United States Patent Application Publication US 2011/0004955 A1 - sequence listing, part 2

SEQ ID NO: 3343 - protein, 313 aa, Bacillus anthracis str. A2012
MLGVTGMRVAQSVSELIGKTPIVKLNRIVESDSADIYLKLEFMNPGSSVKDRIALAMIEDAEKKGLLKEGDTIIEPTSGNTGIGLAMVAAAKGYKAILVMPETMSVERRNLLRAYGAELVLTPGPEGMGGAIRQATELAKEHGYFIPQQFKNQSNPEIHRLTTGPEIVEQMGDQLDAFIAGIGTGGTITGAGEVLKEAYKDIKIYAVEPADSPVLSGGKPGPHKIQGIGAGFVPETLDVEVYDEIIQVKTEQAFEYARRVAKEEGILVGISSGAVIYAATEVAKKLGKGKKVLVIIPSNGERYLSTPLYQFES

SEQ ID NO: 3344 - protein, 712 aa, Clostridium difficile 630
MIYMPNLPSLGSKAPDFKANTTNGPIRLSDYKGNWIVLFSHPGDFTPVCTTEFLCFAKYYDEFKKRNTELIGLSVDSNSSHLAWMYNISLLTGVEIPFPIIEDRDMRIAKLYGMISKPMSDTSTVRSVFIIDNNQILRTILYYPLTTGRNIPEILRIVDALQTSDRDNIVTPANWFPGMPVILPYPKNYKELKNRVNSCNKKYSCMDWYLCFVPDNYNDEEVSKKIDNTCSWKKEHTKNIENECNCEHEHHDYLNKALDCKQEHKTDIKDDCNHEKKHTKNTNKVHNSKQDKFKDKSCDEMNFNYDKDESCDKINSSYNKEDSSYEDFYKHNYKNYDYTSEKNTKKIAMKTLKDSKKLVRPQITDPYNPIVENANCPDINPIVAEYVLGNPTNVDAQLLDAVIFAFAEIDQSGNLFIPYPRFLNQLLALKGEKPSLKVIVAIGGWGAEGFSDAALTPTSRYNFARQVNQMINEYALDGIDIDWEYPGSSASGITSRPQDRENFTLLLTAIRDVIGDDKWLSVAGTGDRGYINSSAEIDKIAPIIDYFNLMSYDFTAGETGPNGRKHQANLFDSDLSLPGYSVDAMVRNLENAGMPSEKILLGIPFYGRLGATITRTYDELRRDYINKNGYEYRFDNTAQVPYLVKDGDFAMSYDDALSIFLKTQYVLRNCLGGVFSWTSTYDQANILARTMSIGINDPEVLKEELEGIYGQF

SEQ ID NO: 3345 - protein, 153 aa, Caulobacter crescentus CB15
MLQPGDKAPDFDLPTDTGRVSLSALKGKNVVLYFYPKDDTAGCTSEALQFSSEVEEFQKLGAVIIGVSKDSAASHAKFRAKHDLTIELAADTLGDVVESYGAWVEKSMYGRKYMGIDRSTFLIDREGVIREIWRKVKVPGHIKAVMNAAKAIK

SEQ ID NO: 3346 - protein, 859 aa, Physcomitrella patens subsp. patens; identical to SEQ ID NO: 1349

SEQ ID NO: 3347 - protein, 433 aa, Arabidopsis thaliana
MVAMIMASRFNREAKLASQILSTLLGNRSCYTSMAATSSSALLLNPLTSSSSSSTLRRFRCSPEISSLSFSSASDFSLAMKRQSRSFADGSERDPSVVCEAVKRETGPDGLNIADNVSQLIGKTPMVYLNSIAKGCVANIAAKLEIMEPCCSVKDRIGYSMVTDAEQKGFISPGKSVLVEPTSGNTGIGLAFIAASRGYRLILTMPASMSMERRVLLKAFGAELVLTDPAKGMTGAVQKAEEILKNTPDAYMLQQFDNPANPKIHYETTGPEIWDDTKGKVDIFVAGIGTGGTITGVGRFIKEKNPKTQVIGVEPTESDILSGGKPGPHKIQGIGAGFIPKNLDQKIMDEVIAISSEEAIETAKQLALKEGLMVGISSGAAAAAAIKVAKRPENAGKLIAVVFPSFGERYLSTPLFQSIREEVEKMQPERVSG

SEQ ID NO: 3348 - protein, 328 aa, Caulobacter crescentus CB15
MDDASSLYDAARFKRAGRGKIYDSIIDTIGDTPLVRLPRLSAELNPKAEVLAKLEFFNPIASVKDRIGVSMIESLEAQGVLKPGATIIEPTSGNTGIALAFVAAAKGYKLTLVMPESMSIERRKMLLLLGAKLELTPAEKGMRGAVTRAQELIEATPGAVMPQQFENSANPLIHRVSTAEEIWNDTAGAVDAVVSGVGTGGTITGVGQALKARKPSLKMVAVEPEASPVLSGGAPGPHKIQGIGAGFVPGVLDRGVIDDIVQVSNDDAFAMARRAAATEGLPVGISSGAALTAAFDLALRDAYKGKTIVVIIPSFAERYLSTALFDGL

SEQ ID NO: 3349 - protein, 192 aa, Synechococcus sp. WH 5701
MNRRQLLEGALVHATAALVIPGLTAPLLAWPGKAQAMGGVLPALDQPAPDFRLPGFGPGLDASGNLGLNDFQGRWLALYFYPKDFTGGCTLEARGFQQDLEQFHQYGAEVVGISADDVAEHASFCDSEGLVFPLLSDPGGAVSQSYGSWIAPFSQRHTFLIDPNGVLRARWVAVRPLGHSREVLEELKRLQA

SEQ ID NO: 3350 - protein, 115 aa, Zea mays
  misc_feature (38)..(38): Xaa can be any naturally occurring amino acid
  misc_feature (53)..(53): Xaa can be any naturally occurring amino acid
  misc_feature (57)..(57): Xaa can be any naturally occurring amino acid
  misc_feature (62)..(62): Xaa can be any naturally occurring amino acid
  misc_feature (64)..(67): Xaa can be any naturally occurring amino acid
  misc_feature (70)..(71): Xaa can be any naturally occurring amino acid
  misc_feature (73)..(74): Xaa can be any naturally occurring amino acid
  misc_feature (76)..(76): Xaa can be any naturally occurring amino acid
  misc_feature (79)..(80): Xaa can be any naturally occurring amino acid
QTDRKSGGLGDLKYPLVSDVTKSISKAFGVLIPDQGIXLRGLFIIDKEGVIQXSTIXNLVIXRXXXXIMXXFXXFXYFXXNFFFFDLLFIFILLFFYFFPFYSFPLFISFFQSFF

SEQ ID NO: 3351 - protein, 211 aa, Cytophaga hutchinsonii ATCC 33406
MSLRLGDIAPDFKADTTEGPISFHEWLGDKWGVLFSHPADYTPVCTTELGATAKLKSEFEKRNVKVAALSVDGLESHKGWIKDINETQNTTVNFPIIADEDRKVAELYDMIHPNASEKFTVRSLFIIGNDKKIKLIITYPASTGRNFTEILRVIDSLQLTANYSVATPANWKDGEDVVITPAVKDEDIAAKFPKGYTRVKPYLRTTPQPNK

SEQ ID NO: 3352 - protein, 332 aa, Wolinella succinogenes DSM 1740
MYNPPRLIAQESFKKIKTLNEGEKMKVAQNVQELIGKTPLVRLNFASKESGANVIGKCEFMNPSGSVKDRIALGMINAAIGAGKITPETIVIEPTSGNTGIGLASVCAAKGIKLILTMPSSMSIERRKLLAALGAQIELTPAEKGMKGAVERALELAQETKNSFVPQQFENPANPEYHRVTTAVEIWEDLDGKVDVLVAGVGTGGTITGVGEVLKAKNPNLKIYAVEPIDSPVLSGGKPGPHKIQGIGAGFVPKALNTALYDEVIQVKVSDAYEMSRRLGKEEGILVGISAGANIWASKEIGKKYPGKTVVTILCDTGERYLSTELFDLQPS

SEQ ID NO: 3353 - protein, 218 aa, Glycine max
  misc_feature (204)..(204): Xaa can be any naturally occurring amino acid
MPGLTIGDTIPDLQVETNQGKIKLHQFCADGWTILFSHPGDFTPVCTTELGKMAQYAKEFYQRGVKLLGLSCDDVQSHNEWIKDIEAYTPGAKVNYPIIADPKREIIKQLNMVDPDEKDSTGNLPSRALHIVGPDLKIKLSFLYPATTGRNMDEVLRVIESLQKASKFKVATPANWKPGDPVVITPDVTNEQAKEMFPQGFESXETPSKKEYLRLTKV

SEQ ID NO: 3354 - protein, 195 aa, Mycobacterium leprae TN
MSLLSIGQQFPAYQLTALIGGDLSKVDAQQPGDYFTTVSSDSHPGKWRVVFFWPKDFTFICPTEIAAFGKLNEEFEGRGAQILGVSIDSEFVHFQWRAQHEDLKRLPFPMLSDIKRELSAASGALNADGVADRVTFIVDPDNDIQFVSVTAGSVGRNVEEVLRVLDALQSDQLCACNWRKGDPTLNATELLKTSA

SEQ ID NO: 3355 - protein, 164 aa, Burkholderia sp. 383
MIDIVVNDTRHSLENVPEDMPLLWVLRDRLKLTGTKFGCGKGLCGACTVHLEGQAVRACLIPAVAAHGRHVTTIEGLSPDGRHPLQLAWVAEDVPQCGYCQPGQLMQAAALLKGGQPVDDDAIVQAMSGNICRCGTYARIHRAIKRAASGDPALKAAAEPAKEA

SEQ ID NO: 3356 - protein, 201 aa, Synechococcus elongatus PCC 6301
MRLMTEGALRVGQLAPDFEATAVVDQEFQTIKLSNYRGKYVVLFFYPLDFTFVCPTEITAFSDRYADFSALNTEILGVSVDSQFSHLAWIQTSRKEGGLGDLAYPLVADLKKEISTAYNVLDPAEGIALRGLFIIDKEGVIQHATINNLAFGRSVDETLRVLQAIQYVQSHPDEVCPANWQPGAATMNPDPVKSKEFFAAV

SEQ ID NO: 3357 - protein, 522 aa, Zea mays
RTRGPRQTHTRGRGRRREGRAALASMAAAVLAPKPPPPLPTRAFPSSSPSRFAPAFISPRHPLRRLLLRPIPCASSPSSVLMPNPDLETEPAHDGDGDGDEAPPESRPRRIALFVEPSPFAYVSGYKNRFQNFIKYLREMGDEVIVVTTHEGVPQEFHGAKLIGSWSFPCPWYQKVPLSLALSPRIIAEVARFKPDIIHASSPGIMVFGALIIAKLLCVPLVMSYHTHVPIYIPRYTFSWLVKPMWLIIKFLHRAADLTLVPSVAIGRDLQAARVTAANKIRLWNKGVDSESFHPRFRNMEMRSRLTNGEPEKPLVFYVGRLGVEKSLDFLKRVMDRLPGARIAFIGDGPFRAELEQMFSGMPVVFTGTLQGEELSQAYASGDVFVMPSESETLGFVVLEAMSSGVPVVGARAGGIPDIIPEDQEGRTSFLYTPGDVDDCVGKIKRLLSSEELREAMGRAARKEMEKFDWRAATRKIRNEQYSAAIWFWRKKRAQVLRPLQWVLRLLRRTMPGAADAAAKQS

SEQ ID NO: 3358 - protein, 378 aa, Mycobacterium tuberculosis H37Rv
MCGVRVAIVAESFLPQVNGVSNSVVKVLEHLRRTGHEALVIAPDTPPGEDRAERLHDGVRVHRVPSRMFPKVTTLPLGVPTFRMLRALRGFDPDVVHLASPALLGYGGLHAARRLGVPTVAVYQTDVPGFASSYGIPMTARAAWAWFRHLHRLADRTLAPSTATMESLIAQGIPRVHRWARGVDVQRFAPSARNEVLRRRWSPDGKPIVGFVGRLAPEKHVDRLTGLAASGAVRLVIVGDGIDRARLQSAMPTAVFTGARYGKELAEAYASMDVFVHSGEHETFCQVVQEALASGLPVIAPDAGGPRDLITPHRTGLLLPVGEFEHRLPDAVAHLVHERQRYALAARRSVLGRSWPVVCDELLGHYEAVRGRRTTQAA

SEQ ID NO: 3359 - protein, 334 aa, Synechococcus elongatus PCC 6301
MIIRTPSSPANRSVMRIAQNITELIGRTPLVQLNRIPVADGCLARIVVKLESFNPSASVKDRIGISMILEAERKGLIAPDRTTLVEPTSGNTGIALAMAAAARGYRLILTMPDTMSSERRAMLRAYGATLELTPGIEGMAGCIQRAQEIVASHPEAYMLQQFKNPANPKIHRETTAEEIWADTDGTVDILISGVGTGGTITGVAEVLKERKPSFQAFAVEPANSPVLSGGRPGPHKIQGIGAGFVPEVLATQLIDEVVTVSDDEAIAYGRRLAREEGLLSGISSGAAVAAAVQVARRPENTDKLIVVILPSFGERYLSTPLFQEPELVSVSSNG

SEQ ID NO: 3360 - protein, 194 aa, Picrophilus torridus DSM 9790
MLAIGNTAPDFESPTYFPETKEIKNVRLSDYRGKWVILTFYPGDFTFVCATDIEALMGSYDKFLKENAQIFAISEDSVYSHKAWSDTSPRVSKSKIPLIDDFNKKIASAYGFLTAAGTAQRGLVIIDPEGKVQYMAMFNDGLGKDVKHIYAAFMGLKTLHDTKEPEGHMCAIPANWEPGEEVLDINVVNDIGKL

SEQ ID NO: 3361 - protein, 207 aa, Magnetospirillum magnetotacticum MS-1
MSDAIQNPTSLVTKAAPDFTAPAVMPDNEINPAFNLKSYLAGSYGIVFFYPLDFTFVCPSEILAHDHRVKAFAERNTKVIAVSVDSHFTHLAWKNTPVDKGGLGNVQFPMVADLTKDIAKSYGVLLPGGVALRGTFVIDKNGVVQSAHVNNLPLGRNVDEALRLIDALQFHEEHGEVCPAGWNKGKAGMKANPNGVAEYLAKHASEL

SEQ ID NO: 3362 - protein, 754 aa, Agrobacterium vitis
MALERLRMPDRWHIRPDMPPKIRGDMVYLTDHRQENMLVGRILRAGIAHGRILSIDTAAAEALPGVIAVVTHRDVPGLNAFGIVVQDQPALCFDTVRHRGDPVAAVAAIDDETAERALALIDVRYEPLPVVDDMESALEPQAMPVHETGNLQREILFTRGDSVQGFAKAAQYRRRSLYHAPPDACFMETEGGLRLRWPDGKLNMCAGGQHGGRDRLQLSRILGLGEDDIRVVTSPTGGAFGGKDELSIQPALALLALKARRPVRLHLSRTESMLAGQKRHPMKIRMKTACDAQGILLAQQVDLVADAGAYASLGPSVLETALEHAIGPYVVGNITTRGRLAYTNNGLCGAFRGFGANQMTFAVECQMDRLAALCGLSPLEIRRRNLRQPGSPGTLGQSYRPANDWKKMLAAATPSVLWRKPQGCGVDQEWMVGTGMALNYQGNGLGSVIPDPAAGRLALKKQGFIEGAFGLDEMGQGLLPAICAAISAELGCARQDVLPLVGDTLLAPDSGSTTASRGSHVVWASVRLAAPEFRTRMCRAAAGLLGCDPAQLVLAPGGFAEPGSHSGTILLSYADLAASLPEKDLPSVTVAFDFPKTDYMDANARFVFAFGASLARVAVSRVTEKCGVFYLHQHSAAGPIIDLAAYLGQLEGGAVQGLGFTLTEDCPMQEAAYLTGNFDTYMLPGIQDAPLGLHVFALEDLDPGDAHGPRGVGELGIGAVTPAIANAIAAATGYWPPVMPVVPETLLVHLSVTA

SEQ ID NO: 3363 - protein, 155 aa, Carboxydothermus hydrogenoformans Z-2901
MKKLSLTVNGKLIEREVPTNIRLLDFLRDYLHLTGTKEGCGEGECGACTVLLDGKPVNSCLVMAHSAHGREVITIEGIGTPDKLHPIQEAFLEAGAVQCGYCTPGMVLAAYALLKENPNPTREEIKVAISGNLCRCTGYNKIVDAVELAARKEGK

SEQ ID NO: 3364 - protein, 196 aa, Yarrowia lipolytica CLIB122
MVATVQHPAPDFKKTAVSGGVFEEVSLDQFKGKWVVLAFIPLAFTFVCPTEIIAYSDAVSQFKERGAEVLFASTDSEYSLLAWTNVARKDGGLGPVNIPLLADTNHTLSKDYGVLIPEAGVALRGIFIIDPKGVVRQITINDLPVGRSVEETLRLIDAFQFTEKHGEVCPANWQKGSDTIKADPVNAKEYFEKANK

SEQ ID NO: 3365 - protein, 421 aa, Anabaena variabilis ATCC 29413
MQKSKLRIALFSGLYAPFLTGVSVAVHQRVHWLLKQGHEVLLVHPQINDKFPKKVGSRPMAGLEELKPFPNFSSFAFPTQPLIFYKSLPQPLSYRHWSDTKLLSDFQPDIIVVEEAAQMRGLYSGLLQGYGRPVGVKYAKRTHTPIISVFHTDIVAYIKYYFGDIFFSLVRPLIPLLVKQFSDNYDLNVFPSREQLKKYHNLKCQRSEYVPYQGIDCEKFHPRNITHNPIPDDSRPTLLFVGRITAEKNVTQLIDMYPLIAAKIPDVHLVIIGSGPLDEEIRRRVQKFPSGITFWGESHGTELLGWFARADVFVNPSVTENFCTTTNEALASGTPVVAAIAPSTSEQVFPGLNGLLAEPNSPEDFAQKIITILENPELKSALSEQARPSILGYDWSACMEKFESKLYELVQSSDKQEVTSV

SEQ ID NO: 3366 - protein, 182 aa, Burkholderia sp. 383
MKTVGDKLEAFTVVAAKPGFNHHEENGQSAFETVTEASFPGKWKIIYFYPKDFTFVCPTEIVEFAKLTKQFEERDAILLGGSSDNEFVKLAWRREHKDLDKLNHYAFGDVKGELIDQLGVRDKEAGVALRATFIVDPDNTIQHVSVNNLNVGRSPEEVLRILDGLQTDELCPCNRAVGGATL

SEQ ID NO: 3367 - protein, 156 aa, Rickettsia montanensis
MTLELGKKVPDLSLHIGKDNVIKLSDLKGKFVILYFYPKDDTPGCTIEAQDFNKLKPEFDKLNTVIIGVSKDKLDSHDKFKEKYSLGFDLASDANSNLCEQLGVWIEKSMFGKKYMGIDRATFLLDKEGIVKHIWRSVNAKNHAQEVLEKLRTMLS

SEQ ID NO: 3368 - protein, 151 aa, Campylobacter jejuni subsp. jejuni NCTC 11168
MSLNIGDKAPQFELLNQDGVKIALKDFIGKKVILYFYPKDNTPGCTTEACDFSANYDKFGGKNAVIIGISPDSVASHEKFISKFDLKHILLSDSEKEVAKAYGALGLKKNYGKEYEGLIRSTFVIDETGKIAQIYSNVRVKDHALKVLESL

SEQ ID NO: 3369 - protein, 505 aa, Rhizobium sp. NGR234
MKGGFSLNSELQLEADAVIIGSGAGGASVADVLTAAGLYVIMLEEGGHVPSSSASPFASEAFAAAWRGGGLTAAIGRPPIAYAEGRCVGGGTEINSAIAQRADSDLLDQWRKLYKIENFTPDELSQYYGRAETTVNASLTPGPLGRPTDILRLGGEALGWKVSELKRGQRDCKGANRCSFICPNGAKQSMAVTLLPKSMDRGMRLLARTRVDKIRIEKGRAAVVVAQLQDAGGQGVHVRVKAGLVFVCAGAIHTPALLRRSGLRKRIGDTLRIHPTIRATALFDEPVDAHQSRLPLTAVTEFMPEQRIGGSVFTPAVFGLSLAEDWTNRGDLMQAWRLCGSYYGMIRPRGVGSVRPLPGINEPLVSFKLAPEDWISLGQVLTLLGQAMFAAGARKVIPSISGHEGWTNPDEVDEFRNKPLPEKATNLMTIHLFSTCPPGEHRDACAVDSYGRVRGVENLFVADGSVIPEAPGVNPQMTIMALAFRIAEAALSHSSRERAQSAARE

SEQ ID NO: 3370 - protein, 373 aa, Fulvimarina pelagi HTCC2506
MSRTDQKKLEEKEMQTSTLRTTGGRGRLFDSVLDTIGDTPVIRVNNLRVGDTTLYVKAEFFNPAGSVKDRLALNIIEDAERRGLLKPGQTVIEATSGNTGIGLAIVCAQKGYPLVVTMADSFSVERRKLMRMLGAKVVLTPRAEKGYGMYRKAVELAEANGWFLARQFETKANADIHAATTAREILGDFAGQRLDWFVTGYGTGGTVSGVGRVLRKERPETRIVLVEPANAALLSSGVAQNRGSDGAPTSGHPAFEPHPIQGWTPDFIPYVLQEAVSGHFYDEVVKIAGPEAIKWTRELARREGIFCGISSGATFAVARQIAETAPAGSVILCMLPDTGERYLSTPLFEGIEADMDVEEMALSHSTASARFAA

SEQ ID NO: 3371 - protein, 799 aa, Pseudomonas fluorescens Pf-5
MSNHHKVEKTQAELTALFHQDLTSGVGRSVKHDSADKHVSGEAVYIDDRLEFPNQLHVYARLSDRAHAKVISIDTAPCYAFEGVRIAITHEDIPGLKDIGPLLPGDPLLAIDTVEFVGQPVLAVAARDLETARKAAMAAIIEYEDLEPVLDVVEALRKRHFVLDSHTHQRGDSASALASAEHRIQGTLHIGGQEHFYLETQISSVMPTEDGGMIVYCSTQNPTEVQKLVAEVLDVSMNKIVVDMRRMGGGFGGKETQAASPACLCAVVARLTGQPTKMRLPRVEDMLMTGKRHPFYVEYDVGFDSSGRLHGIQLELAGNCGCSPDLSASIVDRAMFHSDNSYYLGDATINGHRCKTNTASNTAYRGFGGPQGMVAIEEVMDAIARHLHLDPLAVRKANYYGKTERNVTHYYQTVEHNMLEEMTAELEASSQYAERREAIRLYNANSPILKKGLALTPVKFGISFTASFLNQAGALIHVYTDGSIHLNHGGTEMGQGLNIKVAQVVAEVFQVNIDRVQITATNTDKVPNTSPTAASSGADLNGKAAQNAAQTIKNRLVEFAARKYQVSEEDVEFHNGHVRVREHILTFEELIQQAYFAQVSLSSTGFYKTPKIYYDRAQARGRPFYYFAFGAACAEVIVDTLTGEYKMLRTDILHDVGASLNPAIDIGQVEGGYIQGMGWLTTEELVWNTKGKLMTCGPASYKIPAVADMPLDLRVKLVENRKNPEDTVFHSKAVGEPPFMLGIAAWCAIKDAVASLGDYRHQPQIDAPATPERVLWGCEQMRRLQVTRAADPQAELAPL

SEQ ID NO: 3372 - protein, 165 aa, Alkalilimnicola ehrlichei MLHE-1
MAKHAITLHINGQAHDVAVDARELLIHTLRERLRLTGAHIGCETSHCGACTVDMDGVSLKACTLLSVQCDGAEITTVEGLAGADGLHAVQEGFMQEHGLQCGFCTPGMLMRAYRFLQENPDPTEEEIRYGMAGNLCRCTGYNNIVKAVQYAARKLQEQADPKQPA

SEQ ID NO: 3373 - protein, 197 aa, Buchnera aphidicola str. APS (Acyrthosiphon pisum)
MVLVTQNAPNFIAPAILKNNQIVEQFDLKKYSNGQSTVLFFWPMDFTFVCPSEIIEFNKLHSEFKKRNVKIVGVSIDSVYVHQAWQNTLPKNGGIGKINFPMVSDVKHDIQKSYGIQHPNLGIALRASFLIDSNWIIRHQVVNDLPFGRNITDMIRMVDALDFHNKFGEVCPANWKKGEEGITASSEGVSQYLSKYS

SEQ ID NO: 3374 - protein, 484 aa, Pseudomonas fluorescens Pf-5
MIQFLLNQELRSEHALDPNLTVLNYLREHLGKPGTKEGCASGDCGACTVVVGELQTDAQGGESIRYRSLNSCLAFVSSLHGKHLISVEGLKHQGQLHSVQQAMVDCHGSQCGFCTPGFVMSLFALQKNSSQPDAHKAHEALAGNLCRCTGYRPILAAAEQACCGGQSDQFDARQAETISRLKAIAPKDTGELNSGDKRCLVPLTVADLADLYDAYPQARLLAGGTDLALEVTQFHRTLPVMIYVGNIAQMKRIEHFDDHLEIGAATALTDCYDALRAEYPDFGELLQRFASLQIRNQGTLGGNIGNASPIGDSPPLLIALGAQIVLCKGEVRRTLALEDYFIDYRVTARQESEFIEKIIVPRASAERLFRAYKVSKRLDDDISAVCAAFNLRIDNGVVSDARIAFGGMAAIPKRAKNCEAALIGAPWNQSSIERACAALAEDFTPLSDFRASKEYRLLSAQNLLRKYFIELHAPHIETRVTAYV

SEQ ID NO: 3375 - protein, 1027 aa, Alkalilimnicola ehrlichei MLHE-1
MATPAEELDRNEKLGGIGCSRKRKEDPRFIQGKGHYVDDIQLPGMVFGDFVRSPHAHARIKAIHKDKALAHPGVHAVLTAEDLAPLNLHWMPTLAGDKQMVLADGKVCFQNQEVAMVIADDRYIAADALELVEVEYEPLEPLVDPHRAMDDEAPVIREDLAGQSEGAHSKRVHHNHIFTWDVGDKAATDKLFDEAEVTVSEKMLYQRVHPCPLETCGCVADFDKVKGELTVNLTSQAPHVVRTVFSMLSGIPESKVHINAPDIGGGFGNKVGVYPGYVVATVASIVLGRPVKWIEDRIENLSTTAFARDYHMTGELAATRDGKILGLRAHVLADHGAFDACADPSKWPAGFFNICTGSYDIKTAYARVDGVYTNKAPGGVAYRCSFRVTEACYLIERMIDVLAQKLDMDKAEIRFKNFIQPEQFPYPSALGWEYDSGDYPRALQQVLDACDYPALRREQKERRERGEIMGIGLCTFTEIVGAGPGRKCDILGVGMFDSAEIRVHPTGSVIARMGTKTQGQGHETTYAQIIATELGLNSEDIQIEEGNTDTAPYGLGTYGSRSTPVGGAATARAARKIRDKARKIAAHLMEVSDEDLEWTGEGFRVKGVPDQTKGIQEIAWAAYNNTPEGMEPGLEAVEYYDPPNMTYPFGAYLCVVDIDRYTGETRVRRFYALDDCGTRINPMVIEGQVHGGLTEAYGVALGQELPYDGAGNIQGASLMDYFLPTMVESPHWETDHTVTPSPHHPIGAKGVGESSHVGGIPCISNAVNDALSPFGVTHVDMPHNAYRVWQTLHALKLDRHPEADTVAPFQPKARRPKAAATERPAEAPAGKAAGAKGMEVRLERDYGLDVPADPAWTLMQDIREVAACMPGASIVEQTGERTYLGEMRLKVGPITSAFKGDIEVLDLDPTRQTLRLRGEGGDTKGSSSARMTLQARIVPETEAQCRLEGVCTIELTGKLASFGGRMLENISDRLLSQFVANFENRVAAGGEGSKAEAARERVASGPKELSALALLWQMIKSWFGGRR

SEQ ID NO: 3376 - protein, 219 aa, Zea mays
  misc_feature (142)..(142): Xaa can be any naturally occurring amino acid
MAFTPATACCKASLALAPRASPRGPAACAQAALLCTPSTSVFRGLRAPASAAPAPRRRRSAASTGIVCGKVAKGSVPPNFTLKDQNGKPVSLNKFKGKPVVVYFYPADETPGCTKQACAFRDSYEKFKKAGAEVIGISGDDXAASHKAFAQKYRLPFTLLSDEGNRVRKEWGVPSDLFGTLPGRQTYVLDKQGVVQYVYNNQFQPEKHIGETLKILQTL

SEQ ID NO: 3377 - protein, 670 aa, Medicago truncatula
MCFSITFTGSTNDALYKELWHACAGPLVTLPREGERVYYFPQGHMEQLEASMNQGLEQQMPSFNLPSKILCKVVNIHLRAEPETDEVYAQITLLPETDQSEVTSPDDPLPEPPRCTVHSFCKTLTASDTSTHGGFSVLRRHADDCLPPLDMTQQPPWQELVATDLHGNEWHFRHIFRGQPRRHLLTTGWSVFVSSKKLVAGDAFIFLRQVVLGENGELRVGVRRLMRQQSNMPSSVISSHSMHLGVLATASHAISTGTLFSVFYKPRTSRSEFIVSINKYLEARNHKLSVGMRFKMRFEGDEVPERRFSGTIVGVEDNKSSVWADSEWRSLKVQWDEPSSILRPDRVSPWELEPLVSTPPANSQPTQRNKRSRPPILPSTMTDSSLQGIWKSPADSPPFPYRDPQHGRDLYPSPRFSSTATSFLGFGGNSPASNKSMYWSSRLENSTEPFSPVALEESGEKRQGTGNGCRLFGIQLLENSNAEESLQTAPLSGRVGDDRSVPSLDVESDQHSEPSNVNRSDIPSVSCDADKSCLRSPQESQSRQIRSCTKVHMQGMAVGRAVDLTRFDGYEDLLRKLEEMFDIEGELCGATKKWLVVYTDNEDDMMMVGDDPWLEFCSVVRKMFIYTPEEVKKLSPKIGLPSNEEGKPSKLDSEAVVNPEDRSSIVGPGC

SEQ ID NO: 3378 - protein, 777 aa, Mycobacterium smegmatis str. MC2 155
MTSNANGRGLIGSSVRRREDDRMLGGRGHFVADLSAGAHHVVFLRSTEPHADITRIDTAAATRMPGVIGVFTADDLGMAGACIPSLTTPDESFTAATSLKLAEQRLPVIASDRVYFVGQPVAAVIAEDRYRAEDAAEAIEVDYVSRPAVADPAEALQPRSPVLFDHLDSNAAARIHFAFGDPESAFTRAAAVVSGTYRMNRHGAVPLECRGVIADFDVRRQRVEITTSTQVPHMVRNAICAVTGWSQADVVVSVPDVGGGFGTKANVYAEEILLARLARETRRRLIWVEDRQEHLVASAQGRDQIHHTRLAVDEQGRILAWADDFVVDIGAGSLWVAGIVANTAIHLLGPYRVPAAEISGRAALTNKTLVAQYRGAGRPEATFALERSLDAAARELGLSGVEIRRRNLLTSDDLPYPRPIPYRDGVPIEYDGGDYRACLESVLEALPRDEIARCAAEHPQYRIGYGLSSYLEATGRGPHETARIRLSPDGRFEVTAGAASAGQGHETVFAQVAAEALAVPMEQVIYTPGDTEWLPEGVGTFASRSAVLAGSAVHRAARELVGSAIDRVARLIGADPDDVQYRDGCFSVGGRPALDWADLVRAAGVGGALETGGMLDVSAVHRVSTVTWTMGVHAAIVGVHRRTGIVKVLRYAVSHEGGREINPQIVEGQIIGGVAQGIGGTLFERWAYSEAGQPQSTTFAAYHLPLTTDVPRVRVRHLHVDTPANPLGVRGVGESGTIAVYAAVASAVDDALDGRVHIDTTPIATGDLCRVLARTAS

SEQ ID NO: 3379 - protein, 531 aa, Pseudomonas fluorescens Pf-5
MPVPDLFREGLNRGWKTYNGSQLEQDLTLEADVAIIGSGAGGGTTAEILSAAGYKVLLIEEGPLKTSDDFKMLEDQAYTSLYQEGIGRMSKDGAITILQGRAVGGTTLINWTSSFRTPDPTLEHWAREHGVVGHSSAEMAPWFEKMEQRLGVAPWVMPPNANNDVIRKGCEALGYSWHVIPRNVRGCWNLGYCGLGCPTNAKQSMLVTTIPATLEKGGELLYLARAERLQIKDDKVTSLQCQAMDARCVAPTGRTITVKAKHYVLAGGGINSPALLLRSDAPDPHSRLGKRTFLHLVNFSAGQFDEVINPFYGAPQSIYSDHFQWQDGTTGKMSYKLEVPPLQPALASTLLGGFGPQSGLSMEQLPHTHAMLALLRDGFHPDSTGGNVELRGDGTPVLDYQVSPYAWDGLRRAFHSMAEIQFAGGAKAVKPLHSDARFAKSLDEVRAQIDGLDLALYRTRLGSAHVMGGCAMGEDPKTAVTDSLGRHHQLHNLSVHDGSLFPTSIGANPQLSVYGLTAQLASALAERLKSV

SEQ ID NO: 3380 - protein, 741 aa, Sinorhizobium meliloti 1021
MTTAIGKSLSRIDGRLKVTGQATYAAEFNQEGQAHAVIVGSTVGLGRIESIDSAAVEKMPGVVAVISHLNAQRLAYNEHRGPIDPPAGERLHVLQGSEVRFFGEPVAIVVAETLDQAEHAANALKVTYSARPPQVDAHAGEQVVPAVARRPGARAEADVARGDADKALETAAVKVEAEYVIARENHNPMEPHATIAAWDGDRLTLWSKSQFVVNEQAEIAAVFGLPPENVQVICPFIGGAFGTSLRTWPHVTLAALAARHVNRPVKLVLTRKQMFFATGHRPYTLQRIALGAQPDGKLIGIVHEGAGETSRYEEFMEALTSVTSFMYSCPNVRTSYRLIPLDASTPTYMRGPGEASGIHALECAVDELAYKLQMDPIDLRRINEPQIDEGRQVPFSSRSMLKCYDLGAERFGWSRRTPEPGSMRDGRLLIGYGMANASYPCLFAPASARVRLLPDGTVEVEAAASDMGPGTYTSMSQVAAEYLGIPVERIRFSLGRSDFPATPPHGGSMTMASVGSAIRAACLDLQAKAAVLAAKGGGNAGLAGQSPEALEWRDGMLFVKGRSDRGVTYADLVSYGGESPLVGEGTAARDAETGQKYSMHSFGAVFAEVAIDPDVKTIKVRRALGAYGVGRVVNPKLATSQCIGGMIGGIGMAIMERTLLDRRNGCPINAHMADYLVPVNLDTPHIEAHFIDEEDTIVNPLGVKGLGEIALVGMSAAVSNAIHHATGRRVHELPIMIESLL

SEQ ID NO: 3381 - protein, 309 aa, Clostridium acetobutylicum ATCC 824
MGKIYKNLIETIGRTPLVELSNYKEKNKIEGNILGKVEYFNPSGSIKDRIAYSMIKNAEEQGLINKDTVIIEPTSGNTGVGLAFIAAAKGYKLILTMPETMSVERRKLLTAYGAEIVLTSGVEGMTGAIKKANELASENPNSFIPQQFKNPSNPAIHEVTTGIEIWEDTDGKVDAVVAGVGTGGTITGIAKTLREKNKDIKIIAVEPATSPVLSGGKAGPHKIQGIGAGFVPDVYEAELIDEIIQVKNEDAFASAKELAREEGILAGISSGAALFAAKEVASRPEFKGKNVVVILPDSGQRYLSMSVFD

SEQ ID NO: 3382 - protein, 721 aa, Haloarcula marismortui ATCC 43049
MDGVDAVITPFDDVVPDKLYSSSGQSYPEPSPWDLKVLREHVRFVGDPVAAVAADDPETADRAARKVEIEYRELDAVFDPEEALDEDAPQLFEADDVENKQSGADYNRNLESHFEGELGDVNSAFERASNDDERHVIETEWETPYQSHCVPEPHTTIAYTDEDDRHVFITATQVPFHTRRQIAHLFDVPIRDVRVKKPRIGAGFGSKQEMAIEPITFALHLAADRPVKLEMSRQEEFTALRFRHPMQMQMQTAVTDDGDIEAMDLYTLSNSGAYGTHGMTVANNVGTKPLPLYPRVSNVRFSGDVVHTNLPMGAAMRGYGAPQGHFAVEAHIDEVARRLDFDPIEFRLQNAVREGDLDRSVAILKDGDRFTREIRSCGIRECVDRGKEAIGYDDLEQPDEDHRKRGVGMALIAQGSGVAGKELGAAQVQMNEDGSFHLQVGGVDTGTGADTMFSQIAAEVLGCTPEDVVVIAADTDLTPFDYGAYASSTTYISGRAVKNAAEDAKERLLEWGAKLLEEPPDVLDTGDGGVYSERTGKRVSLEEIGYEATYGDDEREHILGDGNHSTDESPPPYGAQFVDVTVDTETGEYELNKLVFAADCGVAINPALVEGQIEGGEHMSLEYATSGDLTFDEDGNPDVLGFRQYGMPRTTDHPEMETILVETHEPTGPFGAKSIAELPTNGVPPALSNAIRDAVGVRLTELPFTAEDLMAALDDQSGAGK

SEQ ID NO: 3383 - protein, 192 aa, Haloarcula marismortui ATCC 43049
MSHMEIELEINGVERTVEASKSDSLLDVLRRNGYTGSKRGCDTGACGFCTVHVDGEPVKSCVEPVTKVRDTSVETIEGLGEQDDLHPVQQAFVDNTALQCGFCIPGMIMRSTALLETNPNPTEQEVREALSDNLCRCTGYKKIVEAVLDAAERMDSDTAVAADGGQAMDGDGGAATVTECSLGDCDCMEGDQ

SEQ ID NO: 3384 - protein, 816 aa, Haloarcula marismortui ATCC 43049
MSNDDETAKADGGTASQSETVEDERFEEHPLEWDEPENNHKAPGERDSVSHRTEKYDDRKLVTGQAKYTADYEERYPDLAYAAVVRSEIPHGRVTGIDTSAAEAMDGVEAVLTPKSDTVPDAKYTSAGQSYPEPSPWDMRVLNEHVRYIGDPIAAVAAEDRATATAAVEAIEVSYEEYDYVTDPEDAFNEDAPQLFEDGEVENEIVGHDYDRNRMAHIGGELGDVDGALDDDTHVHETEWETIRQSHANVEKHTSLAYTDEDDRHVLITSTQVPNHTRRQLAHLFDIPIRDIRVTKPRVGGGFGGKQAMVVEPIPLALSLATDRPVLYEASREEEFYAMRSRHPMKVKAKTAVTDDGDIEAIDIYALSNTGAYGSHGMTVAGNVGSKPMPLYSKVPNARFEADIVHTNTPQTGAMRGYGAPQGTLALEGHLDEVARDLGLDPIEFRRRHHMEVGDLDEIAGMMGGEGANRRIRSCGLDECIERGKDAIGYDDLEQPDADHLHRGIGMALSAQGTGVAGDELGAAQIMMNEDGSFHLQVGGVDIGTGADTAFLQIAAEVLGCDEDDIIVKSSDTDVTPFDYGAYASSTTYISGMAVKKAAEDAKERILDWGAKLLEEPVDVLETGDGTVYSERSGNSVTLEDIGYEAAYGDDEREHILGKGTHCTEESPPPFAAQFADVTVDETTGEFEVHKLVVAVDCGVAINPGMAEGQIEGANHMSYEMAVSEGITLDDEGRAEIADFDEYGLPSAAETPPIESILVETHEPTGPFGAKSVAEVPTNTVPPALSNAVRDAVGVRIREMPISAEKIKAKLDERKA

SEQ ID NO: 3385 - protein, 250 aa, Zea mays
MRPAGSSPRASKPAHVGRHATMPGLTIGDTVPNLELDSTHGKIRIHDYVGDGYAIIFSHPADFTPVCTTEMAAMAGYAKEFEKRGVKLLGISCDDVESHRQWTKDVEAYGGKQQQQQATTTKVTFPILADPARDAIRQLNMVDPDEKDAAGRSMPSRALHVVGPDKAVKLSFLYPATTGRNMDEVLRAVDSLLTAAKHGGKVATPANWKPGECAVIAPGVSDEEARKMFPQGFETADLPSKKGYLRFTKV

SEQ ID NO: 3386 - protein, 192 aa, Haloarcula marismortui ATCC 43049
MPKTGGYSVDIELTINGERTIVEAGSGDDLATVLRQRGYIDVKCGCDGGTCGASKVFVDGDVRMACGMEATDADGSEIQTVAALGTQADLHPVQQAFVDNFAVQCGFCIPGMVIEAVALLDSNPDPTEREVREALDDNVCRCTGYQKPVEAVLDAAQRMQGEQSVAADGGHPVTVAQHRDESTSCCGGGCDE

SEQ ID NO: 3387 - protein, 431 aa, Oenococcus oeni PSU-1
MNIGLFTDTYFPQISGVSTSTQILAQQLENLGHNVYIFTTTDPKVKRSHYGHGSEKNIYRFSSIPYTGFKDRRITFRGFFEAIEIARTLRLDIIHTQTEFSLGLMGKIIARQLKIPIVHTYHTMYQDYTHYVMNGRLIKAGGVEVIVRAYLKSVNGVIAPSQRVYDTLRGYGVDAPMPIIPTGVSFSKNMPDNSAELRKTLKIRPRQPVILSLGRVAFEKNIEELINVMSYIINDFHNAILVIAGDGPAREELEDHAKALGLNKHVKFVGMVDHADVYSYYRMADVFASPSTSESQGLTFIEAVNANRPFVAMSNPYLTQITKSKFIGTIVHDNAEMTEAIENYLSDPSFKKENPERDRVLKEISAEKFGADVLKFYQQIINSFDPNGSKSSDEPTDEEIGYARQLLGRLPLPKVAKRKILKVKKEARDNK

SEQ ID NO: 3388 - protein, 310 aa, Staphylococcus epidermidis ATCC 12228
MAQKPVDYVTQIIGNTPVVKLRNVVDDDAADIYVKLEYQNPGGSVKDRIALAMIEKAEREGKIKPGDTIVEPTSGNTGIGLAFVCAAKGYKAVFTMPETMSQERRNLLKAYGAELVLTPGSEAMKGAIKKAKELKEEHGYFEPQQFENPANPEIHELTTGPELVEQFEGRQIDAFLAGVGTGGTLSGVGKVLKKEYPNVEIVAIEPEASPVLSGGEPGPHKLQGLGAGFVPDTLNTEVYDSIIKVGNDTAMDMARRVAREEGILAGISSGAAIYAAIQKAKELGKGKTVVTVLPSNGERYLSTPLYSFDN

SEQ ID NO: 3389 - protein, 198 aa, Helicobacter hepaticus ATCC 51449
MLVTKPAPDFTAEAIKADGTFEDSFNLYKNIGKNGAVVFFWPKDFTFVCPSEIIAFDKRVKDFEARGVKVIGVSIDSKEVHFAWRNVPVNQGGIGAVTFPMVSDITKQISRDYDVLFNGAVALRGSFLIDKNKVVRHAVINDLPLGRNVDEMIRMVDAMLFVEEHGEVCPAGWNKGDEGMKANAKGVAEYLAKNADKL

SEQ ID NO: 3390 - protein, 377 aa, Microcoleus chthonoplastes PCC 7420
MRIALFTETFLPKVDGIVTRLRHTVDHLQRNGDQVLVICPDGGLTEHKGAKIYGVSAFPLPLYPELKLALPRPAIGIALAKFKPDVIHVVNPAVLGLGGLYYAKAMQIPLIASYHTHLPQYLQHYGLGMLEPVMWELIKANHNQAQLNLCTSTAMVEELRGRGIQHLDLWQRGVDTETFRPSLASEDMRSHLSQGHPESPLLLYVGRLSAEKEIDRIKPVLESIPGARLALVGDGPHRSALEKHFAGTPTHFVGYLTGEALGSAFASADAFIFPSRTETLGLVLLEAMAAGCPVVAARSGGIPDIVTDGVNGYLFDPKDEQGAIAATQRLFQEQTERETLRENARAEAERWSWSAATRQLQQYYQGVVLSRSLLPAA

SEQ ID NO: 3391 - protein, 235 aa, Capsicum annuum
MACTTVTCSSTSPLVSNVGVGGTCKVTAPCSVFFPSMRRPASTLVARATGDTKTHQWTCTCQNGQGGNTKALLFEHVLGGLALDVSPFGLLDPMSPMRTMRQMMDTMDRLFEDTMTFPGRNRASGSGEIRAPWDIHDGENEIKMRFDMPGLSKEDVKVSIENDVLVIKGEHKKEEGGNDEHSWGRNISSYDTRLSLPDNIEKDKIKAELKDGVLFISIPKTKVEKKVIDRACQLN

SEQ ID NO: 3392 - protein, 365 aa, Erythrobacter sp. NAP1
MNMSAKIAPARLAAAERPQSIAIVTDAWFPQVNGVVRTLSTTCEILRRWGYDVTVISPEQYHSVPAPTYPEIRLALTLPGAVGRQLARITPDAVHIATEGPLGFAARRYCAGRGVPFTTAYHTQFPDYISRRTGLPASVFWPYIRWFHGPAERVMVATESIREELRGEGLTQLAHWSRGVDLASFSPDAPVPLELADLGGPILLYVGRVAVEKNIEAFLSCDHPGTKVVVGDGPARASLEAKFPEAVFLGKRTGAELAGCYAAADVFVFPSKTDTFGLVMIEALACGTPVAAFPVSGPVDILNETVGAMDADLAKAIATARTRDRAACTAHAASFSWEAATQQFLSGLAPLADEECVSLRAVSAI

SEQ ID NO: 3393 - protein, 443 aa, Thermosynechococcus elongatus BP-1
MIFSESLTKCNLEKPRVPQPLSVAVFICLEWQPHAGGHVKCWERFAEAASHYPERIDLTIYFLGAKHQTLEVAANVRYQLLPPQFSTHSLEIMRQGAGMTDVAPFHWALRRYLPQHQVFHITDTFSFAQTVRRFCRQQRRPLLSSIHTDLPLLTRTYSREIIWRLSGRSRGQKFWRWLWLKQLQVDQWFGCQAKRKLAGFMRASDRVLVSRQQDADWLLTFLPPERVAWFQRGIDRDRFHPRLRNPQWLREEYHLPEGPIILFVGRVDASKNVLLLARAAQRLANQGKVFHVLIVGEGAQAVLVKDLLGDRVTLTGKIPQEKLGAIYASSDLFVFPSESETGPNVVVEARAAGLPVVISGFDGGRKYVQASGEDGVVVYSRDPQDWAAAIAPLLDDTHYRQRMGAQAHQITQATCPTWREAFEQSILCQWEAVAQAYGWPQKT

SEQ ID NO: 3394 - protein, 316 aa, Haemophilus somnus 2336
MTIYADNSYSIGNTPLVRLKNFGNNGNIIAKIEGRNPSFSVKCRIGANMVWQAEKDGILTKDKEIIDATSGNTGIALAYVAAARGYKITLTMPETMSSERKRLLRGLGVNLVLTEGVNGMKGAIAKAEEIVASNPNHYVMLKQFENPANPAIHQQTTGPEIWSGTEGKIDVLVAGVGTGGTISGISRYIKQDQGKKIITVAVEPEESPVITQTLAGEETKPGPHKIQGIGAGFIPKNLDLSLVDQIEKVSSETAIITARRLMAEEGILGGISSGAALAVADRIAQRPEFSDKLIVVILPSASERYLSTALFDGFEG

SEQ ID NO: 3395 - protein, 379 aa, Thermosynechococcus elongatus BP-1
MRIALFTETFLPKIDGIVTRLCQTVRHLQRNGHQVLVVAPDGGLDHYEGARIYGVSGFPLPLYPELKLALPRPAIGKALAAFEPDLIHVANPAVLGLAGLYYAQKFQLPLVASYHTHLPQYLKYYGLGFLEELLWFLLRWGHNCAQLNLCTSTAMVAELKAHGIRHLDLWQRGVDVELFHPQRQSQEMRHFLSQGHPEAPLLLYVGRLSAEKEIEQIKPILEQIPQARLALVGNGPHREALEKHFAGTPTHFVGYLRGERLAGAFASADVFIFPSRTETLGLVLLEAMAAGCPVVAANSGGIPDIVTDGVNGFLFDPADPTGAITACQRLFDSPDDRETLRQNARQEAERWSWAAATQQLEQYYRSVLPVPQRDVALSH

SEQ ID NO: 3396 - protein, 154 aa, Sulfitobacter sp. EE-36
MTIKLKINGAERSVEAEPGTPLLWVIRDELKLTGTKFGCGVASCGACTVHVDGEPTRSCQTYIEDVEGAEVSTIEAIGDDKIGAAVQQAWKELDVVQCGYCQSGQIMSAVGLLKETPKPTLEEIDAYMDGNACRCATYQRIRAGIQRAADIVEG

SEQ ID NO: 3397 - protein, 187 aa, Gluconobacter oxydans 621H
MVRINSPLKPFSTDAFRNGEFLTVTDSDVRGKWSVFFFYPADFTFVCPTELEDLADNQAAFDKLGVEIYSVSTDKHFTHKAWHDTSPAIGKIKYTMLGDPTGTIARNFDVLIEEAGLADRGTFLIDPEGKIQYIEITAGGVGRSAAELLDKIQAAQYVATHPGEVCPAKWKEGGETLKPSLDLVGKI

SEQ ID NO: 3398 - protein, 879 aa, Triticum aestivum
  misc_feature (180)..(180): Xaa can be any naturally occurring amino acid
MGDLASTCKDKLAYFRIKELKDVLIHLSLPKHGKKQELVDRILALLSDDQAQWHLGRGRKNAPSKEAVVKIVDDIYRKMQVHGPPDLVVSQSQLPVTTDFNRIIKAKKEQLGPDSGCLCGQSFVLGNVVKCDDCQVQQHMDCVLIPEKPAVGVRPEAPEHYFCQLCRLIRADPDYFEPAXYWITTGNPLLPVRLITNDGVNVPQSVERTFLLTRAERETVQRVEYDIQVWCMLLNDKVQFRMHWPQNADLQVNGIQVRVVPRPSTQLLGINGRDDGPVITTFCREGQNKIVLSSDDARPFCFGIRIAKRRTVDQVLNLVPKEADGESFEDSLARVCRCLRGGNTADDADSDSDLEVVADFFPVSLRCPNSGSRIRTAGRFKPCAHMGSFDLQTFVELNQRSRKWQCPTCLKNYSVESLIIDRYFNRIASLVRNCSEDVTEIDVKPDGSWRVKGDVADIKLSLWHLPDGSLCELKQDTKPVAGDVKSETSKIGSRGNVGLNGLWEASKAVDIKPSKPMSSSHTGIYRDGDYLSVSECSTQIGEMYRVDDRPQQQLEDADVIVLSDSDDDNVVTVSPPAAYSDVGGLGFAPISAPGVAESYQEGGVVGGLGLDLFNDNSDIFDITSWSAQPQPEQGFNFFGTDVLLGSHNSFDAAPRAYTLGCHAGSSDTSMVRDPSTCHVRTRSLVDNLLPFGNDDSSLRIFLPIQPSGVPVQEERNGHDNMSNGVQHVDDDEDEDWISLTLAAGGGNNEQSEAADTVSAQAQTAVEERRMEPADTLNPQAQMTVEERRMEPADVLNPQAQIAVEETRITSRCVEPTSTNCSGREDRTRGYVEPTRTSYSGREKDGTSRHCPTSANCSGRKKMEPADTVNRAQIALEKGW

SEQ ID NO: 3399 - protein, 325 aa, Azoarcus sp. EbN1
MSNWYSDNALSIGKTPLVKLNRVTDGATATVLAKIEGRNPAYSVKCRIGAAMIWDAEQRGLLGPGKEIVEPTSGNTGIALAFVAAARGIPITLTMPETMSVERRKLLVAYGAKLVLTEGAKGMNGAIAKAEEIAASDPGRYVLLQQFNNPANPAIHASTTGPEIWNDTDGNVDIFISGVGTGGTITGVSRYFKETRGKPIVSVAVEPEASPVLTQTRAGEPLKPGPHKIQGLGAGFVPKVLDLSLIDAVETVSNEDAILYAHRLAREEGILSGISCGAAVAVAARIAQRPENAGKTIVVVLPDSGERYLSSILFEGLFDASGVAI

SEQ ID NO: 3400 - protein, 92 aa, Daucus carota
DLPGLKKEEVKVEVEEGKVLQISGERNKEKEEKNDKWHPLEVSSGKFLRRFRLPENANVDEVKAGMENGVLTVTVPKVEMKKPEVSVIDISG

SEQ ID NO: 3401 - protein, 153 aa, Nitrosomonas europaea ATCC 19718
MSDDLIPDFELASTGNKQFRLSDVKSRYLVIFFYPKDDTPGCTSESQQFRDLYPEFVQIGCEIVGISRDNLKSHDKFRGKYDLPYDLLSDSDEVVCELFGVMKMKNMYGKQVRGIERSTFVLDRDGKVYKAWRGVKVPGHAEEVLAFIKSVTA

SEQ ID NO: 3402 - protein, 250 aa, Aeropyrum pernix
MPGSIPLIGERFPEMEVTTDHGVIKLPDHYVSQGKWFVLFSHPADFTPVCTTEFVSFARRYEDFQRLGVDLIGLSVDSVFSHIKWKEWIERHIGVRIPFPIIADPQGTVARRLGLLHAESATHTVRGVFIVDARGVIRTMLYYPMELGRLVDEILRIVKALKLGDSLKRAVPADWPNNEIIGEGLIVPPPTTEDQARARMESGQYRSLDWWFCWDTPASRDDVEEARRYLRRAAEKPAKLLYEEARTHLH

SEQ ID NO: 3403 - protein, 189 aa, Staphylococcus xylosus
MSLINKEVLPFTANAYDPQKDEFLEVSEEILKGSWSVVCFYPADFSFVCPTELEDLQGQYDKLQELGVNVYSVSTDTHFVHKAWHDHSEAINKIQYTMIGDPSQTITRNFDVLDEDLGLAQRGTFIVDPDGIVQAAEVNADGIGRDASTLVHKIKAAQYVRQHPGEVCPAKWEEGSETLQPGLDLVGKI

SEQ ID NO: 3404 - protein, 415 aa, Oryza sativa Japonica Group
MGQQAAEAQPLLLQGDQVDAEWGCRPHRIVLFVEPSPFAYISGYKNRFQNFIKHLREMGDEMLVVTTHKGAPEEFHGAKVIGSWSFPCPLYQNVPLSLALSPRIFSAVAKFKPDIIHATSPGVMVFGARFIAKMLSVPMVMSYHTHLPAYIPRYNLNWLLGPTWSLIRCLHRSADLTLVPSVAIAEDFETAKVVSANRVRLWNKGVDSESFHPKFRKHEMRIKLSGGEPEKPLIIHVGRFGREKNLDFLKRVMERLPGVRIAFVGDGPYRAELERMFTGMPAVFTGMLQGEELSQAYASGDLFAMPSESETLGQVVLESMASGVPVVAARAGGIPDIIPKDKEGKTSFLFTPGDLDECVRKIEQLLSSKVLRESIGRAAREEMEKCDWRAASKTIRNEHYCTATLYWRKKMGRTN

SEQ ID NO: 3405 - protein, 148 aa, Glycine max
KALSGRNLIGFGEPTDPQIISVLRSNNTSGLQMCLRDGTWASIQPDHTSFFVNVGDLLQVMTNGSFKSVKHRVLANSSMSRLSMIYFGGPPLNEKIAPLPSLVSREEESLYRELTWREYKNAAYKSKLSDNRLSLFDKFADHSDKSPL

SEQ ID NO: 3406 - protein, 159 aa, Verrucomicrobium spinosum DSM 4136
MPLAVGTLAPDFTLKSKTADGLKDVTLSANFGSKNTVLLFFPLAFTGVCTQELCDITAGLGSYGDLNADVIAVSVDSPFAQEAWAQKEKISITLVSDLNKETTKAYDVLFPGLAGIGDTSARSAFVIDKDGVIQYSEQTPSPKELPNFEAVKAALASLS

SEQ ID NO: 3407 - protein, 155 aa, Wolbachia endosymbiont of Drosophila melanogaster
MELAVGNNAPDFSLPADSGENLSLSEFFDKKNVVLYFYPKDDTPGCTMEAKGFRDKIDDFSFLDTVIIGVSKDSVKCHTNFKAKYSLPFSLVSDENAEMLGKYGVWVEKSMFGKKYMGIERTTFLIDKKGKIVKIWKNVKVSGHVDEVLEEVKRI

SEQ ID NO: 3408 - protein, 726 aa, Arabidopsis thaliana
MESLVAICDTFISSIDDSGVGHVDDCVAGYFSASASQTGTPDRVARLMSERLHHPKKWILRAGLWLLSTWIGSLVLCGWRSFTGEFPYFRRFCRLPEKRREEILLNWSSSYFSLLRMLFRTIKLISALVFFTQVDEKGRNLAWKAIGYNGPSPDHSDHEVELNEEKKKKKPEEIFGPLYNGIVDLKSPREAVEKKLAGRGFAVSNQKRNTNGSSISDPVMKIQCDAVVVGSGSGGGVAAGVLAKAGYKVLVIESGNYYARSKLSLLEGQAMDDMYLSGGLLATSDTNVVILAGSTVGGGSTINWSASIKTPEHVMKEWAEKSKLEMFGSDLYREAMDVVCKRMGVQCGFVEEGFNNEVLRKGCEKLGLPVKNIPRNAPSDHYCGFCCLGCKKGQKQGTSETWLVDLVESDNGLILPGCQATEVMYDCEQGKKKKATGVAFAFGEEIYVVESRVTIVACGALRTPHLLKRSGLKNSNIGRNLCLHPVVMAWGWFPEEDKWPEKKKKSYEGGIMTAMSSVVIEETHSSYGEMVIQTPALHPGMFSGIIPWTSSKDFKTRMLKFSRTAHIFALLRDKGTGTIDSKTYIDYNLNDEDEESLKNGLERVLKILAAAGAEEIGTHHSEGRSLNVRTASSLEIERFVREESSKPLKDLSGQICSAHQMGSCRMGIRPEESAVRPTGETWEVERLFVADTSVFPTALGVNPMVTVQSIAYCIGLNVVDVLKKKK

SEQ ID NO: 3409 - protein, 500 aa, Ralstonia eutropha JMP134
METQTIRFFHRGQVREVSDAPVTRTVLQYLREDARCTGTKEGCAEGDCGACTVVIGELQDGGDVEFKAVNACIQFLPTLDGKALITVEDLRQADGALHPVQEALVECHGSQCGFCTPGFVMSLWALYQQHTPGGEAPTRQTICDALTGNLCRCTGYRPIIDAGERMMALPAPHASKLNPKQIADTLRNLKRGETFRYSAKGQNFFAPRTAAEFGAIKAAEPGIRILAGSTDVGLWVTKQFRELGNLLYIGQVEDLQSIEERDGMIEIGAGVTLEKAYAALTAAHPELEEMWKRFASLPIRNAGTLGGNIANGSPIGDSMPALIALGAEVVLQLGATRRTLPLEDLYLAYQKTAMVEGEFVAALRVPVKGPQHFRTYKLSKRFDEDISAVCAAFAITVENDVITQARVAFGGMAATPKRGAATEAALIGQPWNEATVRAGMAALSQDYTPLSDMRSTASYRTRGAANLLYRFWLETRADALPASAVNVRAPGAGATATVTA

SEQ ID NO: 3410 - protein, 793 aa, Ralstonia eutropha JMP134
MNKQTEPFLLDASVADEAVPQVGISRPHESAHLHVAGTATYTDDIPELAGTLHAALGMSSRAHARIKSISLDKVRTAPGVVDVLTVDDIPGVNDCGPIIHDDPILVRDVVQFIGQPIFVVVATSHDAARRAARLGVIEYEDLPPVLSPEAAHEAGSYVLPPMHLTRGEPQQHLAAAAHRDAGKIRLGGQEQFYLEGQIAYAAPRENDGMHVWCSTQHPTEMQHAVAHMLGWHAHQVLVECRRMGGGFGGKESQSAMFACCASLAAWKLMCPVKLRPDRDDDMMITGKRHDFVFDFDVGHDTDGRIEGVQIEMVSRAGFSADLSGPVMTRAICHFDNAYWLPNVQIDGYCGKTNTQSNTAFRGFGGPQGAFAIEYILDNVARNVGKDSLDVRRANFYGKTERNVTPYGQTVEDNVIHELIDELVATSEYRGRREATRAFNATSPILKKGIAITPVKFGISFNVAHYNQAGALVHVYNDGSVLVNHGGTEMGQGLNTKVAMVVAHELGIRMERVRVTATDTSKVANTSATAASTGADLNGKAAQDAARQIRERLAEFAARKAGVTPDSVRFNDDLVIAGELRVPFGELAREAYLARVQLWSDGFYTTPKLHWDQKKLQGRPFYYFAYGAACSEVLVDTLTGEWKLLRADALHDAGKSLNPAIDIGQVEGAFIQGMGWLTTEELWWNKDGKLMTHAPSTYKIPTINDCPEDFNVRLFQNRNVEDSIHRSKAVGEPPLLLPFSVFFAIRDAIAAVADYQVNPPLRAPATSEAILDAVEAVRATCAASAVGETAAQPA

SEQ ID NO: 3411 - protein, 151 aa, Burkholderia sp. 383
MITLNINGETRSVDAPDDMPLLWVLRDVVGLTGTKFGCGIAQCGACTVHLDGVAARSCVLPVAAVAGRKITTIEAVGATPAGHKVQQAWRELDVVQCGYCQSGQVMAATALIASNPNPSDADIDAAMAGNICRCGTYNRIRAAVKQAAKEV

SEQ ID NO: 3412 - protein, 462 aa, Burkholderia pseudomallei K96243
MRTPAAKGTFAPAGTGAIVMQKIALISEHASPLGVIGGVDAGGQNIYVANVAKQLARLGVDVDVFTRCDNPHLPDVAHIGAGIRVIHVPAGPPSNVPKEALLPYMKAFSAFLIDWFRREPTPYDAMHANFFMSGDAALRVKARLGVPLVMTFHALGRVRRRHQGAADGFPDARFPIEDALAKRADRVIAECPQDAADLRALYRADPGRIEIVPCGFDEEEFRPVLRRAARARLGWRDDEFAVLQLGRLVPRKGIDNVIEALARVPRDAGARPARLYVVGGSDYEPDPSRCAELARLAGIAREAGVADRVTFVGRRDRDALHLYYGAADVFVTTPWYEPFGITPVEAMACATPVIGSDVGGIRTTVEHGVTGYLVAPRDPGALAARLDELRRDPERAQQLGWAGYRRAHRHYTWRGVAERLAAIYRDVAACARRGARAGTAAHVRRSPVAPSATVANQKENGS

SEQ ID NO: 3413 - protein, 577 aa, Zea mays
  misc_feature (532)..(532): Xaa can be any naturally occurring amino acid
  misc_feature (544)..(544): Xaa can be any naturally occurring amino acid
  misc_feature (548)..(548): Xaa can be any naturally occurring amino acid
  misc_feature (550)..(550): Xaa can be any naturally occurring amino acid
  misc_feature (554)..(555): Xaa can be any naturally occurring amino acid
  misc_feature (557)..(557): Xaa can be any naturally occurring amino acid
  misc_feature (561)..(562): Xaa can be any naturally occurring amino acid
  misc_feature (564)..(564): Xaa can be any naturally occurring amino acid
  misc_feature (566)..(566): Xaa can be any naturally occurring amino acid
MDVQTKRRGHARLSEYAVGHTSCTVEEDEETGVVEAVVDDVRVDRRMDGYCCYIHPIIEKRLQGKTAMEVCKAQSSDTLKLSPDDEIEGEIVYLQSRLLDGVVSMKQRYEDLILKVVQNISYELDSFNKRKWDHIIVNQFLRDLREAKKRGNSERRHKEALAILAATAPSVTPTSRNTTVRKETENNVTPAKRENMPRSITGSSRIGQLSSSPQAKDLSFPDSPLPDETNFGIFNLAKFSKKSALPCDICMRCDTILNRIFVCSSCKATVHLDCYQSLVYPTGPWKCELCHEMPSDSVTSGEQSDQNGPKACLVQCGLCHGTSGAFRKTVKGQWVHAFCAEWLLETTFRRGQHNPVDGMERLHHKDKDTCSICHRCVGACLKCCTLDCQVTFHPSCARDAGLYMNTKRLGNMLQHKAYCCRHSIEQRKAYSQQYGPDEIKGMKQMRVELELLRFLCERIVKREKVKKDLVGCAHDILAARRITAVSSLWTSCYTSGPGASSESATTSVNNKSYGGQFTDWKDVTAGSQLPKXHTVRFSLANRDXDRNXAXDSSXXTXTYNXXLXQXGNSSSWTFLGH

SEQ ID NO: 3414 - protein, 153 aa, Sulfolobus solfataricus P2
MVKVGDKAPLFEGIADNGEKISLSDYIGKHNIVLYFYPKDDTPGCTREACAFRDNWDLLKDYDVVVIGVSSDDINSHKRFKEKYKLPFILVSDPDKKIRELYGAKGFILPARITFVIDKKGIIRHIYNSQMNPANHVNEALKALKQIKEEEIS

SEQ ID NO: 3415 - protein, 422 aa, Gloeobacter violaceus PCC 7421
MGRTKLQRRPLRPPSVGPYESGRRRGPSRPVAHPPLTHRQRIAPMLTKTQSRLREVGIYRRVYPLASEAFITEQASSLVRYRPTFILCTQLANAAFPSVALNRRDRWGLRQALFLLTRSPRLFEGRDFGRLDLLHAHFGPDGIYSLPLAEQLAIPLLVTFHGYDITVKRNWLAFRSPLFYQLMLHERQLQRKAAGFIAVSRFIRAKLIAGGYPAERVVQHYIGVDTAKFAPGCERPAERYILCVGRHTEKKGLDTLLAAFARIAHRHPDVSLVQVGTGALTRQLHAQSAALRLAGRVRFLGALPHAEILRWMRGAEIFALPSQTARDGDSEALGIVFNEAAACAVPVVSTRHGGIPEAVLDGQTGFLVPERDSAALAERLETLLADRALARTMGRRAREFACEMFDIRKQAKKLELIYDSLK

SEQ ID NO: 3416 - protein, 198 aa, Helicobacter pylori J99
MLVTKLAPDFKAPAVLGNNEVDEHFELSKNLGKNGVILFFWPKDFTFVCPTEIIAFDKRVKDFHEKGFNVIGVSIDSEQVHFAWKNTPVEKGGIGQVSFPMVADITKSISRDYDVLFEEAIALRGAFLIDKNMKVRHAVINDLPLGRNADEMLRMVDALLHFEEHGEVCPAGWRKGDKGMKATHQGVAEYLKENSIKL

SEQ ID NO: 3417 - protein, 801 aa, Polaromonas sp. JS666
MNAPEILPVHAAGPAHPPAAGRPHFHESARAQVAGAAMYVDDIPEVKGTLFAAPILSTVAHGKLLGVDASAALAMPGVRGVVLAGDIPGNPLLPTFGQDEPVLATTKVEHIGQVIGVVAADTVMQARRAARKVQLTIEALPPVLKVRDALAAQSFVLPPVVVKRGNAEAALAAAPHTLSGSFEVGGQEHFYLEGQVAYALPQEQNQWLIYSSTQHPGEAQHWVSHALGIDSHAVRVECRRMGGGFGGKETQSGHMAVWAALAAHKLGRPVKLRMDRDDDFLVTGKRHPFAYDYTVGFDDSGRLCGLKLMMAVNCGFSADLSGPVADRAIFHADNAYFLEDVTITSCRCKTNMQSNTAFRGFGGPQGMIAIETILGDIARTLGLDPLDVRKRNLYSDEVVAPKTDTTPERRRDTTHYGMQVEDNILQPLLSRLEQTAHYRQRREAMAAWNAQSPVIKRGIAITPVKFGISFTATLFNQAGALVHVYTDGSVQVNHGGTEMGQGLNTKVAQIVADELGVAFEQVLATASDTSKIPNASATAASAGTDLNARAAQYAARQVRDNLAQLVAGLDRCDVGAVRFAGGEVTTPARTRAFTEVAKLAHANRIQLWSDGFYRTPKIHYDKTTLTGRPFYYFAYGAACTEVAIDTLTGESRVLKVDILHDVGTSINPAIDIGQIEGGFVQGMGWLTTEQLVWSDKGQLSTHAPSTYKIPTTGDIPEHFNIALWPEPNREDNVFGSKAVGEPPLMLAISVYEALRDAIASVRPDRTVVLQAPATPEHVLAALGRPADIPAHIFMSRKPRKV

SEQ ID NO: 3418 - protein, 781 aa, Sinorhizobium meliloti 1021
MGVEGIGARVARKEDKRFLTGKGRYTDDMVVPGMKYAVFVRSPHAHATIRSIDATSAKSMPGVIDVLDGKQLLADGIGNLICGWMIHSKDGSPMRMGAWRPLAHETVRYVGDAVAIVVADSVAQARDAAEAVVVDYETLPVVTETLQALGEGEPQIHPEAPGNLIFDWELGDAGAADQAIAAAAHVTELKIINNRLSPNAMEPRATLGIYDAGDDHFTCYTTSQNPHLARLVMSAFYNVAPENKLRVIAPDVGGGFGSKIFIYPEEIVCLWASKRTGVPVKWTADRTEAFLTDAHGRDHVSTVKMAFDSSNRITALKVDTIANLGAYMSLFSSCVPTYLYATLLSGQYAIPAIHANVRTVYTNTAPVDAYRGAGRPEATYLLERTIETAARELGISPAELRRINFIRTFPHQTPVIMNYDAGDYEASLRGAMEAADWDGFAARKAEAERRGMKRGIGMSCYIEACGLAPSAAVGSLGAGVGLWESAEVRVNAVGTIEVMTGSHSHGQGHETTFAQVVAERFGVPIDSVNIVHGDTDKVQMGMGTYGSRSGAVGMSAVFKALDKVEAKAKRIAAHMMEADESDIVIEDGALKVAGTDRSVPWSQVALASYTAHNLPPGMEPGLKEGAFYDPSNFTFPAGCYICEVEVDPETGRTKIVQFVAADDFGNIINPLIVEGQVHGGLAQGIGQALLEGVHYDQSGQLLTASYMDYAMPRADDLPSFTVTTSNTPCPSNPLGVKGCGEAGAIGSPPALINAITDAIGTNELTMPATPQKVWVAVHSAH

SEQ ID NO: 3419 - protein, 153 aa, Dictyoglomus thermophilum H-6-12
MEKKAPNFTLPDQNGKEISLSDYKGKWVILYFYPKDMTSGCTKEAVGFSEKIDEFTKRNAVVIGISKDSVESHKKFADKYNLKITLLSDKDAKVIKEYGAWGKKKMYGKETEGTIRSTFIISPEGEILHEWKNVKVDGHVEEVIKKLDELIAS

SEQ ID NO: 3420 - protein, 571 aa, Polaromonas sp. JS666
MAIRSDTQNTVKPIRFIRRGEVVTLANVPPSRTLLEVLREDLACTGTKEGCGEGDCGACTVVLGEADGKTIRYRAINSCIRLAHSIDGLALWTVEDIAPTLFTSPSASCNALPPEGALRLRPGKAGSAAPTGEEERGKPTLHPAQEAMVQFHGSQCGFCTPGFVMSLFGMYHNHVGRGQPITRALAQEELSGNLCRCTGYRPILDAAQAMDQLPQVAVDEAGLLKKMKQLAHAPYRPGPDFSSDFSYESPPTLAALLKARAAHPEAQLVAGCTDVGLWVTKQHQQFSRVLDVTRVRELRRIEDYPQHIAIGAAVTLADAYAALAKDRPQLHTFAARFAGLPVRNAGTMGGNVANGSPIGDSMPLLIALGANVVLMNERQGVMGHREMPLEQLYTGYRQSVMAPDEVLAWVKVPRPASPHPNPLPGGEGIEEKDGIAPSPLWGEGWGEGQELLRIYKISKRYDDDISAVCLALNLHIDKGIVTSASIGAGGVAATPVRAVKTEAALLGQAWTAETVQQAITTLRAEFSPISDMRASAAYRSTVLGNLLQRYWLESQGLQQINLESFRLEELA

SEQ ID NO: 3421 - protein, 164 aa, Aeropyrum pernix K1
  misc_feature (1)..(1): Xaa can be any naturally occurring amino acid
  misc_feature (60)..(60): Xaa can be any naturally occurring amino acid
  misc_feature (118)..(118): Xaa can be any naturally occurring amino acid
XKGLVELGEKAPDFTLPNQDFEPVNLYEVLKRGRPAVLIFFPAAFSPVCTKELCTFRDKXAQLEKANAEVLAISVDSPWCLKKFKDENRLAFNLLSDYNREVIKLYNVYHEDLKGLKXVAKRAVFIVKPDGTVAYKWVTDNPLNEPDYDEVVREANKIAGELVA

SEQ ID NO: 3422 - protein, 493 aa, Arabidopsis thaliana
MTTLSSINLSIPPHLLPSTTNTCSSSSATSCSPPRSSSFVLHSPLSFGHRRLPISKKSKLRFCGVITKEAVSGSNDMTITQVREDDESEIDAPLLDPESLSKPRRIALFVEPSPFAYVSGYKNRFQNFIRYLREMGDEVIVVTTHEGVPEEFYGARVIGSRSFPCPYYQKVPLSLALSPRIISEIARFKPDIIHASSPGVMVFGALAIAKMLSVPIVMSYHTHVPVYIPRYTFSWLVKPMWSIIRFLHRAADLTLVPSAAIGKDLIAAGATAEKPLVIHVGRIGVEKSLELLKSVMDKLPEARIAFIGDGPYKEDLEKLFTGMPAVFTGTLQGDELSQAYASGDVFVMPSESETLGLVVLEAMSSGLPVVAARAGGIPDIIPEDQEGKTGFLFNPGDVEDCVTKLRTLLHDRETREIIGKAAREETEKYDWRAATTKIRNEQYSAAIWFWRKKKVHVLGPINWLIKRLFPVPEGTCTRPVLSCWKHKDAPAYR

SEQ ID NO: 3423 - protein, 507 aa, Thalassiosira pseudonana CCMP1335
MCQVTRINTASIGNQSIPLNNEILTTQCKPSNDGLRVLLCSENVPPQVNGIARRIGMYADGLEKLGCDVELLHPGSGSDKVFQFVNPWNFTSLMMVINPWYLYKLLTTPYDVVHVVMPANLSGMWILAAFKVLRCVKRQSKPALVVSWHCNIVDYIQHFSIGPLRFLAYFFFFQLFGMLPLISDRILTPTRKSEPRIVNLWKRSNGKLCSGVCFTGVNKSEFSPDSKNTKWGSTWQMAKEKFLVNENKKYLLVCVGRLSPEKGVDELIKTLPMLKDCALWLVGDGPFRPELERLARDLKVPVKFLGYQSGDALHSVYAVGDMFVCPSLTETFGQTVNEALASQVRVALPNVPVFAEAYGEVIPKDAFWKPLDRTAMANAISKQLERHSRNESSSLPDLDKLKSWADASQSLLGEYTEASRDRQHTFTFLAGLYFPIWWSVTVSTAVSFYLFSLIRTLCGGSVRLFFRSAAEDVLIKVQSFHRLPSFNSLQQMEKGQKQKEGVRDRTE

SEQ ID NO: 3424 - protein, 610 aa, Streptomyces griseochromogenes
MSLQGLVAALIADDGTADWPRRVPARLDTVLATMPLPARVGIRTAAHAVNAYAMARTGRTLGPLTAPERESVLGELTARPALLPLLDVLKVPVLLAAGTERMLQDGPAPRGLPRQDPPLDLTPASAWPARSTADAVVIGSGAGGAMAARTLARAGLDVVVLEEGRHHSTESFGRRTPLDRFTELYRDGGASAAVGSPPLLLPVGRAVGGTTVVNSGTCYRTPDHVLDHWSKDFGFTLADDFERRLDEVERTLRVATQPTQVLGANGRITLAGARELGWRAAPLRRNAPGCQGSCQCVVGCPTGAKQSVQLSVLPDACAAGARIVTDARVERILVDTDRPGGPRAAGVRARGADGGFEILAPLVVVAAGALQSPPLLRRSGLGRHPRLGRNLSVHPATSVAGRFAGPVTAWKGVLQSVGVEEHHPEGILIEATATPPGMGSFILPGLGGELRRELESADRLATLGAMIADRPSGSVLGRDRTLVRYDVDRRDADRLIRAVRAMGELLFAAGAEEVLTGIPRTPRVRSLPELDAVLAGTSVRQLHLSAYHPTGTVAAGASSQHFPVDPEGRLRGVHGVLVADASVLPSCPQVNPQLSIMAAALAIAELHLRE

SEQ ID NO: 3425 - protein, 451 aa, Nocardia farcinica IFM 10152
MDGVSQRVDQRPNRIAVLSVHTSPLAQPGTGDAGGMNVYVLRTAVELAQRGIEVEIFTRATASHIPPVQEAAPGVLVRNVVAGPFEGLDKQDLPTQLCPFTAEVLRQEARQLPGYYDLVHSHYWLSGQVGWLTRDRWRVPLVHTAHTLAAVKNAALAEGDAPEPVSREIGEKQIIAEADRMVANTAEEARQLVELYGADRDRIDVVPPGADLTRYRPGDRAAARAELGLAPGEPIVAFVGRIQPLKAPDVLVRAAAELLRRDPGRALRVLIVGGPSGSGLQRPDALIELAAELGISERVTFLPPQPPERLVQVYRAADLVAVPSYSESFGLVAIEAQASGTPVLAADVGGLSTAVRDGATGLLVRGHETADWADALGALLGDRDRLRRMGLRAVAHAAGFSWAHTAEGLLESYSAALWEFHGARAGVGAGRMTPNQARSRALWRRRMGVRR

SEQ ID NO: 3426 - protein, 271 aa, Nicotiana tabacum
MACSASSTALLSSNPKAASISPKSSFQAPISQCLSVPSSFNGLRNCKPFVSRVARSLSTRVAQSQRRRFVVRASSELPLVGNQAPDFEAEAVFDQEFIKVKLSEYIGKKYVILFFYPLDFTFVCPTEITAFSDRYGEFEKLNTEILGVSVDSVFSHLAWVQTDRKSGGLGDLNYPLISDVTKSISKSYNVLIPDQGIALRGLFIIDKEGVIQHSTINNLGIGRSVDETLRTLQALQYVQDNPDEVCPAGWKPGEKSMKPDPKGSKEYFASI

SEQ ID NO: 3427 - protein, 145 aa, Anabaena variabilis ATCC 29413
MPLAVGTDAPAFTVKDTNGNTVSLSDFAGKTVVLYFYPKDDTPGCTKQACSFRDAQSDYKNKDVVVLGVSADDEGSHQAFTQKYNLNFPLLADTNKTLISAYDVDGGGYAKRVTYVIGPDGKIVHVDASVNTTTHASDVLAALGL

SEQ ID NO: 3428 - protein, 401 aa, Acidobacteria bacterium Ellin345
MAMSERRHCGRPAVRILYLITRAQRGGAQAHLLKLAGASSRNNEVLVAVGEEGVLCSDLRRRGISCIVLEHMKHAPHPWHDALGVRELIRLIRNFQPDVVHAHSGKAGLLGRVAAAICGVPAVYTAHGYAFANQAPWLQKTIALPAERLAARTGGLTIAVSRSECRLAASSGIGGVNQTVVVHNGCEPSAYPAEPGVSPPVVVMVARFARPKRQDRLIRAFSQIAGQSQLWLVGDGPGLRSARELAQGSGVRDRIIFWGDRDDVSALLGRAQVAALISDHEGFGLALIEAMSAGLPVIASDVGGMREIVVPGETGLLVPANDETNLEVALRRLIANPQERQRMGSAGLVRFREKFTLDRMLTDTFRVYDLALGAATREEVNACVHCRYPAACGAGAVVSGD

SEQ ID NO: 3429 - protein, 398 aa, Anabaena variabilis ATCC 29413
MTMKIAVIGAKGLPPKQGGIEHYCAEVYPRIVAQGHSVDLFARSSYTDTSWLGNYDFQGVRVISLPGIAARGADAFITSALGAIAATAERYDIVHFHALGPSLFTFLPRVANSAKIVVTCQGLDWQRAKWGSFSTRLIQSGEKAAVRFAHGMVVVSDALKTYFAETYGRDTVYIPNAPASYGESDPSFTYGKQLGLEPGRYMIFVGRIVPEKRPDLLIEAFSKLQAPGWKLVLAGGVSDTQSYTSQLLEKVANNPNIIFAGELRGSRLWEIVRGAGMFVLPSDLEGLPLAMLEAMQEGVPVVASDILPHQQLINGGMGTLFMAGNTDSLVSSLDWAIHHPQQIAAMAKNAQRNIQVNYSWEHITAENLKLYKTLLSSSQPVGIANSREVSLARVGSKE

SEQ ID NO: 3430 - protein, 180 aa, Bacillus licheniformis ATCC 14580
MAERMVGKQAPRFEMEAVLANKEFGKVSLEENMKNDKWTVLFFYPMDFTFVCPTEITAMSDRYDEFEDLDAEVIGVSTDTIHTHLAWINTDRKDNGLGQLKYPLAADTNHEVSREYGVLIEEEGVALRGLFIINPEGELQYQTVFHNNIGRDVDETLRVLQALQTGGLCPANWKPGQATL

SEQ ID NO: 3431 - protein, 250 aa, Aeropyrum pernix
  misc_feature (50)..(50): Xaa can be any naturally occurring amino acid
MPGSIPLIGERFPEMEVTTDHGVIKLPDHYVSQGKWFVLFSHPADFTPVXTTEFVSFARRYEDFQRLGVDLIGLSVDSVFSHIKWKEWIERHIGVRIPFPIIADPQGTVARRLGLLHAESATHTVRGVFIVDARGVIRTMLYYPMELGRLVDEILRIVKALKLGDSLKRAVPADWPNNEIIGEGLIVPPPTTEDQARARMESGQYRSLDWWFCWDTPASRDDVEEARRYLRRAAEKPAKLLYEEARTHLH

SEQ ID NO: 3432 - protein, 242 aa, Zea mays
  misc_feature (224)..(224): Xaa can be any naturally occurring amino acid
  misc_feature (233)..(233): Xaa can be any naturally occurring amino acid
  misc_feature (236)..(236): Xaa can be any naturally occurring amino acid
SPTPNLQSTHPLLIHSAVATAARPLRLVASRSARAIRLVARAGGVDDLPLVGNKAPDFEAEAVFDQEFINVKLSDYIGKKYVVLFFYPLDFTFVCPTEITAFSDRYEEFEKLNTEVLGVSIDSVFSHLAWVQTDRKSGGLGDLKYPLISDVTKSISKAFGVLIPDQGIALRGLFIIDKEGVIQHSTINNLAIGRSVDETMRTLQALQYVQENPDEVCPAGWKPXERSMKPDPXGSXEYFAAV

SEQ ID NO: 3433 - protein, 711 aa, Glycine max
ACVLVSSLLTWFCFVAGLKDDDLYRELWKLCAGPLVDVPRNGDRVFYFPQGHMEQLQASTDQELNQEIPHFNLPAKIFCRVVNIQLLAEQDTDEVYACIALLPESDQTEPTNPDPNVSEAPKQKFHSFCKILTASDTSTHGGFSVLRKHATECLPELDMTQSTPTQELAAKDLHGFEWKFKHIYRGQPRRHLLTTGWSTFVASKRLVAGDAFVFLRGEHGQLRVGVRRLARQQSPMPSSVISSQSMHLGVLATASHAVMTRTMFLVYYKPRTSQFIVGLNKYLEAVNNKFSLSMRFKMRFEGDDSPERRFSGTIVGVGDVSAGWSNSQWRSLKVQWDEPATIPRPDRVSCWEIEPFVASTALNVTQPAVKGKRSRPADVLSSAASGFWYHGSSNELSQLGAAAEVQSKENQVVPCSLRQKDIINSNPINANNSSISTRVRMEGVWPSSPHLNATPNLFSDPNNNNSNNGVSARSLISGYPNVPSRSSDGPTCDGVEDGKKTENSLDCWLFGVNLTNNCSNVITTPSEREQRGPSSSVVLSGPKESIPAAACETERVQTPNYSLSNKGQKQIISEASPNQWQNKQATVLSMRTRTKVQMQGVAVGRAFDLTTLSGYDDLIDELEKLFEIRGELRSQDKWAVTFTDDENDMMLAGDDPWPEFCNMVKRIFICSREDLKKMKCCKLPASSSEVEEILLSPDSQNRDETQQSHMP

SEQ ID NO: 3434 - protein, 323 aa, Salmonella enterica subsp. enterica serovar Ohio
MSKIFEDNSLTIGHTPLVRLNRIGNGRILAKVESRNPSFSVKCRIGANMIWDAEKRGVLKPGVELVEPTSGNTGIALAYVAAGRGYKLTLTMPETMSIERRKLLKALGANLVLTEGAKGMKGAIQKAEEIVASNREKFLLLQQFNNPANPEIHEKNTGPEIWGETDGQVGLFISGVGAGGTLNGVGRFLKSPRGKKNLITVAGEPTDSPVIPQALAGEELKPGPHKIQGIGAGFIPGNLDLKLVDKVIGITNEEAISTARRLMEEEGILAGISSGAAVAAALKLQEDEAFTNKNIVVTLPSPGERYLSTALFADLFTEKELQQ

SEQ ID NO: 3435 - protein, 187 aa, Escherichia coli O157:H7 EDL933
MSLINTKIKPFKNQAFKNGEFIEITEKDTEGRWSVFFFYPADFTFVCPTELGDVADHYEELQKLGVDVYAVSTDTHFTHKAWHSSSETIAKIKYAMIGDPTGALTRNFDNMREDEGLADRATFVVDPQGIIQAIEVTAEGIGRDASDLLRKIKAAQYVASHPGEVCPAKWKEGEATLAPSLDLVGKI

SEQ ID NO: 3436 - protein, 251 aa, Vitis pseudoreticulata
MAEEKCFIAKDVTELIGKTPLVYLNNVVDGCVARIAGKLEMMEPCSSVKDRIGYSMITDAEEKGLITPGESVLIEPTSGNTGIGLAFMAAAKGYKLIITMPASMSLERRIILRAFGAELVLTDPAKGMKGAVQKAEEILAKTPNSYILQQFENPANPKIHYETTGPEIWRGTGGKVDAFVSGIGTGGTITGAGKFLKEQNSDIKLYGVEPVESAVLSGGKPGPHKIQGIGAGFIPGVLDVNLLDEGCSSFK

SEQ ID NO: 3437 - protein, 793 aa, Burkholderia xenovorans LB400
MNAPETHLIGASVERKEDYRFLTGNGQYTDDIVLPQQTYAVFLRSPYAHAKINTIDTTAAKQSPGVVAIFTGADMAADNVGGLPCGWLIHSTDGKPMNEPPHPVIAHTKVRHVGDQVALVIADSIKAAKDAAELIEVDYDVLPAVVDTAHAADAGQPAVHDEVPDNVCYNWGHGDKAATDAAFAKAAHVTTLDIVNNRLIPNAIEPRAVNASYSAQDDSYTLYVANQNPHVERLLMAAFVLSLPESKLRVIAPDVGGGFGSKIFLYAEDVALTWASKKIRRPVKWTAERSEAFVSDAHGRDHVTKAELALDADGRFLAMRIHTTANMGAYLSTFASSVPTILYATLLAGQYATPAIYAEVKAVFTNTVPVDAYRGAGRPEATYVVERLVETAARELKLDPAEIRRRNFIREFPYATPVGLTYDTGDYETILARSLELADVKGFAARRQESEKNGKLRGLGYSCYIEACGLAPSNIAGALGARAGLFEVGQIRVHPTGSVTVFTGSHSHGQGHETTFAQVVAERLGIALESVEIVHGDTGRIPFGMGTYGSRSIAVGGSAIMKALDKIETKAKKIAAHLLEAAAEDIEFKDGVFRVAGTDRTKAFAEISLAAYVPHNYPLDVLEPGLEESAFYDPTNFTYPSGAYICEIEVDPDTGVCRIQQFTAVDDFGNVINPMIVEGQVHGGLAQGIGQAMLERCVYDNESGQLLSGSYMDYAMPHASDLPDFTVETAKGTPCTHNPLGVKGCGEAGAIGSPPAVINAILDALAPLGVTDLQMPATPHRVWSAIHAAKQAH

SEQ ID NO: 3438 - protein, 213 aa, Dehalococcoides sp. VS
MEEVTYAMPRIGDIAPPFEALTTHGVLKLEDFKGQWLIIFSHPADFTPVCTTEFIAFSEIYPELKKREVELLGLSVDSNSSHIAWVRNIEEKTGVKIPFPIIADLNKEVSFAYGMIHPGQSKTETVRCVFILDPGQKIRLIMYYPMNVGRNMREILRVIDALQTADENKVALPANWHPGEKVVVPPPFTQEMAEERMGQGYECIDWYLCKKNL

SEQ ID NO: 3439 - protein, 392 aa, Lactobacillus plantarum WCFS1
MNIGIFTDTYYPQVSGVATSIKVLRNQLERAGHQVYIFTTTDPHVDKNIYERNIFRFTSIPFVSFTDRRIAVRGLFKAYQVAKDLGLDIVHTQTEFSMGMIGKFVAKQLKVPCIHTYHTMYEDYLHYIANGKLLKPYHVKEATRAYCYHLNGIVAPSERVANTLTGYGVKAPIRIIPTGIDINQYEQQSTVDYRQRLGYQSDTPVLLSLSRLAYEKNIHEVIAALPAILEQVPNAQLLIVGDGPARETLENQVQDAGLTAHVQFTGEIDNDEVYNYYQMADLFVSASNSESQGLTYIEAMAAGLKTVVAASPYTDQLLDDPSLGTTFTSETDLIKDVVRYLQHPNTFNDPKPRQKKLYQISAEYFGKQVINYYQDVQLAYSESADKSANISN

SEQ ID NO: 3440 - protein, 145 aa, Populus tremula x Populus alba
VLTDPAKGMKGAVQKAEEIVRRTPNAYMLQQFDNPANPKIHYETTGPEIWEDTRGKVDIFVAGIGTGGTISGVGQFLKEKNPKIKVIGIEPSESNILSGGKPGPHKIQGIGAGFVPRNLDRDVVDEVIEISSDEAVETAKQVALQ

SEQ ID NO: 3441 - protein, 389 aa, Cyanidioschyzon merolae
MLVSNAMYVLVPCSLKAAQATLRNRKKNSTFVRAKPEQTRILGYARRSPRARQRVQLALTAPPSVALARDVSDLVGNTPIVELKKIPEEEGVQAHILCKLESMEPCSSVKDRIGKYMIVEAEKRGDIQPGKTVLIEPTSGNTGIALAYLAAARGYRLILTMPDSMSIERRMVLRAFGAEVVLTPAAKGMKGAVAKAEQLFHTTPNAYMLQQFNNPDNPKAHYETTGPEIWAATGGKVDAFVAGVGTGGTVTGAGRYLREQNPHVYIMAVEPAESPVLSGGRPGPHKIQGIGAGFVPGILDTKIYNEVKQVTSMDSIEMARRLAVEEGLLCGISSGAAVVAALELGRRPEMKGKNIVVIIPSFGERYLTSALFDKQREEAYNMVAVEVET

SEQ ID NO: 3442 - protein, 157 aa, Cuscuta japonica
MSLIPSFFEGRRSNAFDPFSLELWDPFFSNTVANLSGSSSAREASAFANARIDWKETPEAHIFKADVPGLKKEEVKVEVEEGKVLQISGERSKEKEEKNDTWHRVERSSGKFLRSFRLPENAKVDQVKAAMENGVLTVTVPKVEEKKAEVKSIQISG

SEQ ID NO: 3443 - protein, 194 aa, Prochlorococcus marinus str. MIT 9515
MSLRVGQEAPNFTATAVYDQEFKEITLSSYKGKWVVLFFYPLDFTFVCPTEITAFSDEYEKFSALNTEILGVSVDSKHCHLAWIQTPRNEGGIGDINYPLVSDLKREICQEYNVLNDDGEADRGLFLINPQGIVMHTTVNKAPVGRNVDETLRILQGYQYVAANPDEVCPANWTPGEKTMLEDPKGSKEYFSAL

SEQ ID NO: 3444 - protein, 390 aa, Cyanidioschyzon merolae
MVQHAANGHAQCSFRPLRYKAETRGRVARSTRERVLLRCLFDMRLVHNVYDSFEDAIGNTPLIKLRRASERTGCNIYGKAEFMEPGGSVKDRAALYLLTDAEKRGTLKLGSIVVEGTAGNTGIGLTLLGNSRGYRTVIVIPETQSEEKKEFLRSCGAELVQVPAAPYRNPNNYVRLSERLAKELGAFWANQFDNPANRRAHEETTGPEIWDQLDGHIDAFNCAVGTGGTLAGVSAFLRAKNPGIKIALTDPQGAALVRYYQCGELVSVGDSITEGIGQSRITGNLEGFVPDMSFEISDAEALQAAYDVVRHEGLHIGLSSGINIAGAIRVAESLGPGHTIVTILCDGGSRYQKKMFQPSFLEQKKLPIPTWLSDSMKPDLAAALSKVYVP

SEQ ID NO: 3445 - protein, 242 aa, Hordeum vulgare
DARARSFVARAAAEYDLPLVGNKAPDFAAEAVFDQEFINVKLSDYIGKKYVILFFYPLDFTFVCPTEITAFSDRHEEFEKINTEILGVSVDSVFSHLAWVQTERKSGGLGDLKYPLVSDVTKSISKSFGVLIPDQGIALRGLFIIDKEGVIQHSTINNLGIGRSVDETLRTLQALQYVKKPDEVCPAGWKPGEKSMKPDLGPKRSTRCYLERTFALSCGVLSWPFLGYMCFCDPSCSYHAYN

SEQ ID NO: 3446 - protein, 173 aa, Prochlorococcus marinus str. MIT 9303
MLSISQCLGRPSQALAMEGKLPALDAQAPDFELEAAAQEGALAEKLQRDAFLGSWLVLYFYPRDFTSGCTLEARGFQRDLSDFKAAGAAVVGVSADGTEEHVSFCSSEGLGYTLLSDPGGVVSERYGSWSSPFSQRHTFLIDPKGILRMRWLAVSPSRHSQDVLRELKELQQS

SEQ ID NO: 3447 - protein, 768 aa, Oryza sativa
MGVPAFYRWLADRYPQTVSDAVEEEPVELEPGAFVPVDLRRPNPNGLEFDNLYLDMNGIIHPCFHPEGRPAPTTYDEVFKSIFAYIDHLFGLVRPRKLIYMAIDGVAPRAKMNQQRSRRFRAAKDAADAAAEEERLRKEFEAEGRTLVAKEKSEAIDSNVITPGTPFMFVLSSALQYYIQLRLNHTPGWQSVKVMLSDSNVPGEGEHKIMSYIRLQRNLPGFDPNTRHCLYGLDADLIMLSLATHEVHFSILREVITMPGQHEKCFLCGQVGHLAAECRGSGQADKTVELPPIHKKKYQFLNIWVLREYLEKDLEIVDPPFKINFERVVDDFVFMCFFVGNDFLPHMPTLEIREGAINLLMNIYRREFTSMGGYLTDGGEVLLDRVEHFIQSVAVHEEQIFQKRARIQKAIQNNEERNRVQTENSEDNQYVDKVKLGEPGYRVRYYAEKFKEEAELKPIDQVQRDVVQKYVEGLCWVMRYYYQGVCSWQWFYPYHYAPFASDLKCLAELEITFFLGQPFKPFDQLMGTLPAASSNALPKYYGDLMNDPNSPLKSFYPKDFEIDMNGKRFAWQGIAKLPFIDERRLLAETQKLEETLTDEERFRNRTMFDILYVRETHPLAAQIAFLYQMCSQSPNASYIIPIDPAASGGMNGFLCLSERNCYSIVVTSPVKGFNGIAQNRVLNATYLNPQYHKHIPEPPEGVIIPAKILKPSDFKPFPILWHEDNSRRQAKRKASGFWSSVRLCLRRGCTSPGEKLTADKIRLLCWAA

SEQ ID NO: 3448 - protein, 153 aa, Mycobacterium abscessus
MLPVGTVAPDFTLRNQNNQPVSLSDFRGKKAVLLVFFPLAFTGVCQGELDHVRDHIGDFENDEVQIIALSVSAGPIHKIWSSYSGFTFPILSDFWPHGAVAEAYGVLNEKAGYPNRGTFVVDADGIIRFAEMLDPGQARDQAGWVQALAALHS

SEQ ID NO: 3449 - protein, 163 aa, Leptospira interrogans serovar Lai str. 56601
MEEIEMSDPLLGTNLPEISLESTEGKRVKLPEDIQGSWTLLYFYPKDDTPGCTKQACNYRDNMGEFKKIGAKVYGISLDALDSHGQFIQKYSLNFPLLSDPDHKLSEALGVYGDQEWKGKVFKGLSRDSFLVSPDGKIQKVWRKVDPTTTVQDTLQEISKSIV

SEQ ID NO: 3450 - protein, 212 aa, Pseudomonas putida
MSLKLGDIAPDFEQDSSEGKIRFHEWLGNSWGVLFSHPADFTPVCTTELGLTAKLKDDFAKRGVKAIALSVDPVDSHHRWIDDINETQNTVVNFPIIADADRKVSDLYDLIHPNASDTLTVRSLFVIDPNKKVRLTITYPASTGRNFNEILRVIDSLQLTDNHKVATPGNWQDGDDVVIVPSLKDEEEIRQRFPKGYRAVKPYLRLTPQPNR

SEQ ID NO: 3451 - protein, 336 aa, marine gamma proteobacterium HTCC2080
MNAICSTVLDAIGDTPMVSLAAFGKDTLPHLYAKLECTNPGGSMKDRAAKGMIEWAEREHNLTSGARIVVCTSGNMGVGMAMVCAVKGYQLMCLVDAKINPATENCLRVLGAEVIKVYQRDETGGYHLTRLSKLDSVLAEYPDAIYLDQYDSPAAVMSHSTSTGPEIYNAFQGQVRAIVMVAGTGGSSMGIARFFKEHSPQTDIWLVDEAGSLALPGNGGASPRHLNGMGTSIAPANYGPADFHTFIDHVVYVNAEDSIRAAIELARCEGILVGGSGGAAVQVMRDVAAAHYGADDNLVALLPDHGSRYTETQFDPDWLAARGINVPEIFNVEDES

SEQ ID NO: 3452 - protein, 260 aa, Phaseolus vulgaris
MASSAPCASLISSNPNILFSPKFPSSSFSSLSFPNSPNSLFKPLRTSLNPSSPPLRTFVARASSELPLVGNTAPDFEAEAVFDQEFIKVKLSDYIGKKYVILFFYPLDFTFVCPTEITAFSDRYAEFEALNTEILGVSVDSVFSHLAWVQTDRKSGGLGDLNYPLISDVTKSISKSYDVLIPDQGIALRGLFIIDKEGVIQHSTINNLAIGRSVDETKRTLQALQYVQENPDEVCPAGWKPGEKSMKPDPKLSKEYFSAI

SEQ ID NO: 3453 - protein, 155 aa, Alkaliphilus metalliredigens QYMF
MKAIEVGNHAPNFMVKDINDQNLSLADYQGKKVLLSWHPLAWTPVCTDQMRALENNWQTFQKLNTVPLGFSVDPPPCKKAWATAILMNNVSLPSDFWPHGKVAQAYGLFNEAQGVSERANIIVDENGIIKWVKVYPSQQLPDINEVIQVLSNMQM

SEQ ID NO: 3454 - protein, 200 aa, Klebsiella pneumoniae subsp. pneumoniae MGH 78578
MVLVTRQAPDFTAAAVLGNGEIVEKFNFKQHTNGKPTVLFFWPMDFTFVCPSELIAFDKRYEEFQKRGVEVVGVSFDSEFVHNAWRNTPVDQGGIGPVKYAMVADIKREIQKAYGIEHPDEGVALRGSFLIDANGVVRHQVVNDLPLGRNIDEMLRMVDALQFHEEHGEVCPAQWEKGKEGMAASPEGVAKYLTENVSSL

SEQ ID NO: 3455 - protein, 148 aa, Bacteroides fragilis NCTC 9343
MNVGDKAPELLGINEKGEEVRLNNYKGRKIVLYFYPKDNTSGCTAQACSLRDNYAELRKAGYEVIGVSVDNEKSHQKFIEKNNLPFTLIADTDKKLVEQFGVWGEKKLYGRAYMGTLRTTFLINEEGVIERIIGPKEVKAKEHASQIL

SEQ ID NO: 3456 - protein, 560 aa, Sulfolobus tokodaii str. 7
MIFKEGFRFVKGEGSYIDDVLTKEIKGYFSVSIVRSPYAHAKIIRINKDDAEKLNGVVKVITYNDLRNFLDPFPLSLDINLEYYPIARDKTMYYGEPVAVIVAKDDYIAEDAKELVQVDYEPLDAVVSISDAISKPPIHPNLKSNIVLDKTFIYGKYMDEIKKANIIVEEKIKFPRYTASPLETYEVYAKYNGEEYEIFSNFQGPFTIHYLLSKALKSKLVIRGPRDIGGSFGIKSAIYPYMALIAASSRLVNRPLKWIETRNEHLTSSSVGAERESIIRIYGDKEGKIHAIDMELTDNLGAYPRPPEPGNLLRNHGNLTGPYDVQALKLTYRAVLTNTVPTGLNRGYGGPHLYLALESAIDEFAREIGMDPMEVRIKNVIKTTQYETVTGGKYYGFSCYNVVKRMKELYDKLKVEVNEERKRGKRVAIGTSLVVEPSGTNIGYLDLARESKDYLPKSSAQDMVIVQIDPYSKVKVIVNGTNEGQGHETVISEIVSKRLGVNPEDVDVIYSVDTNRPWVISSGSYSSRFTPIVLPALNNALDQLENRDCSQTVIKFDKCL

SEQ ID NO: 3457 - protein, 1006 aa, Saccharomyces cerevisiae YJM789
MGVPSFFRWLSRKYPKIISPVLEEQPQIVDGVILPLDYSAPNPNGELDNLYLDMNGIVHPCSHPENKPPPETEDEMLLAVFEYTNRVLNMARPRKVLVMAVDGVAPRAKMNQQRARRFRSARDAQIENEAREEIMRQREEVGEIIDDAVRNKKTWDSNAITPGTPFMDKLAAALRYWTAFKLATDPGWKNLQVIISDATVPGEGEHKIMNFIRSQRADPEYNPNTTHCIYGLDADLIFLGLATHEPHFKILREDVFAQDNRKRNNLKDTINMTEEEKQFLQKQNSEQPFLWLHINVLREYLSAELWVPGLPFTFDLERAIDDWVFMCFFCGNDFLPHLPCLDVRENSIDILLDIWKVVLPKLKTYMTCDGVLNLPSVETLLQHLGSREGDIFKTRHIQEARKKEAFERRKAQKNMSKGQDRHPTVATEQLQMYDTQGNLAKGSWNLTTSDMVRLKKELMLANEGNEEAIAKVKQQSDKNNELMKDISKEEIDDAVSKANKTNFNLAEVMKQKLINKKHRLEKDNEEEEIAKDSKKVKTEKAESECDLDAEIKDEIVADVNDRENSETTEVSRDSSVHSTVNVSEGPKNGVFDTDEFVKLFEPGYHERYYTAKFHVTPQDIEQLRKDMVKCYIEGVAWVLMYYYQGCASWNWFYPYHYAPLATDFHGFSHLEIKFEEGTPFLPYEQLMSVLPAASGHALPKIFRSLMSEPDSEIIDFYPEEFPIDMNGKKMSWQGIALLPFIDQDRLLTAVRAQYPLLSDAERARNIRGEPVLLISNKNANYERFSKKLYSKENNNNNVVVKFQHFKSGLSGIVSKDVEGFELNGKIVCPIQGGSLPNLSTTLILKMSYRLIPLPSRNKSIILNGFIPSEPVLTAYDLDSIMYKYNNQNYSRRWNFGNDLKQNIVPVGPKGITQYKPRTGGYRAFFYFAELSRNNVQPAHNYGRNSYNSQPGFNNSRYDGGNNNYRQNSNYRNNNYSGNRNSGQYSGNSYSRNNKQSRYDNSRANRR

SEQ ID NO: 3458 - protein, 181 aa, Listeria innocua Clip11262
MAERLVGTQAPRFEMEAVMPNQTFGKVSLEKNIEDDKWTVLFFYPMDFTFVCPTEIVAISARSDEFDALNARIIGASTDTIHSHLAWTNTPIKEGGIGKLTYPLAADTNHQVASDYGVLIEEEGVALRGLFIINPKGEIQYEVVHHNNIGREVDEVLRVLQALQTGGLCPINWQPGEKTIV

SEQ ID NO: 3459 - protein, 401 aa, Vibrio vulnificus CMCP6
MKVLLVNKFFFLKGGAETVFFQERELLQSAGFEIIDFAMKHEKNLTSSYSDFFVDNVDYHQGHGISSSLKTAWAFIHNSDACAKLKALIEQEQPQVVHFHNIYHQLTPSLIKVAKSAGCKTVLTAHDTKIACPSYTMYRQGKTCEACLDGSVWNATRYRCQQGSLFKSVLLSLEATYQSLAGNYRALDVIISPSEFLASILRRKLPENHIEVIVNGIDENVDCSDVSDDGYFLYLGRLSQEKGVATLAAAYQQSQRLLPLKVVGDGPLHDTLKQQYSMIEFLGFQSGDALHQLIKKASAIVVPSECYENCSMSVLEAMAYGKPVIGANIGGIPEQVREGTEGHLFVAGNSTSLAEVMDTFAQHPEKAAQLGHNARQRLEQRYSLTRHQQSLMSLYRNLINK

SEQ ID NO: 3460 - protein, 370 aa, Pseudomonas fluorescens PfO-1
MHIADITMFYAPASGGVRTYLDAKHRRLGVKPGIRHSLLIPGAHFGEDDGVYTVPAPALPFGKGYRFPLRLAPWRNVLQDLQPDLIEVGDPYLTAWAALDARRQLDVPVIGFYHSDLPLLVGNRMGHWVTPNVDAYVRKLYGNFDRVLAPSQVMADKLSGLGVRNVFVQPLGVDLQTFHPDAHDAALRSELGIAEDSRLLIFAGRGSKEKNLPVLLDCMKRLGPRYHLLLVGSSMPASVPDNVSVIDRFCPAAQVARLMASADALIHAGDQETFGLVILEAMACGIPVVAVAAGAFEEIVSESCGLLCAPNNAQAMANAVRELFSRGAGVLGQQARQHVERHYAWNTVVDSLLGHYHAVLGESVPRVANG

SEQ ID NO: 3461 - protein, 345 aa, Bradyrhizobium japonicum USDA 110
MRVLVATDAWRPQINGVVRSLEYLASEAPSFGASIGFLTPGDFPTVPLPGYREIRLALASVGRIERAIKSMGPDSVHIATEGPIGWITRHVCQTRGYPFTTSYHTRFPEYLAERLPVPLRWSYAVLRRFHNGGDGIMVGSPTLEQALKAHGFRNLMPWSRGVDAVLFRPRSVQPLAFPAPVFLYVGRIAIEKNLEAFLALDLPGSKVVVGDGPLRASLQARFPQVHFLGTRTGRALADVYASADVFVFPSLTDTFGLVILEALACGLPVAAFPVMGPLDVIGESGCGCLDADLRRAALAALQVPREKCRAYALTFTWQESVRQFLDNVKRAHGMLTDAARPLFAG

SEQ ID NO: 3462 - protein, 187 aa, Prochlorococcus marinus str. MIT 9313
MKRSELLRVITGAAVLSISQCLGRPSQALAMEGKLPALDAQAPDFELEAAAQEGALAEKLQRDAFLGSWLVLYFYPRDFTSGCTLEARGFQRDLSDFKAAGAAVVGVSADGTEEHVSFCSSEGLGYTLLSDPGGVVSERYGSWSSPFSQRHTFLIDPDGILRARWKDVSPSRHSQDVLRALKELQQS

SEQ ID NO: 3463 - protein, 333 aa, Halobacterium sp. NRC-1
MARLLSELQPSEFDITVVAIADTPPDVVSMLPDHVEVKHLKMTRRTALLQLGEISKIVKSTDILVCSLFHATAIGVPLGLLLQVPKLLVWQHSTSYSNQIRSAYYRLAYRAADRVLADSDAVMEMLVDSVGVPDQKISTLPIAGIDVKEYQPSKTHPSHENITVSTVGRLANVKGYDDLIRCARDIGDDLQFQIAGEGEERERLESKTPDNVNFQGMVPNEQIPQFLNNSDIYFQPSKYEGLCMAVIEAMACGLPVVASDVGGITESVVPGETGFLCRPRDIDCFSERLQQLSENPALRKQMGTAGRKRVISEYSQKALARQFRKAIDQTETV

SEQ ID NO: 3464 - protein, 181 aa, Synechococcus elongatus PCC 6301
MPVSRRQLLLSSLLALPALVLAPRSAQALGGPQPPVDEPAPDFSLPTDDGRERLSLADFRGQWLVLYFYPKDGTPGCTLEAQRFQQDLAAYAERNAQIVGVSADDLSSHSRFRENEGLSYPLLADVKGEVSKRYGSWLAPFSLRHTYIIDPEGVLRANFTAVRPVIHSKEVLAKLDELQAG

SEQ ID NO: 3465 - protein, 395 aa, Burkholderia vietnamiensis G4
MRIAIVTHVVRHNDGQGRVNYEIARAALAEGYEVTLVASHVAPELLAEPRVRWVPVKAGRWWPSNLVKQQVFALKSAWWLRTHRAEYDVLHVNGFISWVPADVNTAHFVHGGWFKSPYYPFGLTKGLWSAYQYVYTRVNTALERWAYRRSSAITAVSQKVADEIAGLGIDSRKISVIYNGVDAGAFAHAQADRAAFKLPDDAFLLLFVGDLRTPRKNLGTVLKALTQLPANVHLAVAGYLPGSPYPDEARALGIDARVHFLGLVKNMPTLMRSVDAYVFPSRYEAMSLSLLEAMAAGLPVVTARTAGGAEIITRDCGIVLEDPDDPAALAQAIGSLAASRETCRAMGEAARELMTRFGWAHMGAQYVALYRRIGEPSQPVAFERADDALTQEQSC

SEQ ID NO: 3466 - protein, 344 aa, Arabidopsis lyrata subsp. petraea
LNSKFVRDEDERPKVAYNEFSDEIPVISLAGIDDVDGKRGEICRQIVEACENWGIFQVVDHGVDTNLVADMTRLARDFFALPPEEKLRFDMSGGKKGGFIVSSHLQGEAVQDWREIVTYFSYPVRNRDYSRWPDKPEGWVKLTEEYSERLMSLACKLLEVLSEAMGLEKESLTNACVDMDQKIVVNYYPKCPQPDLTLGLKRHTDPGTITLLLQDQVGGLQATRDNGKTWITVQPVEGAFVVNLGDHGHFLSNGRFKNADHQAVVNSNSSRLSIATFQNPAPDATVYPLKVREGEKPILEEPITFAEMYKRKMGRDLELARLKKLAKEESDHKEVAKPVDQIFA

SEQ ID NO: 3467 - protein, 338 aa, Halobacterium sp. NRC-1
MSRDQAAMGHDVTVLTVTDDDSLPRHEQRDGYTVVRRKPTVELLGNEISAGVAKFLRNADDFDVVHAHSHLYFSTNLAALKRRLGETPLAITNHGLYSQNAPEWLFDAYLKTVGRWTFNQADVVFCYTDEDRERVREFGVDSRIEVVPNGVDTERFTPDGPTSDLIDHDGPVVLFVGRLVEGKRPQDAVKAVSRVAEDMDVKLYVVGDGPMREELEEMSGEETVFLGQLPYDEMPAVYRAGDVLVLPSRAEGLPRTVLEGFASGVPVVASNLEHTKAVIQKGGQTVDVGNVDGYARAIQEVIDDRETRQVGRGVVVKTFQWKDTARTTTEILQAVSSA

SEQ ID NO: 3468 - protein, 372 aa, Gluconobacter oxydans 621H
MKILEITNVDFALRQFLLPLMRELRDAGHDVQGACAEGSHLEPVRAEGFTVHGVPMARSFSPMAQYKAFVALVRLIRREKPDLVHGHMPISGILARFAARLCGVRVVAYTCHGFLFNQPGSWRRRMLSLILEWAAGRITDLYMTVSREEARDARRLHLNRNSIAIGNGRDPRRYHPDPETRARLRRELGVPEDRPVVIVVSRLVRHKGHPELLRAMEDLPEAELWVVGERLPSDHGADLTTAFACARDRLGPRLRMLGYREDVPELLRAADVFALPSHFEGLPMSVIEAMLTGLPVVATDVRGPREQVLDGKTGFLVPPGLSRPLAKALRTLTQDAALRQKMGAAGRQVALEAYDERHILKHVVALMEKTCS

SEQ ID NO: 3469 - protein, 204 aa, Odontella sinensis
MTNFPKIGKTPPNFLTIGVYKKRLGKIRLSDYRGKKYVILFFYPANFTAISPTELMLLSDRISEFRKLSTQILAISVDSPFSHLQYLLCNREEGGLEDLNYPLVSDLTQTITRDYQVLTDEGLAFPGLFIIDKEGIIQYYTVNNLLCGRNINELLRILESIQYVKENPGYACPVNWNFGDQVFYSHPLKSKIYFKDLYSPKKSS

SEQ ID NO: 3470 - protein, 791 aa, Bradyrhizobium sp. ORS278
MQDHTAPASLENAIALQKFGVGQPVRRKEDDTLVRGHGKYTDDFNLPGQAHAWIVRSSHAHGIIKGIDTAAAKAMPGVLGVWTGADLAAAAYGPFTCGLPLKGRDGSPLLQTNRPALVTDKVRFVGDPIAFVVAETAAQARDAAEAVEVDIEPLPAVTNAEEATKPGAPQLYDHIPNNVALDYHYGDTAKIDEAFAKAAHVTKLDIVNTRVAVVSMEPRVALAAFDGKTERFTLQVPTQGVSGNKATLAKILNVAPEKVRILTTNVGGSFGMKNVSYPEYICILHAAKELGRPVKWRDERTTAFLSDSQGRDQIIHGELALDADGKFLAVRLSGYGNLGAYIMGVAPLPLSLNTGKNLASVYKTPLLSVDIKTVLTNVTLMGAYRGAGRPEANYFMERLIDTAAREMGIDRLTIRKRNFIKPSQMPFPAASGVTYDSGDFAAVFEKALQVSDYAGFAKRKRESRKQGKLRGIAVGSYLEVTAPPSGELGKITFDADGGVTLTTGTLDYGQGHATPFSQVLSEQLGVPFEKIRLEQSDSDLVRFGNGTGGSRSITATGQAIVESSQLVIAKGKQAAAHLLEASEADIEFAGGRFTIAGTDRSIDIMELARRMREGKMPDGVPASLDVDHNSTATESTFPNGCHVCEVEIEPDTGVAHIVGYTAINDFGTVINPMIVAGQLHGGVAQGIGQAMMEHLRYDESGQPITGSLMDYALPRASDVPMMTVDNHPVPAKSNPLGTKGCGEAGCAGSMASVINAVIDALSDYGVKHLDMPLTAEKIWRAIQDGKAKTAA

SEQ ID NO: 3471 - protein, 346 aa, Sordaria macrospora
EIGPYRLKDENTLVYNDGAWNEFANVLFVDNPVGTGFSYVDTNAYIHELTEMASNFITFLERWFALFPEYEHDDLYIAGESYAGQYIPYIAQAIIERNKNAGPVNHKWNLAGLLIGNGWISPKEQYEAYLQFAYEKGIVKKGTDLATRLENQQRLCQLKITESPDKIDYTECEEILQDMLQQTAGGVGASGKPQCYNMYDVRLKDDYPSCGMAWPPDLKSVTPYLRKKEVIKALNINENKSTGWTECNGQVGLNFHPKTKPSITLLPDILSSGVPILLFSGAEDLICNHLGTEALISNMEWNGGKGFELTPGTWATRRDWTFEGEPAGFWQQARNLTYVLFYNSSH

SEQ ID NO: 3472 - protein, 799 aa, Mycobacterium smegmatis str. MC2 155
MTTLENPVERPEDTAVNDAKPCGHGRMLRKEDPRFIRGRGNYVDDVKLPGMLHLAILRSPYAHATINSIDVTAAQAHPKVKAVVTGADLAAKGLAWMPTLSNDVQAVLATDKVRFQGQEVAFVVAEDRYSARDALELIDVDYEPLDPVIDARHALDPGAPVIRTDLDGKTDNHCFDWETGDAAATDAVFAKADVVVKQEMVYPRVHPAPMETCGAVADLDPVTRKLTLWSTTQAPHAHRTLYALVAGLPEHKIRVISPDIGGGFGNKVPIYPGYVCAIVGSLLLGKPVKWMEDRSENLTSTGFARDYIMVGEIAATRDGKILAIRSNVLADHGAFNGTAAPVKYPAGFFGVFTGSYDIEAAYCHMTAVYTNKAPGGVAYACSFRITEAVYFVERLVDCLAYELKMDPAQLRLQNLLKAEQFPYTSKTGWVYDSGDYEKTMRLAMEMVDYEGLRAEQAEKRKRGELMGIGMSFFTEAVGAGPRKDMDILGLGMADGCELRVHPTGKAVVRLSVQSQGQGHETTFAQIVAEELGIPPEDIDVVHGDTDQTPFGLGTYGSRSTPVSGAAAALVARKVRDKAKIIAAGMLEASIADLEWDKGSFHIKGDPSASVTIADIAMRAHGAGDLPEGLEGGLDAQICYNPSNLTYPYGAYFCVVDIDPGTAVVKVRRFVAVDDCGTRINPMIIEGQIHGGLVDGIGMALMEMIAFDEDGNCLGGSLMDYLIPTAMEVPHFETGHTVTPSPHHPIGAKGIGESATVGSPPAVVNAVVDALAPYGVRHADMPLTPSRVWEAMQGRATPPI

SEQ ID NO: 3473 - protein, 153 aa, Methylobacillus flagellatus KT
MVTLDINGESRQLDVPNEMPLLWAIRDVAQLTGTKFGCGMALCGACTIHLDSEPVRACVTPVSAAVGKKITTVEAVGEDKVGKAVQAAWLELGVAQCGYCQAGQIMSATALLRSTLHPTDEDIDEAMSGNICRCGTYPRIRAAIKLAAKEGAK

SEQ ID NO: 3474 - protein, 187 aa, Acinetobacter sp. ADP1
MSLINTEIKPFQATAYQNGQFIDISEADLKGKWSVVFFYPADFTFVCPTELEDLADQYAEFQKLGVDIYSVSTDTHFTHKAWHDTSDAIGKIQYAMIGDPTWTISKNFEVLIEAEGLADRGTFVIDPEGKIQIVEINAGGIGRDAQELLRKVKAAVYVYNHPGEVCPAKWKEGDATLAPSIDLVGKI

SEQ ID NO: 3475 - protein, 436 aa, Oryza sativa Japonica Group
MVIGAEIKDEMEEAPPLLLDEAARPRRVALFVEPSPFAYISGYKNRFQNFIKHLREMGDEVIVVTNHEGVPQEFHGAKVIGSWSFPCPMYGKVPLSLALSPRIISEVAKFKPDIIHASSPGIMVFGALAIAKLLGVPLVMSYHTHVPVYIPRYTFSWLVEPMWQVIRFLHRAADLTLVPSVAISKDFETAHVISANRIRLWNKGVDSASFHPKFRSHEMRVRLSDGEPEKPLIIHVGRFGREKNLDFLKTVMDRLPGVRIAFIGDGPYRSELEKMFEGMPAVFTGMMQGEELSQAYASGDVFVMPSESETLGQVVLESMSSGVPVVAARAGGVPDIIPEDQEGKTSFLFTPGDLEDCLGKIQLLLTDKEFRDNMGMTARAEMEKCDWRAASKKIRNEFYNAAIWYWRKKRAELIKPLQWLAQMFLPAPEVNRITQH

SEQ ID NO: 3476 - protein, 322 aa, Vibrio vulnificus YJ016
MSKIYEDNSLTIGNTPLVRLNKVSNGKVLAKIEARNPSFSVKCRIGANMIWEAEKEGKLKPGVELVEPTSGNTGIALAFVAAARGYKLTLTMPESMSLERRKLLKALGANLELTEAAKGMKGAIAKAEEIVASNPEKYLLLQQFNNPANPEIHEKTTGPEIWEATDGAIDVFVAGVGTGGTITGTSRYIKGEKGKQILSVAVEPTESPVISQALAGEEIKPAPHKIQGIGAGFIPGNLDLSLIDRVEKVTSEEAIEMARRLMEEEGILAGISSGAAVVAANRLAELPEFEGKTIVTVLPSSGERYLSTALFAGIFTEKENQQ

SEQ ID NO: 3477 - protein, 401 aa, Nitrosomonas europaea ATCC 19718
MRILHILDHSIPLHSGYTFRTLAILKEQRDLGWETFHVTSAKHTGSVALEEEVDGWHFYRTPEHSRFASRLPILNQIAVINGLARRVADIVRIIKPDLLHAHSPALNAIPALIAARKASIPVIYEVRAFWEDAAVDHGTSSEWGVRYRLTRGLENFALRRVDAITTICEGLRNDMIGRGIAPEKITTIPNAVDIEKFAASRPANESLKEQFGLKSKRIIGFIGSFYAYEGLDILLRALPIMLLQHPDLRVLLVGGGPQDGQLRQLASQLGIGDKVIFTGRVPHDKVQDYYDLIDVLVYPRLSMRLTDLVTPLKPLEAMAQGRVLAASDVGGHQELIRDNHNGILFKSGDPNSLAQKVGELINVPGRWEDLRRAGREFVETERNWRKSVAKYQFIYSNLLNK

SEQ ID NO: 3478 - protein, 198 aa, Helicobacter pylori
MVVTKLAPDFKAPAVLGNNEVDEHFELSKNLGKNGVILFFWPKDFTFVCPTEIIAFDKRVKDFHEKGFNVIGVSIDSEQVHFAWKNTPVEKGGIGQVSFPMVADITKSISRDYDVLFEEAIALRGAFLIDKNMKVRHAVINDLPLGRNADEMLRMVDALLHFEEHGEVCPAGWRKGDKGMKATHQGVAEYLKENSIKL

SEQ ID NO: 3479 - protein, 303 aa, Bordetella pertussis Tohama I
MSTPTYPTIEQTVGNTPLVRLQRIPGAAGQARGNVILAKLEGNNPAGSVKDRPALSMILRAEERGEIHPGDTLIEATSGNTGIALAMTAAMRGYRMVLIMPDNLSLERRAAMTAYGAELILTPAAKGGMEYARDLATAMQAEGKGKVLDQFGNPDNPRAHIEGTGPEIWNQTDGRVTHFVSAMGTTGTIMGVSTYLKSRNAAVQVVGAQPAEGSQIPGIRKWPEAYMPKIFDRALVDAYESIAQAEGETMARRLAAEEGIFAGISSAGALVAALRVAERVENATIVFIVCDRGDRYLSTGVFN

SEQ ID NO: 3480 - protein, 399 aa, Bacteroides thetaiotaomicron VPI-5482
MHILILPMYYPEKDSSPHRGYMFFEQAMQLAKSGCKVGLAFTEQRPLKNFTWKRFRKESHFQISAEDNGSFVTMRLHAWNPKLSTRAGGIIWSLLTVLLVRKYIRTYGRPDLIHAHFGTWAGYAARLVYKWYKVPYVITEHASSINGNQTTPSQAVILKKAYSEARKIICVGTKLKRSLCAYVSDPDKVTVIPNFVDTNTFAFSPHRTEKKKHFTFISIGNLNKRKGFWDLLTAFHWAFKDMPHVSLIIAGDGEEMQPLKKLIQSLHLQEQVKLTGRLSREELSGLLGTCDAFVLASFAETFGIVFIEAMATGLPAIGTICGGPEDIITPESGFLIRPGDVDALAAKMKTLYDTYESFDKEKIRQSIVSRFDFQLAGQKLRQVYSEALEMSKPPKASES

SEQ ID NO: 3481 - protein, 338 aa, Ralstonia solanacearum GMI1000
MIAKSIVDCIGGTPLVQLARLYDGRKAEVFAKLEMLNPAGSIKDRPARYIIERGLAEGSIAPGTHIIESSSGNLAIALAMVCRIKGLRFTAVVDPKISPTNLKILRCYGAGIERVTRKDSQGGYLETRIERVRQMLASEPGAVWINQYGNPRNWESHFHGEGDEIARALDRPADMLVLGVSTSGTVLGIARRLRREWPGLRVVAVDAVGSVLFGAKPGPRELPGIGASRVPELLCRDDIDDVIHVDDYDAAMGCRRLLEREGIFAGGSSGAVVVAIDRLLARATRPLRIVTLLPDRGERYLDSVYDDEWLARIAASRAGGAVSAASPSLHVPSLEEVL

SEQ ID NO: 3482 - protein, 325 aa, Alkaliphilus metalliredigens QYMF
MKMRGVGIGSAFYGTGYGNGFPDISRCQVELQKDGKVAVYVGATEVGQGAKTIMSQMAAEVLGLPLEDIIFSCEDTRLTPDAGTAAASRQTYNTGNAIKKACENLRQRLIDVAVAEFKFNSDVGVTMKNGLVYFKTFPSKSITLQEIASKFVEVPLREEGVFTAQTTKMDEETGQGAPYWPYTFNVYGIILEVDTETGIVDILKAVCAQDVGRAINPELIEGQMDGGFAMGLGYALMEDLNLQQGQMKHKRFSNYLIPTALDIPELEKIIIEDPESTAPFGAKGIGEPVMLGVAPAILNAIYDAVGVRITEIPVTPQRLLKALKK

SEQ ID NO: 3483 - protein, 470 aa, Physcomitrella patens subsp. patens
MASTYLKGIQGADVSNRVESLPGQPPVKFKQYAGYITVSESHKRAFFYWFVEADHEKAASQPLAFWFNGAGPGCSSVGVGALEELGPFFPNYNGTGLVRNKHSWNKLANMVFIESPASVGYSYSNTSSDYSYFSDNLTAQDNLAFTLGWYDKFPEYKKNELYLTGESFAGHYVPELAQQILNYNEKSTGFKINLKGFAVGNPATDAYSDNLGATDFYHSHNLISDETYHKLKENCDFAFDLPVDYSLHNATCLNTSSYALDVVMREINIYNIYGPHCNPPAKSGQNVTSRQLRYKKLHWHLTSGVLQRMGMVQLAGVNPCAPDNVTPYLNLPEVKVALHARDDINWTQCSRVVGANYTIPDYTRSILPLYRELLTKGIRIWVYSGDTDGVVPTTGTRYWLKKLNLPVQTAWYPWNYSSQVGGWSQIYENLTFATVREAGHEVPTYQPGRALKLFKCFLKGQSLPKFNYRK

SEQ ID NO: 3484 - protein, 311 aa, Propionibacterium acnes KPA171202
MAKIANDVTELIGNTPLVKINKLFPDSQATVLAKLEFYNPASSVKDRIATSIVDAAEASGQLNPGGTIVEATSGNTGVGLALVGAARGYKVIITMPETMSKERRAIIRLLGAELVLTPGADGVPGANSKAAEIVENTPGAILASQFDNPANPAIHHDCTGEEIWNDTEGEVDAIVAGIGTGGTISGAGKYLKEKDPEIKIFGAEPAESPVITKGDKAPHKIQGWGPGFVPDNLDKSVVDGILLVPGDEAIAFARRAAAEEGIITGISGGGALQAAGQVVARPEFAGKTIVVVIADTGERYLSTALFEGLLD

SEQ ID NO: 3485 - protein, 157 aa, Daucus carota
MSIIPSFFGGRRSNVFDPFSLDVWDPFKDFPLVTSSASEFGKETAAFVNTHIDWKETPQAHVFKADLPGLKKEEVKVELEEGKVLQISGERNKEKEEKNDKWHRVERSSGKFLRRFRLPENAKVDEVKAAMANGVVTVTVPKVEIKKPEVKAIDISG

SEQ ID NO: 3486 - protein, 393 aa, Nocardioides sp. JS614
MRLRRHHTEPHELPTAPTDRLRVLVVAESFLPQVNGVTNSVRRVLDHLAAEGHPAELVAPTGPATYAGFPVTRARGASLPFYRDFRIGLETRARLRAVMVRFRPDVVHVASPATLGHQAVRAAEELGIPTVAIYQTDLVGFAERYDIAGGQRAMAYLTRRIHQGVDRTLAPSSTSLRQLADLGIHATALWPRGVDLQQFHPVHRSVELRQQLAPEGRLLIGYVGRLAAEKELDLLTCLAGDARYRLVIVGGGPEAPRLRSLLPDARFLGVLHGDDLSRAYASLDMFVHTGRHETYCQSAQEALASGVPVVAPRAGGPVDVVADGVAGFLYEPGSRAELRSYVDALASDRLFRRRMGLAARRSVAGRSWDGVNDALVHHYRDVIAARATHRRAA

SEQ ID NO: 3487 - protein, 252 aa, Triticum aestivum
HGTKGVDTPGVPLSLPKTQEAEERLRRVPFTPIQPRWHSPASTACCKPSVLLAPRASSLSSSQARLCRPSTSAAFHGLRAPASAFALTPAPRRRAASTGIVCGKVSKGSVPPNFTLKDQDGKTVSLSKFKGKPVVLYFYPADETPGCTKQACAFRDSYEKYKKAGAEVIGISGDDAASHKAFAKKYRLPFTLLSDEGNKVRKEWGVPSDLFGTLPGRQTYVLDKKGVVQYIYNNQFQPEKHIGETLKIIQNL

SEQ ID NO: 3488 - protein, 638 aa, Arabidopsis thaliana
MANRGGEYLYDELWKLCAGPLVDVPQAQERVYYFPQGHMEQLEASTQQVDLNTMKPLFVLPPKILCNVMNVSLQAEKDTDEVYAQITLIPVGTEVDEPMSPDPSPPELQRPKVHSFSKVLTASDTSTHGGFSVLRKHATECLPPLDMTQQTPTQELVAEDVHGYQWKFKHIFRGQPRRHLLTTGWSTFVTSKRLVAGDTFVFLRGENGELRVGVRRANLQQSSMPSSVISSHSMHLGVLATARHATQTKTMFIVYYKPRTSQFIISLNKYLEAMSNKFSVGMRFKMRFEGEDSPERRYSGTVIGVKDCSPHWKDSKWRCLEVHWDEPASISRPNKVSPWEIEPFVNSENVPKSVMLKNKRPRQVSEVSALDVGITASNLWSSVLTQPHEFAQSCITSQWSSPQQCHRDANEDAKKSDWLNNSYSVSNVAKDSTLNDQMVSPVEQKKPETTANYRLFGIDLMSSSLAVPEEKTAPMRPINISKPTMDSHSDPKSEISKVSEEKKQEPAEGSPKEVQSKQSSSTRSRTKVQMQGVPVGRAVDLNALKGYNELIDDIEKLFDIKGELRSRNQWEIVFTDDEGDMMLVGDDPWPEFCNMVKRIFIWSKEEVKKMTPGNQLRMLLREVETTLTTTSKTDNHSN

SEQ ID NO: 3489 - protein, 698 aa, Sulfolobus solfataricus P2
MRRIDAYDLLIGKGNYVDDISYKGKYAVFIRSPYAHARIVNINKEDAERRGALVLTGKDLVSRNVESGEREGASLTTPLMAINKALYVGQPVALVIANDPYEATDLAELVQIDYEPLEGIGNIEKALENKVTVFEDLKTNVVREQTFEFGKLSTQGRHLELDLYWSRSSGNPIEPYGAITIPTDDSLTIISNQQAGNVVSNEIQKALGVKVVHKNARQGGSFGEKFSLVRYLTVLGFAALKFKVPIKWIETRNEHLMASNGSGPERKFKIHAYYSSDGRVNSLDVHIWEDVGASRDAGQPFKPLAFLTGPYKIGGIRYTGTLVATNKNPAGAFRGAGTPPHTWALERTMDAIADDLGISKADVRKINAIDTFPYDSGFAYYDSGNPRGLLDLALSRKDIFALRNKNTGVGLALSTDPSTPSGSERVKIKVKNNKIVIGLGFGPEGQGNEHSAVVMASRLLGITPDDVAYEILDNTELPTSFGPGGSRMAIYTFGAVSGAVEELKARLRRKAEVVLNDKVIDYRDGYFIGENGGKVRITSLEGEEVDFTYTLQGKYRFNAYPFACDLAVVRIEDGKIKPIKHVVYIDPGTPIDEDLVKEQVIGGTAIGISLALYEHYVYDENANLLTTNLADYGMPTAADLPEIEVNIVPTPSPSTPYGAKGIGEIPVGIAAAAVTSAIEDVIKRRINRVPVSLEDLFE

SEQ ID NO: 3490 - protein, 255 aa, Oryza sativa Japonica Group
MDGHGDGGGQHDSQRYSRRRGCHETSAKAAQSFVAMPGLTIGDTVPNLELDSTHGKIRIHDFVGDTYVILFSHPGDFTPVCTTELAAMAGYAKEFDKRGVKLLGISCDDVQSHKDWIKDIEAYKPGNRVTYPIMADPSREAIKQLNMVDPDEKDSNGGHLPSRALHIVGPDKKVKLSFLYPACVGRNMDEVVRAVDALQTAAKHAVATPVNWKPGERVVIPPGVSDDEAKEKFPQGFDTADLPSGKGYLRFTKVG

SEQ ID NO: 3491 - protein, 195 aa, Chlamydia trachomatis D/UW-3/CX
MGSLVGRQAPDFSGKAVVCGEEKEISLADFRGKYVVLFFYPKDFTYVCPTELHAFQDRLVDFEERGAVVLGCSVDDIETHSRWLAVARNAGGIEGTEYPLLADPSFKISEAFGVLNPEGSLALRATFLIDKYGVVRHAVINDLPLGRSIDEELRILDSLIFFENHGMVCPANWRSGERGMVPSEEGLKEYFQTMD

SEQ ID NO: 3492 - protein, 217 aa, Oceanicola granulosus HTCC2516
MSLRLNDTIPDLTVETDQGTFSLHEFVGDSWTILFSHPKDFTPVCTTEFGAVARLNDAWEARGVKVIGVSVDKVEEHKRWKSDIETVAGGPAGFPIIADEGLEVSKAFDMLPADAYLPDGRTPADSATVRAVYIIGPDKKLKLSMTYPMTVGRNFAEVLRAVDALQTSSRENVATPADWTPGEDVIVPVAVSDEDAIAKYGEIETVLPYLRKAKLPA

SEQ ID NO: 3493 - protein, 339 aa, Zea mays
MVVLTKGELEQIALPAVQRASPPPPAAVPEVDLAAGDAAAAARAVAKACEDHGFFKVTGHGVPPHLLARLEAAAAAFFALPQREKDRAAGCPFGYASKRIGANGDLGWVEYLLLAVTAAGAAAAPGSACEGAEPSCFRAVLDEYVAAVRRMTCTVLQLMAQGLGLDDRDVFSRLVLDRDSDSMLRVNHYPPRPQPAAAAETRRLTGFGEHTDPQIISVLRSNDASGLEITLRDGTWVSVPSDTESFFVNVGDALQVLTNGRFRSVRHRVMVSSARPRVSVIFFGGPPPRERLAPLPGLVDREGGRRRYREFTWREYKNSAYRTKLADNRLCSFETMATS

SEQ ID NO: 3494 - protein, 144 aa, Microcoleus chthonoplastes PCC 7420
MALSIGDKAPAFTAKDDAGNTVSLSDLAGKTVVLYFYPKDDTPGCTKEAQSFRDNYAEYQGKDMVVLGVSMDDEVSHKQFKEKYGLPFQLLADPDGTITKAYDVEGGGYSKRVTYVINGEGTITYVDEKVKTDSHAKDILASMS

SEQ ID NO: 3495 - protein, 419 aa, Synechococcus sp. PCC 7335
MKIAIISSGFLPVIDGVTVSLFHRVRVLSKLGHQVLILCPDYQPVASVYPSWRDYHGEILPGVRVVNLPSEPFMGVEFERNFSRRANRRLNQELAMFDPDIVHVDEPDRIFLGTLRASGVAYAKVHNIPCVGFYHTNFIDYIEDFWPLPSGLIAFLQWFSMLFIRPVFHSYDAILVSSPVTAEKMALMKVRNVLCDRFLGVDVQAFQTQRPDPNFFAKTYKIEGVQDKTKLVFLGRLTPDKGWAFTLRSLAAWAGDPNNAPLLGQIAIIIAGDGELRSTVLEKLQPLANSTGLSVHLLGRIAPNAVPSLLANSDIHITTSEKETLGLTVLEAFAAGIPVIAPAKGGVKTHIRDGKNSLLFEPQNSESFGQALTKLVSDVNLRCQLGQQAQQDVVCYDWENVVPTLLSTWQNQISLHSSS

SEQ ID NO: 3496 - protein, 972 aa, Nocardioides sp. JS614
MSTMIDLELHLNGAPRTVTCAPGDSLLSVLRRLGCFSVRFGSETGETGAAAVLVDGRLLAADVLLAAQAAGHEVTTVESLNVATGELHPIQAAFVESGALQSGYSAGAMVLATQALLARDPDPSEWEIRDAFSGILDRETGYVKVVDAVQRAAALLRGEKPEPMAPVVVGRLTDGDGGTVPDAPAAMPRLVPAADVPSMQVVGTPAPKVDALKLVKGNPAFVDDIELRGMLYAKVLRSPHAHARIVAIDDSEARALPGVHAVLHTFNTARVKYASGGQSWPNPRPWDQVSFDDKVRHVGDRVAAVAAETVAIAEEACRRIKVTYDVLPAVFDEVEAIGPGAPVIHDETDTEGIADAARNIPRRVNGQTVTDDELAAAFADAEHVFEQTFHVQQQQQTPIEPHITIGWLDADERLTLRSSTQVPFHTRRMVAPLLGLPVKQIRVIKPRLGGGFGGKQEMLLEDVVGHLVLATRRPVRLELTREEEFVSSRIRHAQTITFRSAVDADGRLLALDHHVVGNTGPYATHGFTVQSVSGQRGLSQYNCPAKRYTADVAYTNRPVAGAFRGYGAPQALFALESHMDDIARSLGLDPIELRRRNWVRTGDPLDILPTLGERGAAEIQGEVPRVTSCATDECVAQARRAIGWERRNDPAWKQPADRPSIRRGIGFALCMQATAIPNLDMGGASIKMNDDGSFNLLVGATDLGTGADTVLAQIAAEVLGVEASDVVVYAADTDLTPFDVGAYADSTTYISGMAVKKAAEAVRERIVLRAARLLELAGPAKVELRNKQAWAPDGRCVTLQDVALHALHIEDQEQIMATASHVSGESPPPFAAQTAEIEVDVETGQVTVTKLVMAVDAGVVINPTTASGQVEGAMVQALGYALTEDLVLDDDGRAVNARFGPYWIFRPDDTPPMEVFLVQTMEPSGPFGAKSVGEIAIDGVAPAVRNAILDATGATVNELPLTPERVWRALHA

SEQ ID NO: 3497 - protein, 386 aa, Streptomyces kanamyceticus
MHLLVRALVEEMAGRGVPHRVLTMSPPKVPKDIRIGQRIKVHARRLPVLPIPSDLEGYFGLVGAWAKGSLLWVLRNRKRLRREIGARVHAHCDGSGAAAFYPYLMSRILGVPLVVQIHSSRYLSQHPTTLFERVTDPIAKWAERHAVRKAAAVLMLTDRARDEMRRKAQLPAERVHRLAYLASDQFKDADTEARRAELRERYGLDDRPIVLYVGRIAAEKGVEYYIEAAAELTRRGRDCQFVIAGDGPARPDLEKLIGARGLRDRVTITGFMSHEFIPSMISLGELVVLPSRYEELGIVILECMTMRRPLVAHDVNGVNKLIEDGTTGIVVPPFRTPEMADAVERLLDDPELRERMAENAAPLPAAKYSLSAAGDQLAGIYREIGL

SEQ ID NO: 3498 - protein, 230 aa, Glycine max
MASTVVPYMSFYAHTSSGRMNKFSNVKLLPVSSTRNRTFSYSVKAMAGGEASLQKSNQHQQQVQPKMKVPQGSPKVLLNQFPVARTVQQMMDTMERMGEDLLVYGRTSPVIVAGDDEYSKGKIPWAIKEGQKDYKMRFNMPGMNKNDVKVWVEENMLVVKAEKALEENHEGRANGNEDWPANSYGRYNHRIALPENIEFDKIKAQVKDGILYVTIPKSSTSAKIIGIDVQ

SEQ ID NO: 3499 - protein, 152 aa, Thiomicrospira crunogena XCL-2
MKLSLVVNDKNYSVDVDSDTPLLWVLRDHLQLNGTKFGCGEGLCGACTVLIEGKPIRSCSYPISSLNGQTVTTIEGVNPNHPVVQAWTKLDVPQCGYCQSGQILSAVDLLDKTPNLTDEDVQSAMRNICRCGTYPEIKKAVELSTELKRKEA

SEQ ID NO: 3500 - protein, 704 aa, Mycobacterium smegmatis str. MC2 155
MTLREPRAIGQPVIRKESRAKVTGAAPYAFEHIVDNALYLHPVQATIARGRVVAMDVAAARALDGVRGILTVFDAPELADTSDGEFAILQDDRVHFRGQIIGGVLAESAETAREAAALVRVEYLQEPHDTELRADHPGLYTPDEVNGGEEPDTDDGDVEAALAQAAVTVDETYETPIEHNNPMEPHACIAQWNLGDSGKPAVVLYDSTQGVHAVRKALAPIFGLEPEQIRVIAPHVGGGFGSKGAPHAHNVLAILAAQRSNGRPVKLALTRQQMFSLVGYRTPTIQRIRLGADHDGRITALVHDVVEQTSAVKEFAEQTAITSRKMYSAASRRTTHKLAALDVAIPFWMRAPGECPGTYAAEVAMDELAVACGLDPIELRVRNDPEVDPETGKPWSGRHLVDCLRLGADRFGWAARDPRPAARRDGEWLIGTGVAAATYPGKAMPGNSARITYAAEGRYTVQIGAADIGTGTWTTLSQIAADALACDLAAVDLQIGDTDLPEASVAGGSSGITSWGSAIVAAARQFRADHGDPPAVGATTVAQSPENPDADGVTMQSFGAHFVEAHVNADTGEIRVPRMLGVFSVGRVINARTLRSQLIGGMTMGLSMALHEESVRDPRFGHVVTQDLATYHISAHADVADIDAIWLDEADEYLNPMGSRGAGEIGIVGSASAVVNAVYHATGVRVRNLPVTVDKVLAGLPKLV

SEQ ID NO: 3501 - protein, 358 aa, Solanum pinnatisectum
MASTLTALANEKTLQTSFIRDEEERPKVAYDKFSDEIPVISLQGIDDINGSRRSEICEEIVNACEDWGVFQVVDHGVDAELLSQMTKLAKEFFELPPDEKLRFDMSGGKKGGFIVSSHLQGEVVQDWREIVTYFSYPIRARDYSRWPDKPQGWIAVTEKYSEKLMDLACKLLEVLSEAMGLEKEALTKACVDMDQKVVVNFYPKCPEPDLTLGLKRHTDPGTITLLLQDQVGGLQATKDNGKTWITVQPVEGAFVVNLGDHGHYLSNGRFKNADHQAVVNSNSSRLSIATFQNPAPDAKVYPLKIREGEKAIMDEPITFAEMYRRKMSKDLELARLKKQKKQTEEAQLESKPIEEILA

SEQ ID NO: 3502 - protein, 348 aa, Ipomoea alba
ETLAGSGIERIPKEYIRPEEERRSIGDIFEEEKMGGGPQVPTVDLKGINSDDLEVREKCREELRKAAVDWGVMHLVNHGIPEELTGRVKAAGEGFFAQPIEEKEKYANDQAAGNVQGYGSKLANNASGQLEWEDYFFHCIFPQDKTDLSIWPKTPSDYIAATREYAKQLRALATKVLAVLSLGLGLDEGRLEKEVGGMEELLLQMKINYYPKCPQPELALGVEAHTDVSALTFILHNMVPGLQLFYGGKWVTAKCVPNSIIMHVGDTVEILSNGKYKSILHRGVVNKEKVRVSWAVFCEPPKDKILLQPLPETVSEAEPPRFPPRTFAQHIKHKLFRQSDQGADTPKT

SEQ ID NO: 3503 - protein, 423 aa, Alkaliphilus metalliredigens QYMF
MTVKYEIVGKRAIRVDGRSKVTGQATYPEDLQMEGMCYGRTLRSEKPHAYFTLNTEKAEAIEGVLCILTSKDVPHNHHGVLLKDHEVFCAHKVRRVGDPMAFVVAENEKVAEQAMEAIEVSYEELQGVFDPEEAMADSAPQVHDKSNVIYHYKIRRGDIQEAFKQCHVVVEGEYRTDMVDHAFLQPESGIAYTEEDGTIVICVANQYPHFDQLEVAEALEVELDTIRIINPAVGGAFGGREDITLQIHLALATQRVGRPVKATYSREESFDAHSKRHGMKMKYRTGADQQGKLLAMEATVIGDTGAYASWAINVARKAGVHATGPYEIPNVKVDSYAVYTNNPFAGAMRGFGAAQTPIAHEQQIDEIGVKLGIDPITMRVINGFKTGSETATGQILEESAPFEECLRAVEEALRSYQGPGEGQ

SEQ ID NO: 3504 - protein, 162 aa, Alkaliphilus metalliredigens QYMF
MRDIILSVNGKSYKVTIEEEMRLIDVLRNKLGLLGVKEGCGEGECGACTILMDGVTVNACMVMAFQAEDKAIFTIEGLSDGVNLHPIQQAFIEIGAVQCGFCTPGMVLSAKALLDQNNYPTREEIREGISGNLCRCTGYNKMVDAIELAGELLRKGGNDSEV

SEQ ID NO: 3505 - protein, 288 aa, Alkaliphilus metalliredigens QYMF
MNVKKVYRGKTVAEVLELLEQYGSRSYVIAGGTDAIIQLREKHIDPEVMVDISSVKEIQFIRESQDEIVIGGGTNFTSISESPMLQGRVKGLAQAARMVGSPQIRNTATIGGNICNASPAADIVPPLLALEAEVVIEKKGEKRRIPLDTFLMGKGKLDLKPEELVTAICFKRPKDGQGLGFGKLGLRKALAISRIATAIFISIDEKGTCKEIKIASGAVGTRGLREREVETIFTGKVLTEEVIDEGLQQLSHVVGQRLAGRSTADFKATAVKGICRQALLAALASCQA

SEQ ID NO: 3506 - protein, 162 aa, Bradyrhizobium sp. ORS278
MTLTINGRDHQVDAEPDTPLLYVLRDDLALNAAKYGCGLGQCGACTVMIDGEAVFSCITPVLLLAGRKITTLEGLGTEEAPAPIQRAFIEEQAAQCGYCIPGMMMRAHALLQRNASPTDLQIRAELAPHLCRCGTHMRILRAVHRAADMVRRADAGTEGGRL

SEQ ID NO: 3507 - protein, 213 aa, Bordetella pertussis Tohama I
MGQLRLGDTAPDFEQKSSIGPLRLYDYLGDSWGVLFSHPADFTPVCTTELGYTAKLAGEFAKRNVKVLALSVDPVDSHTKWIDDINDTQSTTVNFPILADDDRKVSELYDMIHPNANATLTVRSVFVIDPAKKVRLTITYPASTGRNFDEILRVIDSLQLTDSHSVATPVNWKDGEDVIIVPSLKDEAVIKEKFPKGYKALRPYLRITPQPNK

SEQ ID NO: 3508 - protein, 243 aa, Triticum aestivum
MADANAPFALVSRLSPAARLPIRAWRAARPAPLSTGGRTRPLSVASAAQENRDNSVDVQVSQAQNAGNQQGNAVQRRPRRAGFDISPFGLVDPMSPMRTMRQMLDTMDRLFDDAVGFPTARRSLAAASEMPRMPWDIMEDDKEVKMRFDMPGLSREEVKVMVEGDALVIRGEHKKEAGEGQGEAAEGGDGWWKERSVSSYDMRLALPDECDKSQVRAELKNGVLLVSVPKRETERKVIDVKVQ

SEQ ID NO: 3509 - protein, 322 aa, Synechococcus sp. CC9311
MPIASDITALVGRTPLVRLNQLPQRSGCLAELVAKLESFNPTASVKDRIAGSMVQAAEEAGTISPERTVLIEPTSGNTGIALAMVAAARGYRLILTMPDTMSTERRAMLRAYGAELQLTPGNEGMQGALDLAVELVSEIPHAYLLQQFDNAANPAVHAATTAEEIWMDTDGQIDALVAGVGTGGTITGCARVLKQRNPDLKVIAVEPAGSPVLAGGAPGPHRIQGIGAGFVPAVFDQSLIDEILGVSDQEAMEVGRRLAREEGLLSGVSSGAAVAAAIRIGQRPEMAGKRIVVILASFGERYLSTPMFSASAATPAWRDGQL

SEQ ID NO: 3510 - protein, 423 aa, Synechococcus sp. CC9311
MDDLWVVLPHLGAGGAQKVALLAAEHFAAQGLRVRVITMIHGHPVLHALPDGVRHQELSPQLEVLKPWLGDGSNRSLLARGSRYLIANLIKVYRFMIRAQMVLIGPWLESHIRPGSSGLAAELFQLGTTTLLGDRLLQFRNLVEQEQPRRILALLTRTNIVCCLACWDLPVHVVVSERNDPARQRLGTFWALLRRLCYRRADVVTANTDGVLKALSRIGTWQRLELLPNPLPFGVISSAENGSERDLEVLAVARLKIQKGLDLLIRAFASIPEVRRLGWCLTVVGDGPERSSLENLVTKLGIDGVFFEGFRSDPQTFMQRAAIFALPSRFEGMPNALLEAMAAGLPCVVSDASPGPLEMITDGVNGLVVPHEDWPALAKKLEMLMEDQILRFRLGEAARQKLRSLDWSVVEPHWRSVLALPKL

SEQ ID NO: 3511 - protein, 159 aa, Daucus carota
MSIIPSFFGSRRSNVLNPFSLDIWDPFQDYPLITSSGTSSEFGKETAAFANTHIDWKETPQAHVFKADLPGLKKEEVKVEVEEGKVLQISGERNKEKEEKNNKWHRVEFSSGKFLRRFRLPENANVDEVKAGMENGVLTVTVPKVEMKKPEVKSIHISG

SEQ ID NO: 3512 - protein, 309 aa, Lentisphaera araneosa HTCC2155
MKANDVLELCGNTPLVKINKLTEGAYAEVYAKTESSNPGFCVKDRIAKAMIDDAIANGTLKPGMTVIEPTSGNTGIGLAMTCAVRGYKLILCMPDSMSVERRQLMRIFGAELVLTPGADGMKGAINKAAELAEDIDGAWIPQQFENASNPAIHEKTTAKEIIADMNGDFDYFVAGVGTGGTVTGCARTFKKEVPNVKIVAVEPETSAVLSGEGPGKHKIQGIGAGFIPGVMEPELLDEVIKVSDEQSGETARQLAQKEGILCGISCGASMTAALELAKRPENKGKKIVCILPDTGERYLSTWLFEDYKM

SEQ ID NO: 3513 - protein, 258 aa, Secale cereale
MACAFSASTVSTAAALVASPKPAGAPSACRFPALRRGRAGLRCARLEDARARSFVARAAAEYDLPLVGNKAPDFAAEAVFDQEFINVKLSDYIGKKYVILFFYPLDFTFVCPTEITAFSDRHEEFEKINTEILGVSVDSVFSHLAWVQTERKSGGLGDLKYPLVSDVTKSISKSFGVLIPDQGIALRGLFMIDKEGVIQHSTINNLGIGRSVDETLRTLQALQYVQENPDEVCPAGWKPGEKSMKPDPKGSKEYFAAI

SEQ ID NO: 3514 - protein, 143 aa, Medicago sativa
DPFSLDVWDPFKDFPFTNSALSASSFPQENSAFVSTRIDWKETPEAHVFKADLPGLKKEEVKVEIEDDRVLQISGERNVEKEDKNDQWHRVERSSGKFMRRFRLPENAKMDQVKAAMENGVLTVTVPKEEIKKPEVKSIEISS

SEQ ID NO: 3515 - protein, 380 aa, Zea mays
MASPDDPVLSACKKNLSHFRIKELKDVLHQLGLSKQGKKQDLVDRVMAVLLSQQDQGINEILANYRLLLPVSRKMQDPTNTVAVSRSHELGDSVTCKKKPDDSAQAVKVRCPCGDSKPNDSMIKCIDPQCNIWQHVGCVVIPDTEKSADNISPELPSCFYCEVCRLSRADPFWVTVNHLLLPILIGPSTVAADGSYTVQYTAKSFQLSRANREILQQAECNIQVWCILLSDKVPFRMHWPLHSDMQVNGIYVRVVNRQPTQKLGANGRDDGPLLTDYLKEGPNKISLSRNDTRTFCLGIRIAKRRSLEQVLNLVPKEQDGENFDDALARVRRCVGGGAEANNADSDSDIEVVADFVSVNLRCPILNELLIKWAIALIYVY

SEQ ID NO: 3516 - protein, 158 aa, Medicago sativa
MSLIPSFFGGRRSNVFDPFSLDVWDPFKDFPFNNSALSASFPRENSAFVSTRVDWKETPEAHVFKADLPGMKKEEVKVEIEDDRVLQISGERSVEKEDKNDQWHRLERSSGKFMRRFRLPENAKMDQVKAAMENGVLTVTVPKEEVKKPEVKTIDISG

SEQ ID NO: 3517 - protein, 375 aa, Synechococcus sp. WH 5701
MATQHPNPNRIAIFIPLRNAVSETFIRNHVDYLPYTTIPRHGTELGITDEKGTPIWRGANLVGRIIARLSPSLRDQLRDFLLSRHLRSLGVTAVLAEYGVTGCWLISACKRAQIPLVVHFHGFDAYVRDVITQYHQSYQDLFRSAAAIIVVSHAMREKLISLGATEEKLFLNPYGVNELLFESARPANQPARFLAVGRFVEKKAPYLTILAFHYVLQNVPEASLILIGEGPLLGPCKRLAQSLGLSGSVKFPGSRPPEYVAAQIKKSRAFVQHSLEADNGDCEGIPVAVIEAQMSGIPVIATKHAGIPDVVVDGSTGFLVEESDVKGMADAMIRIAKNPDLAGKMGIAARQRALSNYSLDRHINELAKIIERVRV

SEQ ID NO: 3518 - protein, 376 aa, Frankia sp. EAN1pec
MGPRVLVDATSVPADRGGVGRYVDGLVAALGAAGADMALVCQRSDEERYSRMAPRATVLSGPAAIAHRPARLAWEQTGLPLVAEQVNADVIHSPHYTMPLRAQRPVCVTIHDVTFFTEPEMHTAVKGTFFRSAMRTAVRRASRIIVPSKATRDELVRVLEGESTTTDVAYHGVDTTTFHPPTEEDRRRVRLRLGLGDTRYVAFLGMLEPRKNVPNLIRGWAEAVHWRDEPPALVLAGGSGWDDDVDAAVASVPSHLRVIRPGYLRFSDLPGYLGGSELVAYPSHGEGFGLPVLEAMACGAPVLTTPRLSLPEVGGDAVAYTQPDPDSIAREMSALLDDAERRAQLAAAGLARSHEFTWAASAEAHLASYARAVADA

SEQ ID NO: 3519 - protein, 377 aa, Aneurinibacillus thermoaerophilus
MKILQVNKFYPPVIGGVEKVVYDLVEGMCSLAEMEVLVANTEWKYVQEIEHKAKIHRVPSIGTYFSMPVAPTFPLWLKKIKTDIIHFHFPFPLGKLSYLLVDKIANIPAKTVVTWHSDIVRQKRFLKLYHPFLKRFLEKVDTIIATSPNMVEASPYLKEHKDKCRVIPLGIDVKEWEKTDKLFENVKKVREEVAIKPIILFVGRLVYYKGVEYLIEAMTEINASLFLVGEWPLKPLLQKRAEELGITEKINFLGGASKEQLVTYLHACDIFVLPSVERSEAFGIVQLEAMACGKPIVSTNLATGVPFVNQDGKTGIVVPPKDIKSLTQALTFLIENESVRKQYGERGKERVYEHFTREKMVQSVYTLYQELLEGGTT

SEQ ID NO: 3520 - protein, 232 aa, Pisum sativum
MAQSVSLSTIASPILSQKPGSSVKSTPPCMASFPLRRQLPRLGLRNVRAQAGGDGDNKDNSVEVHRVNKDDQGTAVERKPRRSSIDISPFGLLDPWSPMRSMRQMLDTMDRIFEDAITIPGRNIGGGEIRVPWEIKDEEHEIRMRFDMPGVSKEDVKVSVEDDVLVIKSDHREENGGEDCWSRKSYSCYDTRLKLPDNCEKEKVKAELKDGVLYITIPKTKIERTVIDVQIQ

SEQ ID NO: 3521 - protein, 522 aa, Ostreococcus tauri
MGRFRSLTARGLALLSHLTTSSIDAKSVAIEDALLERLTRREIDFSNLKHITEDARDDALIYGASSGTFKLNSTRDAHLFYTFFDRRGSGDGRASMNDSDDESPLIIWLTGGPGCASELASLYENGPYAMERDPKSGEARLGRRAHAWNDAGRLLYVDSPVGTGFSYTSKRADAARDETTVANDLLEFLSAFMLSRPELADVEVYVTGESYAGHYVPAFAHRIFEANKKGDNPVRFNLRGVAIGNGLTEPAIQYGAYADYSLGNDIVDAKAAAEAMKAYPACRKAIKACYRGDAGEKSNRATCIRALNACQIIPETLLENAASRFDGKAINVYDIRKSCDAELCYDFSAAEEWLNRADVQKALGVNKKWEMCDNRVHSDMMGDWMHEYEDMIPPLLEAGIRFMIYAGDQDFICNALGNERWVKAMKWSGRAAFTAEHPRPFVVSTSGDDEIIGGTVTESGKLSFVKVSQAGHMVPMDQPLNALTMIQRFVRGEPIARGDETTPVRGAAPRRAVRDSLRVASQ

SEQ ID NO: 3522 - protein, 384 aa, Musa acuminata
MDSVSPVTLDLNKEEGHCSNGAVVFDTSFLRRQAKIPESFVWPRNERPHPLEELEVPVVDLRGLFEGDEASISRAAEASRAACVRHGFFQVINHKVDAKVSGDALDAAGDFFKLPLSTKLRARRQPGSAWGYVGAHADRFASKLPWKETLTFGYDYGERGDGVVDYFTSKLGEGFEPMGRVYRRYCEAMKELSLSIMELLGISLGVGREYYRQFFEDGSSIMRCNSYPPCQEPELALGTGPHCDPTALTILLQDHVGGLQVFTEGKWQAVRPVRSALVINIGDTFMALSNGRYKSCLHRAVVNSERERLSLAFFVCPRGDRVVRPPRELLLLLEEEEEEEEEAVPRAFPDFTWTELLEFTQTHYRADTTTLQNFARRRFLASSP

SEQ ID NO: 3523 - protein, 238 aa, Triticum aestivum
MAAANAPFALVSRLSPAARLPIRAWRAARPAPLSTGGRTRPLSVASAAQENRDNSVDVQVSQAQNAGNQQGNAVQRRPRRAGFDISPFGLVDPMSPMRTMRQMLDTMDRLFDDAVGFPTRRSPAARARRRMPWDIMEDEKEVKMRFDMPGLSREEVRVMVEDDALVIRGEHKKEAGEGQGEGGDGWWKERSVSSYDMRLALPDECDKSQVRAELKNGVLLVSVPKRETERKVIDVQVQ

SEQ ID NO: 3524 - protein, 344 aa, Rhodobacter sphaeroides 2.4.1
MPVQPDRIEVIAPNLKRRLSGVTATIARLVPVQARLIGIAATGPGLPADLPHLPLWRLPFLPRDRWRVWHARRNTEMLLGIALRHLLRRRLKLLFTSASQRRHTGYTRWLIGRMDALVATSRRTASYLERPAEVILHGIDTDTFRPGDRAEVRARLGLPEAVLVGCYGRIRAQKGTDVFVHAMMRLLPERPGVAAVVMGRAVGEHQAFLDGLRREVEAAGLGQRILFRPEVTVDRMPDWYRALDLYVAPQRWEGFGLTPLEAMACGVPVVATRVGAFEELVSADTGRLVPPGDLAAMVAEVAALLDDAALCGRMAEAARARTLKGFRIEDEAAALVALYRRLLA

SEQ ID NO: 3525 - protein, 337 aa, Fusobacterium nucleatum subsp. vincentii ATCC 49256
MMGQEKMKYLENLVGKTPMLELIFDYKGEERRIFVKNESYNLTGSIKDRMAFYILKKAYEKNEIKKGAAIVEATSGNTGIAFSAMGVILGHPVIIYMPDWMSEERKSLIRSFGAKIVLVSREEGGFLGSIEKTKEFAKNNPGTYLPSQFSNPYNSEAHYYGIGLEIVNEIKSLNLNIDGFVAGVGTGGTVMGIGKRIKENFPNVKICPLEPLNSPTLSTGYKVAKHRIEGISDEFIPDLVKLDKLDEVVSVDDGDAIIMAQKLAKCGLGVGISSGANFIGALMLQNKLGKDSVIVTVFPDDNKKYLSTDLMREEKIKEDFLSKDITLKGIKNVLRIF

SEQ ID NO: 3526 - protein, 199 aa, Porphyra yezoensis
MISGPNCLRVGQLAPDFSATAVYDQEFKTLKLSDLKNKYIVLFFYPLDFTFVCPTEITAFSDKYNAFSELNTEVLGVSVDSEYSHLAWLQTDRESGGLGDLSYPLVSDLKKEISAAYNVLNSDGVALRGLFIIDPKGIIQYSTINNLEFGRSVEETLRVLQAIQYVQSHPDEVCPANWKPGDKTMNPDPIKSKNYFAAA

SEQ ID NO: 3527 - protein, 267 aa, Vitis vinifera
  misc_feature (229)..(229): Xaa can be any naturally occurring amino acid
  misc_feature (232)..(232): Xaa can be any naturally occurring amino acid
MDVSKTRQLGDFSAAVGSNISSHPLVASINKPHKLKIRLRNGDKIVVHLETPYNNFNKLSDDEFQGTRLVNTRSKVEFMSGCTNLCDNAYMGTLQKNLKVKIEYAISSNDEIEEVDGSNVVLVSETDIPELVPVKLVPPWRRTKNNIRILKDNRRICSSEVTFSDNGTTMDQNKLLGNVITRKNLSDDLICKVVKSLPQEIEVVWKKKRDFMLVNQYLCEIKEAKKHEXKEXRHKEAQAVLAVTTIIAVDSSRISSFRKDVIDEPAH

SEQ ID NO: 3528 - protein, 800 aa, Serratia proteamaculans
MSNRKGAEHTQEHLAERFRQSLTSGVGRSRKHESADKHVSGEAQYIDDRLEFPNQLHLAARLSERAHAQIEKLDLSACYDFPGVVRVITWQDVPGELDIAPLTHGDPLMAKDKVEYVGQVIAVVAAEDPEIAWRAAQAIKVTYRDLPARLDVTQSLREGFLVQEAHRHQRGDADRALAQAKHRIQGELHVGGQEHFYLETQIASVMPAEDGGMLVYSSTQNPTEIQKLVASVLNLPMHRVTIDTRRMGGGFGGKETQAAGPACLCAVMVYLTGRPVKMRLNRRDDMLITGKRHPFYIQYDVGFDDSGLLHGVKISLAGNCGYSLDLSGSIVDRAMFHADNAYFLEDVLITGHRCKTHTASNTAYRGFGGPQGMMAIEQVMDHIARYLALDPLAVRKTNYYGKDQRNVTHYHQPVEQNLLQEITAELEQSADYQARRQAIRQFNAQNPILKKGLALTPVKFGISFTAGFLNQAGALVLVYTDGSIQLNHGGTEMGQGLNTKVAQIVAEVFQVDIERIQITATDTGKVPNTSPTAASSGTDLNGKAAENAALIIKQRLIEMLSKQHQVSAEQIIFNNGQVKVAERYFSFEQVVEQAYFNQVSLASTGYYRTPKIFYDRDQARGHPFYYFAYGAACAEVVIDTLTGEYKLLRADILHDVGDSLNPAIDVGQVEGGFVQGMGWLTSEELVWDEQGKLLTNGPASYKIPAIGDVPADLRVRLLENRKNPEDTVFHSKAVGEPPFMLGISVWCAIKDAVASLADYRLQPNIDAPATPERVLWGVQQMLHGDVVTDDVRGNGDGRVD

SEQ ID NO: 3529 - protein, 338 aa, Coccidioides immitis RS
MTQYLGQPLSESITEHIGATPLVRLNRLPASFGIKAKVCAKLEYFNAGGSVKDRIAKRMVEQAEQDGLIKPGDTLIEASSGNTGIAIALMAAIKGYKCIITLSEKMSLEKEQILHALGARVVRTPAGVPIEHPESILSVAKRLKEEIPNSWILDQYNNPENPRAHEFGTAEEIWHQTQGKVNAVVAGAGTGGTITGMARAFKKKNRGVFVVGVDPVGSVLAQPAALNGKKSEYKIEGIGYDFVPGVLDQAAPDLWVKTTDKESFQMARQLVSQEGILCGGSSGAAFAGLRQFLEIHPEFNVEDKTIVLVLADNLRNYLTKFGDDAWMESNGYGLDLTP

SEQ ID NO: 3530 - protein, 490 aa, Nocardioides sp. JS614
MAAAPSIPGVTVNGRRLSLAGVSPHTTTLDLLRGVGLTGAKEGCAEGECGACSVLVARPDGEGIRWTALNACLVPAAALDGQELVTAEGLGTPEDLHPVQHEMAVRGGSQCGYCTPGFVCSMAAEFYRPERVATGPGPSGDAHERGPNGFDLAALSGNLCRCTGYRPIRDAAYALGSPAPDDPLAARVHRAAPALEATRLEDGTGVFVRPRDLAEALALLGEHPEAVPVAGCTDWGVEVNLRGARAPYVVAVDRLPELRRVSLPAPSGGAFEIGAALSLSEVELALAGRVPLLAAVFPLFASRLIRNGATIGGNLATASPIGDLAPALLALEASVVLVSTDGDRELPIAELFTGYRRSQLRPGELIRAVRIPQPLAGTTAFHKIAKRRYDDISSVAVAFALDVVDETVVRAKVGLGGVAATPIRARATEAALEGRTWSAETARAAAAVLGGEGTPMDDHRASAAYRAAMLEQSLLRLWAQGPSDEGEASA

SEQ ID NO: 3531 - protein, 284 aa, Zea mays
MAVNAFVVLNSCAVMACRYIPRYNLNWLLEPTWSFIRCLHRSADLTLVPSLAIAEDFETAKVVPANRIRLWNKGVDSESFHTKYRRHEMRVRLSGGEPEKPLVIHVGRFGREKNLDFLKRVMERLPGARIAFVGDGPYRAELEKMFMGMPAVFTGMLQGEELSQAYASADVFAMPSESETLGQVVLESMASGVPVVAARAGGIPDIIPKDKEGKTSFLFTPGDLDECVRKIEQVLSSKDLRETVGKAAREEMEKCDWRAASKKIRNEHYSTAISYWRKKMDKSN

SEQ ID NO: 3532 - protein, 767 aa, Nocardioides sp. JS614
MSDLSTRPADGVVGREVPHEGAALHVTGTALYTDDLVVRTQDCLHAHPVQAPHAHARVTALRTAPALAVPGVVRVLTAEDVPGVNDGGVRGDEPLFPSEVCYFGQAVCWVLGETAEAARLGAAAVEVDYEPLPSVLLVTEAIAAESFQGGRPTVERGEVERGLASSAHVFSGVTEMAGQEHFYLETQCSLAQVDESGQVFVQSSTQHPTETQEVVAHVLGRHAHDVTVQSLRMGGAFGGKEMQPHGYAAVAALGAVLTGRPVRVRLTRTQDMTMTGKRHGFHAEWRVGFDPDGRLQALDVTLTADGGWSLDLSEPVLTRALCHVDNAYWIPHVRLHGRVARTNKTSQTAFRGFGGPQGMLVIEDVLGRCAPALGVDPTDLRRRNLYTAGQSTPYGQVVRHAERASLVWDQVLANGRVAERQAEIAAFNATHRHTKRGLALTPVKFGIAFNFTAFNQAGALVHVYKDGSVLINHGGTEMGQGLHTKMLQVAATTLRIPLERVRLAPTRTDKVPNTSATAASSGADLNGAAVKDACEQIRGRLDDVAAGREVGWADLVREAYLRRVPLWAAGFYRTDGLEWDAARMRGHPFKYFVYGAAAAEVEVDGFTGAYRTRRVDIVHDVGDTLSPLVDLGQIEGGFVQGAGWLTLEDLRWDESDGPTRGRLATQAASTYKLPSLSEMPEVFNVSLLAGAHEDGVVYGSKAVGEPPLMLAFSVREAIRAAVAAFGSGSASVELPSPATPEAVFWAIERARTGATDERVAHAVPGVG

SEQ ID NO: 3533 - protein, 322 aa, Prochlorococcus marinus str. MIT 9313
MPIAADITALVGRTPIVRLNRLPQLSGCHAEVLAKLESFNPTASVKDRIAGAMIQAAEEAGTIAPGRTVLVEPTSGNTGIALAMVAAARGYRLILTMPDTMSTERRAMLRAYGAELQLTPGSDGMTGSIELAKELVATIPEAYLLQQFDNPANPQVHERTTAEEIWNDCEGRLDGLITGVGTGGTLTGCARLLKQRNPSLRVFAVEPALSPVLAGGSPAPHRIQGIGAGFIPSVLDLSLIDEILPVSDDDAMEMGRRLAREEGLLSGVSSGAAVAAALQVGSRAEMVGKRLVVVLASFGERYLSTPMFSAASAVPAQRDGYL

SEQ ID NO: 3534 - protein, 313 aa, Streptococcus pyogenes M49 591
MTKIYKTITELVGQTPIIKLNRLIPNEAADVYVKLEAFNPGSSVKDRIALSMIEAAEAEGMISPGDVIIEPTSGNTGIGLAWVGAAKGYRVIIVMPETMSLERRQIIQAYGAELVLTPGAEGMKGAIAKAETLAIELGAWMPMQFNNPANPSIHEKTTAQEILEAFKEISLDAFVSGVGTGGTLSGVSHVLKKASPETVIYAVEAEESAVLSGQEPGPHKIQGISAGFIPNTLDTKAYDQIIRVKSKDALETARLTGAKEGFLVGISSGAALYAAIEVAKQLGKGKHVLTILPDNGERYLSTELYDVPVIKTK

SEQ ID NO: 3535 - protein, 161 aa, Sulfitobacter sp. EE-36
MTEVKMTVNGKPASGAVEGRTLLASFLRENLSLTGTHIGCDTSQCGACVVHVNGEAVKACTMLAVEADGAEVKTIESMANPDGSLTVIQQAFQDHHGLQCGFCTPGMIMSASALLKDNPKPTEAEVRHYLDGNICRCTGYHNIVKAIMAASGQDVSALAAE

SEQ ID NO: 3536 - protein, 680 aa, Thermoproteus tenax
MNYVGRPLPRLEDYRLLYGGARYLDDIELPGQLYAGFVRSPYAHARVRRVDAADALAMPGVVAVFTPSAGRPFVLAPGGKVRYQGEAVAMVVATDRYLLYDALERVVVDYEPLPAVLDPRRAMEPGAPIIDEERGTNVARRERYTAGDARRALESSDRVVEEELYVDRVVPSPMEPHGVLAAYDGANLLVYDSTQKPHVVRRELARALDIPMSSIRVVQPDVGGAFGSKIQVYPEEVNVAAAAMALRRPVKWVATRSEDFRMSTHGRGLILRYKAGFTKDGVLKAIAGVVIADAGAYDWFALDLASTAATMLPAAYKVADLDLEAVSVLTNKPPLGPYRGAGRPEATFFIERIMDLIADETGLDPIEVRRRNLVERAPYRNPFGLEYDSGEYIAALEKGLERLGYREIVKWAEEEAKRGRYIGVGAAFYVEITTYGHEVAKVRAERDGSITVAVGIAPHGQGDATGIAQLVADELQLPIEKVRVVWGDTDAVPDGLGTDGSRSLTAGGSAAILAREEAVGGAEEGCGGALGRTRRVRRRSLQVGRQKHIVGRSCGGRLPRKGQGPSGGAGGIQGQGHVPLRRRRRCRRAGPGDRAGQTSVVQVLRRYWRCGKPAPRSGADTRRRAPRDLAGALRGGCIRPRRQSRYAQLRLLPHPQGCRGAALRELLPRGPPRLGASNGH

SEQ ID NO: 3537 - protein, 133 aa, Triticum aestivum
  misc_feature (59)..(60): Xaa can be any naturally occurring amino acid
  misc_feature (106)..(106): Xaa can be any naturally occurring amino acid
AFCDYRTYVTGRLVPVLTSQDIVDPRVRSGGLGDLLSPILFFYPLDFTFVCPTGRGAFXXIHDEFQKINTEILGVSVDSVFSHLAWVQTERKSGGLGDLKYPLFSXVTKSISKSFGVFISPPPNGGGEGLFII

SEQ ID NO: 3538 - protein, 374 aa, Clostridium tetani E88
MKIGFDARAINLYNGTGIGTYTQNILKHILDLDSKNFYHIYWWGENYNDFSKDNSKVLLTSKRRKSFYEEYYFPANLDRESVDLYHVPQNGMGLSKNTSCKKIITVHDLIPYTMPETVGRGYLKKFLRNMPQLIYDADAIITVSKYSKKDILRFFPMDEKKIFVTHLAADEKYRPLNKDKCNYILKNHYNIDNPFILYIGGFSPRKNIKSLLISFSKIYKNLDKDYKLVIVGANKNGTKILMDMAKDLNIESKIIFTGFVPEDHLPILYNSCETFVYPSLYEGFGLPPLEAMCCGTPVITSNVTSIPEVVGDGGILINPNDIDELSNSLEKTLLDVSFKYELKKKALERSSLYSWENTAKNTLNVYNSIISNNI

SEQ ID NO: 3539 - protein, 387 aa, Streptomyces kanamyceticus
MQVQILRMSRALAELGVRQQVLTVGFPGLPRVRRDSENLVVRITRAPLPRLRSRITGLVGLNQAWLAAALTECVKLRRRWPADLIQVHLDGQLWALLAGPVAARLVGVPYTVTVHCSRLAVYQPMSTVDRIQHPLVTAVERWALRRAAGITTLTERTATVLAAELGAAQRVIDVVPDAVDPDRAEAAPAEVERLKKRFGLPQEGGPVIGFVGRIAHEKGWRHAVQAVAELADAGRDFTFLVVGDGPQRADMEAAVAEAGLTDRFVFTGFLPNDEIPAVMTALDVLLMPSVHEELGGSAVEAMLAGTPVAAYGVGGLCDTVGKVTPSLLAAPGQVAELARTVKRVLDDPAPVLAELRAGREWLADEFGVHHAAGLALAHYERVLGKER

SEQ ID NO: 3540 - protein, 146 aa, Thermoproteus tenax
MRVRVKVNGVWYERDVEPRKLLVHFLRDDLGIKSVRVGCDTGNCGACTVLMNGLPVKSCNILAVQADGGEIITADYNDELMTKLKEAFHQRHALQCGFCTSGMLTSAYALLKSNPRPSEEEIREAISGVLCRCTGYQNIVEAVKSV

SEQ ID NO: 3541 - protein, 1443 aa, Vitis vinifera
MTGGRCHRQKKMMGRGAERGCGTEEKPCPISRAPAKISAKQPGNPGKEVSLGVDLYAQARKALSDRCPFETEEALANTVSTLPSGLACLLSKHSDSRKRHKKSHSDTKSSSRQSRGANIWLETEGYFRELAFPDIETLVEVSSSVSLATEKNFLIPYIGNPIEANGVSSELQNGENANGNGIVVKEEDKKEDNQLMEIDSVETEVLPPEEKACSQSPLSSGLEWLLGLKNKVLLTSERPNKKRKLLGSDAGLEKLIIARPCEGNSSLCHFCCTGDMGEQSNRLIVCRCCNVAVHQKCYGVQEDIDEESWLCTWCWHKNDKNDASNGESVKPCVLCPKQGGALKPLHKSEDEESMEFSHLFCSQWMPEVYVEDTRKMEPIMNIDGIKETRKKLVCNVCKVKYGACVRCSNGACRTSFHPICAREARHRMEIWGKFGCDNLELRAFCLKHSEVQDVSSTQQLGDFSAADGSNTSSHPPVTSVNKPQKLKIGLRNGDKIAVHMETPDNNSNKLSDGEFQETGLPNTRSKAELMSGCADAQQLIGMRMLETINTFLSFIFLVLQLIERGKVSVKDVALDIGVSPDSLAATLAHLKVVLPSRLLFFCHDDHLVPDLQCKILKWLKDHAYMGTLQKNLKVKIKSAISSKDEIGEVDGSNAVLVSETDIPEPVPVKSVPPRRRTKSNIRILKDNRLICSSEETFSDNGTVMDEVNTDQLAGELENSSKGSFPSATEKHLSLTRFPCKEASCRRNAWIPNCTCKMIRSSSPHYLSFKQFTLLPFPMSEHILLQKVSQSFLIDFHNSTPYPALTSQDFHPPYYPYFPLMTCSRGPEISPMETSSYVRVPCNHQSQHSTCTEMICKSEGENLEQLVKARNTGVLELSPEDEVVGELIYFQNRLLGNAVARKNLSDDLICKVVKSLPQEIEVVRKQKWDSVLVNQYLCELKEAKKQGRKERRHKEAQAVLAAATAAAAASSRISSFRKDAIDESAHQEVNTSSGRAGLSSQPMPRAKETLSRVAAPRVSSEKFSDFVQSNLDFSKEHGRSCDICRRSETILNPILVCSSCKVAVHLDCYRSVTDSPGPWYCELCEELVAPAVNFWEKPAFAVECGLCGGNAGAFRKTTDDQWVHAFCAEWVLESTFRKGQVNPVEGMETVSKGSDVCYICHRKNGVCIKCNYGHCQSTFHASCARSAGLYMNVKTGAGKLQHKAYCEKHSLEQRAKAETQKAGIEELKNIKQIRVELERLRLLCERIIKREKLKRELILCSHDILASKRDSVALSVLVHSPFFPPDVSSESATTSLKGHMDGYKSSSEAIQRSDDITVDSTISGKHCIKLPVSMDSDQKTDDSSTSQHLCTRKPSEGASFCGKQIPLRPSSVASRNVSGEVEKRSKSRKHTETFEKELVMTSDQASVKNQRLPKGFVYVPIGCLSKEKQINQDACPRESVERDG

SEQ ID NO: 3542 - protein, 377 aa, Prochlorococcus marinus str. MIT 9215
MKIALFTETFLPKVDGIVTRLTKTIEFLIKNGDEVIIFCPDGCPESYMGATVVGVAAMPLPLYPELKLGLPGPAVSDKLEKFNPDLIHVVNPAVLGLGGIWLAKTNNIPLIASYHTHLPKYLEHYGMGMLEPLLWELLKAAHNQALLNLCTSTAMVNELKDKGIQRTALWQRGVDTYSFRPDLRSETMREKLFGKYKEANYLLIYVGRLSAEKQIERIKPVLENIPNACLALVGDGPYRNQLEKIFENTKTNFIGYLSGDDLASAYASGDIFLFPSSTETLGLVLLEAMAAGCPVIGANKGGIPDIISDGINGCLYDPDEKDNGEKSLIEATKKILENEDKREIMRKEARNEAEKWDWNQATLQLQKYYSDTLKDIE

SEQ ID NO: 3543 - protein, 311 aa, Corynebacterium efficiens YS-314
MGNVYNNITETIGRTPLVKLNRLTEGLDATVLVKLESFNPANSVKDRIGLAIIDAAEASGELKPGGTIVEATSGNTGIALAMVGAARGYKVVLTMPETMSTERRVLLRAYGAEIVLTPGAAGMQGAKDKADEIVAERENAILARQFENPANPEIHRETTAKELMEDTDGNFDIFVAGFGTGGTITGVGGVLKEHNPEAQVYAVEPEASPLLTSGKAGPHKIQGIGANFIPENLDRKILDDVITISNEDAVTWSRKLATEEGILGGISTGANIKAALDLAAKPENAGKTIVTTVCDFGERYVSTVLYEDIRD

SEQ ID NO: 3544 - protein, 322 aa, Sinorhizobium meliloti 1021
MPEARKPGRGRVFSSITETIGDTPIVRLDKLAKEKGVKANLLAKLEFFNPIGSVKDRIGVAMIESLEAQGKITPGRTTLVEPTSGNTGIALAFVAAAKGYRLILTMPETMSVERRKMLTLLGAELVLTEGAKGMKGAIAKAQELTETLPDAIIPQQFENPANPEIHRTTTAEEIWNDTEGAVDILVSGIGTGGTITGAGQVLKARKPSVRVIAVEPEESPILSGGAPGPHKIQGIGAGFAPAILDTSVYDEVVTVNAGEAIEAARLVARLEGVPVGISAGAALQAAIEVGQREENAGRNIVVIIPSFAERYLSTVLFEGLGA

SEQ ID NO: 3545 - protein, 268 aa, Triticum aestivum
  misc_feature (109)..(109): Xaa can be any naturally occurring amino acid
MAAANAPFALSRLSPAARLPIRAWRAARPAPVWTGRTRPLSVASAAQENRDNSVDVQVSQAQNGGNQQGNAVQRRPRRAGFDISPFGKSSFPMFFYTLFCCRCRRSRAXGFTLKNAGLVDPMSPMRTMRQMLDTMDRLFDDAVGFPTARRSPAAASEMPRMPWDIMEDDKEVKMRFDMPGLSRKEVKVMVEGDALVIRGEHKKEAGEGQVEGGDGWWKERSVSSYDMRLALPDECDKSQVRAELKNGVLLVSVPKRETERKVIDVQVQ

SEQ ID NO: 3546 - protein, 191 aa, Mycobacterium sp. JLS
MQVSMTVNGEPVSADVEPRMLLVHFLRDELRLTGTHWGCDTSNCGTCVVSLDGEPVKSCTMLAVMADGHDVRTVEGLEVDGKLDPVQEGFMQCHGLQCGFCTPGMMITARALLDRNPHPTEHEIREAISGQICRCTGYTTIVRSVQWAAGHARGRDVESGPSATDFAPQSQTDDTLGPVAGDHLIETGSPS

SEQ ID NO: 3547 - protein, 389 aa, Cyanothece sp. PCC 8801
MKVLQIVPSISLVYGGPSQMVLGLSEALANQGIDVTILTTNSNGDAGQLPLDVPLGIPIQQKGYQIIYFPCSPFRRYKFSLDLLKWLINHASNYDIAHIHALFSPISTAAATVARYCQLPYILRPLGTLDPADLQKKKLLKKIYGNCLERANLLGSVAVHFTTEQEAKISHRYGVKTNDLVIPLGVNLPDYFPPVGHTRQQLGIANDVPLVLFMSRIDPKKGLELLLESAEKLAKKGVEFKLVIAGSNPQDPIYEKKIQEKITNSCLAKQTAITGFVQGELKLGLLQDADLFVLPSYYENFGIAVAEAMAVGTPVVISQGVYIWPDVQKAAAGWVTSMDIEDLTNTLDEAIFNQNERQKRGQNARELVVKNYLWPTIAQQMINAYSHFQ

SEQ ID NO: 3548 - protein, 796 aa, Mycobacterium sp. JLS
MTAVDERPDAQADNDRKPCGYGRMLRKEDPRFVRGRGNYVDDVTLPGMLHLAILRSPYAHARIANIDISAAEAHPKVKAVVTGADLAEKGLAWMPTLSNDVQAVLATDKVRFQGQEVAFVVAEDRYSARDGVELIDVDYEPLDPVIDVRRALDPDAAVIRTDLDGKTDNHCFDWETGDAAATDAAFAKADVVVKQEMVYPRVHPAPMETCGAVADLDPVSGKLTLWSTTQAPHAHRTLYALVAGLPEHKIRVISPDIGGGFGNKVPIYPGYVCAIVGSLLLGKPVKWMEDRSENLTSTGFARDYIMVGEIAATSDGKILAVRSNVLADHGAFNGVAAPTKYPAGFFGVFTGSYDLEAAYCHMTAVYTNKAPGGVAYACSFRITEAVYFVERLVDCLAYEMKMDPADLRLRNLLKPDQFPYHSKTGWTYDSGDYETTMRKAMDMVGYEQLRAEQAAKRERGELMGIGMAFFTEAVGAGPRKDMDILGLGMADGCELRVHPTGKAVVRLSVQTQGQGHETTFAQIVAEELGIPPDDIDVVHGDTDQTPFGLGTYGSRSTPVSGAAAALVARKVRDKAKIIASGMLEVSVADLEWDKGAFHVKGDPAASVTIQDIAMRAHGAGDLPEGIEGGLDAQICYNPENLTYPYGAYFCVVDVDPGTAVVKVRRFLAVDDCGTRINPMIIEGQVHGGIVDGIGMALMEMIAFDEEGNCLGGSLMDYLIPTALEVPELETGHTVTPSPHHPIGAKGIGESATVGSPPAVVNAVVDALAPFGIRHADMPLTPSRVWEAMQGRPTPPI

SEQ ID NO: 3549 - protein, 351 aa, Zea mays
  misc_feature (110)..(110): Xaa can be any naturally occurring amino acid
  misc_feature (259)..(259): Xaa can be any naturally occurring amino acid
MAYARTVMAAAASALLMAVGVRFLGPAAAAFVEEELPRARAVAATWLTPPYLYLVINAIIISIAASSRFQSSGGAGGRPSAPSYAPAADPDADAIGGEGAGEEIAAAGWXQPAVASLQVPAAVPVVAAKAAEVAAVVEEPVVVEIHTVAVAPEGEVDEDYSVSRSTWTPRRRGAEPEVAAEVPPFADLTNSRKKPLVSARFSRKATKPSPEGSRALRVARPRKEETLESTWKAITEGRGPTLARHLKKSDTWDTRSPGXRPSGGGSSGEVDPAAVAPAGAMRKAETFNDGGAGRSRPAPAALVRREPSLGQDELNRRVEAFIHKFNMEMRLQRQESLKHYNDMIGRGRGSR

SEQ ID NO: 3550 - protein, 175 aa, Rhodococcus sp. RHA1
MNVADSPRYRKITLTVDGEERNLEVDTRTTLLDALRDHLGVTAPKKGCDHGQCGSCTVLLDGRRSTSCLTFAVAHHGERVVTAHGLADGEVLHAVQQAFVEQDGLQCGYCTPGQICSVIGMLDEFLALHPSAVTENLTAPPELTDDEIRERMNGNLCRCGAYPNILAAIRQAAEA

SEQ ID NO: 3551 - protein, 437 aa, Streptococcus suis 89/1591
MRIGLFTDTYFPQVSGVATSIRTLKTELEKLGHTVFIFTTTDEDVNRYEDWDIIRIPSVPFFAFKDRRVAYAGFTDALKIASRYKLDIIHTHTEFSLGILGKMIAKELDIPVVHTYHTQYEDYVHYIAKGRIIRPGMVKYLVRAFLKDLDGVICPSEIVEDLLMSYNVPISKRVIPTGIDLAKFDRPEIGKDETDELREQLGIASDETMLLSLSRISHEKNIQAIVQAMPKILLENPKVKLVIVGGGPYTDDLQEMIAELNLDEHVQLTGMIAPSDTALYYKAADFFISASTSETQGLTFLESLASGTPILAHSNPYLKNVVTDKMFGTLFVREQELADAVVEAIVATPPMNPYVLDKKLYEISSTNFGRKVFEYYLDLKISYDFRKEHTNQDSVAEALIKEAIYLPQKVVVKSTDTTAKILKKSVEQVKSIRNFFD

SEQ ID NO: 3552 - protein, 182 aa, Burkholderia pseudomallei K96243
MKTVGDKLEAFTVVAAKPGFNNHEENGQSAFETVTEASFPGKWKIIYFYPKDFTFVCPTEIVEFAKLAKQFEERDAVLLGGSSDNEFVKLAWRREHKDLDKLNHYSFGDVKGELIDQLGVRDKEAGVALRATFIVDPDNTIQHVSVNNLNVGRSPEEILRILDGLQTDELCPCNRAIGGATL

SEQ ID NO: 3553 - protein, 390 aa, Methanocaldococcus jannaschii DSM 2661
MKIAMVTWEYPPRIVGGLAIHCKGLAEGLVRNGHEVDVITVGYDLPEYENINGVNVYRVRPISHPHFLTWAMFMAEEMEKKLGILGVDKYDVIHCHDWMTHFVGANLKHICRMPYVQSIHSTEIGRCGGLYSDDSKAIHAMEYLSTYESCQVITVSKSLKEEVCSIFNTPEDKVKVIYNGINPWEFDINLSWEEKINFRRSIGVQDDEKMILFVGRLTYQKGIEYLIRAMPKILERHNAKLVIAGSGDMRDYLEDLCYQLGVRHKVVFLGFVNGDTLKKLYKSADVVVIPSVYEPFGIVALEAMAAGTPVVVSSVGGLMEIIKHEVNGIWVYPKNPDSIAWGVDRVLSDWGFREYIVNNAKKDVYEKYSWDNIAKETVNVYKIAMEMMGR

SEQ ID NO: 3554 - protein, 467 aa, Xanthobacter autotrophicus Py2
MAIAFVLNGESVREATAAPSTTVLDYLRTRAHLTGTKEGCAEGDCGACTIAIGRADGEGVRWQAANACLMLLSQLDGALVKTVEGLATGDALHPVQLVLAESDGTQCGFCTPGIVMSLYVLQQDGAADDATIHEALAGNLCRCTGYRPIVDAARALCAAPQAREPAVAAPRPSTAHGAAGELHLSPDNLADLVALRATHPEAVLIAGATDLGLIASKQRRGFSLAISTRRVAELKHVTREPDGLVVGAAVTYADGLPAVEAAFPAFGALIRRIGSRQIRALGTFGGNLGTASPVGDTLPVLLALDAQVELAGPAGSRWMKVDDFLTGYRTTALAPDEVIAALRLPYLAEGEQLHVWKLSKRHDQDISTVLAAFRVRIADGVLVSIEAAFGGMAERAKRARALEAALTGAPWGEAAPERIEAALAADFAPLSDHRASAAYRRAAAANLVRRLHLATMRPDVAIEVHAL

SEQ ID NO: 3555 - protein, 764 aa, Xanthobacter autotrophicus Py2
MSRVVHAPARHESASAHVSGRALYLDDMPEPPGLLHGVLVLSPHPHARIVSIDLSAARALPGVVAVAAGDVPGVNDIAPIRTGEPALAQGVVEYVGHPVAAVAAPTLDEARSAAALVKIEYEKLPALLDLEEALAAGARVAPDQMVGRGDVDAALAAAPHRITGEVCCGGQDHFYLEGQIAIAVPGEDRDMQVYSSTQHPTEAQHGVAHVLGLPFAAVTVEVRRMGGAFGGKESQATIIAAIAALLAHHARKPVKLRLPRDVDMEATGKRHPFRIRWNVGFDSEGRLAGLDLELAADCGNVADLSPAVVSRALCHADNCYFIPAARYRGLLVKTNTVSNTAFRGFGAPQGMLAIEAVMEAVARHLGLPIEELRAANFYGDAPRNITPYGQEVEDNIIAEVVAELDGRADLAAWRRDIAAFNATSPIIRKGLATMPIKFGVSFNLTTLNQAGALVHVYTDGSVHLNHGGTEMGQGLFVKVAQVVADAFGIPLDHVRVSATSTAKVPNTSPTAASSGSDLNGMAALIAAQEIRGRMAGVVGARFGVPAEDVVFADGRVSAGNQSLSFGEAAKLAWQERVQLSAAGFYKTPKIHFDLATAQGRPFYYYTYGAAAAEVAVDTLTGEVRVLRAEIVQDCGRSLNPAIDLGQVEGAFVQGLGWLTCEELKWTPEGRLATRGPSTYKIPGSRDVPPDFRVHLLDRPNREETVLRSKAVGEPPLMLAISVWLAIRDAIASVAGEGPIRLDAPATPERVLEAVALRGGHAGAG

SEQ ID NO: 3556 - protein, 374 aa, Rhodococcus sp. RHA1
MRIVQLANFYGPRSGGLRTALHNWGQGYVERGHEVILVVPGQRDCEELLPSGVLRITRSAPTIPATGGYRVVNPRRVADVVSGLRPDVLEVSDRLTLRGFGGWARARGVRSVVVSHERLDRLLGQVAPRRVARGWADVANRRMARNYDAVVCTTDFASEEFTRIGAPNLHRVPLGVDLTMFHPGKHDQVMRDSFADPAQRFLLHCGRLSVEKQVERSIDAVRLLRRQGHDARLVIAGDGPRREALQYRARGLPVHFTGFISDKGRLASLFASADVSLAPGPHETFCLSALESLAAGTPVVASQSSALAEIITPGCGALARDRGPAFAEAVSGILAIPSRTRRASARRRAEDFGWGESVDGMLAVLEGTGPRCPA

SEQ ID NO: 3557 - protein, 318 aa, Psychrobacter arcticus 273-4
MSATAPLNVNFITQITDLADCVGQTPLVKLQRLPEQEQIDNGAIMLAKLEGNNPAGSVKDRPAFNMIYQAERRGDIKPGDMLIEATSGNTGIALAMVAAMRGYPITLFMPSNSTQERKDAMTAYGATLIQVEEGIEAARDMALQMQADGKGIVLDQFNNPDNKQAHYLTTGPELWAQTEGKITHFISSMGTTGTITGVAQYLKEQNPAIQIIGLQPDEEAAIAGIRRWPAAYMPGIFDADLVDEIMDIDQRVAEVYMRKLAKTEGIFAGVSSGAAAWAATQVAKANPDAVIAFIVCDRGDRYLSTGLYNVDDSIDNAN

SEQ ID NO: 3558 - protein, 181 aa, Glycine max
GGDNKDNSVEVQHVSKGDQGTAVEKKPRRTAMDISPFGILDPWSPMRSMRQILDTMDRVFEDTMTFPGRNIGGGEIRAPWDIKDEEHEIRMRFDMPGLAKEDVKVSVEDDMLVIKGGHKSEQEHGGDDSWSSRTYSSYDTRLKLPDNCEKDKVKAELKNGVLYITIPKTKVERKVIDVQVQ

SEQ ID NO: 3559 - protein, 154 aa, Bacillus halodurans C-125
MLEGKQAPDFSLPASNGETVSLSDFKGKNIVLYFYPKDMTPGCTTEACDFRDRVEDFKGLNTVILGVSPDPVERHKKFIEKYSLPFLLLADEDTKVAQQYDVWKLKKNFGKEYMGIERSTFVIDKDGTVVKEWRKVRVKDHVEEALAFIKENLE

SEQ ID NO: 3560 - protein, 153 aa, Magnetospirillum magnetotacticum MS-1
MRVAFTLNGRKVEAEVEPRTLLVALLRDGFGLTGTHVGCDTGQCGACTVHLDGRAVKSCLVLAAQADGRDVLTIEGVAEGETLHPLQAAFRDRHALQCGFCTPGMVMSGLDLVAHLDRADEDAIRHGLDGNLCRCTGYRPIVEAIAQTIREKG

SEQ ID NO: 3561 - protein, 787 aa, Sulfitobacter sp. EE-36
MPKDGGIGASSKRREDIRFLTGEGNYTDDINLHGQAHVFFLRSDIAHGVLNSVDTSAAEGMPGVVKIFTGADFAEVGSIPCGWQVTDKHGAPMQEPRHPVLAEGKVRHVGEPIAAVVAETLSQARDAAEAIVVDITDLPAVIDMKQAVQEGAPKVHDDLTSNLCYDWGFVEENKAAVDKAFDDAAHVTTLELVNNRLVANPMEPRVAVGDYARGTGDHTLYTTSQNPHVIRLLMGAFVLGIPEHKLRVVAPDVGGGFGTKIFHYQEEAFCTFAAKACNRPVKWTSSRSEAFMSDAHGRDHVTKIQMALDADNNFTALRTDTYANMGAYLSTFAPSVPTWLHGTLMAGNYKTPLIYVNVKAVFTNTVPVDAYRGAGRPEATYQLERLVDKCAHELGVDPIALRRQNFITEFPYATPVAVEYDTGDYVATMDKLEEIADFAGFDARRKESEAKGKLRGFGVNCYIEACGIAPSNLVGQLGARAGLYESATVRVNATGGLVVMTGSHSHGQGHETAFPQVIAEMIGIPEEMVEIVHGDTANTPMGMGTYGSRSLAVGGSAMVRATEKIIAKATKIASHLLEASEGDIELKDGAFTVAGTDKSVAWGDVTLAAYVPHNYPLEDIEPGLEETAFYDPSNFTYPSGAYACEVELDPETGHVTIDRFAAADDFGNIVNPMIVSGQVHGGIAQGIGQALMENCAYDSDGQLLSASYMDYAMPRASDLPFYTVDHSCQTPCTHNPLGVKGCGEAGAIGSPPAVVNAVLDAMRSGGKDVGHIDMPVTPARVWAAMNG

SEQ ID NO: 3562 - protein, 224 aa, Coccidioides immitis RS
MADQSQRAAPLRLGSEAPNFKAVTTKGEIDFHEFIGDNWVILFSHPDDFTPTCTTELGAFAKLEPEFTKRGVKLIGLSANGLKSHHDWIKDIDEVTGSHLQFPIIADADRHISYLYDMIDYQDTTNVDEKGMAMTIRSVFIIDPKKKIRLIMSYPASTGRNTAEVLRVVDALQTTDKNGVNTAINWTPGDDVIIPPFVSTEDAIKKFGDVRIVKPYLRYATIKN

SEQ ID NO: 3563 - protein, 319 aa, Nostoc sp. PCC 7120
MRIANDVTELIGGTPLVKLNKIPQAEGVVARIVVKLEGMNPASSVKDRIGVSMINAAEAEGLIIPGKTILVEPTSGNTGIALAMVAAARGYRLILTMPETMSQERRAMLRAYGATLELTPGTEGMRGAIRKAEEIVASTPDTHMLQQFRNPANPKIHRETTAEEIWNDTDGEVDIVIAGVGTGGTITGIAEVLKQRKPSFQAIAVEPSNSPILSGGQAGPHKIQGIGAGFVPDVLRLELVDEVIRVSDDQAMSYGRRLAREEGLLSGISSGAALCAALQVGKRPENAGKLIVMIQPSFGERYLSTPLFQDLTNETAGVS

SEQ ID NO: 3564 - protein, 342 aa, Marinobacter sp. ELB17
MRICHVNLAGGFSGGERQTVNLIRELAGRQHQQTLVARPGSRLFDELAGLPGLEFRSCKHFLLGHTAGAWDLIHCHDGKAAYWAYLERRLRKTPYLITRRVDNPLGKGRFTRAAYTAASRVVCLSNAIAQSVLARVASATIAVIPSSFSGFEAVPADVSAIRQRFAGKRLVGQVGRLLEHKGYQVTIAAAQQLAANYPDVMFVFLGEGPDEDWLKQQAGNACNVCFVGHQNNVGSWLAALEVFVFPSLHEGLGSTVLDAMQHGVPVIGARAGGIPDMIEQEKTGLLVAPGDAPDLARAIAGLLDSQPRREALSDNATAQLEAFSPSTIAGRYQDLYTAVCTA

SEQ ID NO: 3565 - protein, 391 aa, Microcystis aeruginosa PCC 7806
MKILQIVPSISLVYGGPSQMVLGLSAALAQLGQDVTIITTDSNGDTGQAPLDVPLGVPVSQNGYQIYYFPCSPFRRYKFSLDLFTWLANRAKDYDIAHIHALFSPVSSISASIARYHQLPYILRPLGTLDPADLQKKRQLKQIYANFLEKPNLAAAAAIHFTSQQECQTAERFNIKTKDIVIPLGVDFFNSQALPVTGFDLPENKPIILYMSRLDPKKGLDLLLPSLEGLLEKGLDFHFVLAGGNPQDPEYENRIKNQIERSILGKNTTITGFVTGEVKNRLLARADLFVLPSYYENFGIAVAEAMAAGIPVVISDRVDLHPAVTAAAAGWVTACQLEDLTNTLATAITNPEIRQQRGKNARDLVLNQYSWSAIAEQLLTVYQNLDRRIKI

SEQ ID NO: 3566 - protein, 1281 aa, Vitis vinifera
MGSLKNEEELEGVEEGSKEAILYVNGVRKVLPDGLAHLTLLEYLRDIGLTGTKLGCGEGGCGACTVMVSYFDENSKKCVHYAVNACLAPLYSVEGMHVITVEGIGNRRNGLHPIQESLALSHGSQCGFCTPGFIMSMYALLRSSQTPPSEEQIEESLAGNLCRCTGYRPIIDAFRVFAKTDDFICPSTGKPCSCKSGSSNDKDAAKSNMSCVDSTYTEKELIFPPELLLRKLTPLNMNGFGLKHLLELKARYPDAKLVVGNSEVGIEMRLKRIQHQVLISVINIPELTMLSVKDDGLEIGAAVLADPCKAFIEQIKWFAGTQIKNVASVGGNICTASPISDLNPLWMAAGAKFRVINCKGNIRTVLAENFFLGYRKVDLAHDEILLSIFLPWTRPFEFVKEFKQAHRRDDDIAIVNAGMRVYLQEKEEKWVIWNRELLQDALKILQKNILIKDDAPGGMVEFRKSLTLSFFFKFFLWVSHQMDGQRFFLETVPISHLSAVQPFHRPSDYEVVKHGTAVGSPEIHLSSKLQVTGEAEYADDMPMPPNGLHAALVLSRKPHARILSIDDSGAKSSPGFAGIFFHKDVPGGNAIGPVVNDEEIFASEFVTFVGQVIGVVVADTQENAKLAARKVHVKYEELPAILSIEDALKAKSFLPNTERHIEKGDVDLCFQSGCCDKILEGEVHVGGQEHFYLETNSSLVWTTDSGNEVHMISSTQCPQKHQKYVSHVLGLPMSKVVCKTKRIGGGFGGKETRSACFAAVACVPSYLLNRPVKLTLDRDIDMMISGQRHTFLGKYKVGFTNDGKVQALDLEIYNNGGNSLDLSGAVLERAMFHSDNVYDIPNVRINGKVCLTNFPSHTAFRGFGGPQGMLITENWIQRIATELKKSPEEIREINFQSEGCVTHYGQQLQHFTLPRVWNELKSSCEFLKARGEVDQFNLQNRWKKRGVAMVPTKFGISFTTKFMNQAGALVHVYTDGTVLVTHGGVEMGQGLHTKVAQVAASSFNIPLSSVFISETSTDKVPNSTPTAASASSDMYGAAVLDACEQIKARMEPIASKRNFSSFAELVTACYLERIDLSAHGFYITPDIHFDWKTGKGSPFSYFTYGASFAEVEIDTLTGDFHTRVANVFLDLGHSINPAIDVGQIEGAFVQGLGWVALEELKWGDAAHKWIPPGCLYTCGPGSYKIPSINDVPLKFDVSLLKGAPNPKAIHSSKAVGEPPFFLASSVFFAIKDAIVAARREVGNKDWFPLDNPATPERVRMACLDEFAMQFVSSDFRPKLSV

SEQ ID NO: 3567 - protein, 357 aa, Glycine max
NHTHTQAKKVSSRYRDRKNRTKQKKKKKRMGYVSMKVVLISTGVLSMAMGLKLTLPLLSHFLLNQAPHVWTFLLTCFTPPYLYILLNFIILTIVASSKLNNHHHSPPDTTVLLPSDPVIYALPPAAVQILAPETVNISAAVQTDYNAVASEKYLYETKPTLSYDTVTEGNGSVGYVYDENTPVKATVNNDDEAVGVVSPSLQRKDSSDFAFANENLKPPVSARFSHRKSVRASPEGGKVVALGVAKAKKQETLESTWRTITEGRAMPLTRHLKKAETWERETPLRDLNGGGKLMKKSETFAGREKNASTRLRKEPSLSQDELNRRVEAFINKFNADMRLQRQESLRQYKEMMNRGAH

SEQ ID NO: 3568 - protein, 153 aa, Pseudomonas putida KT2440
MQMLIINGQSQQVDVAPDMPLLWVLRDVLGLTGTKYGCGIAQCGVCTVHLDGQPIRSCVTPISAVAGRAITTIEAIGETVVGQAVQQAWLAHEVVQCGYCQSGQIMAATALLQRQPKPDDQAIDAAMAGNLCRCATYTRIRTAIHSVGQVEEA

SEQ ID NO: 3569 - protein, 757 aa, Blastopirellula marina DSM 3645
MSDISPISYSDKTFKVIGTRPVRHDGADKVTGRALYGADVQLPGALHGKVLRSPHAHARIKLIDTSIAEKIEGVYAVATGKDWPDLVDKIADLGEGAVHLKDLSENCLAVDKVLYKGHAIAAVAARDVHIAEAAIAAIRVDYELLPAVTSVLDAMKPGAPILHPGLKTETLGQPSQGPTNIDRHVHFETGDIAAGFAAADLILEREFETATVHQGYIEPQVSTALWNEDGQLKIWTSTQGSFTARHQTAELLQLPISKVTVTPCEIGGGFGGKIAVYLEPVAAILSRKSGRAVKMTMQRDEVFEGTGPTPASFIRVKLGATKDGKLTAGQAYLAYESGAFPGGVIGPGTMCIFSCVELPNAVVDGYDVCVNKPKTQAYRAPGATQAAFAFESTFNELAEQLQIDPIAIRRINGVKEGSRRVDGPVYPRIGYLECLEAAQNSSHWNSPLEGPNQGRGIAAGYWFNIGLKSSVSASVNPDGTVNLLEGSTDIGGTRTSIAMQLAETLGIPAADVLPKVVDTDSIGYTDVTGGSRTTFATGMAAHKVGLKLLEQLTARAAFLWDCDPAEVKVDGDLYRWRDQQLTFKQLAEKLPSAGDPVVGHASVSPEGPTNGFGVHIVDVEVDPDTAKVKILRYTAIQDAGKAIHPSYVEGQMQGGAVQGIGWALNEEYFYGDDHKMRNASLLDYRIPTCLDVPMIDTIIVEVPNPNHPFGVRGVGETPIVPPPGAIADAIFQATGVRATRLPISPPRLWKAMSQLAK

SEQ ID NO: 3570 - protein, 158 aa, Blastopirellula marina DSM 3645
MAKKKLISAKINGEPREFACEPRQSLLEVLRDSLQLTGAKEGCNNGNCGACTVLLNGEPVVSCLVLALEAEGAEIETVEGIAAGGQLQPLQQCFLEGAALQCGVCTPGFLMTAKALLDRVPHPSEAEIRFQLAGNLCRCTGYDKIVRAVQAAAEGTNP

SEQ ID NO: 3571 - protein, 292 aa, Blastopirellula marina DSM 3645
MQDFDYAAPISTHEAVQLLADPGHKAVVLAGGTDILVLLRERRRRATLVVDVKKIAELNELAMTADGGLFLGAAVPCSRIYREAAITEKYAALVDATKIIGGWQIQSRATVGGNLCNASPAADSIPPLAIYDAVAEIAGPNGRRQMPVADFCSGVGKNVMARGDLLVAIILPPIEARSGAAFQRFIPRNEMDIAVASAASLVELDDQGIICKARIVLGAVATTAVRASHAEEALVGQPPSDELFAQAGALAERSARPIDDMRGTIEYRKHLCGVLTRRTLAIAVERAQSKTQ

SEQ ID NO: 3572 - protein, 402 aa, Deinococcus radiodurans R1
MNPLRIGLFTDTFLPDQNGIVTSVCLLSDELRALGHQVDVVAPRFPEHLDRRPDVRRVASVRYPLLPTYRLAWPGRRSFEQRYDLIHTHTPLTLGLAGARLARKWGVPHVATYHTHLEAYTHYVPGMTQLNRAVHFMPKVVGRLYGEADAVITPTAGTLDTLRQAGITDAVVIPTSIDPAVLEAAPPIASPWPPGTRRLLTVGRLAREKRFDLVLDTLADLPGAHLVILGEGPERTHLEDHAQRLGVAEHVTFVGVRPWTEIGAYYRLAELFVFASDTETQGLVLQEAQLMGVPVVAVGARGTLTGVQSGYSGYLTAPGDVPELVRRARELLESPEQYARFSRQAREFGGRTTPAGVARQVLAVYARTLGLPPESPDDPRADGLSAPAEAAGRPRNNPVYGR

SEQ ID NO: 3573 - protein, 794 aa, Azoarcus sp. EbN1
MNAPDRELRKLGAANAAPRGVGARLPLIDGVEKVTGTARYTADLPAQGALVGKLLRSPYAHAELLEVDISEALKLPGVRGIVTGNDCDTPYGVIPIAQNEFPLARGRIRYVGEPVAAVAAVDEATTDAALALIRLKVRELPAYFDAADARKADVVLLHDNKKGNIEREVHNEFGDAAAGFAAADLICEETFECAEVHHAMMEPNASLAAWDNERGHLTLWSVTQVPYYVHESLARCMKLDAAYIRVIKPFVGGGFGHRVETLNFEIIAGLLARAARGTVRLLQTREEAFLTHRGRPQTYVRMKLGLTRDGRMTACEAEVVQRGGAYGGYGLVTILYAGALLNGLYDLPAVKYDGYRVYTNTPPCGAMRGHGTVNIRFAFESLLDMMAAELGLDAFAVRRRNLLKAPTETINGLKVMSYGLPECLDWVEQASGWRERAARLEANSDGPIRRGIGIACSHFVSGSAKPVHFTGQPHATIALRVDFDAGITILTGASDIGQGSSTIITQVVAEILGVEYRRLRLIATDSALTPKDNGSYSSRVTFMVGNAAADAARNLKAVLVAAAAKRLQVAEADVDWLGEAAAVVGDASRQIPFHDIVEEALVDVGMLTVKGTFTCPPEFQGGKQRGGAVGSTMGFSYAAQAVEVSVDTELGKVTVEKVWSAIDCGFAINPMSVEGQVQGAIWMGMGQAISEETVYENGRHKAVSLLDYRVPTIIESPDIAVHIVESLDPNGPFGAKEASEGPLAGVMSAIAAAIEDATGTRIRATPFTPDRVFDALNRKPRPGAHVAAAAKGAA

SEQ ID NO: 3574 - protein, 158 aa, Azoarcus sp. EbN1
MKTLLTLSVNGRPREDAVAGNALLIDYLRDTLGLTGTKQGCDGGECGACTVLVDGQPRLACCTLAHSVAGHSIETIEGLSHEGNLSRLQRAFHEHLGSQCGFCTPGMIMAAEALLRRNPQPSRDEIRAALAGNLCRCTGYVKIIESVEAAACGSEVSA

SEQ ID NO: 3575 - protein, 806 aa, Bradyrhizobium sp. ORS278
MNDMTPTREQREAALEGMGCRRKRVEDIRFTQGKGNYVDDVKLPGMLHGDFVRSPHAHARVKAIHTEEALKVPGVLAVITAETLKTVNLAWMPTLAGDVQMVLADGKVLFQNQEVAFVVATDRYAADDGVSKVVVDYEPLPVLVDPFKAMDPDAPVLREDLAGKTTGAHGPRKHHNHIFEWSVGDKELTDAAFKKADVTIKEMISYHRTHPSPLETCQCVCSFDKIKGELTIWGTFQAPHVIRTVVSLIAKLPEQKIHVIAPDIGGGFGNKVGAYPGYICAAVASIVTGKPVKWVEDRIENLTATAFARDYHMTTEIAATKDGKVTGLRVHVLADHGGFDACADPSKWPAGFFNIVTGSYDFPVAHLAVDGVYTNKAPGGVAYRCSFRVTEAAYCIERAMDILAQKLGMDPAELRLKNFVKPEQFPYHSALGWEYDSGDYHTAMRKMMETVDYAGLRKEQAEKRAAFKRGETREIMGIGIGFFTEIVGAGPSKNCDILGIAMFDSCEIRLHPTGAGIARMGTKSQGQGHETTWAQIIASEIGIPADNIMVEEGNTDTAPYGLGTYGSRSTPVAGAAIAMAARKIKAKAQMIAAYKLEVHEDDLEWDIDGFRVKGLPEKAMSMKDICWAAYNSVPPGMEPGLEAVSYYDPPNMTYPFGAYLCVMDIDVDTGVYKVRRFYALDDCGTRINPMIIEGQVHGGLTEAFAIAMGQEIRYDAEGNVVTGSFMDFFMPTAVETPHWETDYTVTPSPHHPIGAKGVGESPNVGGVPAFSNAVNDAFSFLGATHIQMPHDFWRNWQAAKTLGVVA

SEQ ID NO: 3576 - protein, 531 aa, Oryza sativa
MMMMNYRALWLWLSVAIVFSVQSCRALAAGEGSKEADKIAALPGQPPDVKLQQYSGYINVNETSGKSLFYYFVEASVDAAHKPLLLWLNGGPGCSSMGIGAFQEIGPFRVDTDGKTLCRNPHSWITAANLLFLESPVGVGFSYAAVKPQEVYSTIGDNMTAHDSHTFLLRWLDRFPEYKTRDLFIVGESYAGHYVPELAVTILDNNLLPHATPIKLKGIAIGNGILEFAAEQTQLYEYLWQHAFISDSAHALITQSCKYPDDHPSALCESARKAAYSRIGNIDIYNIYSSTCHEQKVRPSASKCMDLADPCSQYFVEAYMNQPQVQKTIHANTELKYPWTRCRVYNLDHFGDSPKSMLPYIKAVITGRIRIWIFSGDLDAMVPVTATRQSMERLQLRVAADWRPWSADGKDVAGYVIAYDGLVFATPYAHTSAGRYTIRQKLGRACNTVRGSESELINSGRWSTNLWSGCNASGPIHCHPLRSGPKSVTHRPILPSVTKHIWHQHADLVHHIFTEKGNQTSRINPLLYSLN

SEQ ID NO: 3577 - protein, 212 aa, Azotobacter vinelandii
MSIRLGDIAPDFEQDSSTGRIRFHEWLGDGWGILFSHPADFTPVCTTELGFTAKLKDEFAKRNVKAIALSVDPVDSHLKWIGDIEETQGVQVGFPIIADADRKVSDLYDLIHPNANDTLTVRSLFIIDPNKKVRLIITYPASTGRNFHEILRVIDSLQLTDNYKVATPANWKEGDEVVIVPSLQDPEELKQRFPKGFRAVKPYLRLTPQPNR

SEQ ID NO: 3578 - protein, 184 aa, Myxococcus xanthus DK 1622
MLTVGDKIPNFKVKATVSLEKGKEFQDITNETFKGKWLVLFAWPKDFTFICPTEIAEFGKKNKDFTDRDAQVLGLSTDSEFVHHAWRTHHPDLKNLPFPMLADIKHELCNALGILHKEEGVALRATFIADPEGIIRHVTVNDLSVGRNVSETIRTLDALQTDELCPCNWTKGEETLTQKLSKAG

SEQ ID NO: 3579 - protein, 374 aa, Capsicum annuum
MASIINNPFTSLCCNTNKCEPNRICSLRSQQSLVFDNVNRKVGFPSVVCKAVSVQTKSPTEIEGLNIAEDVTQLIGNTPMVYLNTIVKGCVANIAAKLEIMEPCCSVKDRIGFSMISDAEEKGLISPGKTVLVEPTSGNTGIGLAFIAASRGYKLILTMPASMSLERRVILKAFGAELVLTDPAKGMKGAVSKAEEILNNTPDAYILQQFDNPANPKIHYETTGPEIWEDTKGKIDILVAGIGTGGTISGTGRYLKEKNPNIKIIGVEPTESNVLSGGKPGFIPGNLDQDVMDEVIEISSDEAVETAKQLALQEGLLVGISSGAAALAAIQVAKRPENAGKLIAVVFPSFGERYLSSILFQSIREECEKMKPEL

SEQ ID NO: 3580 - protein, 142 aa, Glycine max
  misc_feature (48)..(48): Xaa can be any naturally occurring amino acid
  misc_feature (60)..(60): Xaa can be any naturally occurring amino acid
MASVASSTTLISSSASVLPATKSSLLPSPSLSFLPTRSSPSPSASLRXSLVPLPSPQSAXSSRRSFAVKAQTDDLPLVGNKAPDFEAEAVFDQEFIKVKLSEYIGKKYVILFFYPLDFTFICPTEITAFSDRYAEFEKLNTE

SEQ ID NO: 3581 - protein, 384 aa, Prochlorococcus marinus subsp. marinus str. CCMP1375
MKIAFFTETFLPKVDGIVTRLTKTIESLTDAGDEVIIFCPEGCPEEYMGAKVVGVPAMPLPLYPELKLGLPGASVSDALETFKPDLIHVVNPAVLGLGGIWLAKTNGIPLVASYHTHLPKYLEHYGMGMLEPLLWELLKAAHNQAMLNLCTSTAMVKELSEKGIQNTALWQRGVDTQNFRPELRNNNMRKKLLGKFSDEGALLIYVGRLSAEKQIERIKPVLEALPNARLALVGDGPFRNQLEQIFENTPTTFIGYLAGEELASAYASGDAFLFPSSTETLGLVLLEAMAAGCPVIGANKGGIPDIITDGINGCLYDPDGENNGTESLIKATEKLLGDNKNERQSMREAARLEAERWGWPSATEQLKSFYTQILEKNTTNNIAA

SEQ ID NO: 3582 - protein, 403 aa, Thermus thermophilus HB8
MRLYRVGLFTDVYFPNPNGVTTSVYLLLRELRRMGHEAWVIAPAHPEAPENEEGVVRVPSVAYPFYEGQQIALPSARHLPTEFELVHTHTPLTLGVWGLRIARNKNLPHVSTFHTHYEKYAHYVPGLAFLDKYTGIVPRLAKAFYNRVEVVIAPTEPVKRLAESYGIERPIRVIPTGIDNRLLEEAPLPSPSPWPEGKRRLITVGRLGKEKSFDVVLKAVAELAKEEDVFLVHIGEGPELPHLKALAKELGIADRVLFLGPVPYRKIGGYYRLAELFLFASETETQGLVIWEAQAMGVPVVAVGAEGVLEGVEDGKTGFLVPPGDFRALAEKALELLKDEERRRRFSLQARAFALKRSAETIAEQIVAVYDEASEILRVEPRRLIFPFPRLPRSSLEDRPGGF

SEQ ID NO: 3583 - protein, 345 aa, Rhodopseudomonas palustris CGA009
MSIKNDVVDAIGNTPLIKLKRASEATSCTILGKAEFMNPGQSVKDRAALFIIQDAVKRGTLRPGGVVVEGTAGNTGIGLALAANALGFRTVIVIPNTQSQEKKDMLRLCGAELIEVPAVPYANPNNYVKLSGRLAAQLAETEPNGAIWANQFDNVANRQAHIETTAPEIWNQTDGKVDGFVAAVGSGGTLAGVSIGLKQFNPKVRAVLADPLGSALYNYYKNGALKSEGSSITEGIGQGRVTANLEGAQIDDAYQIPDDEAVPLIYDLLEHEGLCLGGSSGINVAGAIRLAKDLGPGHTIVTILCDYGSRYQSKLFNPDFMRSKNLPVPDWMETKSTIQVPFEPV

SEQ ID NO: 3584 - protein, 319 aa, Rhodopirellula baltica SH 1
MGGYSLMSRGKTFDNIARAIGDTPMVQINRLVPSGDATVFAKCEFFQPLNSVKDRIGVAMIEAGERDGSINPDTHIIEPTSGNTGIALAFVCAAKGYKLTLTMPESMSVERRALLRAMGANLVLTPAGDGMKGAITTAQELVDQTDNSFMPQQFENPSNPAIHEATTGPEIWADTDGKIDAIVAGVGTGGTITGVARYLKKQNPDFKAFAVEPKHSPVISGGSPGKHRIQGIGAGFIPGNLDTSIIDDVVQVDDEDAFEWGRQLAKQEGIVAGISSGANMWAAAQIAARPEMKGKRIVTVMCSLGERYLSTPLFGDLGL

SEQ ID NO: 3585 - protein, 197 aa, Oryza sativa
MSGVIGHKAPAFSTEALMPDGSFKKVSLSDYAGKWLVLFFYPLDFTFVCPTEIIQYSERVEEFNTIGAEVVAASVDSVFSHLAWTKQPRKAGGLGPMKIPILGDITKEVSKAYGVLNEGGVAFRGVFIIDPEQNIRQITINDLPVGRNVDETLRLLQAFQFVAQHGEVCPAGWKPGAKTMKADPKGSQEYFAAAAAQ

SEQ ID NO: 3586 - protein, 423 aa, Legionella pneumophila subsp. pneumophila str. Philadelphia 1
MSIFRSVLITLLFISSAMAATPDQVTYLPGWGPIKNNQYAGYFPVNPKAGLFYWFVESNNPSMDAPIVLWLNGGPGAASLYGFFMENGPYQVDKNGKLTARKDSWTKAANYLVIDQPAGVGYSYGSSKSYGSEGEAIDQLQGALQLIFKKHPELYGKPLFLAGESYAGKYLPQLAIRLLKDKNMNLKGLLLGDPWINPRLQQKANIDYAYYHGLIDNKARKRVRVLYENCVKEIDKQSPSTSKANKTCEQIQEFIKQESGGLNLANIATGVEPEDTNMVNYLNQKVVREALHIPVTVSEFKTFSTAAAKKLEIGEQDSVADLYPQLLAAGIRILIYNGLEDGKDSNFLSTELLLASLDWHGKNAFAKAPTCIWRTNNEVSGYAKGAVGLTQVKIRGAGHLAPIDQPARVFDLFKHFINDKPLC

SEQ ID NO: 3587 - protein, 209 aa, Cytophaga hutchinsonii ATCC 33406
MSLVGKKAPSFVAPAVLNGYEVVEAFSLDQYLGKKYVVFYFYPKDFTFVCPTEILAFQEKLAAFEAKDTVVVGCSTDTENSHFAWLSMPKNKGGIQGVKYPLVADTAKTIATNYGVLGGNFDIDDNGQMIFVGAPIAYRGTFLIDKEGIVRHETVNDFPLGRNIDETLRMVEALQHVEKFGEVCPANWGEGKEAMKATVEGVSDYLAKN

SEQ ID NO: 3588 - protein, 338 aa, Magnetospirillum magnetotacticum MS-1
MRIALVTDAWTPQRNGVVRVLATLVGSLGDLGHVVRVIEPSAFTTIACPSYPEIPLALLPRRRVARMLDDFAPEAVHIATEGPLGWAARAWCLEHRLPFTTAYHTKFPEYISTRTGVPVSWPYALMRRFHGPAAAVLCPSPSVHRELRQKGFANATPWSHGVDTQVFCPGPKDFLDLPRPVFIYVGRVAVEKNLPAFLSLDLPGSKVVVGDGPARAGLMKRFPKAHFRIVNGDEELGRAFRAADVFVFPSRTDTFGLVMLEALASGVPVAAFPVTGPLDVIGGAPVGVLDEDLRAAALRALTIPPADCRRHAQRFSWSRVTAEFLSHLRPFTRRAQAG

SEQ ID NO: 3589 - protein, 332 aa, Phaseolus coccineus
MVVLSQPALNQFFLLKPFKSTPLFTGIPVVDLTHPDAKNLIVNACRDFGFFKLVNHGVPLELMANLENEALRFFKKSQSEKDRAGPPDPFGYGSKRIGPNGDVGWVEYLLLNTNPDVISPKSLCIFRENPHHFRAVVENYITAVKNMCYAVLELMAEGLGIRQRNTLSRLLKDEKSDSCFRLNHYPPCPEVQALNRNLVGFGEHTDPQIISVLRSNSTSGLQICLTDGTWVSVPPDQTSFFINVGDALQVMTNGRFKSVKHRVLADTTKSRLSMIYFGGPALSENIAPLPSVMLKGEECLYKEFTWCEYKKAAYTSRLADNRLAPFQKSAAD

SEQ ID NO: 3590 - protein, 793 aa, Ralstonia eutropha JMP134
MEPNHSEEGRGQGVGARVARKEDARHLHGKGRFVADIAMPDLQEVAFLRSPVAHARLLAVTKPQGLAASVIVREDMQEAKDIVADSAFPSYQPSAQPPLASGKVRFVGEPVAMAFAPTRAEAEDIAEQVSLELDELTALTEVAQAQQLAGEVRVHEHWRDNNFLTLTADKNFEARQREATVVVHRKIDLARQCMVPMEGKAVLAYWDHQFDQLVVYSATQVPHMIRTILSHCLGLEQERVRVISPDVGGAFGYKCVLQQEELCIAWLAMTYKRPFRFIEDRREHLTAGANSREHHYELTAYADARGRLLALDAKIAIDGGAYSVWPFTIGLEPGQAIGNLPGPYAFDAYRCETVCVATNKPGFVPYRGVARTGVCFAMELLIDAIAREVGREPWEVRCENVVPPQAMPYVNVTNKHFDSGDYPASVRKAMEMIDLAGIRARQKAGPEGSRYVGVGFGTYTEQSAHGTSVFAAWGTPVIPGFDSATVRITPDGGLEVRVGVHSHGQGMETTFAQIANEILGVDVARIKVVHGDTGLTPFSTGTYASRSLVMSGGAVSRACKALLPRLLKIGAHMLGQPEESARFEAGHVRAGEASIAVNRIADAWYINPHLLPSDVDAQGLETTMGFKPAVDTGSFTYATHAVAVEVDVDSGHVEILDYVVVEDCGTMINPMVVEGQTYGGVAQGIGTAMFEEMRYDGNGQPLASTLADYMLPGPTEIPSIRIHHFETPSPHTEFGAKGMGEGGAIAPPAAIFNAVNDALRDFGVELKETPLTPRKVLEALDAAAAQSESRKAA

SEQ ID NO: 3591 - protein, 1360 aa, Lactuca sativa
MEDTQLQLTSTETKEQQNQRLVFAVNGERFELSSVDPSTTLLQFLRSRTRFKSVKLGCGEGGCGACNVLLSKYDSNLKQVEDYTVSSCLTLVCSINGCSITTTEGLGNSKDGFHSIHQRFAGFHASQCGFCTPGMCVSLFSALVNSEKNDHPQPPLGSSKLTSSEAEKSISGNLCRCTGYRSIADVCKSFACDVDMEDLGFNSFWKKEKTPDSKLLKLPFYDPKKICTYPEFLKNESMSPMHLKYQKRSWYTPVSMKELNSLLVSSVTEKGKMVKLVAGNTCIGYYKEVDQYDKYIDLRFIPELSTIKRTDSQIKVGATVSISKLIFALKEERDDDDDDDEGDMVFQKIASHLEKIASESVRNSATIGGNLVMAQRHGLPSDIATLLVAVKSEVTIMNGIKKVLTLEEFLAQPALDSTTLPLSVHIPFMKPNKNGYNSDKSDTKLLFETYRASPRPLGNSLAYLNAAFLAEVSPYKSGNHVINNIQLAFGAFGNKHAIRANTVENYLLGKTLSVGLLSESLKLLKANIQPEDDTSHSAYRSSLASSFLFEFLFPLLDSNASYIKSSRVRFDHYDEKRTLLSSSKQVLESSHEHYPVGEPITKTGASIQASGEAVFADDIPSPLNCLHGAFIYSTNPLAWVKGVEVKKDVHSVVSFQDIPKGGENIGAKTLFGPEPLFANELTECTGQRIAFVVADSQKNADIAAETAMVDYDTQDLEPPILTVEHAVENSSFFEVPSFIYPSQVGDFIKGMAEADHKIRSAEIKLGSQYYFYMETQTALAVPDEDNCMVVYSSIQVPEFAQSVIAQCLGIPEHNVRVITRRVGGGFGGKAIKAMPVATACALAAYKLNRPVRTYVNRKTDMIMAGGRHPMKINYTVGFKSSGKITALPLDILINAGISPDISPVMPWNMLGALKKYNWGALSFDFKICKTNHSSKSAMRAPGEVQASFIAEAVIEHVASVVSIDVGCVREKNFHTFDSLKMFYGGDSVGEFVEYTLPTIWDKLMKSSNFNDRVETIKKFNKCNTWRKKGISRVPILHEVSLRATPGKVSILRDGSIVVEVGGIELGQGLWTKVKQMTAYCLKAIQCEGADGNQLLEKIRVIQADTLSMIQGGFTAGSTTSEASCEAVRLCCDVLVERLVGLKERLEAQMGFVKWDSLILHANMQSVNLSASSFFVPEFTSMRYINYGAAVSEVEVNLLTGETKILQADIVYDCGQSLNPAVDLGQVEGAFVQGIGFFMLEEYSINSNGLVIADSTWTYKIPTIDTIPKQLNVHILNSGHHKKRVLSSKASGEPPLLLAVSVHCATRAAIKEARNQVRSWKGLEGSDSIFQLDVPATMPVVKTLCGLDNVDLYLQSLMSSS

SEQ ID NO: 3592 - protein, 390 aa, Ralstonia eutropha JMP134
MQTIAFTVNGRQVSGACTDRTHLGDFLRDTHRLTGTHLGCEHGVCGACTVLVDDKPVRSCITFAAGCAGADIVTVEGYEDDAVMADLRAAFNRHHALQCGFCTPGMLATARDIVLRLPDADEATIRHELSGNLCRCTGYMGIVAAIRSVLDARRAASGATVPGAPLAAATKKFTGFTVSDEALGAAPVQAATAANEAGRAADRKGWSRIEGSFAVPYPVDAVWAFMADLPAVAGCLPGAVLTEIEGEKVKGHIAIKFGPMSARFEGAARLQRDDSRMRGVLKGAGQDSLSNSKAAGDIAYQLTARSASETEVEVDLQYSLQGPLAQFSRSGLVRDFVRRMIADFGKSVARRMDPTLSEAERMKTAQLNPVALFFGVLWERVKRVFGAGGR

SEQ ID NO: 3593 - protein, 419 aa, Desulfovibrio desulfuricans subsp. desulfuricans str. G20
MSAASPSSACILPEKGPVTVAHCIASNFYGGPERQVLTHLEHLQRSGVRPLLIPFFEEGRRNELYLHAQERGIPVAPLRRQGAFNPLLIGELAGVLHREQVHLLVTHGYKANVVGRLASWFMRVPEVAVSRGWTGECPRVRLYERLDRLFLRFARHVVAVSAGQRAKVVEAGVPAARVSVIHNAIDLETYPPSAGVLRPLLGIPDTAEVVITAGRLSPEKNHAGMIRAAAMVLERHPDVYFAVFGEGALRSRLERQIEEAGLQNRFFLPGFRKDMRGIMHECDIFVLPSFTEGLPNVALEAAACRRPVVCTRAGGSPEVVRHGHTGLVTEPGDDAALAAAVGSLLDDPALRRTMGENAYSFISRSFSYAGQTEQYLNLYRRITPMPCAVTPQHCAWSDGRGGAVSGQEQQQPVRRQEDA

SEQ ID NO: 3594 - protein, 328 aa, Synechococcus sp. WH 8102
MSRIYDDNSLAIGNTPLVKLNSVTKNCKATVLAKVEGRNPAYSVKCRIGANMIWDAEKSGKLTKDKVIVEPTSGNTGIALAFTAAARGYKLILTMPESMSIERRRMMAVLGAELILTEAAKGMPGAIAKAKEIADSDPGKYFMPGQFDNPANPEIHFKTTGPEIWNDCDGAIDVLVAGVGTGGTITGVSRYIKNEAGKAIESVAVEPSHSPVITQTINGETVKPGPHKIQGIGAGFIPKNLDMSMVDKVEQVTNDESIAMALRLAQEEGLLVGISCGAAAAAAIRLAEQDAYAGKTIVVVLPDLAERYLSSVMFADVPTGIIEQPVAV

SEQ ID NO: 3595 - protein, 779 aa, Azoarcus sp. BH72
MHPSELGTVDAAAIRGGVGTAQTHDSAHLHVTGCASYIDDLPELRGTLHAALGLSQRAHARVVALDLAPVRSAPGVVAVYTAADVPGLNDFGPVIHDDPIFASDEVQFHGQALFVVVAHDMRAARMAARLARVEYEDLPALLTTDEALAAGSTVLPDATLRRGDADAAIGAAPHRLAGSVRLGGQDHFYLETHIAYAIPREDRTLHVHSSSQHPGEVQLQVAHALGVDAKDVVIECRRMGGGFGGKESQPGQIAAIAAIAAWHTGHPVKLRLDRDDDMALTGKRHDFRIDWEAGFDDDGLILGVRFMHGCRAGYSADLTGAIADRAMFHADNAYYLGDVTIESHRCKTHTVSNTAFRGFGGPQGMFGIEEVIDAIARHLGRDPLEVRKLNYYGTDARNTTHYGQTITDNVIHTLTARLEAECDYPARRAALRAWNGASPVIKKGIALTPVKFGISFTATHLNQAGALLHVYTDGTVLLNHGGTEMGQGLFTKVAQVVAEELQIDLDRIRVTASDTSRVPNASATAASSGADLNGKAAQDAARKIKARLAGFAAARFGVREDEVVFRANRVHAGTASLSFAELAHAAWMARVSLSATGFYRTPKISYDRATLSGRPFYYYAYGVACSEVAIDTLTGESRVLRVDILHDAGRSLNPAIDLGQVEGGFIQGMGWLTMEALRWDASGRLLTHAPSTYKIPAVSDLPPVFNVRLWEDGHNSEDAIFRSKAVGEPPFMLALSVWHAIKDAVAAAADYRVTPRLDAPATAEEILRAVDAARQAAGV

SEQ ID NO: 3596 - protein, 266 aa, Glycine max
MASVTSPTTLISSSTRAFPAKSYSLPSPSVSFLRTLSSPSSSASLRSAFAQRSSLSSSSRRSFAVKAQTDDLPLVGNKAPDFEAEAVFDQEFIKVKLSEYIGKKYVILFFYPLDFTFVCPTEITAFSDRYAEFEKLNTEVLGVSVDSVFSHLAWVQTDRKSGGLGDLNYPLISDVTKSISKSFGVLIHDQGIALRGLFIIDKEGVIQHSTINNLGIGRSVDETMRTLQALQYIQENPDEVCPAGWKPGEKSMKPDPKLSKEYFSAI

SEQ ID NO: 3597 - protein, 161 aa, Thauera aromatica
MKNILRLTLNGRAREDLVPDNMLLLDYLRETVGLTGTKQGCDGGECGACTVLVDDRPRLACSTLAHQVAGKKVETVESLATQGTLSKLQAAFHEKLGTQCGFCTPGMIMASEALLRKNPSPSRDEIKAALAGNLCRCTGYVRSSKSVETAAAARLCEEGAR

SEQ ID NO: 3598 - protein, 769 aa, Thauera aromatica
MSPKLPQHGTVGVRTPLVDGVEKVTGKAKYTADIAAPDALVGRILRSPHAHARILAIDTSAAEALEGVIAVCTGAETPVPFGVLPIAENEYPLARDKVRYRGDPVAAVAAIDEVTAEKALALIKVDYEVLPAYMTPKAAMKAGAIALHDDKPNNILREVHAEFGDVAAAFAEADLIREKTYTFAEVNHVHMELNATLAEYDPVRDMLTLNTTTQVPYYVHLKVAACLQMDSARIRVIKPFLGGGFGARTEGLHFEIIAGLLARKAKGTVRLLQTREETFIAHRGRPWTEVKMKIGLKKDGKIAALALEATQAGGAYAGYGIITILYTGALMHGLYHIPAIKHDAWRVYTNTPPCGAMRGHGTVDTRAAFEALLTEMGEELGIDSLKIRQINMLPQIPYVTMYAQRVMSYGVPECLEKVKAASGWEERKGKLPKGRGLGIALSHFVSGTSTPKHWTGEPHATVNLKLDFDGGITLLTGAADIGQGSNTMASQVAAEVLGVRLSRIRVISADSALTPKDNGSYSSRVTFMVGNASISAAEELKGVLVKAAAKKLDAREEDIEVIDEMFMVSGSQDPGLSFQEVVKAAMVDSGTITVKGTYTCPTEFQGDKKIRGSAIGATMGFCYAAQVVEASVDEITGKVTAHKVWVAVDVGKALNPLAVEGQTQGGVWMGMGQALSEETVYDNGRMVHGNILDYRVPTIVESPDIEVIIVESMDPNGPFGAKEASEGMLAGFLPAIHEAVYEAVGVRATDFPLSPDRITELLDAKEAAA

SEQ ID NO: 3599 - protein, 166 aa, Bradyrhizobium sp. ORS278
MPKTHVTMKVNGSEVEGLAEPRTLLVHFLREQAQLTGTHIGCETSHCGACTVDIDGMSVKSCTMLAVQANGAEITTIEGMANADGTLSPLQEGFRMMHGLQCGFCTPGMILRAHRLLKENPSPTEAEIRAGISGNICRCTGYQNIVKAIQYAAAKINGVEFQEAAE

SEQ ID NO: 3600 - protein, 153 aa, Burkholderia xenovorans LB400
MPIAVDQPIPDFTAPATGGEITLSKLRGKKVVLYFYPKDNTPGCTTEGLQFRDLYPKFRKAGAEIIGVSRDSLRSHDNFKAKLELPFPLISDPEETLCALFNVIKMKKMYGKEVRGIERSTFLIDAGGVLRQEWRGVKVPGHVDDILEAVQAL

SEQ ID NO: 3601 - protein, 416 aa, Frankia sp. EAN1pec
MEEQPAARVLIVEQGEGLWGAQRFLLRLAPLLERRGIEQILAAPEDSATGAAWRASGRHHAVLPVPADRRLRRPDGRPSPALVLRESGRTAVMAARTARLARRFGVDVLQANSRWSHLEAVGASALCRRPALLLLHEENEPDLVGRLRGLAVRGAARSVAVSGAVAASLPGWAARRAVVIRNGVDTDALRPGPADPAVRASLSTDPAAPLVLAMSRLDPRKGVDKVIRAVAALPDHLKSTRLAVAGAPSLDPASGESLRRLGAELLGDRVLFLGPRSDIGDLLRATDVLVLASSLEGLPLNVLEAQACGRPVVAFPTAGIPEIVTDGATGLIARQDDVADLSAKLARVLDDQTLAALLGARARASVVAHHTLDAQADALGGLLISLAGQARARRHRSAGHDTAHHEVHHTTAGRRS

SEQ ID NO: 3602 - protein, 212 aa, Pseudomonas fluorescens PfO-1
MSLRLGDIAPDFEQDSSAGKIRFHEWLGDSWGVLFSHPADFTPVCTTELGFTAKLKDEFTKRGVKAIALSVDPVDSHHKWIEDINETQNTIVNFPILADADRKVSDLYDLIHPNANDTLTVRSLFVIDPNKKIRLTITYPASTGRNFHEILRVIDSLQLTDNYKVATPANWQDGEEVVIVPSLKDEDEIKQRFPKGYRAVKPYLRLTPQPNK

SEQ ID NO: 3603 - protein, 226 aa, Ashbya gossypii ATCC 10895
MSNTLRPQIYVGCKAPNFQVQSSQGIIDFYDYIGDSWCLFFSHPADFTPVCTTEIGALASLAEEFAMRRCKLLGLSTNNRATHVKWLKDIERVTGFRVNFPLLCDVDRRLSTVFGMLDARTLDADGHPVPLRSTYFVDPNKVIRLVQSYPLSTGRNTAELLRCLDSLQLSDATSHQFMTPVNWIPGDDVVLAPDLDAPTMQEKYPEHRTIRDYLRLAPFDPDQLDR

SEQ ID NO: 3604 - protein, 284 aa, Pyrococcus furiosus DSM 3638
MFFAKLEFFNPFSRSIKDRPVYNMIMKAIESGEIDGTDTLYEATSGNVGIALAALSAVLGLKFRAYVPKPTPKITEILIKMFGAEVIRTKFETIDPEFINFVKEEAKKDKAVNLNQFENDANFEAHYYGTAKELDEQLKSIKKKPEVIIAGVGTSGHIAALSKYFKEKYGTKIIGVVPAEGEKIPGIKRIETKPKWFFQVKVDKVVEITTREAVEGALRVARTDGLIIGLSSGAVVKAYEKINPKGTTVLIFPDDGFKYVEIFQAFLQEAQDTTSSQTARHQSP

SEQ ID NO: 3605 - protein, 325 aa, Synechococcus sp. PCC 7002
MDIKDGFVGAVGNTPLIRLNSFSEATGCEILGKAEFLNPGGSVKDRAALYIIKDAEERGLLKPGGTVVEGTAGNTGIGLVHICNAKGYKCIIVIPETQSQEKIDLLRTLGAEVITVPAVPYADPNNYVKYSQRLAAETENAIWANQFDNLANRRAHYETTGPEIWAQTDGKIDAWTAATGTGGTYAGTALYLKEKNPNVKCVVADPMGSVLYSYVKTGKLDREGGSITEGIGQGRITANMEGVPMDDAIRVDDQEAVQVVYQLLKKDGLFMGGSVGINVGAAYALAKEMGPGHTIVTVLCDSGARYQSRLFNPAWLASKGLSIPN

SEQ ID NO: 3606 - protein, 267 aa, Arabidopsis thaliana
MASVASSTTLISSPSSRVFPAKSSLSSPSVSFLRTLSSPSASASLRSGFARRSSLSSTSRRSFAVKAQADDLPLVGNKAPDFEAEAVFDQEFIKVKLSDYNGKKYVILFFYPLDFTFVCPTITAFSDRHSEFEKLNTEVLGVSVDSVFSHLAWVQTDRKSGGLGDLNYPLISDVTKSISKSFGVLIHDQGIGIALRGLFIIDKEGVIQHSTINNLGIGRSVDETMRTLQALQYIQENPDEVCPAGWKPGEKSMKPDPKLSKEYFSAI

SEQ ID NO: 3607 - protein, 523 aa, Triticum aestivum
  misc_feature (312)..(312): Xaa can be any naturally occurring amino acid
MKSTVVALLLLVAVQCLALGPGTTAAAKPRRTRQGDYLNRLRGSPSSRVSWESLAAVEEEETTTKATGRPAPAAAAAEAGRKEADRVEALPGQPSGVDFSQYAGYVTVDPAAGRALFYYLAEAVGGNGNGDGSSSKGKPLLLWLNGGPGCSSLGYGAMEELGPFRVMSDGKTLYRNPYSWNHAANVLFLESPAGVGYSYSNTTADYGRSGDNRTAEDAYLFLANWMERFPEYKGREFYITGESYAGHYVPQLAHAILRHASPAINLKGIMIGNAVINDWTDSKGMYDFFWTHALISDETAAGINKNCNFTAXGAGAAPSALCYDASDEASESLRDIDIYNIYAPNCQSEKLVTPPIAPSIENFDPCTDYYVDAYLNRPDVQKAMHANVTRLDHPWSACSEVLTRWVDSAKTVLPIIRELMKNNIRVWVYSGDTDGRVPVTSSRLSVNQLQLPVAAKWRPWFSSTKGAGEVGGYIVQYKGDLSLVTVRGAGHEVPSYQPRRALVLVQNFLAGKALPDCKECEQN

SEQ ID NO: 3608 - protein, 260 aa, Vibrio sp. Ex25
MIELRVLLLSFFSINSIYLFRFFQYYNLYYSLSRTNTDQTDTTEFGLELTILFRSKKMVLVGRQAPDFTAAAVLGNGEIVENFNFAEFTKGKKAVVFFYPLDFTFVCPSELIAFDNRLADFQAKGVEVIGVSIDSQFSHNAWRNTAIEDGGIGQVKYPLVADVKHEICKAYDVEHPEAGVAFRGSFLIDEEGVVRHQVVNDLPLGRNIDEMLRMVDALNFHQKHGEVCPAQWEEGKAGMDASPKGVAAFLSEHAADLGKK

SEQ ID NO: 3609 - protein, 198 aa, Helianthus annuus
IILHDYVGDSFTIIFSHPGDFTPVCTTELGAMAAYADKFAQRGVKLLGLSCDDVQSQKEWIKDIEAYNKGKKVTYPIAADPNREIIKQLNMVDPDEKDASGQNLPSRALHIVGPDKKIKLSFLYPASTGRNMDEVVRALDSLIKASQHKIATPVNWKEGEPVVIAPSVSNDEARKMFPKGFQTVDLPSNKDYLRFTSV

SEQ ID NO: 3610 - protein, 422 aa, Physcomitrella patens subsp. patens
MYAGYITVNEQAGRAHYYFFVEAAEEPENKPLVIWHNGGPGCSSIAYGFGEELGPFFINEGGETLRLNPNAGNKVANIVFVESPAGVGFSYTNTSNDLYTSGDNRTAYDNYAFVTNWMKRFPQYKGRDFYLSGESYAGYYVPELSKLIYENNKNLPDADKINFKGFMVGNPVIDTYSDNWGYIDFLYYHAMISDQLYAKIKVVCNFQRKNATLSDACVKLLYYNADEEQGEIDPYSVYAPACTSNTTFGGNFTGHHPLHTPHKKLEEYDPCTYDYSLIYFNRPDVQKAMHANTTGIPYPWVGCSDPLFLNWKDSATTVLPIYQELLEAGLQLWVFSGDADSVVPVTGTRYALSSLNLPVVVPWYSWYHNLQVGGRVIVYEGNLTLVTVRGAGHEVPLLRPEEFLQVFSAFLNQSLLPRTPYP

SEQ ID NO: 3611 - protein, 319 aa, Xanthomonas campestris pv. vesicatoria str. 85-10
MALYDNILDTIGRTPVVKLQRLAPDNVTLYVKVESFNPGGSVKDRLALAIILDAEQRGLLKPGDTIVEATSGNTGVALAMVAAARGYKFVATMVETFSIERRKLMRAYGAKVILTPAAERGSGMVRKAKELAEQHGWFLASQFANPANPAYHRNTTAAEILRDFAGHRLDHFVTGWGTGGTLTGVGEVLRVARPEVRITASEPAGAALLQGQDWKPHKIQGWTPDFVPEVLNREAAHQVLSVEDTDAITVARRLAAEEGIFTGISGGATVATALRVAEGAASGAVILAMLPDTGERYFSTPLFADINEGSDDDWLAGLP

SEQ ID NO: 3612 - protein, 308 aa, Triticum aestivum
  misc_feature (130)..(130): Xaa can be any naturally occurring amino acid
  misc_feature (212)..(212): Xaa can be any naturally occurring amino acid
  misc_feature (221)..(221): Xaa can be any naturally occurring amino acid
  misc_feature (229)..(229): Xaa can be any naturally occurring amino acid
  misc_feature (252)..(252): Xaa can be any naturally occurring amino acid
  misc_feature (263)..(263): Xaa can be any naturally occurring amino acid
EVFQEGGRRIPDVAPGRLAEAQPGEGENFLSYNPLPGTPRLTTAAMACAFSASTVSTAAALVASPKPAGAPQCLSFPRAIAGAAARPSRLAAASSRTARARSFVARASAEYDLPLVGNKAPDFAAEAVVXQEVINVKLSDYIGKKYVILFFYPLDFTFVCPTEITAFSDRHEESEKINTEILRVPVDSVVSHLAWVQTERKSGGLGDLKYPXLVSDVTKSXSKSFGVLXPDPGIALRGLFIMDKEGVIQHSXLTPLVSGRSVXETLGTLPALQYVQENPDEVCPAGWKPGEKSMKPDPKGSKEYFAAI

SEQ ID NO: 3613 - protein, 155 aa, Wolbachia endosymbiont of Drosophila ananassae
MELAVGNNAPDFSLPTDSGENLSLSEFFDKKNVVLYFYPKDDTPGCTMEAKGFRDKIDDFSFLDTVIIGVSKDSVKCHTNFKAKYSLPFSLVSDENAEMLGKYGVWVEKSMFGKKYMGIERTTFLIDKKGKIVKIWKNVKVSGHVDEVLEEVKRI

SEQ ID NO: 3614 - protein, 185 aa, Glycine max
MPNGENPAWEAIGYQVDSDGITTTSNVHRERPLEKGIVEAMKESNLSLPKSLIEKGLEVAIDSKNNTLNIKCDVVIVGSGCGGGVAASILASSGLKVLVLEKGNYFTPNDYSSLEGPSLNELYELGGTFASRDGKMAILTGTTVGGGSAVNWAASIRTPDFVLEEWGKDHKLSLFSSHEYLSAMD

SEQ ID NO: 3615 - protein, 301 aa, marine gamma proteobacterium HTCC2143
MEFPTIEDYVGGSPLVRLQRINGTTSSNTILLKLEGNNPAGSVKDRPALSMINRAEARGDIKAGDTLIEATSGNTGIALAMVAAIKGYNLKLIMPSHMSQERKLAMAAYGAELIDVTQKEGMEGARDLALQMQADGQGVVLDQFANVDNPMAHYEGTGPEIWRQSQKRVTHFVSSMGTTGTIMGVSKFLKEQNPNIEIVGLQPCDGSSIPGIRRWPEAYLPSIFERTRVDRVIDVDQRDAEVMMKRLAAEEGVFCGVSSGGSVVGALKIAEHVENAVIVAIICDRGDRYLSTGVFDSTLQK

SEQ ID NO: 3616 - protein, 302 aa, Clostridium thermocellum ATCC 27405
MIYDDMQQLIGNTPLVRLRHSGFPDGVRVYAKLELYNPSGSVKDRIGKYMIEDAEKRGVLVPGSTIVEGTAGNTGLGIAFAALNRGYRLIMVVPTKFSQEKQALLRALGAEVINTPREEGMLGAERKAEELRQSIPKAVSLEQFRNPANPLAHYETTGPEIWEDLGADIDYFVAGAGSGGTYAGIVRYLKEQKPDIKGILADPIGSTMGGGEHGDYDIEGIGNDFIPETMDMSLVDEVIKVSDDEAFTETRLLARNEGIIAGSSSGANLAAVRKLAMRIQRGTIVTVLPDRGERYLSKNLFL

SEQ ID NO: 3617 - protein, 456 aa, Chromobacterium violaceum ATCC 12472
MQDNSVLSLIGNTPLVRVSHLDTGPCELYLKLESHNPGGSIKDRIALTMIEAAERDGKLKPGGAIIEATAGNTGLGLALVAAQKGYPLTLVVPDKMSREKILHLQALGAQVVLTRSDVGKGHPEYYQDLAARIASETPGAYYIDQFNNPANPLAHETTTGPEIWRQMNGEVDAVVVGVGSSGTLTGLTRFFRAKAPATAFVLADPVGSVLADYVETGSFGQAGSWLIEGIGEDFIPPQTDLSMVKRAFRVSDQESFDTAQQLLRSEGILAGSSSGALLAAALRYCREQTEPKRVVTLVCDSGNKYLSKMYNRDWLVDQGMLRLPEVGGLTDLIVRRHQDGSTVSCHPDEPLNVAYQRMRLHDVSQMPVLDDDKVVGVLDEWDLLLSVHGEPENFRQTVATAMSSHVRTLSPQASLQDLLQVFNDGHIALIVDKGRYLGLITQADLLSFWRRQPRAA

SEQ ID NO: 3618 - protein, 303 aa, Oenococcus oeni PSU-1
MLINNLYQLIGKTPLLRLNIDVPNRSRIYAKLEMFNPGGSIKDRLGIALIAYGRKIGAVKEGTTIIEPTAGNTGIGLALAAQQYHLPVKLIVPEKFSFEKQTLMRALGAEVINTPADDGIKGAIAKAQSLAKTIKNSYVPLQFQNPANPDIYYRTLGPEILQDLSGQKIDAFVAGSGSGGTFVGTTKFLQEHYPKMQAVTVEPEGSILNGGPEHPHRIEGIGVEFVPPFFDQIRVDQVKTISDDRAFEYVKWLAAHVGLFAGSSSGAALAASLQLAKELPSDSTVVTVFPDSSERYLSKGIYD

SEQ ID NO: 3619 - protein, 437 aa, Sulfolobus tokodaii str. 7
MFSVAINTQTPPIRFRYTYRDLVDKYGFLSFPIDVSLLDPSDYYISVGGVAKMMLALSKKFNKTRWVSLGPGYPPEVKYKDLNIYFVDLNPKDLQGYTRFKEGIYNEAHGLSKYDIQPEDYIAYATYNWLSAQKLLEFYKDTDIYFINDFQQLLIGGIIGPSAPAVLWYHIPFVPEYLSHKMREFLIRTFEGFDGVIVSTKRDLEGMLRAGIKGRVKQVYPFIDPQEYRKVSGQEVMKVREKYGIKGDEKIVTVVARMDPMKSQDVAIQAMKYVNDAKLLLVGNGSFTSGALGTGKANIWAKKLQALAEQINVKDKVVFTGYVPDEELYAIYEASDVIVLPSNIEGFGLTVCEGWVYGKPAIVSSGAGISELIIDGGNGFVFKRGDYQDLADKLNTVLKDPDKYSLGKETLRKCSVDSSYDYLKEVFIDVMKDYGKI

SEQ ID NO: 3620 - protein, 215 aa, Gluconobacter oxydans 621H
MNVSTPAESPLPFLRIGDRAPDFSARTTHGEFIMSALRGHWVLLFAHPADFTPVCTSEFIALARSAEEFQKRDCVLLGISADSLPAHLAWVEAINTQFGIQIPFPIIEDPSLAVARAYGMLDSAAQDSATVRSIFVIDPSGTIRAILNYPATVGRSVPELLRLLCALQEVDRAGALTPESWQPGQPTVAPPLQTQAAVEKAGAKWFFQPMTRERS

SEQ ID NO: 3621 - protein, 306 aa, Lactococcus lactis subsp. lactis Il1403
MVKIVENITELVGNSPIIKLKNGPENGAEIYLKLEYFNPGGSVKDRIALQMIRQAEADGRLKKGGTIVEPTSGNTGIGLAMAGAALGYNVVIIMPDSYSKERRQIIQAYGAELILTPAADGIKAAIDLGQKLVEENGWFMPMQFENPANLKAHELTTGPEIIEAFGENGLDAFVACAGTGGTISGVSHYLKSQNSKIKTFVVEPAESPILTGGESGPHRIQGIGIPFMSPNLDTKAYDGVIDVTSDEALETARKIGKSEGFLVGISSGAAIWAAYELAKKLGKGQKVLALCADNGERYLSTELYDY

SEQ ID NO: 3622 - protein, 295 aa, Methylobacillus flagellatus KT
MYKTLDDFVGNTPLVKLQRMAGKTSNTILLKLEGNNPAGSVKDRPALSMIKRAEARGDIKPGDTLIEATSGNTGIALAMVAAMRGYKMVLVMPDNQSVERRQSMKAYGAELVLTPRDGGMELARDVATKLQAEGEGIVLDQFANQDNPLAHYEGTGPEIWRDTAGKITHFVSSMGTTGTIMGTSRYLKEQNRDIRIVGVQPEEGAQIPGIRKWPEEYLPKIYDAKRIDELVYVNQENAEKTTRRLAQEEGIFAGISSGGALYAALQLSKRVENAVIVTIVCDRGDRYLSTGVFPS

SEQ ID NO: 3623 - protein, 218 aa, Zea mays
MAFTPATACCKASLALAPRASPRGPAACAQAALLCTPSTSVFRGLRAPASAAPAPRRRRSAASTGIVCGKVAKGSVPPNFTLKDQNGKPVSLNKFKGKPVVVYFYPADETPGCTKQACAFRDSYEKFKKAGAEVIGISGDDAASHKAFAQKYRLPFTLLSDEGNRVRKEWGVPSDLFGTLPGRQTYVLDKQGVVQYVYNNQFQPEKHIGETLKILQTL

SEQ ID NO: 3624 - protein, 300 aa, Cupriavidus taiwanensis
MAYKTIEDTIGNTPLVRLQRIPGAANDARGNVILGKLEGNNPAGSVKDRPAVSMIARAEARGRIKPGDTLIEATSGNTGIALAMAAAIRGYKMVLIMPEDLSLERRQSMAAYGAEIILTPVKGGMEYARDLADSMERDGKGVILDQFANPDNPQAHYEGTGPEIWRDTDGRITHFVSAMGTTGTITGVSRYLKERNPEIQIVGAQPAEGSRIPGIRKWPEAYLPKIYDPSFIDRTEPVSQGDAEHMARRMASEEGIFCGISAAGALCVALRVAEEVENATIVFVVCDRGDRYLSTGVFPA

SEQ ID NO: 3625 - protein, 762 aa, Sulfolobus tokodaii str. 7
MYIEGLRAVNGEGEYINDLPDLAGTLYMAIYRSPIAHGKIKKIDLSDVKLHGGIAFGPEELSKVIVNPFPNTVELPIKYYPFAKDKVRFVGEPIAVVLAKDYYKAIDLLDYINVEIEELPPVITIEDSLKNEVLLHEEVKTNIAMHKIMRFGNIERAFSESPIVISHTFKFGRHSALPLETYGVLAKFGEELEVWANIQGPMLQVYFLSRALNIPINKIKLFSPRDIGGSFGNKYSLYPYITLAAAASKLTGKPIRWFESRAESFIASSAGGERKGNVEIAATKDGVIKGIRYTFYEDVGAYVRPPEPGVLFRVQGNLNGAYDIRAIEAEYYVVLTNKSPTGLNRGYGGPPFYFALETAVDKLADEVGIDPLELRLKNLIKVFDKEINGQRFYETVSGGLYPEQDYVKVVKAIEDEYKKWKSMKDVGVGIAVIVEPSGTNLAYVDLALNKIKNPHSASSDYVTIALNPDGSVSVFVNGTNEGLGHETTIAEFISKELGIDESLIHVENRVDTTQPWNLASGSYSSRFAPIVMSAVKSGVDELKKRLAELAKKYLETEEIIFENGRFYDAKNKEKYVDIKRLVSAYHWNPSEFNYDKALSVTSYFYSPLLKPPQDNKINSSLGYAIQAHLAIVKRDEVTGEFKIVKYVISHDAGRILNKNLLEGQMYGGLLHGIALTFYEELKYDERGNPLVTLFDSYESPTLSEVIDTQVEFIHFETPAKYIPTGAYGGGEGPIMAAPAALANAISRLIGKRISEVPIRVIE

SEQ ID NO: 3626 - protein, 415 aa, Oryza sativa; identical to SEQ ID NO: 3404

SEQ ID NO: 3627 - protein, 438 aa, Sulfolobus tokodaii str. 7
MSFVLGIPKKFKYIKVNSLDEALELLRDGSKVLAGGQSLLPLLKLRILNVDTLIDIKNLDLRGVKENEKEIEIYSLTTHNEVASKVKLLSKVAFTIADFQVRNKGTIGGSLAHADPSSNYYPALLTLDAKVKVKSKKGEREIKISDLYLSPYTTSMREDEIITSIIIPKKKELNFTYEVYKRGGSAYPTAIVAVAIEGNKYKVSFGGITEKPTLFEGEVEGESTIKNVIERLRKEKIISDIHADSSTRLKIAERLFVNAFLKALKGVIDKLDIPNIENKWKSDMIRGEEMVKVRMKVNDFEIEDEVEPRTLLLDFLRRNGYKEVKRGCDEGKCGACTVIINGKSIKSCLTLAVEVAGSDIRTVKGLSDIKPIKDSFLENFAMQCGYCTHGFLMVTYDYLKRVGKRDNDELLRHSIKNICRCTGYFNIIKAIKSSSLSQ

SEQ ID NO: 3628 - protein, 136 aa, Glycine max
MIQPSLESCTNDYVLPDSDGDDTLEATWRAIMEGQGKTMKPQLKKSDTWGARIAKAEPFHRNGEGGGDDDPVAWAQKELKKSDTFNDRASLRRDKSMSPEELNRRAEAFIKKINNQMKLQRLESYQRFREMVNRGV

SEQ ID NO: 3629 - protein, 269 aa, Populus trichocarpa
MACSATSTTLISSIAAAATATTTKSMAFPISKNITLPNSFFGTRKSFQSRVPRSISLTRGSHSRSTFVVKASSELPLVGNIAPDFEAEAVFDQEFINVKLSDYIGKKYVILFFYPLDFTFVCPTEITAFSDRHEEFEQINTEVLGVSIDSVFSHLAWVQTDRKSGGLGDLKYPLISDVTKSISKSYGVLIPDQGVALRGLFIIDKEGVIQHSTINNLAIGRSVDETKRTLQALQYVQENPDEVCPAGWKPGEKSMKPDPKLSKDYFAAI

SEQ ID NO: 3630 - protein, 269 aa, Bradyrhizobium japonicum USDA 110
MGACSYSQQRTRHQREKRRAKGADIQGQRLAPAAEPSRHRRSGDRFRKLPARSRHALAAARNIVAESLTCDNRHDDLSMTRSPQNPSCKVPFALSLIGITTNIREDFTVSTVKLTVNGKAVAVDVEDRTLLVHLLRDHLNLTGTHVGCDTSQCGACVVHMDGRAVKSCTMLAGQADGASVTTIEGIAKGDELHPMQAAFRDNHGLQCGYCTPGMIMSAIDIVHRHGGELDEATVRQELEGNICRCTGYHNIVKAVLDAAGRMKVAQAAE

SEQ ID NO: 3631 - protein, 211 aa, Synechococcus sp. PCC 7002
MSLRLGDVAPNFTQDSTIGEINFYDWAGDSWVVLFSHPADFTPVCTTELGEVARLKGEFEKRNAKVIALSVDDTASHNGWVGDIDETQGCAVNYPILSDADQKVATLYNMIHPNANPKVTVRTVFVIDTERKVRLTITYPPSTGRNFQEILRVLDSLQLTDNYSVATPVNWQDGEDVVVSPAISTEDAKVKFPKGVKEIKPYLRMTPQPNK

SEQ ID NO: 3632 - protein, 780 aa, Bradyrhizobium japonicum USDA 110
MGVEGIGARVVRKEDKRFITGKGRYVDDIKLVGMTHAHFIRSPHAHAKVKKIDSSAALKMPGVVAVLTGQQIVDDKVGNLICGWAITSKDGSPMKMGAWPAMAPETVRFVGQAVAVVIADSKNLARDAAEAVVVDYEELPAVADVHAAIKAGAPQLHPEAPGNQVYDWVIGDEGATDAAFAKAANVVKLDVTNNRLAPNAMEPRAAIADYDAAEEHFTLYTTSQNPHVARLVLSAFYNIAPEHKLRVIAPDVGGGFGSKIFIYPEEMVALWASKKVGRPVKWTGDRTEAFLTDAHGRDHVTHAEMAFDASNKITGLKVKTYANFGAYMSLFSSSVPTYLYATLLSGQYNIPAIHAEVIGVYTNTTPVDAYRGAGRPEASYLIERLMETAARQLKVDPAALRRTNFITQFPHQTPVIMAYDTGDFNASLDAAMKAIDYAGFAARKAKAKADGKLRGIGVSCYIEACGIAPSKAVGSLGAGVGLWESAEVRVNPVGTIEILTGSHSHGQGHETTFCQLVAERLGVPISQVSIVHGDTDKVQFGMGTYGSRSAAVGLTAILKAMEKMESKAKKIAAHALEASEADIVIENGEFKVTGTDKAIAFPMVALAAYTAHNLPDGMEPGLKESAFYDPTNFTFPAGTYICELEVDPGTGKTSFVNFVAADDFGRLINPMIVEGQVHGGLVQGIGQALLEHAIYDANGQPVTASFMDYAMPRADDVPSFNLSHTTTLCPGNPLGIKGCGEAGAIGASAAVINAITDAIGKNNLEMPATPDRVWRTIHAA

SEQ ID NO: 3633 - protein, 1529 aa, Arabidopsis thaliana
  misc_feature (1481)..(1481): Xaa can be any naturally occurring amino acid
MNVDQCQWRKKMMGRGVDGGCGAEEKPYRPFRRVALDKENGYEDMGSLEIDFLAQASKNLSERSPFDVPEDGSTSVLSVPTLPIALANLLKNHSDNKKRHKKSHSGADKKKKKSSRQGDKLRSGSIWLEHEDYFRRLDFPDLETLSDLASLRSLSSRNCFSIPSVEYDSIDIQQRETDASAKNEDVVCGDGVVLEQIKNLLTKDISEGTVRKEEDVVKPMGVDNVGNGISSGSDYSGSLEWVLGNRNRILLTSERPSKKRKLLGSDAGLGKLMVAAPCEGNALLCDFCCTGHHQLIVCTSCKATVHKKCYGLLEDSGKPWLCSWCELENGRADSERPCLLCPKKGGILKPVLSKTENGGPAEFAHLFCSLWMPEVYIEDLKKMEPILNFPGIKETRRKLLCNLCKVKSGACIRCCNGTCRTSFHPICAREAGNRLEVWGKHGCDTVELRAFCSKHSDIQESGKSVEGGESNAAESRSPICHLPSESVGEGHLSNDEMGVDVGTPGTGSDISRNSDLQELESPHSKFNLSATDNVESGMTGRSNEDERTLSKSLSFGLILKKLIDLGKVDVKDVAAEIGINPDALRAKLTVTHKTSHLPASNLYALIDGDLLPDLLGKVVKWLSQHAHMGSSDKGKNLKRKTTTKSERRAAICTEGIVMLDSDILDPAVAKAFSIERTHEINICNNTTNNTRCTLTENCTGNGIVVVEAKANGSVLKKEGSVSLAPDHSPEEKNSIVLDQKVHHGKSSVIPSDDHGEQSNSSSSGVMMENAFSLRPNSSQNRGNLNCPNPIILDLFNQEAYPGFNPHRYIHKELSELGKEQTLKSSTDSDVARMTTNFDGHLVTLTHLAGSEEGNKHLQGAETFLQLSKARKLGILDLSPEDELEGELLYYQLQLLGTAVSRKQLSDNLVYEVAKKLPLEIDEQHGRRWDDVLVNKYFHDVREARKQGRKEQRNKQAQAVLAAATAAAATSSRNTSLRKDMSEEPAQQEMSTSRRKVVGSSHLVPQTKESLLKMAVSGPPSEKRSDHHTPDFLVENPRTCDICRRSETIWNLIVVCSSCKVAVHIDCYKCAKESTGPWYCELCAESSSEPSFNFGEKPNSSTECTLCGGTTGAFRKTTNGQWVHAFCAEVKFPLRQQLLAGSGVLYSVLNIANNLVYNFWQWSLESTFRRGQINPVQGMESLAKKPDNCCLFCLIYGACTKCSYGNCQTTFHPSCARSAGFHMTGGGKHPHKAYCEKHSMEQKAKAESQKHGAEELKSLKHYRVELERLRLLCERIVKREKLKRELAISSHEILAAKRDHAARPLHVRNPFSPPEVSSDSATTSIKGHPDSNISGSEAIQRSDDITIDSTVTDKRRGKGPLLMDTDQKTDDSATSKSRFSRKLTERQILSGKTVPRKHCIVSPSVSEDGDNGSKPKKQHVETFAKELVMTSDEASFKNRRLPKGYFYVPVDCLQEDKPGNQKLASSDKPANQKTSSGDQSGXFTNWLKAKEQMVLRYKRAVAATENQLKKAIVKLLGTRYKLCLLVMFEI

SEQ ID NO: 3634 - protein, 794 aa, Arthrobacter nicotinovorans
MMAKAKALIPDNGRAGADEGNRQAWIGQEVLRREDRRLLTGTATFAGDLGVPGQLHMRIVRSTQAHARIVSIDATEAEKTPGVRMVITSEHTRHLGSVLLEELGYHEIYENIEDFSHPVLAVDKVLYVGQPVVAVLAVDPYLAEDAAELVSIEYEPLPVLLDPEEALTGKVELFPGRGNEGARIKKAYGDIDRAFAEAEHVIRHKYVTNRHSGVPMEPRAVVVQPDPARDTLFIWGTVHVHDNRRIIAKMLNLPEVNVRMKHVEIGGSFGVKGGVFPENVVAAWAARTLGVPIKWTEDRVEHMTSTSHAREMVHKLELALDAEGRILGMKDEIFHNHGAYFRQAEPLVSDITAGIVFGPYRVPAYDATLHAVFTNKTPVGAYRAPGRYESTFARERIFDLACAEIGLSKTEFRRRNLLTAEDLPWTPGLDIVHEPYHFDSGDVVKHFNEALEAANFSEWLEESKRLRADGRKVGVGLGVLMDKAGLGLFETGGVEVSRAGRVTVKTGGSSVGQGIETVLAQIVAEELQIAPENIDIVHSDTELIPDGVGSWSSRSTVLAGGAARKAALAVVEKARRLASEMLEADPDDLELTAGSFKVKGTDQQISLYEIAAARDPFTARADNDEPGLAADAVYMNNAMNYPYGVTLVQIELDPDTGGHRILRFSTSTEAGRVINPLTTRGQIIGAAVQGIGGALYEEFLYEEDGQPITTSFMDYLLPSAQEMPNVDCFVTEDAKSPDNPFGAKGLGEIGIIAAGAAIASAIDDAIADGVHTDRLPVTPEQIFSRCQGLNKAER

SEQ ID NO: 3635 - protein, 322 aa, Synechococcus sp. RS9916
MVIASDITALVGRTPLVRLNRLPAASGCRAELVAKLESFNPTASVKDRIAGAMVQAAEEAGTISPGRTVLVEPTSGNTGIALAMVAAARGYRLILTMPDTMSTERRAMLRAYGAELQLTPGTEGIQGAIDLARELVDEIPEAYLLQQFANPANPAIHARTTAEEIWADTEGQLDVLVAGVGTGGTITGCGRLLKQRHPGLKVVAVEPAGSAVLSGQPPGPHRIQGIGAGFVPPVLDRDLIDEVMAVSDEEAMVIGRRLAREEGLLSGVSSGAAVAAALQLGQRPELEGKRIVVILASFGERYLSTPMFSSALPLPPRLDGQL

SEQ ID NO: 3636 - protein, 260 aa, Glycine max
MACSATSASLFSANPTPLFSPKPSLSLHLNPLPTRPSPSLTRPSLSLTRPSHSRRSFVVKASSSELPLVGNTAPDFEAEAVFDQEFINVKLSDYIGKKYVVLFFYPLDFTFVCPTEITAFSDRHAEFEALNTEILGVSVDSVFSHLAWIQTDRKSGGLGDLNYPLISDVTKSISKSYGVLIPDQGIALRGLFIIDKEGVIQHSTINNLAIGRSVDETKRTLQALQYVQENPDEVCPAGWKPGEKSMKPDPKLSKDYFAAV

SEQ ID NO: 3637 - protein, 341 aa, Ralstonia metallidurans CH34
MVCNSIIESIGNTPLVQLRRLFGRADAEVFAKLELLNPAGSVKDRPARYIVEKGLTEGAIGPHSHVIESSSGNLAIALAMICGLKGLRFTAVVDPKISPTNLKILRCYGAGIEQVTAKDSQGGYLETRIERVRQMLREQRDAIWINQYANPLNWESHYYGEAAEILAQLAQPADVLVLGVSTSGTVHGIARRLRKAWPSMRVVGVDAVGSVLFGQPSQARELPGIGASRVPELLCRDEIDEVIHIDDYTAATACRRLLAREGIFAGGSSGAVVAAIEQVLHATPVSHRPLRILTLFPDRGERYLDTVYDDAWLARIAARRAVPNLAALPTVASLIPAGVSA

SEQ ID NO: 3638 - protein, 324 aa, Ralstonia metallidurans CH34
MATRNGFIGAVGNTPLIRLGKLSAETGCEILGKAEFLNPGGSVKDRAALYIIADAERRGTLKPGGTVVEGTAGNTGIGLAHICAARGYRCVIVIPETQSKEKMDLLRVLGAEVRTVPAVPYADPNNYQKVAGRLAQELDNAIWANQFDNTVNRQAHYETTGPEIWRDTDGKIDAFVCATGTGGTLAGVARFLKAQNPAVRTVLADPHGSGLYSFVKTGQIRAEGNSITEGIGSSRITANLADTPIDDAVRIDDQRCVTMVYRLLREEGLYVGGSTGINVAAAVQIAQDLGPGHTIVTLLCDRGSLYSARLFNAEWLAQKGLVAG

SEQ ID NO: 3639 - protein, 304 aa, Thermus thermophilus HB27
MRVEGAIGKTPVVRLAKVVEPDMAEVWVKLEGLNPGGSIKDRPAWYMIKDAEERGILRPGSGQVIVEPTSGNTGIGLAMIAASRGYRLILTMPAQMSEERKRVLKAFGAELVLTDPERRMLAAREEALRLKEELGAFMPDQFKNPANVRAHYETTGPELYEALEGRIDAFVYGSGTGGTITGVGRYLKERIPHVKVIAVEPARSNVLSGGKMGPHQFQGMGPGFIPENLDLSLLDGVIQVWEEDAFPLARRLAREEGLFLGMSSGGIVWAALQVARELGPGKRVACISPDGGWKYLSTPLYAEP

SEQ ID NO: 3640 - protein, 479 aa, Mesorhizobium loti MAFF303099
MSEHGKAAPGSAPSDGQSARLRPPYKSVLDLIGQTPVVELTKFDTGKCRLFIKLESQNPGGSIKDRIALSMIAAAEREGKLKRGGTIVEATAGNTGLGLAQVGIPKGYRIVLVVPDKMSREKIQHLRALGAEVRMTRSDVGKGHPEYYQDMAEKIAAEVPGAFYANQFANPANPLAHETTTGPEIFSQLDGNVDAVVVGVGSGGTLTGLGRYFSKVSPKTEMVLADPVGSVLAPLIKTGKMEEAGSWTVEGIGEDFVPPNADLSLVKKAYSISDKQSMLAVRDLLSREGILAGSSSGTLLSAALRYCREQTTPKRVVTFVCDSGNKYLSKVFDDFWLAEQGLAEHEQHGDLRDLVMRSHRTGDTVYVGPDESLLNAYGRMRRSDVSQLPVLEDGKLIGIVDESDILAKVDGPYDGRWERFNGPVRTAMTSNLHTLQASQTLDALLPVFDRNEVAIIFDGDEFVGLITRIDLINHLRRAR

SEQ ID NO: 3641 - protein, 335 aa, Arabidopsis thaliana
MVIVLQPASFDSNLYVNPKCKPRPVLIPVIDLTDSDAKTQIVKACEEFGFFKVINHGVRPDLLTQLEQEAINFFALHHSLKDKAGPPDPFGYGTKRIGPNGDLGWLEYILLNANLCLESHKTTAIFRHTPAIFREAVEEYIKEMKRMSSKFLEMVEEELKIEPKEKLSRLVKVKESDSCLRMNHYPEKEETPVKEEIGFGEHTDPQLISLLRSNDTEGLQICVKDGTWVDVTPDHSSFFVLVGDTLQVMTNGRFKSVKHRVVTNTKRSRISMIYFAGPPLSEKIAPLSCLVPKQDDCLYNEFTWSQYKLSAYKTKLGDYRLGLFEKRPPFSLSNV

SEQ ID NO: 3642 - protein, 339 aa, Coccidioides immitis RS
MAAPFLGQLMSDSVADYIGGTPLVRLNRVPAALGIKAQVYAKLEYFNAGGSVKDRIAKHMIEQAERDGVIKPGDTLIEASSGNTGIAIALMAAIKGYKCIITLSEKMSLEKEQILHALGARVVRTPAGVPIDSPDSIISVAKRLRNEIPRSFILDQYTNPANPAAHEFGTAEEIWHQTQGKVDAVISGAGTGGTVTGIAKGMKKHNPDVFLVGVDPVGSILAIPERLNETKGEYKVEGIGYDFLPDVLDQTAPDLWVKTTDKDSFKLARRLVREEGLLCGGSAGATVAALVQFMEQRPEFNKEEKLIVLILADGLRNYLTKFADDNWMKQNGYAVDAGA

SEQ ID NO: 3643 - protein, 461 aa, Anabaena variabilis ATCC 29413
MATYENILQAIGQTPLVRLNRVTANVQSPIYAKVEYLNPGGSTKDRIALSMIENAEKTGQIQPGGTIIEATAGNTGVGLALIAAVKKYRCIFVMPDKMSQDKINLLKAYGAEVVVTPTSVPPDSPESYNGVAERLAKEIPGAYRPNQFENPNNPLAHYLTTGPEIWADSQGKIDVFVAGMGTGGTISGVAKYLKEQNPNIIIVGADPEGSILSGDSPKSYKVEGIGEDFIPKTFNRQLVDEMIRVSDKESFNMARRLAREEGLLVGGSCGTVVAAALKYAARLSQPKYIVVLLPDTGRNYINKIYSDVWMQENGFWEGKTVKTIKVGEILQQKTDFPSLVAVSPSDTLSQATNLLQKLNISQLPVIDNHHVVGSLNEASLMKFLYDGINFSNQQVLAVMGKPLPILDENVDVSEAYRVLLSGTTGIIITRNNIPAGLITRADLIRYWISQNQEKSKVNNGI

SEQ ID NO: 3644 - protein, 308 aa, Streptococcus suis
MAIYQNITQLVGKTPVIKLNNIVPEGAAEVYVKLEAFNPGSSVKDRIALAMIEDAEKAGTIKPGDTIVEPTSGNTGIGLAWVGAAKGYNVIIVMPETMSVERRKIIQAYGAELVLTPGSEGMKGAIAKAKEIAEEKNGWVPFQFANPSNPKVHEDTTGQEILEDFGTTGLDAFVSGVGTGGTVSGVSHVLKTANPDIAIYAVEADESAVLSGEAPGPHKIQGISAGFIPDTLDTSAYDGIIRVKSDDALATGRAIGGKEGFLVGISSGAAIHAAIEVAKELGTGKKVLAILPDNGERYLSTALYEFND

SEQ ID NO: 3645 - protein, 187 aa, Burkholderia sp. 383
MPIINTQIKPFKATAYHNGDFVPVSEENFKGKWSVVVFYPADFTFVCPTELGDLADRYAEFQKLGVEIYGVSTDTHFTHKAWHDTSDTIGKIKYPMIGDPTLTLSRNFDVLIEEEGMALRGTFVINPEGEIKLCEIHDNGIGRDAGELLRKVQAAQYIAAHPGEVCPAKWTPGAETLTPSLDLIGKI

SEQ ID NO: 3646 - protein, 187 aa, Propionibacterium acnes KPA171202
MSLINTKILPFKANAFRNGDFIEVSDSDINGKWAVFFFYPGDFTFVCPTELGDLADHYEELQAMGVEVFSVSTDSHFVHKAWHADSDTVGKVNYTMIGDPNLQLTRNFDVEREGAGQADRATFLVDPDGVIQFYELTAEGIGRNATELVRKVKAAQYIYTHPGEVCPAKWEEGDETLAPSIDLVGKI

SEQ ID NO: 3647 - protein, 187 aa, Caulobacter crescentus CB15
MSLINTEIKPFTAQAYKDGKFVTVSEADVKGKWSVFFFYPADFTFVCPTELEDLADNYDVFTRLGVEIYAVSTDTHFSHKAWHDSSPAIGKIKYTMVGDPSGQVTNNFEIMRPGVGLADRGTFLVDPQGVIQFMEVTAEGIGRNAIELLRKIKAAQYVAAHPGEVCPAKWEEGEKTLAPSLDLVGKI

SEQ ID NO: 3648 - protein, 317 aa, Desulfitobacterium hafniense Y51
MPKIADNLTDLIGKTPLLRLNRYSKGKNLFAEIIAKLEYFNPQSSVKDRIAYAMIEDAEKQGAIDQDTTIIEPTSGNTGIGLAFVAAAKGYRIVLVMPDTMSVERRRLLRALGADLVLRPGTQGMGGAIRKAEELKEQISKSFIPDQFSNPVNPSFHRETTAKEILEDTEGKVDVFVAGVGTGGTVTGVGEALKAVNPGIKVVAVEPYNSPVLSGGQPGPHAIQGIGAGFIPKVFNSSFVDEIFQVKNEEAFEASREVAKLEGLLVGVSSGAALYAATRIAARRELEGKKIVVLLPDTGERYLSTPLFPYDEGSNHF

SEQ ID NO: 3649 - protein, 152 aa, Coprothermobacter proteolyticus DSM 5265
MLSRRWIDPFEEMRSIIDEMDRMMEEFWSTGIEPSRPARRGLGRRFVPPVEVTEDENNVYVRAAVPGVPKDKLEITVEEDRVYLKGELQEQKKEEKEGVFYSEMRYGTFERAIALPTTVKAEEAKAEYRDGVVELTLPKKAPESKGVKIRLE

SEQ ID NO: 3650 - protein, 167 aa, Alkaliphilus metalliredigens QYMF
  misc_feature (43)..(43): Xaa can be any naturally occurring amino acid
MLRIGQPAPEFTVPSTQGELSLRDYRGKWVVLFFYPLDFTPVXSTEIPELNRNLPAFQRLNSIVLGANTDSVPTHEAWAKSIDGVSFPLLSDYDKKLSEKYEVLVKEAGGIALRGLFIIDPQGDLQYISVNNLAVGRNVGEILRVLAACQAGGACPINWEEGQETLS

SEQ ID NO: 3651 - protein, 377 aa, Brassica napus
ADRKIRSVELTLESQYFFYMETQTALAWPDEDKYLVVYSSTQASEYTQAVIATCLGIPENNVRVVTRRLGGGFGGKAIKSMPVATACALAAQKLQRPVRIYLNRKTDMIMVGGRHPMKITYSVGFTSDGKLTGRVGGRVGDAGIDVDVSPMLPKNIVNSLKKYDWGALSFDIKVCKTNRPSRTSLRAPGEVQGSYIAESIVENVPCSLNMDVDVVRRINVHTYESLSKFYTEAAGEPDEYTLPLLWDKLEISSDFKRRAVSVKEFNAGNVWRKRGISRVPIVYHVKNRPTPGRVSILGDGSVVVEVAGIEMGQGLWTKVQQMVAYGLGMIKCEGSQDLFERIRLLQTDTLSMTQTSYTAGSTTSENCCEAVRLCCVI

SEQ ID NO: 3652 - protein, 152 aa, Ralstonia solanacearum GMI1000
MITLDINGKPTHVDAAPDTPILWALRDTLQLTGTKYGCGMGLCGACTVHLDGQPIRSCSTPLSAAAGKKITTIEGVDRARVGKAVQEAWRHLDVVQCGYCQSGQIMSAVALLESNHQPTDADIDAAMAGNICRCATYVRIRAAIHDAAKRLA

SEQ ID NO: 3653 - protein, 198 aa, Helianthus annuus
INLHDYVGDSFTIIFSHPGDFTPVCTTELGAMAAYADKFAQRGVKLLGLSCDDVQSHKEWIKDIEAYNKGKKVTYPIAADPNREIIKQLNMVDPDEKDASGQNLPSRALHIVGPDKKIKLSFLYPASTGRNMDEVVRALDSLIKASQHKIATPFNWKEGEPVVIAPSVSNDEARKMFPKGFQTVDLPSNKDYLRFTSV

SEQ ID NO: 3654 - protein, 297 aa, Oceanobacter sp. RED65
MDYPTIADFVGNTPLVKLQRLGRQSSNTILLKLEGNNPAGSVKDRPALSMITEAEARGDIQPGDNLIESTSGNTGIALAMAAAMKGYNMTLIMPDNLSMERRWAMEAYGAELILVTKDEGMEGARDLALKMQEEGKGKVLDQFGNQDNPLAHYKGTGPEIWRDTKGTITHFVSSMGTTGTIMGTSRYLKEQNPNIQIVGLQPKEGAAIPGIRRWPEAYLPKIFDATRVDQVLDIGQEEAEVTMRELAMKEGIFCGVSSGGSVAAALKLDEELENAVIVCIICDRGDRYLSTGVFSTE

SEQ ID NO: 3655 - protein, 168 aa, Zea mays
  misc_feature (120)..(120): Xaa can be any naturally occurring amino acid
  misc_feature (126)..(126): Xaa can be any naturally occurring amino acid
  misc_feature (132)..(132): Xaa can be any naturally occurring amino acid
  misc_feature (157)..(157): Xaa can be any naturally occurring amino acid
MASSVASSTTLISSTQVSPAKSSLPSPSSLSFLRTVSSPLRSGSALRSSLSSCSRRSFAVKAQADDLPLVGNKAPDFEAEAVFDQEFIKVKLSEYIGKKYVILFFYPLDFTFVCPTEITXAFSDRXAEFEKXNTEGVRCSVLIVCSPTLALGPDRQXIRRGLGDLNYP

SEQ ID NO: 3656 - protein, 154 aa, Oryza sativa Japonica Group
MACAFSVSSAAAPLASPKGDLPLVGNKAPDFEAEAMFDQGFIKSKCMFVSSAEITAFSDRYEEFEKINTEVLGVSIDSVGIALRGLFIIDKEGVIQHSTINNLAIGRSVDETLRTLQALQYVQENPDEVCPAGWKPGEKSMKPDPKDSKEEQEC

SEQ ID NO: 3657 - protein, 211 aa, Cyanothece sp. ATCC 51142
MALQLGDTVPDFTQETSEGTISFHEWAGDSWVVLFSHPADYTPVCTTELGTVASLKPEFDKRNVKILALSVDSVDSHKGWINDINETQNTNVNYPIIADPDRKVADLYGMIHPNSLNNLTVRSVFIIDPNKKLRLTLTYPASTGRNFDEILRVIDSLQLTDYHQVATPANWKDGDDCVVVPSISTEEAKQKFPKGVTEVKPYLRMTPQPNK

SEQ ID NO: 3658 - protein, 316 aa, Picrophilus torridus DSM 9790
MSDIKENVLNAIGNTPLVKLNKINVKNIEIYVKLEYYSPGMSIKDRIALGMIEDAERKGLIEPGDTIIGKTSGNTGIGLAIACAVKGYRFVAVMSAGNSAERQKILRALGAEVVLVPQQPGEEPGRISRKDNDAVEKKTQELTEKLNAYRPNQYINSMNWKVHQHTTGQEIIRQTSGRLDAFVAYIGTGGTFVGIARALKSFNNDIKCYPVEPDVAAFLAGKKVITTQHLIQGGGHAVKPPFWDESIVDGYIQVSEDEAIKTARALAKNEGILTGFSGGANVAAAAKLDDSLRPGSIVVTVLPDTGLKYLSTVLYE

SEQ ID NO: 3659 - protein, 340 aa, Microcoleus chthonoplastes PCC 7420
MKLTKQYPVEDAFIDITSINEGVLGTIGTTPLVKLNRVFKDAKFQLFGKLEMFNPGGSIKDRSAFNIIKNAIFRGEIQANSTIIESSSGNLGIGLAQTCAFLGLRFICVVDPKTTKQNINILKAYGAEVDLVTKPDPITGDFLPVRIDRVKLLLSSIPNSFWCNQYANVNNASAHHQTMHEIVTSLNGKLDYLFCSTSSCGTLRGCAEYIRSNNLSTKIIAVDAKGSVIFGDKRAKRLLPGHGAARVPELFQPGLEDAYIHVSDLDCVVGCRHLLRWEAILAGGSSGGVISAIAKKRADIPEGATCAAILCDRGERYLDTVYSDSWVEEHFGTLNVTLLN

SEQ ID NO: 3660 - protein, 188 aa, Amphibacillus xylanus
MSLIGTEVQPFRAQAFQSGKDFFEVTEADLKGKWSIVVFYPADFSFVCPTELEDVQKEYAELKKLGVEVYSVSTDTHFVHKAWHENSPAVGSIEYIMIGDPSQTISRQFDVLNEETGLADRGTFIIDPDGVIQAIEINADGIGRDASTLINKVKAAQYVRENPGEVCPAKWEEGGETLKPSLDIVGKI

SEQ ID NO: 3661 - protein, 158 aa, Gluconobacter oxydans 621H
MTTKFELNGQPVTVDAPADTPLLWVIRDDLNLTGTKFGCGIGECGACTVHVGGRATRSCITPLSAVEGASITTIEGLDPAGNHVVQVAWRDQQVPQCGYCQSGQIMQAASLLKDYPNPTDDQIDGVMGGSLCRCMTYIRIRKAIKEAASRQQEGANNG

SEQ ID NO: 3662 - protein, 185 aa, Nostoc sp. PCC 7120
MISRRNFLHILLVSCFAVISWLNLPPTAYALGGKLPPINQPAPDFTLPTNTGDGKLSLGDLRGKWVVLYFYPKDFTSGCTIEARRFQQDLPTYLDKNVQIIGVSADDIDSHAEFCDSEGLKFPLLADTDGAVSKAYGSWIGYVSMRHSFIIDPQGILRETFVKVNPSVHSTEVLARLEKLQSTAS

SEQ ID NO: 3663 - protein, 390 aa, Candidatus Kuenenia stuttgartiensis
MNILMLSHSSVNNAYQKRLTTIANHDSIKLTVIVPKSYYEGRLLKSKKVSDYYNFIRLHAFFSKTGRQHLHFYSPFSLYKIIKMTKAEIIHLDEEPQSFISFLTIFLARLISKNTKFILYTAVNIFKTHKEWSYFSLQRYLYPLWEKYSLDHSDAILACNHEAIDIFNKKGFKRKIYYVPLTIDENVFKKKDCYYLKAKLKLNYFTIGFVGKIEIKKGLATLFKALRLIYKKYTLIIIGEGPDKELLVNLSKQLNIQEYILWLGFVNMTQLPDYYSCMDALIVPSETTPEWREQFGRVIIEGMACEVPVIGSSSGEIPNVIGDAGLIFEEGNEKELAGKISILIDNSELRQKLGEAGRKRVIENYTNKIIASKLMSVYNEIASVEINTND

SEQ ID NO: 3664 - protein, 346 aa, Gluconobacter oxydans 621H
MTSRLRILHCLSTREFAGTERHLAELSAIQAQSHDVTLLLDRNTVDPLTGGDISGFLCPEVKVVRAGRAGYLPALASELRSGRHDIVHTHLGRASARVSWLRRAGLAGSVPVVATLHTSYRGRSYGAHDGLVCIASWQQEALPEKQRDASALIPNWTVPPASTCEARAALRERMRREWRIPDGGVVIGAAGRMVEEKNFGLLIQAWKQAELKPGTRLVMMGDGPERDALQQAAQGRPDIIFTGYRTDMPDLLAAFDAFIVPSRHEPFGLVLLEAMEAGLPVCATAAGGVKDILADAPDCLVAPDSLEALTEGLRRLESAAPRQWDMSRYRIGAAASRVEAFYRRYC

SEQ ID NO: 3665 - protein, 372 aa, Candidatus Kuenenia stuttgartiensis
MNIGINALSIRNQYAGIGVYTINLIKALSQIDRNNRYVLFLNPENYHGFKVEQDNFENVLVHAPFHKYYIWEQIYLPFVLKKKKIDILHGPRNVLPLLCKIKSVVTIHDLAFLLFPEVMKFNPFNYWSVFVKRSAVKADHIISVSESTKKDIVRLYNISDHKITVTHEACNNSFKRIEDESALKRISQKYELPERFILYVGTIEPRKNLNVVLEAMDILKKNNLNIKLVIVGKKGWLYAGFFDTLQSLGLGNNVIFTGYVPAEDLPGIYNLAEIFVYPSKYEGFGLPLLEAMSCGVPVIASNISSIPEVLGDAGTLVRPDDPKEFAHKIYELLTDKEIRVKMSSKGFERTKSFSWEKVAQKTLTVYENINTK

SEQ ID NO: 3666 - protein, 219 aa, Polaromonas sp. JS666
MSLRINDTAPDFTAETTQGTVRFHEWIGDGWAILFSHPKDFTPVCTTELGYMAKIEPEFTRRNCKLIGLSVDPVDNHTRWARDIEETQGHLPKYPMIGDTDLAVAKLYNMLPAEEAGTSEGRTAATNATVRSVFVIGPDKKIKLMMTYPMTTGRNFDEILRVLDSMQMTAKHKVATPVNWKHGDDVIIAGSVSDDDAKTLFPQGWKAPKPYLRIVKQPS

SEQ ID NO: 3667 - protein, 298 aa, Rhodococcus sp. RHA1
MLAEHDCTGVWFGAAAPLALLSSTLRRAGAERVVASTHGHEVGWSMLPAARQALGRIGDRTDVVTYVSRYTRGRFASAFGASAALEHLPPGVDTDLFTPDSGARAELRARYGLGERPTVLCLSRLVPRKGQDILIKALPGIREHIDGAVLVIVGGGPYEDRLRSLARSVGVEDHVVFTGTVPSAELAAHHTIADVFAMPCRTRGAGLDVEGLGIVFLEASATGVPVIAGQSGGAPETVRQNETGMVVDGTSVAEVARSVISVLSDRDRAAAMGAAGREWVKAEWRWDVLAAKLQALLA

SEQ ID NO: 3668 - protein, 816 aa, Arthrobacter nicotinovorans
MDNPHYYSPPITRNVIGKRVPRTEDARLLTGRGKYLNDINVDGQLHACFVRSPAAHAQITGIDTSAASEMPGVHLVWTSADIEQYCAGIEAQYTAEGCEAMTMPLLAKDVVRYVGEPVVLVVAESRAAAEDACDLVGLELEHLEVVLDPRKSIQGGPVANGERPDNVGIRGRASFGDVDEAFSNAEHVVSALYHPGRVAAAPMETRGCLADYEWTEDRLKLWVSTQMPHYVKMCLSLFLGFDESRSEVISPDTGGGFGQKAHVFPEEMLMPLASKHLKTPVKWVEDRRENLLAGSHAHEQFVTIQYAANAEGRITGVRTHALVDGGAYHMPPQTMAVECWATAAVTPTGVYDIPAAEYVYEGAVTNKCPMGAFRGVGYTAGTLARESLMDDLARKMKVSPFEIRRRNVVREFPWTNPQGVVYEEGSFLEVIDALEEMVDYPAFLRRQDEARKAGKYLGLGISVFVESSGESTGMMQAHGATDVFHDTATVKMDSTGSVTITSGLNSQGQGHQTTLAQVAADVLGIPFESISVDAGTSTKGAYGSGTIGSRAAVIAGGCVNRAAYAIRQKLVAVAANMLESSEEDIVLEDGFASVIGAAESRVSIADVAMAVYWDSSKWPAGFEPGLEFTKAWDTSRPMFSNGGHALIVELDPVTGFVKVEKVYSVEDCGVIINPTIVEGQIRGGVVQGIGMGLFEQLAYDNAGNLSTTSFLDYQTPTMDVSPPFEIRHIETPSVMTASGVKGMGESGLISAPAAVLNAVNDALSPFGSVLYELPATPEKVVRATKGIIDLQGPQDWSELWERAGVPALDRGPMDRE

SEQ ID NO: 3669 - protein, 391 aa, Mycobacterium smegmatis str. MC2 155
MSARPESAPHVRRVLLLCWRDTGHPQGGGSEAYVQRIGAYLAGRGVDVTLRTARYPGSARTEVVDGVRISRGGGPYTVYIWAGLAMVLARIGLGPLRRARPDVVIDTQNGLPFLARFAFGRRVAVLVHHCHRELWPVAGPVMGRIGWFVESWLSPRLHRRNQYVTVSLPSARDLNELGVDSQRIAVVRNGLDEAPATTLKLPRSETPRLVVLSRLVPHKQIEDALEAVAQLRTEMPDVHLDILGDGWWRERLVEHAELLGITDAVTFHGHVDEDTKHRVLQRSWVHVLPSRKEGWGLAVTEAAQHAVPTIGYRSSGGLTDSVVDGVTGLLVDDRDGLVAGLRQLVSDPVLRTQLGSKAQTRSDEFSWAQSADAMRTVLESVRAGRYLSGLV

SEQ ID NO: 3670 - protein, 363 aa, Hieracium pilosella
MAPASMKWDENSLLEKGFLRDEDERPKVPYNQFSNEIPVISLEGIDDVEGSGGGRSRRAEICEKIVKAFEDWGIFQVVDHGVDAKLLSEMKRLAREFFLMPEEEKLKFDMAGGKKGGFLVSSHLKGETVQNWREFVTYFSYPIKARDYSRWPNKPNEWRSVTEEYSEKSMGLACKLLEVLSEAMGLEKEALTKACVDMDQKVVVNYYPKCPQPDLTLGLKRHTDPGTITLVLQDLVGGLQATRDGGKSWITVEPIEGAFVVNLGDHGHYLSNGRFKNADHQAVVNSSTSRLSIATFQNPAPEAIVYPLKINEGEKSIMEEAMTFMDMYKKKMSGDLELARLKKLAKDKKDNLEKVKPTKNIFV

SEQ ID NO: 3671 - protein, 272 aa, Juglans nigra
EDERPKVAYNQFSTEIPIISLAGIDEVHGRRTEICQKIVEACEDWGIFQVVDHGVDASLISDMTRLARDFFAMPPEEKLRFDMSGGKKGGFIVSSHLQGEAVQDWREIVTYFSYPIRTRDYSRWPDKPEGWRKVTEEYSDKLMGLACKLLEVLSEAMGLEKEALTKACVDMDQKVVVNYYPKCPQPDLTLGLKRHTDPGTITLLLQDQVGGLQATRDGGKTWITVQPVEGAFVVNLGDHGHFLSNGRFKNADHQAVVNSNYSRLSIATFQNP

SEQ ID NO: 3672 - protein, 187 aa, Geobacillus stearothermophilus
MSLVGKKVQPFRAQAYHNGEFIEVTEQDFMGKWSIVCFYPADFTFVCPTELEDLQDHYATFKELGVEVYSVSTDTHFTHKAWHDTSPAISKIEYVMIGDPSHQLSRMFDVLDEEQGLAQRGTFIIDPDGVIQAVEINADGIGRNASTLIDKIKAAQYVRNHPGEVCPAKWKEGAETLKPNLDLVGKI

SEQ ID NO: 3673 - protein, 187 aa, Bifidobacterium longum DJO10A
MTLLQHELTDFKVNAFQNNEFHEVTKDDVLGHWSLFFFYPADFTFVCPTELEDLAKNYAKFKEIGCEIYSVSCDTHFVHKAWHDANEKIAKIEYPMLADPTALLAKDLDTYNEADGMAERGDFIVSPEGKVVAYEVISSNVGRNAEELLRRVQASQFVYEHGDQVCPANWTPGEETIEPSLDLVGQL

SEQ ID NO: 3674 - protein, 740 aa, Arabidopsis thaliana
MMENAFSLRPNSSQNRGNLNCPNPIILDLFNQEAYPGFNPHRYIHKELSELGKEQTLKSSTDSDVARMTTNFDGHLVTLTHLAGSEEGNKHLQGAETFLQLSKARKLGILDLSPEDELEGELLYYQLQLLGTAVSRKQLSDNLVYEVAKKLPLEIDEQHGRRWDDVLVNKYFHDVREARKQGRKEQRNKQAQAVLAAATAAAATSSRNTSLRKDMSEEPAQQEMSTSRRKVVGSSHLVPQTKESLLKMAVSGPPSEKRSDHHTPDFLVENPRTCDICRRSETIWNLIVVCSSCKVAVHIDCYKCAKESTGPWYCELCAESSSEPSFNFGEKPNSSTECTLCGGTTGAFRKTTNGQWVHAFCAEVKFPLRQQLLAGSGVLYSVLNIANNLVYNFWQWSLESTFRRGQINPVQGMTTFHPSCARSAGFHMTGGGKHPHKAYCEKHSMEQKAKAESQKHGAEELKSLKHYRVGVLSEVELERLRLLCERIVKREKLKRELAISSHEILAAKRDHAARPLHVRNPFSPPEVSSDSATTSIKGHPDSNISGSEAIQRSDDITIDSTVTDKRRGKGPLLMDTDQKTDDSATSKSRFSRKLTERQILSGKTVPRKHCIVSPSVSEDGDNGSKPKKQHVETFAKELVMTSDEASFKNRRLPKGYFYVPVDCLQEDKPGNQKLASSDKPANQKTSSGDQSGFTNWLKAKEQMVLRYKRAVAATENQLKKAIVKLLGTRYKLCLLVMFEI

SEQ ID NO: 3675 - protein, 377 aa, Prochlorococcus marinus str. MIT 9312
MKIALFTETFLPKVDGIVTRLTKTIEFLIKNGDEVIIFCPEGCPESYMGATVVGVAAMPLPLYPELKLGLPGPAVSDKLEKFNPDLIHVVNPAVLGLGGIWLAKTNNIPLIASYHTHLPKYLEYYGMGMLEPLLWELLKAAHNQALLNLCTSTAMVNELKDKGIQRTALWQRGVDTYSFRPDLRSEAMRGKLFGKYQDANFLLIYVGRLSAEKQIERIKPVLESIPNACLALVGDGPYRNQLEKIFENTKTNFIGYLSGDELASAYASGDIFLFPSSTETLGLVLLEAMAAGCPVIGANKGGIPDIISDGINGCLYDPDEKDNGEQSLIEATKKILENEDKREVMRKEARNEAEKWDWNQATLQLQNYYSDTLKEID

SEQ ID NO: 3676 - protein, 358 aa, Pyrococcus furiosus DSM 3638
MHNLAIKLRERGHEVGIVTNNRVTGKEKELEKYGIDLIKIPGVVSPLLEVNITYGLKSSELNEFLNNFDVIHSHHAFMPLALKAVKAGRTMEKATLLTTHSISFAHESKLWDTLGLTIPLFRSYLKYPHRIIAVSKAAKSFIEHFTSVSVSIVPNGVDDTRFFPAKHKDKIKAKFGLEGNIVLYVSRMSYRKGPHVLLNAFSKIEDATLVMVGSGEMLPFLKAQAKFLGIEERVVFMGYVPDDALPEVFRMADVFVLPSVSAEAFGIVVLEAMASGVPVVATDVGGIPEIIKENEAGLLVPPGNELKLREATQKLLKNEELRKWYGMNGRKAVEEKYSWDKIVVEIERIYSEVLEEQS

SEQ ID NO: 3677 - protein, 198 aa, Helianthus annuus
INLHDYVGDSFTIIFSHPGDFTPVCTTELGAMAAYADKFAQRGVKLLGLSCDDVQSHKEWIKDIEAYNKGKKVTYPIAADPNREIIKQLNMVDPDEKDASGQNLPSRALHIVGPDKKIKLSFLYPASTGRNMDEVVRALDSLIKASQHKIATPVNWKEGEPVVIAPSVSNDEARKMFPKGFQTVDLPSNKDYLRFTSV

SEQ ID NO: 3678 - protein, 189 aa, Desulfovibrio desulfuricans subsp. desulfuricans str. G20
MDIDFKKLAPWNWFKKEQEEQQSTASLPMQRNDLPVAGGPVSPILQLHREIDRLFDDAFRGFGFPALAMPRWPSDWPGLLKPALDIQETDKLYKISLEVPGVEEKDIQITLDNDVLLVRGEKRQEQETKDGGFHRVERSYGSFQRALNLPADANQDTIKAAFKNGVLTITMEKREACAPKQGRSIPING

SEQ ID NO: 3679 - protein, 239 aa, Picea sitchensis
MACTLSNLYIPATASTCSIPISVRNGAFVPTGQRLKSKVGLSSPSNQRRAKAVVVRAESSKEGAIDVHNTNTKKVAEQKPRAVERAKEISPFGLVDPFSPVRTMRQMLNTMDRLFDDAFMLPTSWRGVSRDDALSVRTPWDIIENENELKMRFDMPGLSKEDVKVSVEDGVLVIKGSHKKEESENDSWSERSYSSYNTRLALPENCEMEKIKAELKNGVLNITIPKGKVESKVVDVNIE

SEQ ID NO: 3680 - protein, 317 aa, Saccharophagus degradans 2-40
MLYDNILATIGNTPIVRLNKLAPEGQNIYVKVESFNPMASVKDRLAFAIIDDAEKRGVLKPGQTVVEATSGNTGIALAMVCAAKGYPFVATMVETFSVERRKLMKALGAKVILTPAAEKGTGMVKKAAELAEKHGWFLASQFENEANPAYHRNTTGPEILRDFAGKDLDYFVSGWGTGGTMTGAGQMLKLARPDLKVIVAEPQNAAMLSGNPWSPHKVQGWTPDFVPAVLDKTVADEIVTVSDDDAIATAKALATQEGIFCGISSGATLAATIAYAKQAPTGSTFVVMLPDTGERYLSTPLFADITEESDDEWLSQQ

SEQ ID NO: 3681 - protein, 369 aa, Zea mays
MVVLTKGELEQIALPAVQRASPPPPAAVPEVDLAAGDAAAAARAVAKACEDHGFFKVTGHGVPPHLLARLEAAAAAFFALPQREKDRAAGCPFGYASKRIGANGDLGWVEYLLLAVTAAGAAAAPGSACEGAEPSCFRCPCSMSLMTRAYFLHPPPCVAPAKRGKETSSSWCPLNLCCTSAVLDEYVAAVRRMTCTVLQLMAQGLGLDDRDVFSRLVLDRDSDSMLRVNHYPPAAETRRLTGFGEHTDPQIISVLRSNDASGLEITLRDGTWVSVPSDTESFFVNVLTNGRFRSVRHRVMVSSARPRVSVIFFGGPPPRERLAPLPGLVDREGGRRRYREFTWREYKNSAYRTKLADNRLCSFETMATS

SEQ ID NO: 3682 - protein, 555 aa, Aspergillus oryzae
MRGYEFLSVLPLVAASWALPGSTPASVGRRQLPKNPTGVKTLTTANNVTIRYKEPGAEGVCETTPGVKSYSGYVDTSPESHTFFWFFEARHNPETAPITLWLNGGPGSDSLIGLFEELGPCHVNSTFDDYINPHSWNEVSNLLFLSQPLGVGFSYNDTVDGSINPVTGVVENSSFAGVQGRYPTIDATLIDTTNLAAEAAWEILQGFLSGLPSLDSRVQSKDFSLWTESYGGHYGPAFFNHFYEQNERIANGSVNGVQLNFNSLGIINGIIDEAIQAPYYPEFAVNNTYGIKAVNETVYNYMKFANQMPNGCQDLISTCKQTNRTALADYALCAEATNMCRDNVEGPYYAFAGRGVYDIRHPYDDPTPPSYYNKFLAKDSVMDAIGVNINYTQSNNDVYYAFQQTGDFVWPNFIEDLEEILALPVRVSLIYGDADYICNWFGGQAVSLAANYSQAAQFRSAGYTPLKVNGVEYGETREYGNFSFTRVYEAGHEVPYYQPIASLQLFNRTIFGWDIAEGQKKIWPSYKTNGTATATHTQSSVPLPTATSMSSVGMA

SEQ ID NO: 3683 - protein, 456 aa, Xylella fastidiosa Temecula1
MVIHSSVLELIGNTPIIKAQRLDTGLCDLFLKLESANPGGSIKDRVGLSMIEAAECRGHIKPGATLVDGAASSTSMGLAFVARQKGYRLILVVPDNMAWEKISNLKAMGAEVILTRSDVSKGHPEHYQDLAEKLAAETPGAYFINQFGNADNPAAHEFGTGPEILKQMGGHVDAVVLGCDSAGTITGLSRAFDSVASDVELILADPVGSILTQYINEGTRSDKSGTWLVEGIGSDCLPPISDFRRIKKTYAISDAESFHTARELLSKEGILGGSSTGTVLAAALKYCREQIEHKRVLVFVCDTGNKYLLNMYNDDWMLDNGFLKRPHYGDLRDLILHPYSQRHTVVVDPNDLLTVAYQRMKRYGVSQLPVIEDRQLVGILDESDVLLHVYGDETRFCDPVSTAMVSKLHRLDVKSPIEALLPVFERGQVAIVMEDDQFLGLITRIDLLNYLRRRIQ

SEQ ID NO: 3684 - protein, 945 aa, Ashbya gossypii ATCC 10895
MGVPSFFRWLSRKYPKIISPVIEDTPQVVDGVKLPIDYSAANPNGELDNLYLDMNGIVHPCSHPENKPAPETEDEMLLAVFEYTNRVLNMARPRKVLMIAVDGVAPRAKMNQQRSRRFRSARDAKLANEEKARVLAEREAYGEMIDDAVKAKKSWDTNAITPGTPFMDKLAAALRYWTSFKLATDPGWKNLQVIISDATVPGEGEHKIMNFIRSQRADVQYNPNTTHCIYGLDADLIFLGLATHEPHFKILREDVFAQDNRRRPRQHDMMDMSAEEKQALIEQDAEKPFLWLHVSVLREYLSAELLVPRLAFHFDLERAIDDWVFMCFFCGNDFLPHLPSLDVRENSIDILVDIWKAVLPSLKTYLTCDGKLNLKGVEKVLAQLGNRESDIFKKKYEQELRKKEAQERRKMLKNNPNVTKGKVDRNFTVPLESMPVFDVNGNAAAGSLNLTNKDFANMRKEITLANEGNTKALDALKRRSDENRTQRTSDTRDFSQEELESAIEVSKGDNLSAAASLRERILAKRKAAEDPEGAPEPKNPHKAPSASETEAATPASSETASQVDIPISTGMLTPGFLDTDTGVRLFEPGYHDRYYQAKFHVPTGSIDALRKKVVRSYVEGISWVLLYYYQGCPSWTWYYPYHYAPFASDFTGISDLSVTFDLGEPFLPYEQLMSVLPAASSHNLPDVFRSLMSDPESEIYDFYPEEFPIDMNGEKMAWKALVLLPFIDETRLLAAVRQKYPLLSEAERARNVRRDEVLLISNKNTHYERFLARLYTDPAPQPVNFRHFKKWPRRHSAVRRGGLPSQHQDALSACRRSLPDISTNLFLKTAYRIPQLPAPSKSILLNGFIPPEAQLSPADRDAIMYKYPQRWNPHSMKHNLVPVGPAAVTQYQPRIGGYRAFLFHQQLMQDRPYPPAHMHSHSSGGPPLAQGPRVTQSRYQPRRFH

SEQ ID NO: 3685 - protein, 198 aa, Campylobacter coli RM2228
MIVTKKALDFTAPAVLGNNEIVEDFNLYKNIGPKGAVVFFYPKDFTFVCPSEIIAFDKRYQEFKNRGIEVIGISGDNEFSHFAWKNTPVNQGGIGQVKFPLVADLTKQIARNFDVLYAEAVALRGSFLLDADGTVRHAVVNDLPLGRNIDEMIRMVDTMLFTNEHGEVCPAGWNKGDAGMKANPKGVAEYLDKNEDKL

SEQ ID NO: 3686 - protein, 198 aa, Helianthus annuus
INLHDYVGDSFTIIFSHPGDFTPVCTTELGAMAAYADKFAQRGVKLLGLSCDDVQSHKEWIKDIEAYNKGKKVTYPIAADPNREIIKQLNMVDPDEKDASGQNLPSRALHIVGPDKKIKLSFLYPANTGRNMDEVVRALDSLIKASQHKIATPVNWKEGEPVVIAPSVSNDEARKMFPKGFQTVDLPSNKDYLRFTSV

SEQ ID NO: 3687 - protein, 415 aa, Thermosynechococcus elongatus BP-1
MKVYHLNHFDIIGGAARAAYRIHHALREVGVDSTLLVDVGMSGDWTVQGPTTKFGKALARLRPAMVQLLLKSVFKTGNPSPHSPALLPSGRVAALNQSDVDIVHLHWVQGEMLSIADIGRLRKPVVWTLHDMWAFCGAEHYAEDCRWRQGYCRDNQRSDESGFDLNRWTWLCKCKHWKKPMQIVTPSRWLAQCVRESALMRDWPVSVIPNPINTERWQPVEAKLARSLLGFPQDVPLVLFGAIAGGKDPRKGFDLLLAALHHLHGQVADLQLVVFGEHRPKNPPDLGFPIHYTGHLHDDLTLRILYSAADVMVVPSRQEAFGQTASESHACGTPVVAFNTSGLPDIVKHEETGYLAKPFDPEDLARGIEWVLSDSVRRAQLRKNARARAEQCFASQLVATQYRQVYESVMNGVVI

SEQ ID NO: 3688 - protein, 152 aa, Sulfitobacter sp. EE-36
MINFTLNGKEVSVDAPDDTPLLWVLRDDLRLTGTKFGCGIAQCGACTVELNGMTRRSCVTPISMVEGSYVTTIEGVDGPEAKAVQAAWEAIDVPQCGWCQSGQVMSATALLREIPNPTDEDIDNAMAGNICRCATYVRIREAIKNAAKELEG

SEQ ID NO: 3689 - protein, 1441 aa, Coprinopsis cinerea okayama7#130
MGIPKFFRYISERYPLTSQLIQENKIPEFDNLYLDFNGIIHNCSHPNDEDAHFRLSEEQIFTSIFAYVDHLFEKIKPKKLFFMAVDGVAPRAKMNQQRSRRFRTAKEAKEVREKAERRGEKLPEEKAFDSNCITPGTPFMARLSAQLRYFINKKITEDSNWRSVEVVLSGHEVPGEGEHKIMEYIRLSRAQPDYNPNVRHCLYGLDADLIMLGLLSHDPHFCLLREEVKFGPQRKKGNQSLESTNFYLLHLSLMREYLDLEFRDIEHVLPFPYNLERVIDDFILLAVFVGNDFLPNLPDLHIHENGLEKLFDVYKKALPGLNGYINESGTINVQRLQVVLDEMAVWEREIFEKEYADMNWFKGKQARHVKEMEMGRKRSKLVLTKRQREIFDKVKAFVLENRKAPSLEHFKAARLEMVNDFPARERAFITQLSQDLHLSLRWDEYDEEDNNVVTWRFPRALEVSEDAEDEEGEWEDMQEDEENVIAVDRVLNKYEKAPVEDPDAEGDFDARYERSIKEKMDEWKRSYYREKLEISYDDPKEMGDLVYRYVEGLQWVMHYYYSGVASWGWFYNYHYAPRISDLRNVDQMTFNFELGKPFKPYEQLMGVLPVASKDHIPLAYQDLMYDPNSPILDFYPLEFESDLNGKKQDWEAVVKIPFIDEERLLKAMASREHRLTPEERQRNTWGTSTKFSHGTGEPTVYPSSLPGFFPPIYRCTCVMEPFDLPTLDGLHLVPGLCDGVFLGAEALAGFPSLKTLPHSATLGYHGVNIHGSESRNKSMIVHIENPYENTKPEEIAQKFIDERIFMGWPFLQEGKVVAVSDSLFKYERMAVVPGRPAKIVSTPHSPQGLGHWASKAERIEQVYSKRCGVLTGSVGVLLHIRPLKGLKRLETGALVKDYEGPDKEIEQAVQMCLQEVVSEDPRYMERAPPPLHEEFPDGSKVFFLGEHAYGVAAQVSATTQNTLSVIVAFFPAERQEIDKFKAIVDTRKSSRYFPSYRVADMLGMSGRALGKITSSFLVLTSDEQKTNLGLSLKFEAKSMKVIDYSRKDGRNWEYSEKAVELIREYKAAFPEVFASLDNGGDAIARATDIFPEAEADARVKEIKAWLKTKGVRDFEPVSLFCDQLSKETIEEIEQLADSITKSKSSSQIKKAIVKGIPRQAVLKPSHAVYRLQNQHFALGDRVTMVQDSGGVPLAVKGVVVGLNARSMDVLWDVAFISGTTLNNRCSQYRGSTVAFNSCLNLTNPQFVTSTNPQAPPPVRPQIPFNPKFGPHPPIQPAPGQTAASGFRPGPHAHQNGTHSTGPGPQIKIMSNPNRGRGGFVNGVGRGGHPGGKPGVPGPAHVVPAVNPGRGGHVNGAAPRGAQASAAAGPSAPAAQVQPIPAANEPAPHASGDFGPRGRGRGRGGPPPFRGHIRGGFDRGRGGGRGGFRGRGGRGFAPPLAS

SEQ ID NO: 3690 - protein, 152 aa, Methanosarcina acetivorans C2A
MKFPIKRPSRDVCNWDPFDEIRGMQEYMEQMMRTFPALESRYAGGTFAPLTDVAEEDNKVIVTTDLPGINRENIELSLKDNFLVISASKGKEEENEKEGYLRKERSFMRYYREIPLPKGVTEEGATAQLKNGVLTVTMPKTEALTEKRIPIE

SEQ ID NO: 3691 - protein, 406 aa, Pseudomonas syringae pv. phaseolicola 1448A
MSKILNVTLITETFIPEINGVANTLGRLCEGLRLRGHRVELVRPRQNDETHAGAAEDLLLCRGWPIPGYPGLQWGQSSMHKLLRRWQRRRPDVLYIATEGPLGLSALRAARRLGIAVISGFHTNFPQYTQQYGMGFITRLLTHYLRWFHNRSRMTLVPSISQKMELERRGFERIELLSRGVDSQTFNPSRRSQALRESWGLQAGDIGVIHVGRLAPEKNLGLLKASFETLKDSYPQRNIKLIVVGDGPQRQQLEQQIPDAIFCGTQRGEVLAMHYASADMFLFPSLTETFGNVVLEALASGLGVVAYDEAAAGQHIRHGHNGALAMPGDEAAFIDAARWLLEDSETLRRVRLNARQHASRQGWTAIIDQFERQLREACPGEKPVNAKETRQVATKKIRPVSSVPLD

SEQ ID NO: 3692 - protein, 395 aa, Oryza sativa Japonica Group
MAAWNTSILLPPPPPLLSRAAVATPALNPYPLRLHRRHPQKPLCLPSESYPADTDADASSASLDSRPRRIALFVEPSPFAYVSGYKNRFLNFIKYLREMGDEVIVITTHEGVPQEFYGAKLIGSWSFPCPWYQKVPLSLALSPRIIGEVARFKPDIIHASSPGIMVAQNFYYINTLSFNMPLTAFVSPKQLYTEIYIQLAGEAYVVDYNNGEPEKPLILYVGRLGVEKSLDFLKRVMDRLPGSRIAFVGDGPFRAELQLMFTGMPAVFTGTLQGEELSQAYASGDVFVMPSESETLGFVVLEAMSSGVPVVAARAGGIPDIIPEDQELRETMRKAARKEMEKFDWRAATRKIRNEQYSAAIWFWRKKRAQLLRPIQWVSRRLFRPTPAPSTMNQS

SEQ ID NO: 3693 - protein, 305 aa, Clostridium tetani E88
MKIYNNLIELIGKTPLVNLNKFEKKNGLDSNIIAKVEYFNPSGSVKDRAALSMIEEAERTNLINKDTVIIEPTSGNTGIGLALICAIKGYRLILTMPETMSIERRNILKAYGAEVVLTPGNKGMNGSIQKAEELAKEMGNVFIPQQFNNPSNSAIHKITTAKEIINDLDGKVDIFIAGVGTGGTVTGVGEGLKEYNKNIKIVAVEPENSPILSGGKPGPHKIQGIGAGFIPEILDMNIIDEIFKAPNEESIEIMKKIVKLEGLFVGISSGAALYAAKEIGKREENKGKNIVVLLPDTGMRYLSSY

SEQ ID NO: 3694 - protein, 197 aa, Thermosynechococcus elongatus BP-1
MSECLRVGQPAPDFEAVAVYDQEFKTIKLSDYRGKYVVLFFYPLDFTFVCPTEIVAFSDRYDEFAKLNTEILGVSVDSQFSHLAWTQTDRKAGGVGDLKYPLVSDLKKDISTAYNVLTEEGVALRGLFIIDKEGIIQHATINNLAFGRSVDETLRVLQAIQYVQTHPDEVCPAGWHPGDKTMNPDPVKSKVYFEAVG

SEQ ID NO: 3695 - protein, 372 aa, Pseudomonas syringae pv. tomato str. DC3000
MSFAKKNVIDGISKTPLIDLARINKEISTNVIVKLEKYNPGGSIKDRAAAYIIREAEKKGQLKPGGTIIESSSGNFAISLAMIGAVSGYKVIALVDPKATETNKALMKAYGAEVITVTEKDDTGSYHKTRIKLANDLAKKIPGSYRPDQCFNVLSSLAHYNSTAKEIHEQTSGNIAGVVCAVSTGGQIGGVSEYFKDHLPDVKVTCVDAYGSAVFGGPSHAYKIPGVGLGWTPRNINDTTKIDYFYRAKDESAYIAARLLCRHEGILVGVSSGAVLLAALNLSLHLGNQKPIVAILGDSGERYLDTLYNDDWLNEHGVDTGLELNKLQLLIDNMATPIESPHIKSNYRDDLIGILEVPETTITHFNMLEGRN

SEQ ID NO: 3696 - protein, 678 aa, Arabidopsis thaliana
MENHSCLQKDTTSAAKLDVETGNLRQRDETKPFYANSLTPREMESLVAICDTFISSIDDSGVGHVDDCVAGYFSASASQTGTPDRVDEKGRNLAWKAIGYNGPSPDHSDHEVELNEEKKKKKPEEIFGPLYNGIVDLKSPREAVEKKLAGRGFAVSNQKRNTNGSSISDPVMKIQCDAVVVGSGSGGGVAAGVLAKAGYKVLVIESGNYYARSKLSLLEGQAMDDMYLSGGLLATSDTNVVILAGSTVGGGSTINWSASIKTPEHVMKEWAEKSKLEMFGSDLYREAMDVVCKRMGVQCGFVEEGFNNEVLRKGCEKLGLPVKNIPRNAPSDHYCGFCCLGCKKGQKQGTSETWLVDLVESDNGLILPGCQATEVMYDCEQGKKKKATGVAFAFGEEIYVVESRVTIVACGALRTPHLLKRSGLKNSNIGRNLCLHPVVMAWGWFPEEDKWPEKKKKSYEGGIMTAMSSVVIEETHSSYGEMVIQTPALHPGMFSGIIPWTSSKDFKTRMLKFSRTAHIFALLRDKGTGTIDSKTYIDYNLNDEDEESLKNGLERVLKILAAAGAEEIGTHHSEGRSLNVRTASSLEIERFVREESSKPLKDLSGQICSAHQMGSCRMGIRPEESAVRPTGETWEVERLFVADTSVFPTALGVNPMVTVQSIAYCIGLNVVDVLKKKK

SEQ ID NO: 3697 - protein, 302 aa, Clostridium perfringens str. 13
MKYYNDIRDLIGNTPILKLNNISTKEGVNIYAKIEGTSPGGSCKDRVGIYMVEKAEKEGKLKPGSTIIEATAGNTGIGIALAAINKGYKIIFIVPDKFSIEKQKIMKALGAEIINTPKEEGMEGAINLANSLLSEIPNSLSLNQFKNEANPLAHYETTGRELYDGLDGEIDYFVAGAGSGGTISGVLKFLKENISEVKGILADPVGSIIGGGQCGTYKIEGIGNNFIPETMDMSLVDDVIKVNDEEAFDAVKLLAKKEGLIVGSSSGAAFAAVLKLAEKIEKGNIVTIFPDRGDRYFSTDLF

SEQ ID NO: 3698 - protein, 158 aa, Oceanobacillus iheyensis HTE831
MSVEIGSKVNDFSLPNQHGENISLSDYQGKYVVLYFYPKDMTPGCTTEACDFRDNHESFKELDAVILGVSPDPEARHQKFIDKHELPFNLLSDEDHQLAEQFDVWKLKKNFGKEYYGIERSTFIIDKDGKLIKEYRKVRVKDHVSDALEYIKEINEVG

SEQ ID NO: 3699 - protein, 289 aa, Coprothermobacter proteolyticus DSM 5265
MIGIMETPLVCIEPYGIYAKLERFNPTGSIKDRPAYFMLVHALKENLIQPGGTLVEPTSGNTGISLAALGSQVGIKVILTMPASVTPERVKLAQSYGAEVILTPAEKGIPGAIEKAKQLQEKHHAYIPDQFNNPFNVLAHELTTGPEILKQTNWEVDAFVAGVGSGGTISGVGRALRRVLGNRVKIIAVEPAESPVLSGGKGGSHIIQGIGAGFIPTIFDKDLVDEIITVRGNEALEGVKMLSAKGYSVGISSGANFIAALRIKEKYNLAHVVTVFPDDGLKYLSTIAY

SEQ ID NO: 3700 - protein, 154 aa, Caulobacter crescentus CB15
MAFNLTVNGESRIADVDGDTPLLWVLRDTLGLVGTKYGCGAALCGACTVHLDGVPVRACVTPISGVGEQKVTTIEGVGKTTVGAKVQAAWKAVDTPQCGYCQAGQIMSATALLATTPKPTDEEIDAAMNGNLCRCATYIRIKKAIKVAAGLEKA

SEQ ID NO: 3701 - protein, 178 aa, Clostridium pasteurianum
MERLVGKPAPEFEMKAVKGDGRGFTEVKLGDYKGKWLVMFFYPLDFTFVCPTEITGFSKRAEEFRDLKAELLAVSCDSQYSHETWINQDIKQGGLGKINFPIASDKTTEVSTKYGIQIEEEGISLRGLFIIDPEGIVRYSVVHDLNVGRSVDETLRVLKAFQTGGMCALDWHEGDDNL

SEQ ID NO: 3702 - protein, 358 aa, Klebsiella pneumoniae
MNVIHIAETVKGGVATVINNLTENNEIDSHVICPESQSKEIYCAQKTLFSRTGRNISSLSSLFLVIIKTLKYNKFDVIHLHSSFAGFIVRALFAFKLINKKKYKVIYTPHCFSFIMDTKKWKKKVYIYIERILAKQTDCIIANSYYEYKCAVDAGISKNKIKVVYNAVSLDGQEKLERIKKCNENEVQKEKINILFVGRFDKQKGYDYLLNVIKVADVSKYTFNIIGDSVHDVFEKIEKENVVYYGWVDNKELPAYFCENDVLLMPSRWESFGLVAVEAQLYGVPVIANNVASLPEVISDGLTGMLVNFEDANKVVEIMDSHTIHFWNEKKEACREFASNKFRKSDMVNSYVQIYKSY

SEQ ID NO: 3703 - protein, 316 aa, Legionella pneumophila subsp. pneumophila str. Philadelphia 1
MIYPNILATIGHTPVVKINRLGKDLECELYAKCEFFNPGGSVKDRIGYEMVVKAEKEGRIKPGDTLIEPTSGNTGIGIALAGAVLGYKVIITMPEKMSQEKQSVLERLGAIIYRTPTEAAYNDPDSHISLAKKLQAEIPNSHILDQYANPNNPNAHYFGTAQEIIDDFGKDLHMVVAGVGTGGTITGIAKRLKEFNPAIKIIGADPEGSILGGGTEIKSYHVEGIGYDFFPDVLDNTLIDAYIKTNDADSFRTARRLIKEEGLLIGGSCGAAMWAALQAAKSLSKGQKCLVILPDSIRNYMSKFANDEWMKEMGFL

SEQ ID NO: 3704 - protein, 173 aa, Mesorhizobium loti MAFF303099
MTIRDLMPWGRDTSQSPTLFREGDRDPFMGLHREMSRLVDDMFRGFESRLPSMGRFSLAGTGWPSVEISETDKDIRVTAEIPGMEEKDIEVLLDDGVLTLRGEKHSETDDKERQFSERFYGRFERRIPIGFEVAEDKVAADFRNGVLSVSLPKSEKAQSKAKRIPIGGKSTKH

SEQ ID NO: 3705 - protein, 355 aa, Kluyveromyces lactis NRRL Y-1140
MSQFIRRLHVPPLANKGFTDAIGSTPLIKIQRLSKELGRNIYGKSELQNPGGSVKDRAALYLIEDAEKKGLIDPSRPVTVVEGSAGNTAIGLAHICKAKGYNAVFYMPDTQSEAKINLLKWLGAEVYPVPVCPITDPLNFNNRARDHAKRLDNAVWTDQFDNQSNWKAHYHTTAPEILQQIEEAGMMLDAFTCSTGTGGTYTGVAKFLKEATNGNCKLVVADPPGSVIYSYIKTRELKREGGSFTEGIGQGRITENMRQSVDITDDAVFIPDEESIIMLFRLLDEEGLFVGGTTALNVVAAAKVAQTLPEGSNVATILCDSGHKYADRVFSKSWLQSKKLYDVLPDHLKKYASLE

SEQ ID NO: 3706 - protein, 375 aa, Magnaporthe grisea 70-15
MFRHGIRRFTTSSIRAAVAAAAEPTQHTINVSRAQGVAKGLTGAIGNTPLIRLNKLSEETGCEILGKAEFMNPGGSVKDRAALYVVKDAEERGLLRPGGTVVEGTAGNTGIGLAHVCRSKGYKLVIYMPNTQSQGKIDLLRLLGAEVYPVPAVAFDNPQNYNHQARRHAERLDNAVWTNQFDNTANRRAHIETTGPEIWAQTDGKVDAFTCATGTAGTLAGVTRFLKDASGGRVKSFLADPPGSVLHSYIVSGGKLIERTGSSITEGIGQGRITDNLQPDLALLDGALHISDEKSIEMVYRCLDEEGLYLGASSSLNVVAAKEVAEKLGKGHTVVTMLCDGAYRYADRLFSRKWLEDKKLLSAIPKHLEKYIVLP

SEQ ID NO: 3707 - protein, 213 aa, uncultured bacterium
MPSLRLGDTAPDFEQASSEGPIKFHEWLGDSWGVLFSHPADFTPVCTTELGLTAKLKDEFTKRNVKAIALSVDTVESHSRWIPDIDRTQNTQVNFPIIADADRKVSELYDLIHPNASATATVRSLFVIDPAKKVRLVITYPASTGRNFDEILRVIDSLQLTEYHSVATPGNWKDGDDVVIVPSLQDPDLIKQKFPKGYTAVTPYLRLTPQPNR

SEQ ID NO: 3708 - protein, 218 aa, Marinobacter sp. ELB17
MSIRIDDVAPDFTVNSTDGKITLHEWIGDSYAILFSHPKDFTPVCTTEFGAVAQLVPEFAKRNTKVMGVSVDNVEEHVKWKRDIEAFSGAAADFPIIDDTSLLVSKLYDMLPAGAYLPENRTPANSATVRTVFIIGPDKKVRLTMSYPMSVGRNFAEIMRALDAVQITDGAGIATPADWVPGQDVIVGLALNDEQAKEKFGELNIKLPYLRFAKAPKK

SEQ ID NO: 3709 - protein, 397 aa, Triticum aestivum
  misc_feature (240)..(240): Xaa can be any naturally occurring amino acid
AGWSSRPHRIALFVEPSPFAYISGYKNRFQNFIKHLREMGDEVLVVTTRPGAPEEFHGAKVIGSWSFPCPLYQNVPLSLALSPRIFSAVSKFKPDIIHATSPGVMVFGALAIAKMISVPMVMSYHTHLPAYLPGYNLNWLLGPTWGLIRCLHRSADLTLVPSVAIAEDFETAKVVPANRVRLWNKGVDSESFHPKFRRHEMRIKLSGGEPEKPLIIHVGRFGREKNLDFLKRVMEKLPGXVRIAFVGDGPYRAELEKMFTGMPVVFTGMLQGEELSQAYASGDVFAMPSESETLGQVVLESMASGVPVVAARAGGIPDIIPKDKEGKTSFLFTPGDLDECVRKIEQLLSSKDLRESVGRAAREEMENCDWRTASKTIRNEHYSTATLYWQKKTGRTG

SEQ ID NO: 3710 - protein, 783 aa, Ralstonia metallidurans CH34
MNKQTEPFLLDASVAAESAPQVGISRPHESAHLHVAGTATYTDDIPELAGTLHAALGMSARAHARLKSVGLERVRKAPGVVSVLTVDDIPGANECGPIIHDDPILVKDVVQFIGQPIFIVVATSHDAARRAARLADIEYEDLPPVLSPEAAHAAGSYVLPPMHLKRGEPARHIDAAIHRDAGKIHLGGQEQFYLEGQIAYAVPRENDGMHVWCSTQHPTEMQHHVAHMLGWHAHQVLVECRRMGGGFGGKESQSAMFACCASLAAWKLLCPVKLRPDRDDDMMITGKRHDFVFDFDVGHDDAGRIEGVRVEMVSRAGFSADLSGPVMTRAICHFDNAYWLPNVQIDGYCGKTNTQSNTAFRGFGGPQGAFAVEYILDNIARNVGKDSLDVRRANFYGKTDNNVTPYGQTVEDNVIHELIDELVASSEYKARRAATRAFNETSPILKKGIAITPVKFGISFNVAHYNQAGALVHVYNDGSVLVNHGGTEMGQGLNTKVAMVVAHELGIRMERVRVTATDTSKVANTSATAASTGADLNGKAAQDAARQIRERLAAFAARKAGVPVEDVRFGDDLVVAGELRQSFGDLAREAYVARVQLWSDGFYTTPKLHWDQKALQGRPFYYYAYGAACSEVLVDTLTGEWKLLRADALHDAGKSLNPAIDIGQVEGAFIQGMGWLTTEELWWNQNGKLMTHAPSTYKIPTINDCPEEFNVRLFQNRNVEDSIHRSKAVGEPPLLLPFSVFFAIRDAIAAVGDYKVNPPLRAPATSEAILDAVEAVQAAVVSA

SEQ ID NO: 3711 - protein, 902 aa, Marinobacter sp. ELB17
MTMQSQSNGEPQFRNGLRAEFDDFLSQQARRFEPENCLQIDFHCHDHNSDVPDELWGRILRLPETWIKTKKLVEVLGQNGSSVVTVTNHNNARSCWALQDKGVDVLVGCEFTCFFPEYDLFIHVLTYGFTREQEVLLNEKRQNIYDFLRYAARYDIPVILPHPLYFYSRNERIDLCLFEKLAVMFWRFEVLNGQRDLWQSVLTLNWVQSLTPERIRAYARKHKLDPSEFGVNPDKPKVVTGGSDDHTGIFAGLCGSQLYLPDLQQRLKTRPASDLALEALRNGQVAPFGNVGENQKLNIALLDYFAQAATKLKDPGLLRILLHRGSTWDKMGCFMVANLFLEMQKHKKTTVFFALIHDALQGKKPKRFLKWQASKDYAFCITQLDKIADSKRNHPEAFVDTVNQIIGELFNHLNHLITKRIRKAVDKHQGPSLKDFSTEELTRKLEIPSQLTALFLGDGKRQDNMSNINLAEVLDSLSFPVLISTVLAGSTLASTRVLYQNRDLLNRFARQLGKNEHSRRALCLTDTLLDKNGVSTSLSGKLKEIKRTNLPLDFLICHSDAVPEPHLSVVRPIADIDLHPFGDQTLRVPDVMEIARIFYEGGYDRIVCSTEGPMALVALFLQQMFNVPCYFFMHTDWIDFIAHTTNLNQHERDRVRRLMRALYSRFDGVFVLNREHRDWLTGHEMQLPEDKVFLTAHHTAPRDLQVQPVRKSDLISGANDKTPVLFIACRLSREKGIFDLPEIVQEARRSLPNLQIVVAGSGPASEDLQRAMPDAVFLGWQTREQLASLYLGLDLFVFPSRFDTFGNVLLEAFTHGMPAVAYNCKGPKDILEHGVSGYLTEDVSTMAEAVADFFSGSTDRHVMAENARKRAARFQAEPIMRKFLEDLGLDYPEQVHAEVTVA

SEQ ID NO: 3712 - protein, 498 aa, Ralstonia metallidurans CH34
METQTIRFYHRGQVQEVSDAPVTRTLLQYLREDVRCTGTKEGCAEGDCGACTVVIGELQDSGDVEFKAVNACIQFLPTLDGKALITVEDLRQADGALHPVQEAMVECHGSQCGFCTPGFVMSLWALYQQHTPGGEPPPRQTICDALTGNLCRCTGYRPIIDAGQRMMALPAPQADRIDPRQIADTLRNLKRGETFHYNARGQHFYAPRTAAEFGAIKAAEPNIRILAGSTDVGLWVTKQFRELGNLLYVGQVEDLNQIAEHDGFIEIGAAVTLEKAYAALNTAHPELEELWKRFASLPIRNAGTLGGNIANGSPIGDSMPALIALGTQVVLQRGDVRRVMPLEDLYLAYQKTAMVEGEFVAGLRVPVQGPQHFRTYKLSKRFDEDISAVCAAFGITVENGIVTAACIAFGGMAATPKRAVLAEDALTGKPWNEATARAGMAALGQDYTPLTDMRATADYRSRGAANLLYRFWLETRDSALPAAMVNVRAIGAGETVSA

SEQ ID NO: 3713 - protein, 187 aa, Bacillus sp. SG-1
MSLIGSEVKPFTAQAYKDGEFIEVTEESLKGQWSIFCFYPADFTFVCPTELEDLQNNYDELKSLGVEVYSVSTDTHFTHKGWHDSSETIGKIKYAMIGDPSQKITRNFEVLNEEEGLADRGTFIIDPDGVIQTVEINAGGIGRDADILVSKIKAAQYVRKNPGEVCPAKWQEGSETLKPSLDLVGKI

SEQ ID NO: 3714 - protein, 328 aa, Neisseria meningitidis FAM18
MPMGIAPYCRNLIIQEQKMKIANSITELIGNTPLVKLNRLTEGLKAEVAVKLEFFNPGSSVKDRIAEAMIEGAEKAGKINKNTVIVEATSGNTGVGLAMVCAARGYKLAITMPESMSKERKMLLRAFGAELILTPAAEGMAGAIAKAKSLVDAHPDTYFMPRQFDNEANPEVHRKTTAEEIWRDTDGKVDVFVAGVGTGGTITGVGEVLKKYKPEVKVVAVEPEASPVLSGGEKGPHPIQGIGAGFIPTVLNTKIYDSITKVSNEAAFETARAIAEKEGILVGISSGAAVWSALQLAKQPENEGKLIVVLLPSYGERYLSTPLFADLA

SEQ ID NO: 3715 - protein, 150 aa, Alkalilimnicola ehrlichei MLHE-1
MAIMRYDPWSTLRQIQTDLDRMFGQRGMITAGEGENAESAGQWLPAVDISEDDKAYHIHADLPGVAPEDIEISMDQGVLSIKGSRESESTESEEGWKRVERARGTFYRRFALPESVDADNIAARSRNGVLEITVPKKVAPPAQRIEVKSE

SEQ ID NO: 3716 - protein, 151 aa, Deinococcus radiodurans R1
MTLVGQPAPDFTLPASTGQDITLSSYRGQSHVVLVFYPLDFSPVCSMQLPEYSGSQDDFTEAGAVVLGINRDSVYAHRAWAAEYGIEVPLLADMQLEVARQYGVAIDERGISGRAVFVIDREGVVRYQHVEEQTGQYTVRPGAVLEQLRGL

SEQ ID NO: 3717 - protein, 377 aa, Bacillus subtilis subsp. subtilis str. 168
MKIALIATEKLPVPSVRGGAIQIYLEAVAPLIAKKHEVTVFSIKDPNLADREKVDGVHYVHLDEDRYEEAVGAELKKSRFDLVHVCNRPSWVPKLKKQAPDAVFILSVHNEMFAYDKISQAEGEICIDSVAQIVTVSDYIGQTITSRFPSARSKTKTVYSGVDLKTYHPRWTNEGQRAREEMRSELGLHGKKIVLFVGRLSKVKGPHILLQALPDIIEEHPDVMMVFIGSKWFGDNELNNYVKHLHTLGAMQKDHVTFIQFVKPKDIPRLYTMSDVFVCSSQWQEPLARVHYEAMAAGLPIITSNRGGNPEVIEEGKNGYIIHDFENPKQYAERINDLLSSSEKRERLGKYSRREAESNFGWQRVAENLLSVYEKNR

SEQ ID NO: 3718 - protein, 467 aa, Physcomitrella patens subsp. patens
MWNLLWTLAVVVVSVSGAVEGKQVSEKENWIQRAADQVKWLPGQPPVVLNQWAGYVNVGEDVGRYLFYFLSESPKNASGKPLVLWLNGGPGCSSLGVGWALEMGPFRVRENGTGLETNTHSWVRYANVLFLETPVGVGFSYSDDPKENHSSGDSITAEDNYMFLLRWLDRFPEYKDRDLYITGESYAGHYIPQLASLIHQRNRDSEQKINLKGMMVGNPSTDQYYDSIGTIDFWLAHSMISPQTHDQFMKVCNFTNCCSPQCNEVYNYAQQVEIGGIDYYAINALACNTDQNGNPLRRRLSQAFKATTKNNPVPGYDPCVSNSPEIYFNRKDVQEALHANVSGEIPYNWTSCSMDLSWTDSATTVLPLWEELIAAGYKIWIYSGDNDAVVPVTGTIYAIESLNLPITNRWYAWYHKTQVVAGRTQWYKGVTFATVRGAGHEVAVTQPGRFLALFKYFLAGTELPPDP

SEQ ID NO: 3719 - protein, 800 aa, Photobacterium profundum SS9
MSNHHGNALSHEEMVALVKQDLTTGVGKSVKHDSAGKQVTGEAVYIDDRLEFPNQLHLYARLSTQAHANITKIDVSPCYEFEGVAIVITSKDIPGQLDIGAILPGDPLLADGKVEYYGQPILAVAANDLETARKAAQAAIIEYDPLPAILDVKEALEKKHFVTESHQQKRGDSAAALKKAKHVLEGDLHIGGQEHFYLETQVSSVMPTEDGGMIVYTSTQNPTEVQKLVAEVLGVPMHKIVIDMRRMGGGFGGKETQAAGPACMAAVVAHLTGRPTKMRLLRSDDMQMTGKRHPFYNQYTVGFDDNGRIQGIDITVAGNCGYSPDLSSSIVDRAMFHSDNAYYLGDATVTGHRCKTNTASNTAYRGFGGPQGMMTIEHIMDEIACYLKKDPLEVRKHNYYDDKDRNITHYYQTVEDNFIHDITEQLETTSQYHERRKEIDAFNKTSPILKKGLAITPVKFGISFTATFLNQAGALLHIYTDGSIHLNHGGTEMGQGLNTKVAQIVAQEFQVDIDRIQITATNTDKVPNTSPTAASSGTDLNGKAAQNAAQTIKRRLVEFASSHFKISEEEVVFKSGIVQIRDKYMPFEELIQLAYFNQISLSSTGFYRTPKIFYDHQKARGRPFYYYAYGASCSEVVIDTLTGEYKILRADLLHDVGASLNPAIDIGQIEGGFIQGVGWLTTEELVWNEQGKLTTNGPASYKIPAIADMPIDFRTHLLENRSNPEDTVFNSKAVGEPPLMLSMSVWSALKHAIASVAVNNAIPKLDTPATPERVLWAVKNVQQIEQPALEITVELNEQEK

SEQ ID NO: 3720 - protein, 344 aa, Bradyrhizobium sp. BTAi1
MAIRNDVVAAIGNTPLIKLKRASEATGCTILGKAEFMNPGQSVKDRAGKWMILEAEKRGDLKPGGLVVESTAGNTGIGLAVVASARGYRTLIVIPETQSQEKKDMLRLCGADLIEVPALPFNNPNNYAHVGRRLADELRKTEPNGVLFADQWNNLDNAKAHYESTGPEIWEQTGGKVDGFVSAVGTGGTLAGTSRYLKEKNSSIVTACADPHGFAMYNWFRTGEVKSTPGDSITEGIGIARVTPVIETAKVDTAFLISDEDAVNTIYDLLQHEGLCLGGSSGVNIAGAVQLAKQLGPGHTIVTILCDPGNRYQSKLYNPSFMRAKNLPVPEWLERRSDIKPPFV

SEQ ID NO: 3721 - protein, 1268 aa, Physcomitrella patens subsp. patens; identical to SEQ ID NO: 1530

SEQ ID NO: 3722 - protein, 406 aa, Mycobacterium smegmatis
MGSSHHHHHHSSGLVPRGSHMRIGMVCPYSFDVPGGVQSHVLQLAEVLRDAGHEVSVLAPASPHVKLPDYVVSGGKAVPIPYNGSVARLRFGPATHRKVKKWIAEGDFDVLHIHEPNAPSLSMLALQAAEGPIVATFHTSTTKSLTLSVFQGILRPYHEKIIGRIAVSDLARRWQMEALGSDAVEIPNGVDVASFADAPLLDGYPREGRTVLFLGRYDEPRKGMAVLLAALPKLVARFPDVEILIVGRGDEDELREQAGDLAGHLRFLGQVDDATKASAMRSADVYCAPHLGGESFGIVLVEAMAAGTAVVASDLDAFRRVLADGDAGRLVPVDDADGMAAALIGILEDDQLRAGYVARASERVHRYDWSVVSAQIMRVYETVSGAGIKVQVSGAANRDETAGESV

SEQ ID NO: 3723 - protein, 316 aa, Synechococcus sp. WH 7805
MAIAPNITTLVGRTPMVRLNRLPQAWGCTADIVAKLESFNPTASVKDRIAGAMVEAAENDGTIAAERTVLVEPTSGNTGIALAMVAAARGYRLILTMPDTMSTERRAMLRAYGAELQLTPGEQGMQGAIERARELVQEIPGAYLLQQFDNPANPAVHAASTAEEIWADTDGALDGLVAGVGTGGTITGCARVLKSRLPKLRVVAVEPAASPVLGGGVAGPHRLQGIGAGFIPPVLDMDLIDEVIAVSDDEAMEVGRRLAREEGLLCGVSSGAVVAAALQIGQRPVMEGRRIVVILASFGERYLSTPMFSAAGDPDA

SEQ ID NO: 3724 - protein, 84 aa, Brassica napus
SLLKGNPNKKAIHSSKAVGEPPFFLASSVFFAIKEAIKAARTEVGLTKWFPLETPATPERIRMACFDEFSSPFVSSDFSPKLSV

SEQ ID NO: 3725 - protein, 523 aa, Vigna unguiculata
MNNSTTLSLSINPSFSPPFPSPATLITTPSSFSTFRQNSLRFAFYRSFGSKPIASFCRKARLCSLQGSSSAKSRKSFALGATEMTIAEDCLLEAVEEEEGPPDFSLLDPESNSRPRRIALFVEPSPFAYVSGYKNRFQNSIKYLREMGDEVMVVTTHEGAPKEFHGAKLIGSRSFPCPWYQKVPLSLALSPRIISAVAQFKPDIIHASSPGIMVFGALIIAKLLSVPIVMSYHTHVPVYIPRYTFSWLVQPMWWVITADLTLVPSAAIGRDLEAARATAANKIRLWNKGVDSESFHPRFKSHEMRLRLSNGEPDKPLIVHVGRLGVEKSLDFLRSLMDSLPEARIAFIGDGPSREDLEKLFEGMPAVFTGMLGGEELSQAYASGDVFVMPSESETLGLVVLEAMSSGIPVVGARAGGIPDIIPEDQDGKIGFLYTPGDLEDCLSKLKPLLDDKDLRETMGIAARLEMEKYDWRAATRKIRNENYNAAIWFWNKKRAQLLRPFQWLAKRIFPSSPDQEGNSQGC

SEQ ID NO: 3726 - protein, 152 aa, Bordetella pertussis Tohama I
MPTLNINGKDTVLDAPGEMPLLWALRDVADLTGTKYGCGMALCGACTVHADGQPIRACITPVQAVAGRRIVTIEGVAADRTGQAVQQAWRELDVAQCGYCQSGQIMSAAALLRANPAPTDRDIDDAMNGNICRCATYVRIRAAIHAAAAALA

SEQ ID NO: 3727 - protein, 336 aa, Pyrococcus furiosus DSM 3638
MRILLVGHYPPHKGGVARHVKQLKECLEKRHEVYVLTYGTVAVEEENVYSVKVPNIFGIRGTSFALLASKKIVKLHEKYNFDLVHAHYVGTTSFAGVLAKRKTGVPLVITAHGSDLEFMSRLPLGGYFVKTSIMEADYVIAVSHYLAKKALELGASRISVIPNWTELSGESERKYILFLGRVASYKGIEDFIELAKRFPGEEFVVAGEGPLLKKLRAKSPPNVKFLGYVPAEDVLKKAKVLVLPSKREGFGLVVIEANSFKVPVLGRNVGGIRELIRFSKNGYLFEDIEDAITYLKTLLVPKTNVKLGSIGKRISKGHSQEKMCERVEEIYREVIS

SEQ ID NO: 3728 - protein, 201 aa, Legionella pneumophila subsp. pneumophila str. Philadelphia 1
MSVLVGRKAPDFTVAAVMGNGEIVDKFNLHEHLKGKYGLVFFYPLDFTFVCPSELIALDHRIEEFKRRNVEVVAVSIDSHFTHNAYRNTPVKNGGIGPVRFTLAADMTHSICQSYGVEHPVAGVAFRGAFVIDTNGMVRSQIVNDLPIGRNIDEILRIIDAVQFFEENGEVCPAGWQKGQAGMKASPKGVAEYLSEHSESL

SEQ ID NO: 3729 - protein, 444 aa, Zea mays
MAAAVLAPKPPPPLPTRAFPSSSPSRFAPAFISPRHPLRRLLLRPIPCASSPSSVLMPNPDLETEPAHDGDGDGDEAPPESRPRRIALFVEPSPFAYVSGYKNRFQNFIKYLREMGDEVIVVTTHEGVPQEFHGAKLIGSWSSFPCPWYQKVPLSLALSPRIIAEVARFKPDIIHASSPGIMVFGALIIAKLLCVPLVMSYHTHVPIFLFLLIVPYISQTVHMFPANKIRLWNKGVDSESFHPRFRNMEMRSRLTVMDRLPGARIAFIGDGPFRAELEQMFSGMPVVFTGTLQGEELSQAYASGDVFVMPSESETLGFVVLEAMSSGVPVVGARAGGIPDIIPEDQEGRTSFLYTPGDVDDCVGKIKRLLSSEELREAMGRAARKEMEKFDWRAATRKIRNEQYSAAIWFWRKKRAQVLRPLQWVLRLLRRTMPGAADAAAKQS

SEQ ID NO: 3730 - protein, 198 aa, Helianthus annuus
INLHDYVGDSFTIIFSHPGDFTPVCTTELGAMAAYADKFAQRGVELLGLSCDDVQSHKEWIKDIEAYNKGKKVTYPIAADPNREIIKQLNMVDPDEKDASGQNLPSRALHIVGPDKKIKLSFLYPASTGRNMDEVVRALDSLIKASQHKIATPVNWKEGEPVVIAPSVSNDEARKMFPKGFQTVDLPSNKDYLRFTSV

SEQ ID NO: 3731 - protein, 187 aa, Dichelobacter nodosus VCS1703A
MPIINRSIPEFKVDAFHNGEFKTITHEDVKGKWAVFCFYPADFTFVCPTELEDLAKHYDEFKALGAEVYSISCDSHFVHKAWHDTSDAIGKIKYPMLGDTTGLLARSFDVMIEADGMAYRGTFLINPEGIIKAAEIQDDNIGRSAKDMLRKLKAAKYVAEHDGEVCPAAWEEGQETLKPSLDLVGKI

SEQ ID NO: 3732 - protein, 310 aa, Chlorobium tepidum TLS
MATIANITNTIGRTPLVRLNKLAKGLDADILLKLEYFNPLGSVKDRIGRAMIEAAEAEGKIDARTLIVEPTSGNTGIALAFVCAQRGYRLLLTMPETMSIERRKLLRYLGAELVLTPGAQGMKGAIEEAARIVEAEKNSFNPGQFRNPANPLIHQATTGPEIWNDTEGRVDMLVSGVGTGGTITGTSRFIKALKPNFKSIAVEPKDSAVLSGGQPGPHKIQGIGAGFVPDVLDVSLLDEVVTVSNDDAISTARALASQEGILCGISSGAAVHAAIEVAKRSSSAGKTIVAIIPSTGERYLSTALFEDIEA

SEQ ID NO: 3733 - protein, 333 aa, Oryza sativa Japonica Group
MGYARTVKAATAAAAAVLVAFGVRMAAPAAAGFVADELPRAQAAAATWLTPPYLYLVINAIILSIAASSRFQPNRPQAASADASLVRPAPVPVPVPVVAVPAPAVTMPMEVPVVPVPEAMAPEPIPVEVTVPEVVKTAPEAEEAEENFTISRSAWTPRRRSTAEAEAEHEALSPFADLTNSREKPLVSTRFGRKPVKASPEGSSRALGVSRPRKEQTLESTWKAITEGRAPPLARHLKKSDTWETRPGRRQSGSGGGEDAPPPATAMRKAETFNEAAGGGGGGKKVRREPSLGQDELNRRVEAFINKFNMEMRLQRQESLKHYNEMISRGSVY

SEQ ID NO: 3734 - protein, 187 aa, Xanthomonas axonopodis pv. citri str. 306
MSLINTQVQPFKANAYHNGNFIEVTEASLKGKWSVLIFMPAAFTFNCPTEVEDAADNYAAFQKAGAEVYIVTTDTHFSHKVWHETSPAVGKAQFPLIGDPTHKLTRAFGVHIEEEGLALRGTFIINPEGVIKTLEIHDNSIARDVTETLRKLTAAQFVANNPGQVCPAKWKEGAKTLAPSLDLVGKI

SEQ ID NO: 3735 - protein, 201 aa, Pseudoalteromonas tunicata D2
MGVLVGRQAPDFTAAAVLGNGEIVDSYNLHETIKGKKAVIFFYPLDFTFVCPSELIAFDKRFEEFQKRGVEVIGVSIDSQFSHNAWRNTPVNQGGIGPVKYALVADVKHEICQAYDVEHPEAGVAFRGSFLIDEAGNVRHQVVNDLPLGRNIDEMLRMVDALAFHSEHGEVCPAGWTEGKKGMDASPEGVAAYLSQNEGDL

SEQ ID NO: 3736 - protein, 372 aa, Ralstonia metallidurans CH34
MRVLIVTDAWEPQVNGVVRTLKSTRRELEAMGHTVDLITPLEFQTIPCPTYPEIRLSLLPSGKVRRRIDTFRPDALHIATEGPLGLAARRYAMQHDLPFTTAYHTRFPEYVQARFGIPLAWTYRFLRWFHGSARAVMAPTPVVLKDLQDYGITNGVLWTRGVDLDVFTAQRANVLNTAHPIFLYVGRVAVEKNVEAFLQLDLPGSKWVVGDGPALAGLKARYPSANYLGVLKQPELAKVYASADVFVFPSRTDTFGLVLLEALASGLPVAAYPVTGPIDVLGNSPAGVMHEDLREACLEALRIDRATARAHAEKFSWRAASEQFLTHLRPLPTGTGGTDNSAPPVAPDHGQASSHATARSVAAPADGRSHGG

SEQ ID NO: 3737 - protein, 151 aa, Campylobacter jejuni RM1221
MSLNIGDKAPQFELLNQDGVKIALKDFIGKKVILYFYPKDNTPGCTTEACDFSANYDKFGGKNAVIIGISPDSVASHEKFISKFDLKHILLSDSEKEVAKAYGAWGLKKNYGKEYEGLIRSTFVIDEIGRIAQIYSNVRVKDHALKVLESL

SEQ ID NO: 3738 - protein, 408 aa, Microcoleus chthonoplastes PCC 7420
MRIAYICADPGIPVFGQKGCSIHVQEVIRAWLKLGIQVELFATRIGGEPPPDLADVIVHRLPSIPKGEIAAREQAALSANLDLRIALENNGIFNLVYERYSLWSFTGMDYAKSMGIPGILEVNAPLIEEQAKHRGLVERTLAEQVAQQVFSTASAIIAVSEEIKTYIETYPGVSKRVHIIANGVNPERFSSSIESALSIHPESFTVGFVGTLKPWHGLSILVEAFDTLHKKYINTRLLIVGDGPERDNLVTELSARGLLDVTHFTGAVTPDKIPEILAKMTVAVAPYPHQSDFYFSPLKVYEYMAAGLPVVASRIGQLKELIEDEINGLLCPPGDAVALAATLERLYHNPELGKQLGKAARQTIQHHHTWDAIAKRLLEIAGMAEGYSSNVETCHGASGSRLGMTNDE

SEQ ID NO: 3739 - protein, 156 aa, Sulfitobacter sp. EE-36
MIEFELNGRQVSVDAEPDTPLLWAIRDEIGLTGTKFGCGIGACGACTVHIDGTATRSCITYLSDVEGMKVTTIEGLDENGNHPVQEAWRNLRVPQCGYCQSGQIMQAASLLKDTPNPSDDDIDAVMTGNLCRCMTYPRIRQAVRDAATAMGGSDNG

SEQ ID NO: 3740 - protein, 163 aa, Hydrogenophaga pseudoflava
MAKKIITVNVNGKAQEKAVEPRTLLIHFLREELNLTGAHIGCETSHCGACTVDIDGRSVKSCTHLAVQCDGSEVLTVEGLANKGVLHAVREGFYKEHGLQCGFCTPGMLMRAYRFLQENPNPTEAEIRMGMTGNLCRCTGYQNIVKAVQYAARKLQEPSTAAA

SEQ ID NO: 3741 - protein, 637 aa, Sulfolobus tokodaii str. 7
MLYYYVDDIRGKYKVVSFIRSNKPYAKFSIRGKVYTWKDIDFTIPKIFDNEGKLKEIEIPLLAKDRALYTGQPLGMVIGEDEYDAEDKKEEVEVEYEDLSGPIYEPDNVIHSFSQGEYEFGENSFSLKLIFNRQSPAPLEGRGVIVTHEDGRLIIRISTQAPTVARKIVSNMLDLNEEKIEIKVPRVGGGFGAKQDIIMEELAVIALSYVTGEDLKWIERKSEHIMTSQGRGQQHDVTVYYNSNGKITGIIDNITYDMGAFPLPWSGISPLYVTLMNLRNVYDIKIKTNVKVVASNNPPQGAFRGFGRPEAFFVIERIMDEVSRRLKIDPINIREKNLGKINNDIGDVKRVLERLRERYNEYKKKYKVGIGVSLYVHYASPTSKVLIGEEKSFIGGYECVSLRLTSNGIVEVKTTTVDMGQGISDVLREIVKRELDYDRIVVYTGSQDVNGFGSWASRSVITAGNATLLAARELKEKIDKLGGIKRVLEKLNNSPWELEEKELYSIKCYEPEESIGAISAQISVVEYDGTNFHLRENYIIIDIGVPADEDKVKGQIIGGIIQALGGVLYENVNEPYNYLIPTAKEVPKVEVELLNTPSSTPGGFRGVGENSISGAYASIANAISDFIPVYEIPIKRV

SEQ ID NO: 3742 - protein, 369 aa, Verrucomicrobium spinosum DSM 4136
MRILHWNDGYYPHIGGTELLVRSLCHVQQAAGHHVTVVGRSLPDCPAEEEIDNIPVWRRPVPEERLIQQPGLLSQQVKACAAFKRRFQPDVIHIHGSHMAGWLHLLTREAVSCPTILSLHAPIRLPAPVQRRLLMGVEAVAAVSASMKQQFAPLLEGRTGLVQVVHNGLSFPAISPAPLQQPFTALCLGRIVREKGFDIALQALAKLPQLRLIVAGDGAALPTLQQLALELNIANRVEFRGWVHPHAVPGLLNEVSAVVMPSRWEEPFGLVALQAAQMGRPIVASRIGGLPEIVHHGETGLLVPPEDPSALADALQSLFAAPSTAAAMGAAARLHAAARFSIERCACQYHELYTLAAKTTPIDETPILD

SEQ ID NO: 3743 - protein, 312 aa, Oryza sativa Indica Group
MQEGRKGVPSLLSSQGECIASNITQLIGWTPLIELKNIAKKDGIAARLVGKIEPYQPLSSVKDRSALRLIEDAEERGLISPGITTLAGVTSGNLGIGVAFVAAQKGYKFIAVMPAKLSIDKQILLRYLGVEVILVDPALNGFKGLLDRVEQLKKDMENVFVIDQFTNPANPDAHFRWTGPEIWKDTAGKVDIFVAASGSGGTVTGVGRYLKMKNPSIKLICVEPAESAVISGGEPAFHNIQGIGPGFIPEILDRSQIDEIVAAREENKGKMIVTMFSSGGERYLNSELFAQICKMLPVPLLNAEPVCGLVWL

SEQ ID NO: 3744 - protein, 316 aa, Streptomyces coelicolor A3(2)
MRYDSPLAAVGNTPLVRLPRLSPSDDVRIWAKLEDRNPTGSIKDRPALHMIEQAEKDGRLTQGCTILEPTSGNTGISLAMAARLKGYRIVCVMPENTSQERRDLLTMWGAEIISSPAAGGSNTAVRVAKELSAEHPDWVMLYQYGNPDNAGAHYAGTGPEILADLPSVTHFVAGLGTTGTLMGVGRYLREHKPDVKIVAAEPRYDDLVYGLRNLDEGFVPELYDASVLTTRFSVGSADAVTRTRELLQQEGIFAGVSTGAALHAAIGVGKKAVKAGESADIVFVVADGGWKYLSTGVYTAETTEAAIETLHGQLWA

SEQ ID NO: 3745 - protein, 430 aa, Arabidopsis thaliana
MVAMIMASRFNREAKLASQILSTLLGNRSCYTSMAATSSSALLLNPLTSSSSSSTLRRFRCSPEISSLSFSSASDFSLAMKRQSRSFADGSERDPSVVCEAVKRETGPDGLNIADNVSQLIGKTPMVYLNSIAKGCVANIAAKLEIMEPCCSVKDRIGYSMVTDAEQKGFISPGKSVLVEPTSGNTGIGLAFIAASRGYRLILTMPASMSMERRVLLKAFGAELVLTDPAKGMTGAVQKAEEILKNTPDAYMLQQFDNPANPKIHYETTGPEIWDDTKGKVDIFVAGIGTGGTITGVGRFIKEKNPKTQVIGVEPTESDILSGGKPGPHKIQGIGAGFIPKNLDQKIMDEVIAISSEEAIETAKQLALKEGLMVGISSGAAAAAAIKVAKRPENAGKLIAVVFPSFGERYLSTPLFQSIREEVEKMQPEV

SEQ ID NO: 3746 - protein, 140 aa, Archaeoglobus fulgidus DSM 4304
MGMLIDPFEELRRMQERFNRLLEEFGRFPEVKEFRVTMPVDVIDEGEQIRVVADLPGFSKEDLEIYFEDGDLVIKAEKKEEFEEKKGEYLRRERRMGKVYRRIALPAGLDIDAVKAKYNNGVLEITIPKLKKDRKAVQIE

SEQ ID NO: 3747 - protein, 212 aa, Pseudomonas aeruginosa PAO1
MSLRLGDIAPDFEQDSSEGRIRLHEWLGDSWGVLFSHPADFTPVCTTELGFTAKLKDQFAQRGVKVLALSVDPVESHLKWIDDINETQDTRVNFPIIADADRKVSELYDLIHPNANDTLTVRSLFIIDPSKKVRLIITYPASTGRNFNEILRVIDSLQLTDEHKVATPANWEDGDEVVIVPSLKDEEEIKRRFPKGYRAVKPYLRLTPQPNR

SEQ ID NO: 3748 - protein, 886 aa, Glycine max; identical to SEQ ID NO: 1562

SEQ ID NO: 3749 - protein, 140 aa, Brassica napus
SVGRSEADANDGLFDNPMAFSRDDPSLQMFLPTRPETSAQSDFRNEAGMSNGVNNDDWISLRLGDHGETVGANGLNESNLVSTREGALDTLSETASLLLGMNDNKQEKASIQRSESPFSFPRQKRSVRPRLFLSVDSDSE

SEQ ID NO: 3750 - protein, 401 aa, Methanosarcina mazei Go1
MRVLEVCQEFPNRYYPQLGTFIKQSIDSIANQGVELTVISPKAFVLPFSAFPYHNFSKLPGIEHTEKYDLHFPRYFYAVPKKYFYPLTGMSYSYFVSGYAMKNINPKPELIHAHFSYPDGYGMMKLAKKWEVPLVISALGTIERKVAYEGSYTSKQIIEAMNFADRILSVSEDLKTHIVNLGIDENKVDVVPNGVDTEIFRPAGKEYARNVLNLPQEKKIVLFIGALRKIKGVDYLIEAAKSFVNKNTDLYMVGRDDGLRKSLEKRAEELKISGFIKFTGPVTHEEIPLWISAADMLVLPSLSEGRPNVVLEALSCEVPVVATDVGGIPELMVEGETGYLVPSKNPVQLSEKINKLLENESRREKMGKFGRKSIIQRGLTWESHAKKTVDIYSELLARSSK

SEQ ID NO: 3751 - protein, 313 aa, Streptococcus pyogenes str. Manfredo
MTKIYKTITELVGQTPIIKLNRLIPNEAADVYVKLEAFNPGSSVKDRIALSMIEAAEAEGLISPGDVIIEPTSGNTGIGLAWVGAAKGYRVIIVMPETMSLERRQIIQAYGAELVLTPGAEGMKGAIAKAETLAIELGAWMPMQFNNPANPSIHEKTTAQEILEAFKEISLDAFVSGVGTGGTLSGVSHVLKKASPETVIYAVEAEESAVLSGQEPGPHKIQGISAGFIPNTLDTKAYDQIIRVKSKDALETARLTGAKEGFLVGISSGAALYAAIEVAKQLGKGKHVLTILPDNGERYLSTELYDVPVIKTK

SEQ ID NO: 3752 - protein, 198 aa, Helianthus annuus
INLHDYVGDSFTIIFSHPGDFTPVCTTELGAMAAYADKFAQRGVKLLGLSCDDVQSHKEWIKDIEAYNKGKKVTYPIAADPNREIIKQLNMVDPDEKDASGQNLPSRALHIVGHDKKIKLSFLYPASTGRNMDEVVRALDSLIKASQHKIATPVNWKEGEPVVIAPSVSNDEARKMFPKGFQTVDLPSNKDYLRFTSV

SEQ ID NO: 3753 - protein, 387 aa, Streptomyces avermitilis MA-4680
MRVVIVTESFPPDVNGVAHCALQTARHLVERGHAPLVVAPASPKSPTSLGQGGAPFAGQGPDALAPCRVIRVPSLPLPGYPQVRVALPSRRVAAAITEHRADIVHLAGPFVLGVRGMAAAARLGIPAVAVYQTDLAGYARTYMGAGEATAWRRIRSVHAAADRTLAPSTAALHDLEAHGVPRVRLWPRGVDTVRFRPEHRDESLRRELAPNGEPIVGYVGRLAPEKQVELLAGACGLRGVRVVVVGDGPSEVTLRGALPGAVFLGRRTGDELARIFASLDVFVHTGPFETFCQTVQEAMASGVPVVAPAAGGPLDLVAHGRTGLLVPPRDAGAVRDAVWSLAADPALRAAYGAAGRATVEGRTWAAVGDQLIGHYAEVLSARTAVAA

SEQ ID NO: 3754 - protein, 754 aa, Mesorhizobium loti MAFF303099
MNFDPRFSGRKFASVGTRPIRPDGVDKVTGRARYGADFNMAGQLVGRVLRSPHAHAKILKIDTSKAEKLNGVKAVITAKDLPDLTDGDAAMYDILDNCMARTKALYDGHAVAAVAAVDARTARQALKLIEVEYEILPHVTDVDEAMQHHAPLINDTIFTEGLEEKPVKPSNVTKRSQFGHGDVHQGFGHADFIVERSFKTEQTHQGYIEPHACVASVSSDGTADLWVCTQGHFVYRQHCAQLLGMEASKLRVTSSEIGGGFGGKTHVWAEPVALALSRKAGRPVKLVMTRDEVFRASGPTSATSIDVKIGARKDGTITAAEATLRYSAGPYAGSWAEIGAMTAFACYKLDNVKTVGYEVLVNRPKTAAYRAPSAPMAAFAVESAVDELAKELGMDPVDFRIKNAAQEGTRSSYGPVYGPIGIGPTLEAVKHHPHMKAPLKKNQGRGMACGFWFNFGGQTCVDLNIGMDGSVSLAVGTVDVGGSRASLSLVAAEELGIDYAQLKAVVADTSSLGYNDMTDGSRGTFSSSMATISAARNAIKILRERAAQMWDISVDDVVWELGHAVAKGEKHGNLGKLSLKEIAAQSGKTGGPIAGHSELVADGAGVSFATHICDIEVDPETGSTRVIRYTVVQDAGKAVHPTYVEGQYQGGAAQGIGWALNEEYIYGKDGRLQNAGFLDYRIPVCSDLPMIDTQILEIPNPNHPYGVRGVGETSIVPPLAAIANAVSNAAGVRMTHIPMSPPRILAAIEAERGE

SEQ ID NO: 3755 - protein, 827 aa, Nocardioides sp. JS614
MSDQLRTVGTDVPRVETVEKLTGDALYTGDLLLPGMLHAKVKHSPHARARILRVDTARAEALPGVHAVLTGHELDYKIGLYVVDKDILAKDVVRHFGEAVAAVAAETPEIASAAVDLIEVEYDVLTPVLDPMEAIRDGAPLVHPDLGSYAYVEAAFSPQPGTNVAHVQKVRKGDLDRGFAEAEWVVEREYTNPSVQHVPLETHVAVVQWKAGDQVTIWTSAQSPFTVRNLFCTAMRLPLNQVRVVVPHVGGGFGGKAGIHLEPLVACLSRKAGGRPVRLQATREEEFSLLPCRSALTYRIRTGVRSDGTITAQQMTMYWDAGAYADYAVNVTRASGYSAGGPYEIPNAAVDSYAIYTNKPYGTAYRGFGHVEFFWGLERHMELVAQAIGMDPLEFRRRNLLRPGSLTMTGERITEHTGDPRACLDAVAEAIDYGRLTPEEAAHERSTGRRIGKGVATLHKAPAMPSFTATAAVVKMNSDASVVVNIALMEIGQGCNTALAQIVAERLRFPVERVKVAVERDTDKDPYDWQTVASKGLILSGNACLLACDDLLRQAYEVAGQVLRANVADLDHDADRVFVKHRPEESVTFAELSVGYAFPNGNGIGGPLVGVGRYIAQGLTNLDKETGQGLPALDWTYGAHGVVVDVDPETGEFDVLAISSAYDVGRVVNPGLVRGQAIGGMVQGLGTALCEGYIYDQQGRLLNPSFTDNKIPTARDIPARIDSAVVETAQLDGPFGARGVGEHPMISVAPAIGNAIQHATGAELLHMPMRFEDVWRALQRHEPIDNWITETPVGSCRSDLPGTNGTAHPAVPVADTGPTHTPEVALP

SEQ ID NO: 3756 - protein, 167 aa, Nocardioides sp. JS614
MLISVTVNGHLFEREVEEHWTLLRFLRDGLGLTGTKEGCGAGECGACTVELDGRTVNSCLVLAVEADGGSIRTIEGEADQGRLSTIQAAFARHHAVQCGFCTGGMVLSVRDLLQRNPRPTVEEIKEGIEGNFCRCTGYEQIVEAVLDASGQLDDPTNQPVTGGLRHV

SEQ ID NO: 3757 - protein, 186 aa, Salmonella typhimurium
SLINTKIKPFKNQAFKNGEFIEVTEKDTEGRWSVFFFYPADFTFVSPTELGDVADHYEELQKLGVDVYSVSTDTHFTHKAWHSSSETIAKIKYAMIGDPTGALTRNFDNMREDEGLADRATFVVDPQGIIQAIEVTAEGIGRDASDLLRKIKAAQYVAAHPGEVCPAKWKEGEATLAPSLDLVGKI

SEQ ID NO: 3758 - protein, 152 aa, Frankia sp. EAN1pec
MTVDVGAVAPDFSLKDQNNEVVTLSDFRGRRNVVLLFYPLTFTGVCQGELCSVRDDLASFQNDDVQVLAISVDSSFAHKVWADQQGYEFPLLADFWPHGEVAKAYGVFNEEKGISLRGTFIIDKEGKVRWKVVNNIPDARDQAEYLKALASL

SEQ ID NO: 3759 - protein, 220 aa, Thermoanaerobacter tengcongensis MB4
MEEIRMKLLGEKFPSMEVMTTHGVKRLPEDYAGKWFVLFSHPADFTPVCTTEFVEFARKAEEFKQLNTELIGLSVDQVFSHIKWVEWIKDNTGVQIPFPVIADELGRVSNQLGMIHPGKGTNTVRAVFIVDDKGVIRLIMYYPQEVGRNVDEILRALKALQTADQYGVALPEKWPNNYLIKDHVIVPPSTDEASANERKEKIKAKEIEAFDWWFVHKPLK

SEQ ID NO: 3760 - protein, 200 aa, Frankia sp. CcI3
MTARFAREVPAGPPAGPPAGSSWPDDGVVAPYHLHVDGFLHTVAGAWIGDSLLTVLRDVIGVTSVKDACEQGRCGACSVLLDGRLVASCTVLAADANDAQVSTVAGLRTAGPARAVRAAFLEEGAVQCGFCTPGFVVAVTDLLTRRPDADEEEIRESLAGNICRCTGYGRILAAIRTVQAERGTLLSGDAPAPPHRGVGR

SEQ ID NO: 3761 - protein, 1445 aa, Coccidioides immitis RS
MGVPKFFRWLSERYPAISQLIAENRIPEFDCLYLDMNGIIHNCTHKDSDSPTFRMTEDKMFIAIFNYIEHLFGKIKPKKLFFMAIDGVAPRAKMNQQRARRFRTALDAEIAKEKAIREGIEMPKEDPFDSNCITPGTEFMAKLTKQLKYFINKKVSEDAEWQGVEVILSGHEVPGEGEHKIMEYIRQAKAQPDYDPNVRHCLYGLDADLIMLGLLSHDPHFCLLREEVTFGRQNQKKVKELEHQNFYLLHLCIVREYLELEFQELEQEGALQFEFDMERVIDDFILMAFFVGNDFLPNLPNLHINEGALAWMFKVYKEVLPKLDGYINERGRINLNRLGVLLDSLGDVEFRFFEAEYSDSRWLKSKLSRGEEKPEILDDPKALTISPAQKHILSKVKKYISHRPVNDDGYPVPLDLSPSLPARDRKFVEQLADDLRISWSSVSNEHGDRFLRLQLPSKQQLANGDSASEDEDEEAQIAVLRVLKKYENAKVKETTAEEAQQIAEKKYEQKFQEWKNKYYEGKFGWGTDNDEEMRKLTENYVQGLQWVLYYYYRGVASWPWFYRYHYSPMISDVKRGLGADMDFKLGQPFFPFQQLMGVLPDRSKKIVPQAYHELMISPDSPIIDFYPRDFELDMNGKKMEWEAVVKIPFINEDRLLKAMASKEHLLTPEEKARNNFGVTLKFTHSPDIEFTYPSSFVGVFPDIPRCHCIENVYELPTMEGLEPYVGLMDGVKLGTEALAGFPSLKTLPHTAQLGFHGVTVFQQESRNESMVVTLTEPESRSRVETAKSKIGKRVHIGYPFLHEALVVRVSDELFDYVQVDGEEHIVQIPHSPGQIDQWKKKSDRIESSYSKRLGMIIGEVESIVHVHVLKGLVKTELGATVKEFAEIPGIETDYASQLIVDEVISQDDRFIEREAVPIEEEFPEGTRAFFLGEYNYGAPVHITGHDDGKLQGLVSTTKGAKEPEFGKEQVDIAESHSPYTPSFAVSRNLQLNPLTVAKITSSFSVMCEGKRINLGLNLKFEAKKLKVLGYSRRGQNGWEFSEKAIGLLREYMIKFPEFIAGIQRKPQGDLFEPTDFYPPEVAATKIKEIQSWLKSNEAKNFERVPLEAEQLDSDVVGAIEEAADKWFRNKPSPIPQKIRGVPRNAVLKPADAEHRLGNQRFALGDRVIYAQDSGKVPIATKGTVVGLTRTSRTVLLDVIFDVSFMSGTTLSGRCSPFRGQTVAASSVLNLTNKQLVAMTRAANEQAKAQQQRTSANQGYGAPLGPGGRGQLKDAPTPPPLRGSFRSAINGHGSPRGNGLPRGRGAPHILPLRQHPQSHPARAQSSGVHQTRSWRGRSNNQGGSSASQKMDSEMHKGTAPVRGRGRGASAAQLPHSRGGYVSVERVDPTTDIIHNNPNFRPRPYNAVPPPTNLNHRGSHRGRGRGAPRGRGRGALGRGRGTATAES

SEQ ID NO: 3762 - protein, 781 aa, Frankia sp. CcI3
MSLGIGRPVRRPDGPDKVTGSFSYVGDLRVPGMVHARTLRSPHARARIRRVDVDAARRLPGVVGMVTAADVPGMATYGLIVADQPVFAATEIRYAGEPVAAVAAVDVRTARRALAAIEVDYEPLAPSTDPDRVWQPDAEPLHPAGNLYREIELRHGDPDALGPVVVEDQYLVGMQDQAFLAPEAALAMPAADGGVDLRVATQWLHSDREQIAACLGLPEELVRLTLAGVGGAFGGREDVTLQIHGALLARATGLPVRIAYDRVESFLGHPHRHPARMWFQHSATADGNLVSVRARLVLDGGAYASSSPAVLANAVTHAAGPYRVPNAHLHGVVVRTNNPPCGAMRGFGVPQVTIGHEAQMDRLADALGMDPVDLRVRNAVRPGDVLPTGQVMGAPLPAREVIEAVASRPLPPAMPANVAVTALPGGRPAAAEPSRVRRGVGYALAYKNLLFSEGMDDSSVARARLELAEDGTVRVRLHSACAEVGQGFVTIAGQIARTELGVEQVVLAPADTAVGSAGSTSASRQTWMSGGAVRGACAAVADRLLARVARTAGLPAEVVEAPRRTLTVNAGEIVGVEAGLRVPLAEALADGPIEAEYTFHHRRTSALDADGQGDPHVAFAAAAHRAVVDVDVDLGLVRVVSMALAQDCGTVLNPLALRGQVEGGTAQGLGLAVMEELVTVDGVVVNPTFHDYLLPTIADVPDLDFVAVTHPQPDAPYGVKGVGEAPTCTATPAIIAAIRVAVGRDLRRVPVRPEDLVTISPMTAPPTTAPPTTPGQGVPAA

SEQ ID NO: 3763 - protein, 154 aa, Cupriavidus taiwanensis
MTVSLNKAIPDFSAPMTGDATFRLADYRGKTVVLYFYPKDNTPGCTTEAMNFRDQYEDFEKAGVQVFGISRDSLRSHENFKAKLELPFELISDADENVCTLFDVIKMKKLYGKEHRGIERSTFVIDGKGILRHELRGIKVPNHVDEVLEIVRGL

SEQ ID NO: 3764 - protein, 321 aa, marine gamma proteobacterium HTCC2143
MAAFNDNSLAIGQTPLVRLNRIGDGNIFAKVESRNPANCVKCRIGSNMIWEAEKSGLLKPGMEIVEPTSGNTGIALSFVGAARGYKVTLVMPHTMSLERRQLMKALGANVVITDAAKGIKLCIDTAQQLVAEAPDQRWMPSQFDNPANPAIHEQTTGPEIWEDTDGGVDVLICGVGTGGTLTGISRYLKNTRGKAITSVAVEPMSTTMITAAKAGEEPVHGPHKVQGIGAGFVPANLDLDMVDQVEQVSDEDAIEYAHRLMKEEGILAGISSGAAAAIAHRVSQQPEHKGKTIVVILPDSAERYLSTPLFEGQFSDNETVQ

SEQ ID NO: 3765 - protein, 320 aa, Gloeobacter violaceus PCC 7421
MVSTEIGPSALGSVQPPAETDLLQWVGNTPLLRLERVTAGLSPDVEVYGKAEWFNPGGSVKDRPALNMILEGERSGRLTREKIILDATSGNTGIAYAWIAARRGYRVKLALPLNASEERKRILKAYGVDLILTDPTLGSDGAIQEARRLYAADPERYFYPDQYSNNANWQAHYLTTGVEIYQQTGGRVTHFVAGLGTSGTCMGVGRRLKEFDPAVRVIAMQPDSPFHGLEGLKHMETAIVPAIYNPALPDRQVEVSTEEAQRTVKRLAREEGMLVGISAGGNVAAALRLARELDRGVVVTILCDSADKYLSERFWDDPNL

SEQ ID NO: 3766 - protein, 404 aa, Thermoanaerobacter tengcongensis MB4
MKSSKNRRKWGLAMDNLKVTVFTNEYPPNIYGGAGVHVDYLTRELSKLMKVDVRCFGDQKFFSENLTVKGYKEWEELKEGLDPRYQKVLGPFSIDLAMVKDPVDSDVLHCHTWYTFMAGFLAKKLYDKPLVVTIHSLEPLRPWKEEQLGNGYKLSSWMEKTGIKAADRIIAVSQGSKEDILKYYDVPEEKIEVIYNGIDLKEYKKIDRNVARKKYGIEGRYILFVGRISRQKGITHLIDAVKYLPKDVKVVLCASSPDTPEVLEEVEQKVKLHDNIIWINKMVEKEDIVELYSNAEVFVCPSIYEPFGIINLEAMACETPVVASATGGIKEVVVHEETGFLVEPGNSEELAKYINILLENRELAKKFGINGRKRVEEMFSWGSIAKKTYEMYRKVVQEYKKAKK

SEQ ID NO: 3767 - protein, 377 aa, Mycobacterium avium subsp. paratuberculosis K-10
MSRVLLVTNDFPPRPGGIQSYLGEFVGRLAAAGSHELTVYAPHWKGAQAHDEAVGYRVVRHPGTLMLPGPAVDARMRRLIAEHGIDTVWFGAAAPLALLAQRARAAGARRVLASTHGHEVGWSMLPVARSVLRRIGEQTDVVTFVSRYTRSRFAPAFGPRARLEYLPSGVDTDRFRPDPAGRARLRERYGLGERPTVVCVSRLVPRKGQDMLIRAMPSIVQRVDGAALVIVGGGPHLQSLRALARDCGVAAQVTFTGGIPATELPTHHALADVFAMPCRTRGAGLDVEGLGIVYLEASASGVPVIAGRSGGAPETVQHNKTGLVVDGRSVTEIADAVTELLSDPDRAAAMGAAGRQWVTSQWRWDTLAARLAGLLGD

SEQ ID NO: 3768 - protein, 158 aa, Gluconobacter oxydans
MTTKFELNGQPVTVDAPADTPLLWVIRDDLNLTGTKFGCGIGECGACTVHVGGRATRSCITPLSAVEGASITTIEGLDPAGNHVVQVAWRDQQVPRCGYCQSGQIMQAASLLKDYPNPTDDQIDGVMGGSLCRCMTYIRIRKAIKEAASRQQEGANNG

SEQ ID NO: 3769 - protein, 213 aa, Dehalococcoides sp. BAV1
MEEVARAMPRIGDIAPQFEALTTHGVLKLEDFKGQWLIIFSHPADFTPVCTTEFIAFTEIYPELQKRGVELLGLSVDSNSSHIAWVRNVEDKTGIKIPFPIIADLNKEVSSAYGMLHPGQSKTETVRCVFILDPGQKIRLIMYYPMNVGRNMQEILRVIDALQTADEYKVALPANWHPGDKVVVPSPSTQEMAEERMGQGYECVDWYLCKKQL

SEQ ID NO: 3770 - protein, 305 aa, Bacillus anthracis str. Ames
MKLCENITELIGDTPVVRLSKFIPEDAADVYVKLEMFNPSRSVKDRAAYNLLHVAEENGLIKPGDTIIEPTSGNTGIGLAMNAAAKGYKAILIMPDNMSKERINLLKAYGAEVVLTPAEQRMPGAIAKALELQKEIPNSFIPQQFENPANPNIHRYTTALEIYEQMDGELDAFVATAGTGGTITGTGETLKEKLPNLYIAVVEPKGSPVLSGGVPGPHKLVGTSPGFIPKNLNTEVYNEIIQIADEEALTTMRNLARQEGLLVGPSSGASVYAAIMIAKRLGTGKKVLCVAPDTGERYLSMGLFE

SEQ ID NO: 3771 - protein, 1019 aa, uncultured bacterium
MTTVPTLSVNGQHYRVAVDPGETLLDVLRDKLGLTGTKKGCNVGDCGACTVLVDGEPMNSCLLLASEMEGKAVTTIEGLAQNGELTPLQKAFVHEGGIQCGFCTPGMVVAATALLNKNPNPTADEIKDALAGNLCRCTGYTGILRAVQRCAGQEPQSHEATEPRRAEAAEPRSHEATKPRRDEAAEASRQSAIRNPQSAMQSVGVSIPRVDAADKVTGRAQYTADISLPNMIHGKILGSPIAHGRIKRIDVSKAKALPGVVAVITGADVPDTLYGVSPARYDEHVLAKDRVRHAGDEVAAVAAIDERTAEKAVSLIEVEYEELPAVFDPLEAVVDGAPQLHERYKNNINTHVEQSFGDVEKGFAESYCVREETFTGNHVYQSPLEPHASIATWDHDGTLVLYSSTQVPFYVQYMMAHVLHIPLGKIRIIRPAVGGGFGGKAATSPLDLCSAFLSKKTGRPVKMAYSREEMFHYGRGRHKQHMRMKLGVDRDGKIKAFKSEIYLDGGAYTSFGVATAYYAGSMMPTLYHIPNYSYDGYRVMTNKPACGAMRGHGVPQPRFAFECLLNMVADDLGIDPIEIRRRNAMTPNTRTVNDLDIGSCEFLATLDAACEKSGWNEKYRRAAGFSPRGAGNETGASQDQTSRGLQSARPNVRRGIGVGCGGFVSGAGYCIYRGQVQLSHEKPREHFQKKSIFPHANAIVKISEDGMAAILLIGAAEIGQGSDTVLTQMCAESLGIPTSRLRIRSEDSDISPLDLGAYSSRVTLMAGHAVSRAGAAVVDKMRPYAAKVLGCAESEVVAHDGIMFATGRKANPQSAIPNPQSVPWEEVARRYFNDNGPLVGTGCYKPPDGLGGDYKGATVGTSPAYSFGTSVCELSVDLETGKVKIDRFTDYHDCGTAINPRAVHGQVEGAIVMGAGETIMEDVQFDEKGRILNPNLHGYLIMTIKDAPEIFSGIVNSYEPRGPYGAKEIGEGSTLPVLGAVAHAIANATGVWIKDLPITPEKILKAIRERRGTGESTAM

SEQ ID NO: 3772 - protein, 212 aa, Xanthobacter autotrophicus Py2
MATLRLGDVVPDFEAVTTEGPIKFHEWLGDSWGILFSHPKNFTPVCTTELGQASHLKPEFDKRGVKLIGLSVDTIENHPAWVGDIKDATGASLNFPLIADSDKKVSDLYDLIHPNASDTATVRSVFIIGPDKKLKLSLTYPASTGRNFDEILRVVDSLQLTAKHSVATPVNWKHGEDVIIVPSVTDEAAKEKFPEGWKTVKPYLRVVRQPGA

SEQ ID NO: 3773 - protein, 415 aa, Desulfococcus oleovorans Hxd3
MKVLLVNKFLFAKGGDAISTLDTGRILEAHGHEVVFWGMDHPDNPPWPFADLFVSHVNYENAGGPGGKARTAMNILYSFEAREKMAALLEKTKPDLVHLNNFAHQLGPSVLDVIKKHGIPTVMTMHDYKMVCPVYTMLCNGRVCEKCKNGRFYHCGLNRCTKGSLFKSMVNVAEMYLHHRMLHIYDKIDLYISPSRFLKNKVEEMGLKGEVAYLPNCVDVSGFVPCFEWREKSIVYVGRLSHEKGVETLIDAVKNIHGVRLKIIGDGPLKANLEEKVKNENIGNVVFLGYRTGQNLHNEIRNSMFLAIPSEWYENSPRVVIEAFALGKPVVGARIGGIPELVQDWETGLTFTSGDVDDLRKKINLMLNSNTRISQLGKNGRAFVVQQAEPTVYYRRLLECYGRARQLNHNDTVRR

SEQ ID NO: 3774 - protein, 293 aa, uncultured bacterium
MYLPDIELHEASTLEEAAAVMAGHAPDARLLAGGTDLLVDLKTGRVNFGHLVSLRRIDALRGISETADGLRIGALTTISQLDGSPIVRERFSPLLDATSQMANPQIRNVATVGGNIASAVPCADLPPILTAMGASVVLWSAAGQREVPLDAFFVGPRQTVRRDDEVLTAILVPQPPPSFGAAYARFQLRDGNAIAVAAVAAGVLLDNDSSVKEARIVLGAVAPVPLLVESAGAALVGQAPEESAFRHAADAAMGAAEPISDLRGSAEYRRELVGVLTRRALSAACQRAREARR

SEQ ID NO: 3775 - protein, 435 aa, Azospirillum brasilense
MPRVPPAACSARSSGRAMDLAAAAAIETRTLSRMVPSGLPPQPPVPAPPSLADLHLVLFMTDGISLRIWEEAGMFEREVALYRRLRPYLRALTIVTYGDRWDAACRSRLPGIRIVCDRGLGPARYRDWIARRLPRLWRGPTLVKTNQTAGADTAFAAARTAGAWFMARCGYMLSEACVHLHGPDSPQTQSARALEAAVFPAADRCVVTADAMRGSVLATGADAGAVTVIPNYVDTDRFAPDPGARREPGPFRVAFIGRLVPQKNPLLLIEGLRGLDVALDVVGQGELLPAMRAAAQGMDVTFHGILPHLALPALLRRADCFLLPSGYEGHPKALLEAMACGLPVIGANRPGICEVVRHGRTGLLVEPEADAIRDAVRTLAGDCGLRAALGRAAREEVLATLSLERTVHNELALYRDILARPPKAAGAGGEAPCPR

SEQ ID NO: 3776 - protein, 211 aa, Synechococcus elongatus PCC 7942
MSLRLGDTVPNFTQQSSEGEINFYDWAGDSWVILFSHPADYTPVCTTELGTVAKLKEEFAKRNVKPIALSVDDVESHKGWIGDINETQGTQVNYPILADPDRKVSDLYDMIHPNANNTLTVRSVFIIDPNKKLRLTLTYPASAGRNFDELLRVIDSLQLTDNYSVATPANWNDGDDVVVVPSIPTEQAREQFPKGVTEVKPYLRLTPQPNR

SEQ ID NO: 3777 - protein, 345 aa, unidentified eubacterium SCB49
MKEAKKVYKNVLELIGNTPLIELNEITKGMKGNYFAKVEAFNPGHSAKDRIALHILENAEAKGIIKPGDTIVETTSGNTGFSIAMVSALKGYKCILAVSSKSSKDKIDMLKTMGAEVHVCPAHVAADDPRSYYEVAKRIHLETPGSVYINQYFNELNIEAHYASTGPEIWEQTNGEITHLVACSGTGGTISGTARFLKEKNPNIQVLGIDAYGSVLQKFHETGELDKNEIYPYRIEGLGKNLIPSATDFSQIDSFTKVTDGESALTARDLAKKEGLFVGYTSGAAMQGTKQLNEQGVFDENSKVVIIFPDHGSRYMSKIYDDEWMKLNGFLDEAVQETKAVEYVK

SEQ ID NO: 3778 - protein, 211 aa, Synechococcus sp. WH 5701
MTLQLGDTVPDFTQDSQLGPINLYDFAGDSWVVLFSHPADYTPVCTTELGEVSRLRPEWEKRNVKTIALSVDSAESHKGWIGDINETQSTTVDYPILADADKSVSDLYGMIHPNALNNLTVRSVFIIDPNKKLRLQITYPASTGRNFDEILRVIDSLQLTDHHQVATPVNWKDGEDCVVVPSIATEDARVKFPKGVTEIKPYLRMTPQPNK

SEQ ID NO: 3779 - protein, 216 aa, Zea mays
MASSSSFFTFSSQTTLHSHLHRNTFLTKTQFPVPTKSSESNFFGLRLSPSTSRSPLSPCSFKSSIFAKVNKGQSAPDFTLKDQNGKPVSLKKYKGKPVVVYFYPADETPGCTKQACAFRDSYEKFKKAGAEVIGISGDDSASHKAFASKYKLPYTLLSDEGNRVRKDWGVPGDLFGALPGRQTYVLDKNGVVQLIYNNQFQPEKHIDETLKFLKAA

SEQ ID NO: 3780 - protein, 419 aa, Streptomyces ribosidificus
MLRLTPFFHHDCVTAWPAEFDAVGGMQVQILRLSRELADRGVEQLVMTVGFPGLPRERVDRPGLTVRVTRAPLPPLRSELTGIVGLNQAWLAAALAACLPLRRRWRPDLVHVHADGQLWALLAGPLVSRMVGAPYVLTLHCSRLAVYEPMSRFDRLQHRLVDAAERYALRHACRVSALTERTADTVARLLPLDRAVIDVLPDSVGDVRPVPRGRAEEHVRALGVPAGVPVVGWVGRVAHEKGWRDFVAMAERWDSDSGAPGAVFLVVGDGPQRERMRDAVVAAGLADRFVFTGFLPHDAVPSLMTALDVLVMPSAHEELGGSALEAMVCGTPVAGYAVGGLRDTVGSVTPGLLVPRGDVAALARAAGEAVTDAERHRKTVASAVPDLLGRYGADTVERALEHYRRALGRTSGGGAGWTP

SEQ ID NO: 3781 - protein, 339 aa, Allium sativum
MGERTGLASFIAAHNEDASENIVQDITQLVGWTPLIEIKSITKADSVGARIIAKLESYQPSNSVKDRSALRMIEEAEEKGLIKPGVTTLLEPTSGNLGIALAYIGLKKGYKFLGVMPSHYSIERRMLLKYLGADLALTDTNLGFKGVLDKVAELSASDPNFYVLNQFSNSANPGAHYATTGPEIWKDTAGKVDIFVVGSGSGGTVSGAGKYLKEKNPNVKVVCVEPAESAVIAGGPPGPHGIQGFGPGFVPDNVDYSVIDEFLSVTTQEALACARRIAKEEGLLMGISSGANLVACLRVGARPENKGKMIVTTFSSGGERYMSTQLSDEVREECINMTF

SEQ ID NO: 3782 - protein, 265 aa, Spinacia oleracea
MACVASSTTLISSPSSRVFPAKSSLSSPSVSFLRTLSSPSASASLRSGFARRSSLSSTSRRSFAVKAQADDLPLVGNKAPDFEAEAVFDQEFIKVKLSDYIGKKYVILFFYPLDFTFVCPTEITAFSDRHSEFEKLNTEVLGVSVDSVFSHLAWVQTDRKSGGLGDLNYPLISDVTKSISKSFGVLIHDQGIALRGLFIIDKEGVIQHSTINNLGIGRSVDETMRTLQALQYTGNPDEVCPAGWKPGEKSMKPDPKLSKEYFSAI

SEQ ID NO: 3783 - protein, 466 aa, Mycobacterium marinum M
MRPMRAGAGAAGESCKDDGVRPDDVSRLTADAVVRRVALLAVHTSPLAQPGTGDAGGMNVYVLQSALHLAKRGIEVEIFTRATASADPPVVRVAPGVLVRNVVAGPFEGLDKYDLPTQLCAFAAGVLRAEAAHEPGHYDIVHSHYWLSGQVGWLARDRWAVPLVHTAHTLAAVKNAALANGDAPEPPLRTVGEQQVVDEADRLIVNTDDEAKQLISIHRADPARIDVVHPGVDLEVFRPGDRQQARTALGLRPEEKVVAFVGRIQPLKAPDIVLRAVAKLPGVRIIVAGGPSGSGLASPDGLAQLADELGIAERVTFLPPQSRTDLARVFHAVDLVAIPSYSESFGLVAVEAQACGTPVVAAAVGGLPVAVRDGVSGTLVSGHDVDQWAAAIDGLLRSNAGAQGALMSRAAAEHAATFSWENTTDALLASYRRAIGDFTAGRRRKVRDPVAARKPRRWTARRGVGA

SEQ ID NO: 3784 - protein, 198 aa, Helianthus annuus
INLHDYVGDSFSIIFSHPGDFTPVCTTELGAMAAYADKFAQRGVKLLGLSCDDVQSHKEWIKDIEAYNKGKKVTYPIAADPNREIIKQLNMVDPDEKDASGQNLPSRALHIVGPDKKIKLSFLYPASTGRNMDEVVRALDSLIKASQHKIATPVNWKEGEPVVIAPSVSNDEARKMFPKGFQTVDLPSNKDYLRFTSV

SEQ ID NO: 3785 - protein, 381 aa, Mycobacterium tuberculosis CDC1551
MRVVQVANFYGPRSGGLRTAVDRLGAEYCASGHEVFLIVPGARTERHLLRTGVVRITLPAKHIPYTGGYRAVMPGAVRTVLETLRPDALEVSDRLTLRSLGRWGREHGVTTVMISHERLDRFAGQLLPRRAAQKFADFANARTAANYDTVVCTTGFAREEFDRIGATNTVTVPLGVDLKTFHPRRRCARVRQHWATPTQILLVHCGRLSVEKHADRSIDALAALCDAGVDARLVIAGEGPLRARLERKATGLPIDFTGFISDRHAVAGLLASADVALAPGPHETFGLAALESLACGTPAVVSRTSALTEIITADSGACADNRPEAIAHAVRTIVSRPERHRRRCARRRAEIFTWQRAAASMLATLGAMAVSTRCGDTQDTA

SEQ ID NO: 3786 - protein, 154 aa, Quercus suber
MALSLFGGRRSNVFDPFSLDIWDPFEGFSAVASVPPSARETTAFATARIDWKETPEAHIFKADLPGLKKEEVKVEVEDGNVLQISGERSKEHEEKNDKWHRVERSCGKFMRRFRLPENAKVDQVKANMENGVLTVMVPKEEQKKPAVKAIEISG

SEQ ID NO: 3787 - protein, 765 aa, Shigella flexneri 2a str. 2457T
MEAREATATGESCMRVDAIAKVTGRARYTDDYVMAGMCYAKYVRSPIAHGYAVSINDEQARSLPGVLAIFTWEDVPDIPFATAGHAWTLDENKRDTADRALLTRHVRHHGDAVAIVVARDELTAEKAAQLVSIEWQELPVITTPEAALTEDAAPIHNGGNLLKQSTMSTGNVQQTIDAADYQVQGHYQTPVIQHCHMESVTSLAWMEDDSRITIVSSTQIPHIVRRVVGQALDIPWSCVRVIKPFVGGGFGNKQDVLEEPMAAFLTSKLGGIPVKVSLSREECFLATRTRHAFTIDGQMGVNRDGTLKGYSLDVLSNTGAYASHGHSIASAGGNKVAYLYPRCAYAYSSKTCYTNLPSAGAMRGYGAPQVVFAVESMLDDAATALGIDPVEIRLRNAAREGDANPLTGKRICSAGLPECLEKGRKIFEWEKRRAECQNQQGNLRRGVGVACFSYTSNTWPVGVEIAGARLLMNQDGTINVQSGATEIGQGADTVFSQMVAETVGVPVSDVRVISTQDTDVTPFDPGAFASRQSYVAAPALRSAALLLKEKIIAHAAVMLHQSAMNLTLIKGHIVLVERPEEPLMSLKDLAMDAFYHPERGGQLSAESSIKTTTNPPAFGCTFVDLTVDIALCKVTINRILNVHDSGHILNPLLAEGQVHGGMGMGIGWALFEEMIIDAKSGVVRNPNLLDYKMPTMPDLPQLESAFVEINEPQSAYGHKSLGEPPIIPVAAAIRNAVKMATGVAINTLPLTPKRLYEEFHLAGLI

SEQ ID NO: 3788 - protein, 308 aa, Geobacillus kaustophilus HTA426
MARTVNSITELIGDTPAVKLNRIVDEDSADVYLKLEFMNPGSSVKDRIALAMIEAAEKAGKLKPGDTIVEPTSGNTGIGLAMVAAAKGYKAVLVMPDTMSLERRNLLRAYGAELVLTPGAQGMRGAIAKAEELVREHGYFMPQQFKNEANPEIHRLTTGKEIVEQMGDQLDAFVAGVGTGGTITGAGKVLREAYPNIKIYAVEPADSPVLSGGKPGPHKIQGIGAGFVPDILDTSIYDGVITVTTEEAFAAARRAAREEGILGGISSGAAIHAALKVAKELGKGKKVLAIIPSNGERYLSTPLYQFED

SEQ ID NO: 3789 - protein, 325 aa, Arabidopsis thaliana
MIQQSTDREYSKSEKMVSSMISIKAALITAGIVAVSLFLKSSVPIAVDFSVSRFPIFWSSFLSWLKPPYLFVAINVIITIIMASSKFYQSVGEQDGEDDEILLGGEYTIPNVITQAPPRRLVDLDADFDFVATVQSPILVAEVEILEVVFEEKEMAISGQTNGGDEFAVMRSELNQPIMEESENLPPAEKPLVSARSGHRKPIKASSKGVNRKKKALKVVKPNRHETLENTWNMITEEGKSTPLTCHYRKTSMSGLNAGGDVKPVLRKAETFRDVTNYRQSSPTVTSPVKMKKEMSPSREELNRRVEAFIKKCKEERLESLKLEK

SEQ ID NO: 3790 - protein, 292 aa, Shigella flexneri 2a str. 2457T
MFDFASYHRAATLADAINLLADNPQAKLLAGGTDVLIQLHHHNDRYRHIVDIHNLAELRGITLAEDGSLRIGSATTFTQLIEDPITQRHLPALCAAATFIAGPQIRNVATYGGNICNGATSADSATPTLIYDAKLEIHSPRGVRFVPINGFHTGPGKVSLEHDEILVAFHFPPQPKEHAGSAHFKYAMRDAMDISTIGCAAHCRLDNGNFSELRLAFGVAAPTPIRCQHAEQTAQNAPLNLQTLEAISESVLQDVAPRSSWRASKEFRLHLIQTMTKKVISEAVAAAGGKLQ

SEQ ID NO: 3791 - protein, 769 aa, Desulfovibrio desulfuricans subsp. desulfuricans str. G20
MNWPAGGWAMARLSWWRALFYLNLVILFLVIFYKIYLNFFEQDYGAVHAEQVERIESILHGEDTFSFAVVGNINNSVGIFERKIIPELNRSDVAFVVSAGNAVSGAGEDKYRALHRTLGHLEKPYLLTFGDNEHGAFGGFRYYDHYGPYVFAFSAGNSRFIFLDSSGKTSFKWQARWLEEELDVAPNQNVFLFVGHPLLPVDKTGAFDFGDDDLADEEFRSLLMPMFRDSRIKAVFSSNLPLFSAQEYNGTPFVVTGGAGGFVLNNERSFYHYVKVQVSRSQVDIEPVRLNVGQHKVFRTVESIWFFIHSLFYVGYLNYLLIVCFLMVSAYWLYSLLLRERDYYPDFNHPSEPTLDREIKVAMFTNNYLPFIGGVPISIHRLSTALKELGHNVLILAPQYEQSAEPPEERDVFRLPCLFRQTAAKGIVVPNIFSLAAIRKVREFAPDVIHIHHPFWMGTAGLWMARRLKIPAVYTYHTRLEHYSYAVPLPKALFRNFLSHALVRRLGNRCNAIVVPTEASEHYLRMIGVKTPVFVVPTGIETDKFAELSELEGARLRTELGIANDELVLLSVSRLSTEKNISFMLEAVSLLTKHCSRKFKLVLIGEGPERERLYQMVETLGLQDTVLFPGAVPPETMPAYYSLGDIFVFASTSETQGMVILEAMASAMPVVAIRASGIDDFVIEGMTGFKTMQNISAWTEKVQLLLENDTLRHELSGHAASMASRFGIDEFGKKMIRVYAHVLFTRKEMFHEMPGMQRHQSGHDGKTVH

SEQ ID NO: 3792 - protein, 418 aa, Corynebacterium glutamicum ATCC 13032
MRVAMISMHTSPLQQPGTGDSGGMNVYILSTATELAKQGIEVDIYTRATRPSQGEIVRVAENLRVINIAAGPYEGLSKEELPTQLAAFTGGMLSFTRREKVTYDLIHSHYWLSGQVGWLLRDLWRIPLIHTAHTLAAVKNSYRDDSDTPESEARRICEQQLVDNADVLAVNTQEEMQDLMHHYDADPDRISVVSPGADVELYSPGNDRATERSRRELGIPLHTKVVAFVGRLQPFKGPQVLIKAVAALFDRDPDRNLRVIICGGPSGPNATPDTYRHMAEELGVEKRIRFLDPRPPSELVAVYRAADIVAVPSFNESFGLVAMEAQASGTPVIAARVGGLPIAVAEGETGLLVDGHSPHAWADALATLLDDDETRIRMGEDAVEHARTFSWAATAAQLSSLYNDAIANENVDGETHHG

SEQ ID NO: 3793 - protein, 469 aa, Mycobacterium abscessus
MRIAQHVSDLIGNTPLVRLNSVVPEGCATVAAKIEYLNPGGSSKDRIAVKMIEAAEEAGLLKPGGTIVEPTSGNTGVGLALVAQRKGYHCVFVCPDKVSEDKRNVLRAYGAEVVVCPTAVPPEHPDSYYNVSDRLVREIEGAWKPDQYSNPNGPASHYETTGPEIWADTDGKITHFVAGVGTGGTITGAGRYLKEVSGGRAIGEVKIVGADPEGSVYSGGTGRPYLVEGVGEDFWPSAYDPSVVDEVIAVSDADSFEMTRRLAREEGLLVGGSCGMAVVAAIRLAEKVGPDGLVVVLLPDGGRGYLSKVFNDAWMSSYGFLRSRLDGSVSEPTVGDVLRGKSGALPDLVHTHPSETVRDAIEILREYGVSQMPVVGAEPPVMAGEVAGSVSERELLSAVFEGRAQLADAVAQHMSPPLPLVGSGEPLSTAGSMLRDTDAVMVVDEGKPVGVITRHDLLGFVSSGRGVRH

SEQ ID NO: 3794 - protein, 198 aa, Helianthus annuus
INLHDYVGDSFHIIFSHPGDFTPVCTTELGAMAAYADKFAQRGVKLLGLSCDDVQSHKEWIKDIEAYNKGKKVTYPIAADPNREIIKQLNMVDPDEKDASGQNLPSRALHIVGPDKKIKLSFLYPASTGRNMDEVVRALDSLIKASQHKIATPVNWKEGEPVVIAPSVSNDEARKMFPKGFQTVDLPSNKDYLRFTSV

SEQ ID NO: 3795 - protein, 884 aa, Ostreococcus tauri
  misc_feature (86)..(93): Xaa can be any naturally occurring amino acid
MSQWSRRRERSRRWRWWRRRTRRRRRRTLRRRRSQSLERPTQSARSTLGLKRPIPLVRDDSPQDNPSYPPGDIVNRKFECSVCMYXXXXXXXXTSATKSTRDPAVRIPVTRLRCGSNHIRMFHRDKRGNFMIAVRIVRKRDLEDVAATVTEAVSEDKALKNALKWLGFTKKDDEIIMEDVALVSLRCPISGLMCTDPARLSACSGLHAFDAKSFIQLNSVSRKWSCPECGKKGGPTELRVDSFLKRCTNIIRERGLTKVSRMEINKDGQWRPREEPGAPALSASALRWYSPKISRGSIDEHVHQGRCRLQCEHAERRIERGDAGENGSGGQQWRGLRTRRGGGQSSAKKRSEPDVIIISDSENDTAGQCANGSSSAHKRPKPSSAHKRPKPSSSLARNVANAQSNGRPYDWILDAMNRSLVPGHVVLVLFATDYIGLPIRALVDYIGFSGYSFDIAHTNPSTSFVSVTWLANLEFAPMSTATSSSLSSSIASSAGIFSRNASGISTCASGPRAMLIVGAELLSSAFRASACARVSPTRPSIACLAPSRTTVTEILRARRRQSVASSIASILHEHRPRRLSPSPRRRRARAIEASRHARRVAASRGVREGAAKHRARASARARAHGSIGVGVKGDSPRIQKAPVTGEIDVATVVVKGAASRDAARPSMDRDVARDDASSPAQDANEMFEVCEAPTPSFDVRTDRPRGTGALARRADVHARGEWHRSAHVWIVDAKTRAVVLQKRSMGKDTFPGMWDISAAGHVSARDDGDSLRAAACELEEELGVRLSDARRDLTFQFCIPAAQAALGGCNCYEDVYFLRWDRDSAGDDFALGHAEVTATRWESIDDLRAALNGASDEHVPRTKQYLDVFFPALDAFVNHDRSSS

SEQ ID NO: 3796 - protein, 292 aa, Escherichia coli O157:H7 EDL933
  misc_feature (80)..(80): Xaa can be any naturally occurring amino acid
MFDFASYHRAATLADAINLLADNPQAKLLAGGTDVLIQLHHHNDRYRHIVDIHNLAELRGITLAEDGSLRIGSATTFTQXIEDSITQRHLPALCAAASSIAGPQIRNVATYGGNICNGATSADSATPTLIYDAKLEIHSPRGVRFVPINGFHTGPGKVSLEHDEILVAFHFPPQPKEHVGSAHFKYAMRDAMDISTIGCAAHCRLDNGNFSELRLAFGVAAPTPIRCQHAEQTAQNAPLNLQTLEAISESVLQDVAPRSSWRASKEFRLHLIQTMTKKVISEAVAAAGGKLQ

SEQ ID NO: 3797 - protein, 187 aa, Amphibacillus xylanus
SLIGTEVQPFRAQAFQSGKDFFEVTEADLKGKWSIVVFYPADFSFVCPTELEDVQKEYAELKKLGVEVYSVSTDTHFVHKAWHENSPAVGSIEYIMIGDPSQTISRQFDVLNEETGLADRGTFIIDPDGVIQAIEINADGIGRDASTLINKVKAAQYVRENPGEVCPAKWEEGGETLKPSLDIVGKI

SEQ ID NO: 3798 - protein, 280 aa, Magnetospirillum magnetotacticum MS-1
HVHIATEGPIGHAVRAACLSLGHAFTTSYHTRFPEYLAARAPVPEAWSYAWLRRFHAAASGTMVSTPSLERELTGRGFTRLMRWTRGVDTELFRPRDGDALPGLPRPIFLSVGRLAVEKNLAAFLSLDLPGSKVVVGDGPDRARLQALAPEAHFLGALTGEALAKVYASADAFVFPSLTDTFGIVLLEALASGVPVAAFPVTGPLDVIGGTRAGALDSDLRAAALAALAIQRDRCRAEALRYTWAESARQFYDNIAQAHALGPMHRTARRPSGAALPRPG

SEQ ID NO: 3799 - protein, 409 aa, Synechocystis sp. PCC 6803
MKFCCEGRSPGAALDSAFYFVDVDLIYPHLAMRVALFTETFLPKIDGIVTRLKHTVENLQRQGHQVLVFCPEGGLKEYKGAKIHGVKGMPLPLYPELKLAFPSPQIKQALLKFQPDLIHVVNPAVLGLGGIYYAKNLHIPLVASYHTHLPQYLQHYGLGALEGVLWELLKLAHNQAELNLCTSSAMVQELVNHGIERVDLWQRGVDTELFQPHLKSAQMRQKLSQGHPDDPLFLYVGRVSAEKQIDEIKPVLEAIPQARLAIVGDGPNRKNLEAHFAGTNTYFAGYMQGLELAAAFASADAFIFPSRTETLGLVLLEAMAAGCPVVAAASGGILDIVTDGENGYLFDPAVAGGVVQATQRLMSAPGDRELLRQNARQEAERWGWPAATRQLVDYYQLVAYGENDAPLAA

SEQ ID NO: 3800 - protein, 263 aa, Brassica napus
  misc_feature (82)..(82): Xaa can be any naturally occurring amino acid
MASVASSTTLISSTRILLPATKSPLLPSPSLSSPSPSASLRLAHPSPLTSIRSTSRRSFAVKAQTDDLPLVGNKAPDFEAEXAVFDQEFIKVKLSEYIGKKYVILFFYPLDFTFVCPTEITAFSDRYAEFEKLNTEVLGVSVDSVFSHLAWIQTDRKSGGLGDLNYPLISDVTKSISKSFGVLIHDQGIALRGLFIIDKEGVIQHSTINNLGIGRSVDETMRTLQALQYIQENPDEVCPAGWKPGEKSMKPDPKLSKEYFSAI

SEQ ID NO: 3801 - protein, 219 aa, Picea sitchensis
MALTSVSVAKPSFSVNAISNAYCKPGTMDSPPVKIVSVGDSQLFGTKISTSTTLSMPARTLQTRKMIAVAKVSKGSVPPSFNLKNQDGRMVNLSKFKGKPVVLYFYPADETPGCTKEACAFRDSYEKFKRAGAEVIGISGDSPESHKAFAKKYRLPFTLLSDEGNKLRKEWGVPGDFFGSLPGRETYVIDKKGVVQLVYNNQFQPEKHVDETLKMLQSL

SEQ ID NO: 3802 - protein, 536 aa, Dictyoglomus thermophilum H-6-12
MKKALASGGVIINKRSKEIFLLKKKNGNWVLPKGHVEEGENPEETAIREVKEETGLNVKIIDYIGKTHYFAPATEKHPEEEKTVIWFLMETEEEHIKVEEDTFLEGRFFNFREAYNFLTFDQEREILRRAYDLYLIRNKEKKLHILMLTWEYPPRIVGGLSRHVYDLSKHLAKQNIKVSVITCEAPDTPFEEHFDNLSIYRVPEKLIDSYNFISWIYLLNISMIVKAMEVNKKEPIDIIHSHDWLTTFSAYTLKHTLKKPLISTIHATEYGRNQGIYTDEQRFIHNVEWWLTYESWKVIVCSLNMKEEVKHLFSLPEDKIIVLPNGIDTENLRTTIDVEELRKIYAPNGEKIILFIGRMHPQKGAEYLLRSIPIVLQKFQNVKFIFVGTGPQLNSLIEESKYLGINERVIFTGFIDDNLRNALLNIADICVFPSIYEPFGIVALEAMALGKPVIASNLGGFAEIIEDGKDGILFEPRNVQNLAEKIIWALTNEDHIQIIKNNAIKKVKEKYLWEKIAEETKNLYFKVYTEYLKTDW

SEQ ID NO: 3803 - protein, 427 aa, Listeria innocua Clip11262
MNIGIFTDTYSPQISGVATSIMIMENELRKQGHTVYIFTTTDPNADRESEEGRVFRLPSIPFVFFPERRVAIAGMNKFIKLVGRLNLDIIHTHTEFSLGLLGKRIAKKYNIPSIHTYHTMYVDYLHYIAKGKILTPSMVGKMTKSFCDSYDAIITPTAKVRHHLEEQGIHKLMYTVPTGTDISSFAPVEKQRILDLKQSLGIEENDSVILSLGRIAHEKNIDAIINAMPEVLETKPNAKLVIVGDGPVRKDLEKLVETKQLENHVIFTGAVDWENISLYYQLGDLFVSASTTETQGLTYAEAMAASLPVVAKRDESIEGFLADKETAFLFDKDEELASLLIKIFSDKEMATLVATNGRVKVESISAEQFGINVESTYNEVREIYRVKRQNGTIKVKPTLIKSKIASQVFSLSSSTHVQRKERSSRRD

SEQ ID NO: 3804 - protein, 300 aa, Clostridium perfringens SM101
MVFNSLLSLIGNTPILKANNLFEGNNVFVKLEKFNPGGSIKDRAALGMIEEAEKNGLLKENGVIVEPTSGNTGIAIAMIGKIKGYKVIITMPETMSKERRDMIKAYGAEIILTEGSKGMKGAIEEAERLASTNGYFMPQQFLNEANAKKHYETTAEEIIRDIPDLDVFIAGVGTGGTITGVGRKLKEYNPNIKIVAVEPSDSAVLSGENSGPHKIQGIGAGFVPKIYDSSVVDEIIKVKNEDAYTMAKNFADKEGILVGISSGAALKGAKYILKNIEKDKKVLVIAPDGGEKYFSTGLYE

SEQ ID NO: 3805 - protein, 200 aa, Bradyrhizobium japonicum USDA 110
MEPSDWPTVGREWRAETGALAPAGLTSQLGLHRRENDMADVANQVANRIPTNLVVNGVRRTLDLVPWTTLLDALRDHLALTGTKKGCDHGQCGACTVLVDGRRVNSCLTLAVMTDGAEITTIEGLARDGALHPLQQAFIDHDAFQCGYCTPGQICSAAGLLAEGRAGDPDEIRELMSGNLCRCGAYPNIVAAIQQAVGRP

SEQ ID NO: 3806 - protein, 142 aa, Arachis hypogaea
GNRRSDPFSLEVWDPFRDFQFPSALSSENSAFVNARVDWRETPEAHVLKADLPGLKKEEVKVEIEDNSVLQISGERNVEKEDKNDTWHRVERSSGKFMRRFRLPENAKMDEVKASMENGVLTVTVPKAEVKKPDVKPIQITG

SEQ ID NO: 3807 - protein, 151 aa, Pseudomonas putida GB-1
MELRINQKTYQVEADADTPLLWVIRDDLGLTGTKYGCGLAQCGACSVLVDGNVVRACVTPVAGVVGREVTTIEAIEADAVGKRVVAAWVEHQVAQCGYCQSGQVMAATALLKHTPKPSDAQIDAAMVNLCRCGTYNAIHAAVHDLAQGEQA

SEQ ID NO: 3808 - protein, 181 aa, Bacillus clausii KSM-K16
MTEKRMVGKQAPRFEMDAVLPNKEFGKVSLEENMKNDKWTVLFFYPMDFTFVCPTEITALSDRYDEFEDLDAEVIGVSTDTIHTHKAWINTSRDDNGLGDLAYPLAADTNHAISREYGVLIEDEGVALRGLFIISPEGELMYSVVNHNNIGRDVDETLRVLQALQTGGLCPANWKPGQATL

SEQ ID NO: 3809 - protein, 444 aa, Azospirillum brasilense
MKRMPVVRPPVPHSRSPLPLRMRVLTVSLADQEGGAERIAFRLTAGYRFAGHEATLAVGFKRLDHDWVRPLSRDRNRPSRNPAAPPPAGPDDRKWALRAGMEDFFYPGSWDLLDLADDPPDLVHLHNLHNAYFDLRVLPWLSTRVPVVMTLHDCWLLTGHCAHPMECERWRTGCGMCPDLSIYPPLPRDNTANNWDRKRDLLGASRFFLAAPCDWLRERALGSLPPSSVRAAVTLPNGVDIEAFQPGDRRAARDRFGVPQDAVVALLVSNGGLANLWRDVRTLEEAVRAAAARLAPRRILLLVAGGLEERTRWGSVEVWSFPFLTDGSGLADIYRAADVFVHFARADTFPTVVLEAMACGLPVVATAVGGIPEQIADGETGLLVTPGAVGEAAEALTALLEDEAMRTRLAAAARRRAVAHFDERVMIERYLAWYAKILAGNGEC

SEQ ID NO: 3810 - protein, 333 aa, Nicotiana tabacum
  misc_feature (312)..(312): Xaa can be any naturally occurring amino acid
MVVLSIPAVEQFSIVKNCKPISSFFPSNIPIIDISKPDSKNLLVKAYEEFGFFKIINHGVPMEFINNLELEAIKFFSSPLNQKEKAGPADPFGYGNRKIGTNGDIGWVEYILLSTNSEFNYQKFASILGLDPENIRVAVNDYVSAMKKMACEILEMLAEGLKIYPKNVFSKLLMDEQSDSVFRINHYPPCPEVQEFNGRNLIGFGAHTDPQIISLLRSNNTSGLQISLEDGHWISVPPDQNSFFINVGDSLQVMTNGRFKSVKHRVLANSLKSRLSMIYFGGPPLSEKIAPLASLIKGDQDSLYKEFTWFEXKKSAYNSRLADNRLVLFEKVL

SEQ ID NO: 3811 - protein, 397 aa, Trichodesmium erythraeum IMS101
MKILLVCTEKLPVPCIRGGAIQTYIDGILPYLKREHEITVFSVADPELPDRETRENIRYERAGRESSEEYYQAVANFVANRQFDWIVIYNRPKYLPIVAKAAPSSRFLLSMHNEMFHDKKIEPEVATVCLERVEKVVTVSKFIANGICELFPEYKHKLQPVYAGVDLKRFQPKWTKLGEEKRKEILAAHGLEGKQVILCVGRLTNKKGPHLLIPAITKVIKKHPSAVLLLVGSKWYGNNNENDYVREIKTEAEKLGAAVQMTGFISPSEIADYFLLGDIFICASQWEEPLARVHYEAMATGLCTITTARGGNPEVIVPGKNGIVITDYENPDAFATQIDYLLSRPEESEEMGRTGRELAELHYSWSRVAWDILSIINDSKSTSLEKMGLIEQAQEAG

SEQ ID NO: 3812 - protein, 343 aa, Nicotiana tabacum
MVVLTQPLVETLSHIKTCKYNNTDVFTGIPVIDLSDPEANTLIIKACQEFGFFKVVNHGVPIEIMTKLESEAVNFFNLSQVEKDKAGPANPFGYGNKRIGSNGDVGWVEYLLLTTNPDLSYHKSIAIPGNSHLFWSLVNEYVSAVRNLACLALEKIAEGLRIEPKNVLSKMLRDEKSDSCFRLNHYPPFPELLQTLSGRNLIGFGEHTDPQVISVVRSNNTSGLQISLKDGTWLSVPPDPYSFFINVDDSLQVMSNGRFRSVRHRVLADSMKSRVSMIYFGGPPLSEKIAPLSCLMEEGEESLYNEFTWCEYKKSAYKTRLGDNRLALFEKKPQTKPATSAAQ

SEQ ID NO: 3813 - protein, 335 aa, Hyphomonas neptunium ATCC 15444
MTIHRSVIDLIGNTPLLRLNRVSDETGCEILGKCEFLNPGQSVKDRPALGIIREAEESGALKPGGTIVEGTAGNTGIGLALVGKALGYRVVIVMPRTQSQEKKDAIRLLGAELIEVDAVPYANPNNYVRYSGRLAEELAASEPNGAIWANQFDNQANRRAHYNTTAKEIWEQTSGKVDGFICAVGSGGTLGGVALGLKERNPKITIGLADPGGAALYSYYTTGELKAEGTSITEGIGQGRITANLEGIPVDKAWRINDDEALGYIFGLVEDEGLCLGGSSGVNVAGAVHLARELGPGHTIVTILCDYGNRYQTKLFNPEFLRSKGLPVPSWMEAK

SEQ ID NO: 3814 - protein, 159 aa, Myxococcus xanthus DK 1622
MAAHQFILNGQTVLVEAPEDLSLLWVLRDVLGVTGPKYGCGVGVCGACTSHLDGEAFRPCIHPVGGLSGREVVTIEGLGAQGLHPVQQAWMEEDVAQCGFCQPGQIMAAVALLKKNAQPSDADIDAAMSDNVCRCGTYVRIRAAIKRAALLLRSGAGGG

SEQ ID NO: 3815 - protein, 171 aa, Helianthus annuus
DSFTIIFSHPGDFTPVCTTELGAMAAYADKFAQRGVKLLGLSCDDVQSHKEWIKDIEAYNKGKKVTYPIAADPNREIIKQLNMVDPDEKDASGQNLPSRALHIVGPDKKIKLSFLYPASTGRNMDEVVRALDSLIKASQHKIATPVNWKEGEPVVIAPSVSNDEARKMFPK

SEQ ID NO: 3816 - protein, 329 aa, Oryza sativa Japonica Group
MAACCSSLATAVSSSSAKPLAGIPPAAPHSLSLPRAPAARPLRLSASSSRSARASSFVARAGGVDDAPLVGNKAPDFDAEAVFDQEFINVKLSDYIGKKYVILFFYPLDFTFVCPTEITAFSDRYDEFEKLNTEILGVSIDSVWSRAFTSYFIALYSYDMSIPLIQKTFHFCSIFITIQLWGHIYHKRHLLNLMLIHYSKYYGQSDTLKTTFSHLAWVQTDRKSGGLGDLKYPLISDVTKSISKSFGVLIPDQGIALRGLFIIDKEGVIQHSTINNLAIGRSVDETMRTLQALQYVQDNPDEVCPAGWKPGDKSMKPDPKGSKEYFAAI

SEQ ID NO: 3817 - protein, 637 aa, Mycobacterium marinum M
MSRTQAALASFGAALLPEERGGPTSTEFAERVDRYLSQLPTTSRLAVRAGLVSLAAASYLTTGRSLARLEPAQREQVLRRVAAINPDTSAALEGLKAVALLANGADTYAPDLLARAQAHDAARSDAALDITASPDSPSVVTADVVIVGSGAGGAMTARTLARAGLRTVVLEEGRRWTVREFRTTHPIDRYAGLYRGGGATIALGRPAVILPMGRAVGGTTVVNSGTCFRPPLAVQQRWRDEFGLDLADPDRLAGRLDDVEHTLQVAPAPRDIMGRNGNLLLDAAASLGWQAAPIPRNAPGCAGCCQCAIGCPSNAKFGVHLNALPQACAAGARIISDARVQRVLHQGGRARGVRARRPDGTAIDVLADIVIIAAGATETPTLLRRSGLGSHPRLGRNLALHPATMLAGRFDDDVYAWRGVLQSAAVHEFHESDGVLIEATATPPGMGSMVFPGYGTELLDWLDRAPQVATFGAMVADRGAGSVRSVRGETVVHYQVAPDDIAKLRVAVQAIGRLLFAAGAVEVLTGLPGAPTVTSPAALQDALQRSDPRNLHLAAFHPTGTAAAGADSQICPVDATGRLRGVDGVWVADASILPSCPEVNPQISIMALALAVADEVVADRSGSIYISPPACSPGPAP

SEQ ID NO: 3818 - protein, 1054 aa, Bacillus halodurans C-125
MSRSIGKSIYRKEAMAKVTGAAKYTADWATSEMLHIKLVTSPYAHALIKDIDLTEAYQVPGVRRIVIGQPFPLTGEELQDRPPIAYHKVRYHGEPVAAVVADDPVQAKKAAEQVKVTYEPLPVVNSVTDALHPNAVLVHDHVETYERIEHVYPEANSNIADHTKIRKGNIEEGWAQSDVTVNAHFSFSPSDHIAMETRCVTAEICPDGKVVFTSSTQSPYIIKKLMKKYFEIDEGSVIVHTPLVGGGYGGKVAVQLELIAYMATLAVGGRKVKLLNTREEDMITSPVHIGLEADIKLGASKDGFLKAAEILYKFDTGAYSDKGATISRAAAVTCTGPYHIENIWCDSLCVYTNHPYATAYRGFSHSELLFVFERAMDQLARRLEMDPLELRLKNAILPGHTTPTQMRLNQSTVGDLPQCINKLKTLMNWTEGQVIPINDRKIRVKGVSCLWKTSTIDSQASSGVVLIFNADGSINVLSGLVEIGTGTKTILAQLLAEKLSMDVDKIHVKMEVDTQSMPEHWKTVASRGTLMAGRALLHAADDLIRQLKDLASRVLICSPEDLEVGNERVYVRDEPDTFIKVSDICHGYKYTSGYAIGAPIVGRGHYTLRHITHLEHDTGVGKPGPEYAVGAQGVEVEFDLRDYTYKILKAYAVIDIGRVLNEKAAKGQVMGAMSMGLNFGSSETFVFNEDGQVLNPRLRTYTPFRYGDHPEYIVDFVETPHIDGPYGGRGIGEHGLIGMPAALANSLSLAAGVDLNQLPLTPELIWQEKKAVLLMISFEFEYYKPASIIEATTLFQSLDQAGKDPMYVSGATELITLGRVNQLKSGAIIDLKGISECFELKMDGTNIILGAAQSLTKIRDAGLFPFLNKAIVEIADHTARNKITLGGNLCANIIYRETALPLLLTNSQVVIASRTGLKTQPFIEMFQGRLTLEKGEFLVQVIVPQSELDVPFVSVKKRRQWDVGYPLLTTAAVKRNGQIHVAFSGLCAFPFRDQTMEQWLNDHQLSTEQRIEKAIEQVPAPIVNDVHGSSEYRTFVLKNTLTDVLNELEGEGHV

SEQ ID NO: 3819 - protein, 187 aa, Nitrosomonas europaea ATCC 19718
MSLINTTVKPFKATAYHNGDFVEITDKTLKGKWSVIVFYPADFTFVCPTELEDLADNYDEFQKIGVEVYGVSTDTHFTHKAWHDTSSVVRKVRYPLVGDPTRELSRNFDVLIEDAGLALRGSFIINPEGEIKAFEVQDNNIGRNAAELLRKVKAAQYVSMHEGEVCPAKWTEGAATLKPSIDLVGKI

SEQ ID NO: 3820 - protein, 157 aa, Bacillus halodurans C-125
MYKTEITLDVNNEQRTVYVRNADLLLDVLREPLGLTGAKPGCLNGDCGTCTIEVDGETMKACLMLAVEAVGKKITTIEGLKGTLVQGAFIEKFAFQCGYCTPGFIINCHTLLQKYPSADDTVIKDWLESNICRCTGYQEIEEAVKAVQDQLKNGSRE

SEQ ID NO: 3821 - protein, 198 aa, Helianthus annuus
INLHDYVGDSFTIIFSHPGDFTPVCTTELGAMAAYADKFAQRGVKLLGLSCDDVQSHKEWIKDIEAYNKGKKVTYPIAADPNREIIKQLNMVDPDEEDASGQNLPSRALHIVGPDKKIKLSFLYPASTGRNMDEVVRALDSLIKASQHKIATPVNWKEGEPVVIAPSVSNDEARKMFPKGFQTVDLPSNKDYLRFTSV

SEQ ID NO: 3822 - protein, 196 aa, Chlamydomonas reinhardtii
MQTIRAPARAPVASSRRVATFRAAPRVSRTPVVVVRAELKVGEKLEDYPNYYKVLKTSEGKTISLSSYKGKQPIVLFFYPKAATPGCTKEACRFRDEYSRFTAAGAVVFGISSDSPADNAAFGKANNLPYPLVTDENSILRKTFGIKGDFLGLLPGRQTYVIDVNGKCVMAFNDQLNVEQHVDEALKVLASVKVAA

SEQ ID NO: 3823 - protein, 271 aa, Arabidopsis thaliana
MASIASSSSTTLLSSSRVLLPSKSSLLSPTVSVPRTLHSSSASSSSLCSGFSSLGSLTTSRSASRRNFAVKAQADDLPLVGNKAPDFEAEAVFDQEFIKVKLSEYIGKKYVILFFYPLDFTFVCPTEITAFSDRYEEFEKLNTEVLGVSVDSVFSHLAWVQTDRKSGGLGDLNYPLVSDITKSISKSFGVLIPDQGIALRGLFIIDKEGVIQHSTINNLGIGRSVDETMRTLQALQYVQENPDEVCPAGWKPGEKSMKPDPKLSKEYFSAI

SEQ ID NO: 3824 - protein, 444 aa, Physcomitrella patens subsp. patens
MPITLDQDADRVTALPGQPLVGFNLYAGNVTVDRSEGRDLFYVFAQCSNDTYGTKPLVLWFNGGPGCSSIASGFARENGPFQILPGGSSLIINEFSWNAEVNMIWLESPTGVGFSYARLNTTANTGGGDTRTAEDAYNFLVGWLGRFPQYHGREFYITGESYAGHYVPQLAKLIVEHNSASPLKINLSGYMIGNPDIDNYWDQTGDIDFHYSHAMISTETYNGLKANCNFSDENCCSTRCEEFFATMNFEIGNIDYYSIYTDRCIRSNAKPMQSRSWTRKTPTDRGMRARYDPCSEDNAEVYFNRPDVQLALHANTTGVIPYRWTMCSNVLYANWTDAPQSMISTYHYLIAAGLKIWIYSGDVDSVVPVTSTRYSIEAMKLPVSKPWHPWYDYQQVGGRTVVYDGLTFVTVRGAGHQVPLLEAGRLLQVFRAFVSGKPLPGAPF

SEQ ID NO: 3825 - protein, 335 aa, Paulinella chromatophora
MPLYDDLAASGGKTPLVRLHRLPMANKCVAYLFGKQEYMNPTSSVKDRIAKAMLQTAEFEGSIYPNHTTLVEPTSGNTGIGLAMIAAFHNYELILTMPDSMTIERRGIIRAYGAKLQLTPGIDGMIGAINLAEEIVEVLPNSYSLQQFTNPTNPDVHAATTAEEIWADTNGQIDCFICAIGTGGTITGCGRVLKARNPDIKIIGVEPATSPFVSKGIRGVHGLQGIGAGFMPDVLDQSIMDEIITITDQEAMGIGRLLSFKEGLFIGISSGATVAAALQVGSRLEMKGKNLVVILASSGERYLSSPMFNGSDEYYGNFPMFSNSQDCSSSGAELF

SEQ ID NO: 3826 - protein, 325 aa, Bradyrhizobium japonicum USDA 110
MDASSATRAAHQPGRGRIYDSIVEAFGDTPIVRLRRLPGMHGVNATILAKLEYFNPAASVKDRIGAAMIIAMEKAGIVKPDTVLIEPTSGNTGIALAFVAASRGYRLKLVMPESMSIERRKMLAFLGAELVLTPAAQGMKGAIAAAEELVKTTPNSVMPQQFKNLANPEVHRRTTAEEIWNDTDGNIDFFVAGVGTGGTITGVGQVLKPRKASLRVVAVEPEESPVLSGGQHTPHKIQGIGAGFVPDILDRSVIDEIVKINSTTAIETSRALARHEGIPGGISSGAAIAAALQIGQRPEAAGKTILAVVPSFSERYLSTALFEGI

SEQ ID NO: 3827 - protein, 221 aa, Brassica napus
  misc_feature (94)..(94): Xaa can be any naturally occurring amino acid
MPGITLGDTVPNLEVETTHKNFKLHDYFADSWTVLFSHPGDFTPVCTTELGAMGKYAHEFEQRGVQLLGLSCDDIQSHKDWIPDIEAFTDLISXPGSKVTYPIIADPNKEIIPQLNMIDPIENGPSRALHIVGPDCKIKLSFLYPSTTGRNMDEVLRALDSLLMAAKHKNKIATPVNWKPDEPVVISPAVSDEEAKKLFPQGFKTAELPSKKGYLRVADVS

SEQ ID NO: 3828 - protein, 188 aa, Fusobacterium nucleatum subsp. vincentii ATCC 49256
MSLIGRKVPEFKATAFKKGEKDFITVTDKDLLGKWSVFVFYPADFTFVCPTELEDLQDNYEAFKKEGAEVYSVSCDTAFVHKAWADHSERIKKVTYPMVADPTGFLARAFEVMIEEEGLALRGSFVINPEGKIVAYEVHDNGIGREAKELLRKLQGAKFVAEHGEVCPAKWQPGSETLKPSLDLIGEL

SEQ ID NO: 3829 - protein, 787 aa, Burkholderia pseudomallei K96243
MNQQAEPFLSVAADAERDAFRQVHVSRPHESAHLHVSGRATYIDDIPLVAGTLHAALGLSAKPHARIASMRLDAVRAAAGVVAVLTAADIPGTNDCGPIVHDDPVLADGVVQYVGQPMFVVVATSHDAARRAARLAQIEYEERPAILTAQAARAADSYVLPPMRLARGDAAARIAHAAHRDAGELTLGGQEQFYLEGQIAYAVPKEDGAMHVYSSTQHPSEMQHLVAHALGLASHDVLVECRRMGGGFGGKESQSGLFACCAALAAWKLQRPVKLRPDRDDDMMITGKRHDFHYRYDVGYDDAGVIEGVSVDMTSRCGFSADLSGPVMTRAVCHFDNAYWLPDVSIVGRCGKTNTQSNTAFRGFGGPQGAFAIEYIVDSVARALGRDPLDVRRANLYGKTERNVTPYGQTIEDNVLPELIAELEATSAYRARRAATRAFNAASPVLKKGIALTPVKFGIAFNVTHFNQAGALVHIYTDGSILVNHGGTEMGQGLNTKVAQVVAHELGVDFARIRVTATDTSKVANTSATAASTGSDLNGKAAQDAARQLRERLAAFAAEHVGGGAARAADVRFAHDEVRVGEVAVPFEELVAHAYRARVQLWSDGFYATPKLHWDQAALRGRPFFYYAYGAAVSEVVVDTLTGEMRVLRADALHDVGASLNPALDIGQVEGAFIQGMGWLTTEELWWNDGGRLMTHAPSTYKIPTVNDCPPDFRVRLFDNRNAEDSIHRSKAVGEPPLLLPFSVFFAIRDAIAAVGDYAVNPPLAAPATGESILRAVRAVRAARAGA

SEQ ID NO: 3830 - protein, 505 aa, Burkholderia pseudomallei K96243
MSEPIRFYHRRAIREVSGANVTRTVLQYLREDVHCTGTKEGCAEGDCGACTVVVGELNDAGGVEFKAVNACIQFLPTLDGRALFTVEDLRQPDGALHPAQEALVECHGSQCGFCTPGFAMSMWALYERHGHEAQRADRTTPSRAQIADALTGNLCRCTGYRPIVDAAVRMFDARPPKAPVDVAALARALQALRRDDTFHYEHAGQAFDAPRTLDALARLKAEKPAARVLAGSTDVGLWVTKQLRDLGDVLYVGQVPELRRIVEHDDWIEIGAGASVEAAYAALAAHYPELVEMWKRFASLPIRNAGTIGGNVANGSPIGDSMPGLIALGARVVLRGGRAARELPLEDLYVGYQKKDMAEHELVVALKVPKRTGARANLRFRTYKLSKRFDSDISAVCAAFAFEADGEVLRAPRIAFGGMAATPKRAAHAEAALAGAVWDEAAALAAMRALDHDYAPLTDMRATSAYRLETAKNLLYRFWLETRPHDPLPASAVNVREVAAEPAAS

SEQ ID NO: 3831 - protein, 418 aa, Leifsonia xyli subsp. xyli str. CTCB07
MPEPSGPPPQPLTIVMGCDTFSPDVNGAARFAERLAAGLVERGHDVHIVAPAASRRHGTWVEEHVGRKLTAHRLRSWRWYPHDWLRFALPWTSKANARRVLDEVKPDVVHLQSHIVIGRGLAYEAQKRGIRIVATNHVMPENIIEFTRLPTFLHHTFVSLAWKDARKSFDRAESITTPTRRAAEFLEKATGLRGVHAISCGIDAHNYTPDFAPRTANRILFVGRVTGEKQIDVLLKAVKLLPDALDTKLEIVGGGDQFKNLQALAETLGIADRVAFLGYVTDEELRAAYTRATVFAMPSIAELQSIATMEAMASGLPVVAADAMALPHLVHDGENGHLFRPGDAQDLADKLASVLTLPQEELDELKNASLRIVASHDVQTTISTFESLYRGEPVADPVTETASEPAARSDPKAAGTGR

SEQ ID NO: 3832 - protein, 219 aa, Triticum aestivum
  misc_feature (82)..(82): Xaa can be any naturally occurring amino acid
MPGLTIGDTVPNLELDSTHGKIRIHDYVGNGYVILFSHPGDFTPVCTTELAAMANYAKEFEKRGVKLLGISCDDVQSHKEWXTKDIEAYKPGSKVTYPIMADPDRSAIKQLNMVDPDEKDGEGQLPSRTLHIVGPDKVVKLSFLYPSCTGRNMDEVVRAVDSLLTAAKHKVATPANWKPGECVVIAPGVSDDEAKKMFPQGFETADLPSKKGYLRFTKV

SEQ ID NO: 3833 - protein, 144 aa, Cyanothece sp. PCC 8801
MALAVGTVAPNFTTVDDEGKTVSLSDFKGKVVVLYFYPKDDTPGCTKEAQSFRDNYEQYKGKDMVVLGVSMDDQTSHKQFKEKYGLPFQLLVDTDGTLTKAYDVDGGGYSKRVTYIIDEEGKISYVDDKVQTATHAQDILSIVG

SEQ ID NO: 3834 - protein, 214 aa, Vitis vinifera
MASLFLPKHSLPSLLSTQIPKTPSLHSLPLVSKSSHSQFYGLTFSSSPSLPLPSSSSPKKASIFAKVSKGQVPPPFTLKDQDGKTVSLSKFKGKPVVVYFYPADETPGCTKQACAFRDSYEKFKKAGAQVVGISGDDPSSHKAFAKKYRLPFTLLSDDGNKVRKDWGVPADLFGTLPGRQTYVLDKKGVVQLIYNNQFQPEKHIDETLKLLQTL

SEQ ID NO: 3835 - protein, 310 aa, Enterococcus faecalis V583
MTKGYVKSVTELIGQSPVVKLKRMVPEGAADVFVKLEFFNPGGSVKDRIALSMIQQAEADGRLKPGQTIIEPTSGNTGIGLAMVGAALGYPVKIVMPDTMSIERRKLMQAYGADLLLTPGAEGMKGAIAKATALAEEHGYFMPLQFNNPANPMVHEQKTGKEIVDVFGKRGLDAFVSGVGTGGTVTGVGHELKRIFPDIEIVAVEPTESPVLEGGEPGPHKIQGIGAGFVPEVLDTTVYQKVAAVSSEDALETARLMGPKEGILVGISAGAAIKAAIDLAVELGAGKRVLALVPDNGERYLSTALYEFPE

SEQ ID NO: 3836 - protein, 773 aa, Streptomyces coelicolor A3(2)
MSNDAATAEAEGTAEAATPVPDPIPHGLGASLPPADARAKTEGTFPYAADLWAEGLLWAAVLRSPHPRARIVSIDTTHAREMPGVRAVVTHEDVPGSPLHGRGGQADRPVFASEAVRHHGEPLAAVAADHPDTARMAAAAVIVEYELLDPVTDPEQAFEAEPLHPDGNLIRHIPLRHGDPDAAGEIVVEGLYRIGRQDPAPIGAEAGLAVPRPDGGVELYLASTDPHGDRDIAAACYGLSPEQVKIVVTGVPGATADREDQGFQLPLGLLALKTGCPVKLTATREESFLGHTHRHPTLLRYRHHADAEGRIVKVEAQILLDAGAYADTSSDALAAAVAFACGPYVVPNAFIEGWAVRTNNPPSGHVRGEGAMQVCAAYEAQMDKVAKKLGLDPAEVRLRNVLATGDVLPTGQTVTCPAPVAELLQAVRDFPLPALPKDTPEDEWLLPGGPEGAGEPGAVRRGVGYGIGMVHMLGAEGADEVSTATVKVQGGVATVLCAAVETGQGFTTLARQIVQDTLGVDEVQVAPVDTDQPPAGPGCRGRHTWVSGGAVERAAKMVRTQLLQPLAHQFGMSTELLQIADGKITSYDGVLSTTVTEALDGKELWATAQCRPHPTEPLDEAGQGDAFVGMAFCAIRAVVDVDIEIGSVRVVELAVAQDVGRVLNPAQLTARIEAGVTQGVGIALTENLRTPRGLIRHPDLTGYALPTALDAPDIRIVKLVEERDVVAPFGAKAVSAVPVVASPAAVASAVRAATGRPVNRLPIRPQAAVATGH

SEQ ID NO: 3837 - protein, 150 aa, Arachis hypogaea
MSLIPSFFGGRRSDPFSLEVWDPFRDFQFPSALFSENSAFVNARVDWRETPEAHVLKADLPGLKKEEVKVEIEDNSVLQISGERNVEKEDKNDTWHRVERSSGKFMRRFRLPENAKMDEVKASMENGVLTVTVPKAEVKKPDVKSIQITG

SEQ ID NO: 3838 - protein, 773 aa, Streptomyces coelicolor A3(2)
MTDDQHGDPHGDQHGQGTPPGGSRWDPLPQGDYDDGATAFVKLPEGGVDALLASSDSPLAAPGHGYVPPQITVAPATTAGTDPAATGSWAAPSAPSAPVDGTQWQVPDAGQDPAAHQGYGGYPAQQDPYGGAAPYDVHAGQGAPGHDDRFAYQPGPTGQWDFSQAAQAAQASRAEADAAAARQASGQDVTGQWSIPVADGDLPDESGEFTTSSLAEQWGTGAPATLPGGAPAPWATQPAGQPWGEDAPRPGPAGPADEERPAASGHAYGATATGHGEGHGADAGHRADADLSGYGPGHDSGADAGHGPDAAVGPHGPGPSAPGAGPVPHAHGPGSTASGPGEGHGPGPAASVHGHDPAVSPDGPRPADGSYAHAPGVDTQSAAGAAGAGPGVRAPDGAPEGSGTATDGPRGAEEAPEGPAGRSAGPHEEARAGSRPEAAEGPVTDRAPTAGRERAPEPAGEHGQAPEGEPRPESPAAPQGVPADASDRADSPDPADPADPIDPTDPTGRGTDAADAGSGADGPEAVTDGVPDAAQEPSAPAGPQDEHPLASYVLRVNGADRPVTDAWIGESLLYVLRERLGLAGAKDGCSQGECGACNVQVDGRLVASCLVPSVTAAGSEVRTVEGLATDGRPSDVQRALARRGAVQCGFCVPGMAMTVHNLLEGNPAPTELEARQALCGNLCRCSGYRGVLEAVQEVVAEREAHADADAQAGPDPEEPRIPHQAGPGAGGVNPAAFEAQPPPGAQDATGAHDRPPYGDHGDHGTHGRDGGHA

SEQ ID NO: 3839 - protein, 163 aa, Pseudomonas thermocarboxydovorans
MSKHIVSMTVNGRKVEEAVEARTLLVHFLREKLNLTGTHIGCDTSHCGACTVDVDGKSIKSCTHLAVQCDGSDIKTVEGLAQGATLHAVQQAFYQEHGLQCGFCTPGMLMRAYRLLQDNPNPTEDEVRAGMAGNLCRCTGYQNIVKAVLTAARMLQQPQQMAA

SEQ ID NO: 3840 - protein, 155 aa, Helianthus annuus
MSIVPSLFGSRRSSIFDPFSLYVWDPFRDFPISTSSEVSRETSALVNARVDWKETPEAHVFKADLPGIKKEEVKVEVEDGNILQITGERNVEKEDKNDKWHRVERSSGKFTRRFRLPENAKMDQVKAAMENGVLTITVPKEEAKKPDVKSIEISG

SEQ ID NO: 3841 - protein, 98 aa, Oryza sativa
MSQAFVQRPAPEFSATTLFPGGEFRDIKLSDFKGQWVVLLFYPMDFTFVCPTEIIQYNNALDRFKEINTTVLGVSTDSHFTHLAWVEKPRKQGGLGPD

SEQ ID NO: 3842 - protein, 454 aa, Clavibacter michiganensis subsp. sepedonicus
MKYADTILDLIGNTPLVKLNKVVEGISATVLVKVEYLNPGGSAKDRIATRIIDAAEREGKLKPGGTIVEPTSGNTGVGLALVAQQRGYRCVFVLPDKVGEDKRNVLTAYGAEIVVTPTSVAPDHSDSYYSVSDRLAREIPGAFKPDQYSNPNGPLSHYETTGPEIWRDTEGEITHFVAGVGTGGTISGVGRYLKEVSEGRVRIVGADPEGSVYSGGTGRPYLVEGVGEDFWPAAYDPDVVDEVIASSDQESFDMTLRLAREEGLLVGGSSGMAVVSALKAAKHLGPDDVMVILLPDGGRGYLGKIFNERWMQSYGFARVNGQRTVADVMSAKTGSLPDLVHAHPNDTIRDAIRIMTEYDVSQLPVLSAEPPVVMGEVAGAVDERSLLELVFSGRAQLSDQVGPFTGDAFGLIGVNETVPDAWSALGSADALMVSDGGKPVGVLTRHDLLTYLTD

SEQ ID NO: 3843 - protein, 842 aa, Pseudomonas thermocarboxydovorans
MNAPLSDREKALMGMGEPRLRKEDARFIQGKGNYVDDIKLPGMVHMDIVRSPLAHARIKRINKEAALQVPGVLAVLTAEDLKPLKLHWMPTLAGDVAAVLADGKVHFQMQEVAVVIAEDPYAAADGVEAVEVEYEELPAVVDPFEALKPDAPVVREDLAGKTEGAHGKRYHHNHIFTWEAGDKAATDAVFAQAPVTVKQEMHYPRVHPCPLETCGSVASFDSVRGELTVWITHQAPHVVRTVVSMLSGLPESKVRIICPDIGGGFGNKVGIYPGYVCSIVASIVLGRPVKWVEDRIEHLSSTAFARHYHMTGELAATADGKILALRANVVADHGAFDACADPSKFPAGLFHICTGSYDIPTAYCRVDGVYTNKAPGGVAYRCSFRVTEAVYLIERMVDVLAQKLNIDKAEIRAKNFIRKEQFPYPQAFGFEYDSGDYHTALQKVLEAVDYKGLREEQARKRADPNCPTLMGIGLVTFTEVVGAGPTKVCDILGVGMFDSCEIRVHPTGSAIARMGTITQGQGHQTTYAQIIATELGIPSDLIQVEEGDTATAPYGLGTYGSRSTPVAGAAIAMAARKIHAKARKIAAHLLEVSEADLEWEIDRFKVKGRDDKFKTMKDIAWAAYHQPPAGLEPGLEAVHYYDPPNFTYPFGVYLCVVDIDKGTGETKIRRFYALDDCGTRINPMIIEGQIHGGLTEGFAVAMGQLLSFDKQGNIQGNSFMDYFIPTAVETPKWETDYTVTPSPHHPIGAKGVAESPPRGQHPNLHQRHPSMPLPSRRNAHQHAPYGLAGVARAQKERGSHQLTPTGAQASRACATSTSTSYNIRVHIHGSRHRQAISRGRRP

SEQ ID NO: 3844 - protein, 733 aa, Pseudomonas syringae pv. phaseolicola
MNQPFSPMGKPVDRVDGRLKVTGGARYAGEYPEEGLLYASVVSSTIANGRVVSIDTSEALKVAGVVAVIDHTNRPSVASYDENYEDADSADGSPFRPFYNDNVMYSGQPLALVVADTLELARHAGSLVRIEYEQQAHQTDLQAMLDTAHDAPAELPPPRGNFEGELASSALSVDVTYSTPSEYHNPMEPHASTVLYQADGSLQIHDKTQGTQNCQDYLHKVFGLEKDKIRVLAAFVGGAFGSGLRPQYQLPLAVMAALHLKRSVRLTLTRQQMFTFGYRPRTVQRLRLGAAANGRLLAIGHEAIGQTSRFEDFSEHVVEWSGMLYHCDNVQLTYKLVPLDVFTPLDMRAPGAALGMIGLECAMDELACALAIDPVRLRLTNYAERNGNEDKPYSSKELRECYRQVAERFGWESRNPEPRSMRQGRQLVGWGMAGGVWEAMQMKASAKARLEADGSLVVSSATTDIGTGTYTVMTQIAAEASGIDVENVTFLLGDSSLPTAPLQGGSFTVSSVGTAVQQACQALQRQVLEVAKGLHPQFASATPDEVRFEAGKLYVGEQALSMAELAASQASGAIEVQVDAEPDKKREAYAAATHSAVFVEVLVDEDLGTIKVNRVVSAVAAGRVVNPKMARSQILGGVVWGMGMALQEEAMLDHTLGRPMNHSLAEYHIPVNADIGDIDVLFVEEHDEIVNALGSKGVGEIGIVGVPAAIANAIYHATGKRIREFPITLDKLL

SEQ ID NO: 3845 - protein, 163 aa, marine gamma proteobacterium HTCC2080
MITFSLNGDSVSFKGDPNTPLLWVIRDDFKLKGSKFGCGAGLCGACTMHLDGAAIKTCVLPVAAAANKKVTTIEGLGNPEALHPLQAAWVKHNVPQCGYCQSGQIMAAAALIADKPDASSDDIDQAMSGNICRCGCYPRIKAAIASVAGNSQSYDATAVEATS

SEQ ID NO: 3846 - protein, 469 aa, Streptoalloteichus hindustanus
MRLRVLRLTPFFHHDCVDRWPAEFDAVGGMQVQILRLSRQLARRGVRQEVLTVGFPGLPRVREDSPGLVVRITRAPMPRLRSELTGLVGLNLAWFLGAMAECARRRRSRRPDLIQVHADGQLWALLAGPIASALLRRPYSLVLHCSRLGVYQPMSRYDQWQHRFVAAVERWALRRADGVCALTARTADVVRAALRPHAVRVDVVPDSVDPEPPVDAGVPVAERLRAAGLPADAKVVGYVGRVAHEKGWAHFVELAARLAADPPAEPVVFLVVGDGPQRPRMEERVAAAGLSDRFVFTGFLPNHEVPLTMSGIDVLVMPSVHEELGGSAIEAMVLGVPVVAYGVGGLRDTVGTVAPELLVPPQDVPALVRAVRDVLARGAEHRARVRAGRPWLEENFGDGVGVDRTVAHYRRVLAGRGGGGDLGPGVPGPGVPNPGALNPGVPGPGGAAPADPPDGGASAAGQRPPGSGP

SEQ ID NO: 3847 - protein, 305 aa, Cupriavidus taiwanensis
MKVQNILQTIGNTPHIRINRLFGNGHEVWIKSERSNPGASIKDRIALAMVEDAERRGVLKPGGTIIEPTSGNTGIGLAMVAAVKGYKLVLVMPDSMSVERRRLMLAYGATFDLTPREKGMKGAIARAEELVAATPGAWMPQQFENPANADVHARTTAQEILNDFPEGLDALITGVGTGGHLTGCARVLKEKWPQLKVFGVEPVASPVISGGAPAPHPIQGIGAGFIPKNLDTALLDGVIQVDAEPAREMARRCAREEGILVGISSGATLAAIAQKLPELPANARVLGFNYDTGERYLTVEGFLPA

SEQ ID NO: 3848 - protein, 395 aa, Chlamydomonas reinhardtii
VALFVEPSPFSHISGMKNRFQCLIRNLREAGDEVRVFTPDPHAPSEYHGARVVGVLGFKLPFYSSPTLLLSLGLSVNVLWQLLTRRPDVIHVSAPGLMVFAAALYAKLLAVPLVVSYHTHVPEYIPKYTWRGLVEPMWSIIRWFTRTADLALVTSHAMKVRERAAGWEDAEQLLVWPRGVDAEVFHPRHRCAAMRQRLSGGVPEAPLLLYVGRLGAEKNLDALRCVMEAVPGCRLALVGDGPARPQLEQHLAGLPVTFMGMLRGDELSAAYASADVFVMPSETETLGFVVLEAMASGLPVVAVAAGGLKDILAPAAASASSPGGSSSAADLAAAAAAAQLVAALAASPELRASVGAAARAEVERYGWGEATRVLREEQYKRAIHVHASRRRWVNN

SEQ ID NO: 3849 - protein, 536 aa, Alcanivorax sp. DG881
MQDLTTLTINVKDPWKDPANGWDVLDGRTITDNRTLEADVIIVGTGAGGGVSAEILSQRGLKVILVEAGKLKSSDDFKLDEGAAYRDLYQEGALRATKDAGMTVLQGRTVGGTTVINWTSCFRTPHETLQYWHDEFGVQGLSRAQMDPWFQQMETRLKVEKWAIPPNANNDVMKRGCDSKGWHSALIPRNVSGCWNIGYCGMGCPTNAKQSMLVTTIPGALDHGSTLIHSAQADTLIIDGDTVTGVRVRPLNDDKVPTGATVTLKAKTVIAAGGGIQSPALLMRSDAPDPNGLVGKRTFLHPTSFAFGIYDKEIAPYYGAPQSVYSDEFNFKHGVNGPAGYKMEMMPMHPGLSGALMGGFGKRARDEIERLPNLAASIAMIRDGFHDDNQGGTVELRDNGEPLLDYPVNEYLLDGTKRAHLTMLEMQFAAGAKEVRPSHADAGYYKSWKAAREGVAQLDYAPVITGLGSAHVMGGLTMGADESRCTVNSDGSYKHLNGLYVIDGSVFPTSIGANPQLSIYGLSARNASALADKLKA

SEQ ID NO: 3850 - protein, 213 aa, Herminiimonas arsenicoxydans
MMTLRLGDIAPDFEQDSSIGKIKFHEWAGDSWVVLFSHPADFTPVCTTELGLTAKLKPQFDKRNVKAIALSVDPADQHLEWIKDIEATQKTVVGFPIVADADKSVSTLYDMIHPNQSATATVRSVFIIDPQKKIRLTLTYPMSVGRNFDEILRAIDALQLTDNYTVATPGNWRDGDDVIIPLSIQDEAVIKQKFPKGYKAERPYLRVTPQPNK

SEQ ID NO: 3851 - protein, 189 aa, Alteromonadales bacterium TW-7
MSTSLINTKIQPFNATAYHNGDFVEVSEKDVLGKWSIFFFYPADFTFVCPTELGDVADYYEQLQEMGVEVYSVSTDTHFTHKAWHDTSDTIGKIKFPMIGDPTGRITRSFGVMIEDDGLALRGTFVMNPEGEIKVIETHDLGIGRSAKELVRKVQAAQYIATHDGEVCPASWQPGEDTLAPSLDLVGKI

SEQ ID NO: 3852 - protein, 329 aa, Arabidopsis thaliana
MAVLSKPVAVPKSGFSLIPVIDMSDPESKHALVKACEDFGFFKVINHGVSAELVSVLEHETVDFFSLPKSEKTQVAGYPLGYGNSKIGRNGDVGWVEYLLMNANLDSGSGPLFPSLLKSPGTFRNALEEYTTSVRKMTCDVLEKITDGLGIKPRNTLSKLVSDQNTDSILRLNHYPPCPLSNKKTNGGKNVIGFGEHTDPQIISVLRSNNTSGLQINLNDGSWISVPPDHTSFFFNVGDSLQVMTNGRFKSVRHRVLANCKKSRVSMIYFAGPSLTQRIAPLTCLIDNEDERLYEEFTWSEYKNSTYNSRLSDNRLQQFERKTIKNLLN

SEQ ID NO: 3853 - protein, 181 aa, Pyrobaculum aerophilum str. IM2
MKIPEDLCFNTDHGPKCFKDYKGKWLLLFSHPADFTPVCTTEFVAFSRKYEEFKKRGVELLGLSVDTNYSHIEWKRQIEQAFGVKVPFPIIADVDMKVASIFNAVPPGQNLTVRTVALIDPDLKLAWFAAYPYTNGRNIDEILRVIDAIQFSYKYGYATPADWKPGDPVIVPPPPTTEGAA

SEQ ID NO: 3854 - protein, 393 aa, Cyanothece sp. PCC 8801
MQLLYTLTTYPPTIGGAQLHQHLLAQYLSQKHQIQVISQWDKNRTDWLLGTTINAPSSNFDYTIDGINVHRLGLTSAEKRSLIPYLPFYYPLMEIALPPIANCLEKKLHFYAENADLIHNVRIGREGLSYASFQAATTHNIPFILTPVHHPRWAGWLYRAYLKLYQLADAVIALTQAEKEILIDLGVSEERIHITGHGPILAEKADPNNFKERHHLQEPIILFLGQHYPYKGYQQLLKAAPLIWQKIPEAQFVFIGPQVKQSETYFEQFQDPRIHRLGSVSLQEKTDALAACNVLCVPSTQESFGGVYTEAWSFGKPVIGCNIPAVSEVISEGKDGYLVNQNCSEIAEKICYLLLNPTEAEILGKTGKSKVEKYFNWQHLSEITEEIYKKVCH

SEQ ID NO: 3855 - protein, 517 aa, Gibberella zeae PH-1
MASQVPHVLPRAATVHSATELIGNTPLVRLNKIPQSLGIECDVYVKPELFSAGGSVKDRIALRMIEEAEKSGRIKPGDTLIEPTSGNTGIGLALVGAIKGYKTIITLPEKMSAEKVSVLRALGATIIRTPTQAAWDAPESHIGVARRLEKELPNAHILDQYSNKDNPNAHEFGTAQEIWEQTGGKITALVAGAGTGGTITGIARGLKKHNQDIKVIAADPHGSILALPELLNQEHINEGYKVEGIGYDFIPDVLDQHIVDKWYKTDDRESFHLARRLISEEGLLVGGSSGSAMAAMLLAVKEYGFKKGDVVVVVLPDSIRSYLSKFADDDWLAANNLLPVNGVESTVNGNGDKKNSDPYEGATIAALRLKPVTSVGATSTCSEAIETMRDKGFDQLPVLSASGTKLVGLVTLGNLLSYISSGRATGQSSVSDVMFDFARLDEIVTDPREFASPINPGKRRQFVEITKDTPLTTLSKFFEWNSAAVVTEKSGDSKSLSKPIAVVTKVDLLTWMINKKL

SEQ ID NO: 3856 - protein, 307 aa, Bacillus cereus ATCC 10987
MNVYRGVHELIGHTPIVEITRFSLPEGVRLFAKLEFYNPGGSVKDRLGRELIEDALEKGLVTEGGTIIEPTAGNTGIGLALAALQHDLHVIVCVPEKFSIEKQELMKALGATVVHTPTEQGMTGAIAKAKELVNEIPNSYSPSQFANEANPRAYFKTLGPELWDALNGEINIFVAGAGTGGTFMGTASYLKEKNIDIKTVIVEPEGSILNGGKAGSHETEGIGLEFIPPFLKTSYFDEIHTISDRNAFLRVKELAQKEGLLVGSSSGAAFHASLLEAEKAAPGTNIVTIFPDSSERYLSKDIYKGWE

SEQ ID NO: 3857 - protein, 322 aa, Vibrio parahaemolyticus RIMD 2210633
MSKIYEDNSLTIGNTPLVRLNKVSKGNVLAKIEARNPSFSVKCRIGANMIWEAEKAGTLKPGVELVEPTSGNTGIALAFVAAARGYKLTLTMPESMSLERRKLLKALGANLELTEAAKGMKGAIAKAEEIVASNPEKYLLLQQFNNPANPQIHEKTTGPEIWDATDGEIDVLVAGVGTGGTITGTSRYIKGEKGKAITSVAVEPAESPVIAQALAGEEIQPAPHKIQGIGAGFIPGNLDLDIIDRVEPVTSEEAIEMARRLMEEEGILAGISSGAAVVAANRIAELPEFEGKTIVTILPSSGERYLSTALFAGIFTEKENQQ

SEQ ID NO: 3858 - protein, 197 aa, Cryptococcus neoformans var. neoformans JEC21
MATYTLPQIQKPAPNFAGTAVKEGSFEEIKLNDFKGKWTILVFYPMDFTFVCPTEILAFNKALDQFAAVGAEVICVSTDSEFTHLAWSQTKRSEGGLGPDLKLTLLADRNHAAAKAYGVLLPEEGVALRGTFFIDPKGTLRAMHVHDLPVGRSVEETIRVIKAFQFTDEHGEVCPAGWEEGKDTIDTSAPSAYFSKQ

SEQ ID NO: 3859 - protein, 187 aa, Pseudomonas aeruginosa PAO1
MSLINTQVQPFKVNAFHNGKFIEVTEESLKGKWSVLIFMPAAFTFNCPTEIEDAANNYGEFQKAGAEVYIVTTDTHFSHKVWHETSPAVGKAQFPLIGDPTHQLTNAFGVHIPEEGLALRGTFVINPEGVIKTVEIHSNEIARDVGETVRKLKAAQYTAAHPGEVCPAKWKEGEKTLAPSLDLVGKI

SEQ ID NO: 3860 - protein, 832 aa, Rhodococcus sp. RHA1
MSVTKPRTEPAPTTGADAPAASEKLFGKPIPRTEDARLLSGNGRYLDDLGHNALIAAFVRSPHAHARITGIDIDAALDLPGVHAIYTYDDLVDDSPEMAENLPLLIPHPAITAPRNGYPLAKDEVNHVGEAIAMVVADNRYVAEDACAKIDVTYEMLPPVVGIDVARQADNAVHADVPDNVAAHLQHGFGDVDAELANAPHRLTLNLEIERSASMPMEGKGVYARWDTDEQALTFWTSTQTSTSARAAIAARLKMAHNKVHCIAPDVGGGFGVKIVHPWPEEVMVTWAARRLGTAGISSEVKWVEDRREHFVSSAHERGQIQEVTVGFDDDGTLLAFDFTFWHDNGAYLPYGIIVMLNTSTQVLGPYKPKSFRVDAYSLYTNTVIVTPYRGAGRPQAVFAMERAMDAIAKYLGKDVIEVREHNFIRPEEMPYDFHLTFQDGRPLIYDTGDYQAGIDKLKKLIDWDGFAEYKKQAKAEGRAVGIGIGAYVEGTGPGPYEGAHVLVETSGKVKAATGLTTQGQGHQTAFAQIVADDLGVPVTDVEIVTGDTRRFGYAVGTFASRGAVMSGSAFHVAAQMVAEKARTIAGEALNLDPAELELRGGHVCKIGTLPGAEGTSISLGVVAVLSNPLRYAFDDASRQATGFAKADTDMTIPPVREGEQPGLEATGYYSPPTSTFASGVHAAIVETDPVTAEIHVRRYAVIHDCGNVINPRIVEGQVMGAVAQGVGGALYEKIVYDEHGQMLNASYMDFLMPFVTEMPDSLEMDHTVTPSGLNPLGMKGAGEAGVIPTSAVIAAAIEDAEGIPITSMPISPSELFELRLAHASSQSKENE

SEQ ID NO: 3861 - protein, 391 aa, Streptomyces tenebrarius
MGGMHLLVRALVEEMAGRGVPHRVLTMAPPGVPRDLAIARNVTVHARRLPVLPIPSQLEGYFGLVGAWAKGSLLWVLRNRRRLRREISLVHAHCDGSGSAPFYGWLIARALGVPLVAQIHSSRFLSQHPTTLWERVTDPAAKWAERFTVRNAAAVLMLTEKARTEMRDAAALDPRRVHRLAYLASDRFAEGDTEERRTEIRRRFGLDTGQPVVLYVGRIAAEKGVEFFVEAAAELRRRGRNCRFLVAGDGPTRQEIEKLAEDRGVADRITITGFLPHELIPSVMALSQLVVLPSRYEELGIVILECMSMRRPIVAHDVNGVHKLIEHGRTGLLVPPFDTPAMADAIEALLDDPELRERIAETAAPLPSAKYSLTTAADQLTDIYRELGVCV

SEQ ID NO: 3862 - protein, 678 aa, Arabidopsis thaliana
MQSIELVTKRGTIEAYIATRLILFLLATRLGTLLICGTECLVSRWPFVEKFSELSLEKRERVLQKQFKNWILTPIRAAFVYIKVAFLFCFFSRVNPNGENPAWEAIGYRVNPDENKPSETHNERPLEKGIVETMEETEQTLLESLAHKGLEAVLDTEHDAIRIKCDVVVVGSGSGGGVAASVLAKSGLKVVVLEKGSYFTPSEHRPFEGPGLDKLYENGGILPSVDGSFMVLAGATVGGGSAVNWSACIKTPKSVLQEWSEDQNIPLFGTKEYLTAMEVVWKRMGVTEKCELESFQNQILRKGCENLGFNVENVPRNSSESHYCGSCGYGCRQGDKKGSDRTWLVDAVGHGAVILTGCKAERFILEKNGSNKGGKQMKCLGVMAKSLNGNIAKMLKIEAKVTVSAGGALLTPPLMISSGLRNRNIGKNLHLHPVLMAWGYFPDKESSNISFKGNSYEGGIITSVSKVLSEDSEVRAIIETPQLGPGSFSVLTPWTSGLDMKKRMARYSRTASLITIVRDRGSGEVKTEGRINYTVDKTDRDNLKAGLRESLRILIAAGAEEVGTHRSDGQRLICKGVNENSIQEFLDSVSTEEGAKGMTEKWNVYSSAHQMGSCRIGENEKEGAIDLNGESWEAEKLFVCDASALPSAVGVNPMITVMSTAYCISTRIAKSMTTGLSH

SEQ ID NO: 3863 - protein, 216 aa, Rhodococcus sp. RHA1
MTMAKATHSIDEQLAGLQEETGEQHVAVTFTLNAVTQTVVLPSRTLASDAIRHHLRQTGTHVGCEHGVCGACTVLLDGKPVRSCLVLAASLEGREVTTVEGLVEPDGTLHPVQQAFIDCHGLQCGFCTPGFVTTIAAFLEENDSPTREEATDAIAGNLCRCTGYQNIRAAVLRAAEIKRERSGEFPLGEDDESSRASLDPKVRGTTNPVGGRAGRA

SEQ ID NO: 3864 - protein, 382 aa, Prochlorococcus marinus str. MIT 9211
MKIAFFTETFLPKVDGIVTRLTKTLEHLSKAGDEVIVFCPEGCPDEYMGAKMIGVPAMPLPLYPELKLGLPGPAVSEALENLKPDLIHVVNPAVLGLGGIWLAKSNNIPLVASYHTHLPKYLEHYGMGMLEPLLWELLKAAHNQAILNLCTSTAMVKELSDKGIQNTALWQRGVDTETFNPELRSDEMRQKLLGKHSDTGELLIYVGRLSAEKQIERIKPVLEALPNTRLALVGDGPYRQQLEKIFENTATTFVGYLSGKELAGAYASGDAFLFPSSTETLGLVLLEAMAAGCPVVGANKGGIPDIINDGQNGCLYDPDGANGGATSLINATKKLLGNEIERQSMRNAARIEAEKWGWSSATTQLRDFYRAILEKQSNKIAA

SEQ ID NO: 3865 - protein, 315 aa, Frankia sp. CcI3
MRFSSLADSVGRTPLVGLPRLSPSPDARLWAKLEQDNPTGSIKDRAALWMIADGEKRGLLTPGATVLEPTSGNTGISLAMACRQRGYRLICVMPENTSIERRQLLQMWGAEIRFSPAAGGSNEAVAVAKRLAAENPDWVMLYQYGNPANAQAHYETTGPEILEDLPEITHFVAGLGTTGTLMGTGRYLKERVPDISIVAAEPRYGELVYGLRNIDEGFVPELYDPSVLTSRYSVGPREALRRTRELVQEEGIFAGISTGAILHAALAQAERAVKEGKSADIVLIVCDGGWKYLSTGAYAGTLEEAEAALEGQLWA

SEQ ID NO: 3866 - protein, 462 aa, Nocardioides sp. JS614
MNSLLDLIGNTPLLRLSTSMGSLNGAKGPIVLAKVEYLNPGGSVKDRIATRMIEAAEASGELQPGGTIVEPTSGNTGVGLAMVAQAKGYRCVFVCPDKVSEDKRNVLKAYGAEVVVCPTAVEPEHPDSYYNVSDRLASQPGAWKPDQYSNPHNPRSHYETTGPEIWAQTEGRVTHFVAGVGTGGTISGTGRYLKEQNSSVQVIGADPAGSVYSGGTGRPYLVEGVGEDFWPEAYDRDVADRIIEVSDADSFAMTRRLAREEALLVGGSSGMAVHAAVQLAHELAGTPEGEDAVIVVLLPDSGRGYLTKVFNDDWLAQYGFPVDGAERSVQSVGEVLRGKSGRLPDLVHTHPNETIAEAVAILQEYNVSQMPVVRAEPPVVAAEVVGSVSERTLLDLLFTGSAKLTDSVGEHMAPPLPTIGSTEPASEAVAALEGADALLVHEDGKPVGVVTRHDLLAYLARG

SEQ ID NO: 3867 - protein, 307 aa, Bacillus anthracis str. Ames
MNVYRGVHELIGHTPIVEITRFSLPEGVRLFAKLEFYNPGGSVKDRLGRELIEDALEKGLVTEGGTIIEPTAGNTGIGLALAALQHDLRVIVCVPEKFSIEKQELMKALGATVVHTPTEQGMTGAIAKAKELVNEIPNSYSPSQFANEANPRAYFKTLGPELWSALNGEINIFVAGAGTGGTFMGTASYLKEKNIDIKTVIVEPEGSILNGGKAGSHETEGIGLEFIPPFLKTSYFDEIHTISDRNAFLRVKELAQKEGLLVGSSSGAAFHASLLEAEKAAPGTNIVTIFPDSSERYLSKDIYKGWE

SEQ ID NO: 3868 - protein, 405 aa, Azoarcus sp. EbN1
MRILHVLDHSLPLHSGYTFRTAAIVREQRALGWETFHLTTPKQGKSTGLVEDADGLSFHRTPAPDEAGLLAQMRFTAARLDELVRALQPDVIHAHSPVLNALPSLWVARRRKLPVVYELRASWEDAAVDHGTTTEGSLRYRLSRALESFALHHADQVTTICEGLRGDIASRGIAADKITVIPNAVDAGAFKFGTEPDAALRTELGLDGKTVIGFAGSFYGYEGLHLLVSALARLVGRFPEIRLLLVGGGVQEEALRRQAVAEGIADRVVFTGRVAHNRVQKYYELIDVLAYPRLPMRLTELVTPLKPLEAMAQGRMFVASDVGGHRELVRDGETGFLCKAGSVDALADTIASVLGNREAWPGMRANARAFVERERTWANSVGRYQDVYQRALATRGREALLAGAR

SEQ ID NO: 3869 - protein, 305 aa, Novosphingobium aromaticivorans DSM 12444
MRAESILATIGNTPHIRLSRLFPDHEVWVKCERANPGGSIKDRIGLAMIEAAEADGSLKPGGTIVEPTSGNTGIGLAMAAAVKGYKLILVMPESMSLERRRLMLAYGATFDLTPREKGMKGAIERAKEIVDQTDGAWMPQQFDNPANVSVHVRTTAQEILKDFGSEPIDVLITGVGTGGHLTGCAEELKKHWPSLKAYAVEPTLSPVISGGQPGPHPIQGIGAGFIPGNLHTQSIDGAIQVDPADAKEMARLCASKEGMLVGISSGATLAAIAQKLPSLPAGSRVLGFNYDTGERYLSVPDFLPE

SEQ ID NO: 3870 - protein, 216 aa, Thermococcus kodakarensis KOD1
MVVIGEKFPEVEVKTTHGVIKLPDYFAEQGKWFVLFSHPADFTPVCTTEFYAMQKRVDQFRELGVEPIGLSVDQVFSHIKWMEWIKENLGEEITFPVIADDRGELADKLGMIPSGATITARAVFIVDDKGIIRAIVYYPAEVGRDWDEILRLVKALKVSDEKGVALPHKWPNNELIGDKAIVPPASTVDEVKQREEAKAKGEIECYDWWFCYKKLE

SEQ ID NO: 3871 - protein, 320 aa, Gloeobacter violaceus PCC 7421
MHIAHDITELIGRTPLVQLNRIPAAEGALARIVVKLESFNPAASVKDRIGVSMINEAEKSGFILPGKTTLVEPTSGNTGIALAMVAAARGYRLILTMPETMSSERRALLRAYGAQLELTPGSEGMRGAIRRAEEITREVPDAFILQQFRNPANPKIHRETTAEELWRDTDGQMDIFVSGVGTGGTVTGVGEVWKVRKPGVQIVAVEPAASPVLSGGKPGSHLIQGIGAGFVPDVLRRDVIDEVIAVADEKAIEYSRRLAKEEGLLSGISTGAALWAALQLAKRPENTGKLIVFIQPSFGERYLSTALFQNEGQSPTAVAR

SEQ ID NO: 3872 - protein, 1363 aa, Emericella nidulans
MAPGVLLQPSQSELEAASPPKAAASLLQLTEEWDDTIRFYLNGTKVILDSVDPEITLLEYLRGIGLTGTKLGCAEGGCGACTVVVSQINPTTKKLYHASINACIAPLVAVDGKHVITVEGIGNVKNPHAIQQRLAIGNGSQCGFCTPGIVMSLYALLRNDPKPSEHAVEEAFDGNLCRCTGYRPILDAAQSFTSPIGCGKARANGGSGCCMEEQKGTNGCCKGSSEETTEDVKHKFASPDFIEYKPDTELIFPPSLWKHELRPLAFGNKRKKWYRPVTVQQLLEIKSIHPDAKLIGGSTETQIEIKFKQMRYGASVYLGDLAELRQFAFHDNYLEIGANISLTDLESVCDQAIERYGSARGQPFAAIKKQLRYFAGRQIRNVASPAGNLATASPISDLNPVFVATNTTLVARSLDKETEIPMTQFFRGYRSTALPPDAIISSLRIPTASEKGEYLRAYKQSKRKDDDIAIVNAALRVSLSSSNDVTSVSLVFGGMAPLTVSARNAEAFLTGKKFTDPATLEGTMGALEQDFNLKFGVPGGMATYRKSLALGFFYRFYHDVLSQIEARSSDLDNSVVAEIERAISTGEKDNEASAAYQQRVLGRAGPHLSALKQATGEAQYTDDIPAQKNELYGCMVLSTKAHAKLLSVNTEAALEIPGVIDYVDHKDLPSPRANWWGAPNCDEVFFAVDKVTTAGQPIGMILANTAKAAEEGARAVKVEYEELPVILSIEEAIEAQSFFEHFRYIKNGDPESAFRDADHVFEGVSRMGGQEHFYLETQACVAIPKAEDGEMEIWSSTQNPTETQSYVAQVTGVAANKIVSRVKRLGGGFGGKETRSVQLAGICATAAAKVRRPVRCMLNRDEDIATSGQRHPFYCKWKVGVTREGKLLALDADVYANGGHTQDLSGAVVERSLSHIDNVYRFPNIYVRGRICKTNTVSNTAFRGFGGPQGLFFAESIISEVADHLDLQVEQLRILNMYEPGDMTHFNQELKDWHVPLMYDQVLQESEYFERRKAVEEYNRTHKWSKRGMAIIPTKFGISFTALFLNQAGALVHIYHDGSVLVAHGGVEMGQGLHTKMTMIAAEALGVPLSDVFISETATNTVANTSSTAASASSDLNGYAIYNACTQLNERLKPYREKMPNATLKDLAHAAYFDRVNLSAQGYYRTPDIGYTWGENKGQMFFYFTQGVTAAEVEIDTLTGDWTPLRADIKMDVGRTINPSIDYGQIEGAYIQGQGLFTTEESLWHRTTGQIFTKGPGNYKIPGFRDIPQIFNVSLLKDVEWENLRTIQRSRGVGEPPLFMGSAAFFAIRDALKAARKEWGVTDVLSLVSPATPERIRVSCADPIIERARVKAEEGEKSFFVAI

SEQ ID NO: 3873 - protein, 97 aa, Zea mays
  misc_feature (36)..(36): Xaa can be any naturally occurring amino acid
  misc_feature (66)..(66): Xaa can be any naturally occurring amino acid
  misc_feature (74)..(74): Xaa can be any naturally occurring amino acid
CLPPPPRRGPYALPRSASLSAGPRSPATPGRSASSXSRSARATRLVARAGGDDDLPVAGNKASDFXAEAGFEQXFINEMFSDYFGNKYVVLFFYPLD

SEQ ID NO: 3874 - protein, 760 aa, Bradyrhizobium sp. ORS278
MNQHVKAAPTMATDLSRRSFLVGTAATGLVLGYAGLADSALAATTPSAFEPTVWYSIAPDGLVTVTCGKADMGQHIASTMAQIICEELGAAWKDMRVQLASNDPKFNDPVLGAQITGGSWSTMMNFDAMSRAGAAGRIALTEAAATAMGVPAKELVVRDGVVMHPKTKKQMSYAEIVKSGKITKSFTPDELKAITLKTPDQYTMIGVSVPQLDIPSKTNGTAKYGIDTMLPGMVYGKVVTPPVRFGATVKSVDDSEAKKVPGFIKAVTLDDKTGSTSGWVVAVANTYANARKAADALKITYDNGPYANVSTASILAEAKKLQAQDDSGQFFVKDGDATAALSGAAKVLEAEYTTSINIHAPLEPMNATAEFKGDILHIYSGNQFATRSGAIAAGAAGIDPKYVVMHQAWLGGGFGRRLDADMMVPAVQAAKAVGKPVKVIYSRENDMTMDYSRPLTYQKVKAGLDSDGKLIALSHDVVSAWPTARWGIPDFLTPSVDKKGPLDSFTVNGADFFYTVPNHHVRAIKNELAHNATPSGQLRSVAPGWTFWAVESMIDEIAAASGQDPAQFRIALLDGKGKNDGGAQRLRNTLLAAMGLSGYGAKKLPKGEGMGVACVSSQERATASWTACVAHVAVADNGAVTVKKLTVATDVGTQVHPDNIRAQVEGAALWGLSLAMYEKATLKDGGIEQTNFDSYTPLRMSQVPEVAIAVIANGEKATGVGEPAVTVVAPALGNAIYNACGARLRSLPITAEAVKAAMKA

SEQ ID NO: 3875 - protein, 266 aa, Arabidopsis thaliana
MASVASSTTLISSPSSRVFPAKSSLSSPSVSFLRTLSSPSASASLRSGFARRSSLSSTSRRSFAVKAQADDLPLVGNKAPDFEAEAVFDQEFIKVKLSDYIGKKYVILFFYPLDFTFVCPTEITAFSDRHSEFEKLNTEVLGVSVDSVFSHLAWVQTDRKSGGLGDLNYPLISYFTKSISKSFGVLIHDQGIALRGLFIIDKEGVIQHSTINNLGIGQSVDETMRTLQALQYIQENPDEVCPAGWKPGEKSMKPDPKLSKEYFSAI

SEQ ID NO: 3876 - protein, 162 aa, Bradyrhizobium sp. ORS278
MPNLTINGRTMSVDAANDTPLLWVIREQLQMTGTKFGCGAGLCGACTVHVNGEAVRSCQTMVGDVKDKKITTIEGLSQKGDHPLQKAWIAEQVPQCGYCQSGQIMQAASLLAKTTSPTKEEITAHMDGNLCRCMTYSRIQKAIQRAASEMRTASNTSDRRAT

SEQ ID NO: 3877 - protein, 183 aa, Prochlorococcus marinus str. MIT 9211
MLNLIRILSKNLATILVVFLIASPTYAINSNNINIGDKAPYFELDGYSKNNPDKDLWKLSDFKGVWTVLYFYPKDFTSGCTIEARSFEKLSPEFEKLNAMIVGISNDIQESHESFCSKESLSFTLLTDLQGIVSEKYSSWNKPYSKRNTFLIDPEGVIRYSWMNVNPLKHPTDVLKKLTELQV

SEQ ID NO: 3878 - protein, 487 aa, Bdellovibrio bacteriovorus HD100
MSENKIRNEIHVFINGAEHRISGEKAFLPLAQYLRYHSSLPGTKVVCAEGDCGACTVLSAKLENNTWSEFQAINSCIAPMYLFDMGSLVTVEGLSEQENLSEVQNKMREFHGGQCGYCTPGMVCSLSSLAEKSACSGKAITEKKARNFLTGNLCRCTGYEPILAAATNLDLSKWKSLSDKYLTDSQKNQFRPLASDSLMIEAGAKKFTAPANFQVATEQKSKSPQTRLVAGATDLGVLHNKGKAFMDDVMSLHKITDTNEIKMTADGVWVGARVTLTALENFLEDKLPELSRLLRIFASPQIKNQATLVGNVMNGSPIGDSIPALLALDAEVHLQSTKGLRKVALPKFYKAYKVFDVTADEIATGILIPVPGPEWKSKFFKVSLRKDLDISAVTFAALLKVDGNTISDARIAMGGVGPTVVRLSEIESAMKGQAFSEDTFARMGEKVRTLIKPISDLRATDEYRLKVAENLFKKCHIELQQEMTACP

SEQ ID NO: 3879 - protein, 183 aa, Synechococcus sp. CC9311
MNRRSLLQTAVLGAGIFLLAPTRVHALGGQSPEIGIKAPDFDLPGFSSVNPDQKHWSLTGLQGRWLVVYFYPRDFTSGCTIEAHGFQDSLSAFNKSGAEVVAISADSVSDHESFCSSEELKFPLLSDPDGLVSKAYGSWMAPYSMRHTFLIDPESVVQAVWTGVRPVGHAKEVLNRLNDLQTS

SEQ ID NO: 3880 - protein, 441 aa, Triticum aestivum
  misc_feature (152)..(152): Xaa can be any naturally occurring amino acid
  misc_feature (179)..(179): Xaa can be any naturally occurring amino acid
  misc_feature (200)..(200): Xaa can be any naturally occurring amino acid
TVGGGSAVNWSACIRTPGEVLQEWSRDHGVPLFAGQDYQQAMNAVCDRLGVTDECLKEGFQNKVLRRGCQALGLPVEAVPRNSSKGHYCGSCNFGCPTGDKRGTDTTWLVDAVKHGAVILTGCKAERFILQSNSDKNGPEQRNASALLATCXSNGITKKLRIEGKVSISVCGALMTPPXLLRNSGLKNRHIGRNLHLHPXVFMAWGYFPENKQPVPITGKSYEGGIITSMHRVTPRTIIETPALGPGAFAAMVPWESGRDMKERMSRYARTAHAFALVRDRGSGFVDCEGRLRFTPSRDDARELRNGLRHVLRILVAAGAAEVGTHRSDGLRLRCKGVRDEDLEAFLDEVTIEKGPMHSTADKWAVFSSAHQMGSCRMGSSPKDSAVDGSGESWEAEGLYVCDGSLLPTAVGVNPMITIQSVAYCLSKGIAESMTNGQKHY

SEQ ID NO: 3881 - protein, 775 aa, Bdellovibrio bacteriovorus HD100
MSVGQNIPHDSSRGHVTGGSVFIDDRPMMAGEVLVLPVGVPAAAGRLKSIDYSQALKCRGVLAAFTAKDLSHNSWGTIVPEQPILVADKIGHYDEPAVLLVGTDMEDLLRAKKHVQFEIEKENGVFTIDEAIKLDRFIYKANAFKVGDADAAMAQAPHRLKGAFECGGQEHFYLESNACIAYPMEDGQIEVHASSQHPTETQHVVAEALGLSLHEVVCVVKRMGGGFGGKESQAAPFAAMAALVASKMKRPARLCLSKDDDMMMTGKRHPFKNYYEVGFDNDGRILSLKAHLYADGGAYADLSSSILDRAMFHVDGAYYLPAAHIEGAVVRTNLYSNTAFRGFGGPQGTMTIESIIEDMALHLKKDALAIRELNCYQKDHNNVTHYGQALGHNPLPELFADLKKSSDYEKRRQEIDAFNASSKTAVRGLSMTATKFGIAFTARFLNQGNASVNVHKDGTVQVSTGATEMGQGVNTKIQQVVAHAFGIPAHDVKVMATSTEKNHNTSPTAASSGSDINCAAALKAAVGIQKRLAWLFQNILAGTPMNDIAECPPLDEAKLKFEEFHFENGLLTHKPSSKSMTWLDAVKQAYFNRLSLGEYAHFKTEGLGFDKKTSQGTPFKYFTNGVAVSEVQVDLFTGEYKVLRTDILMDLGRRINPGIDKGQVTGAFVQGMGWVTSEKLFHNKEGKLLSHSPTTYKIPNVQDTPRVFNVEFIENHENRENVHRSKAVGEPPFLLGISVWTALKDAANAKSKGLISTLKSPATPEEMLMEIARHE

SEQ ID NO: 3882 - protein, 327 aa, Halobacterium sp. NRC-1
MKDSILDAIGTPLVRLTAPEGATIAAKLEGFNPAGSAKDRPAREMVLAAERAGEIQPGDQLVEATSGNTGIGLALTAAARGYDLTIVMPASMSTERKQLLRAYGADLELVDAGMETANQVADRVAADTGAFRVGQFENPANPRAHYRTTAEEILDQVEGREIDALVAGVGTGGTITGTATRLREAHPEMSVVAVEPEANAVLSTGESGDDDFQGMGPGFVSDNLDRELIDTVETVAVDAAEAETRRLAREEGVLVGQSSGAAALAATRTAERIADPSLDCPDVSFDADAVGDPDAIADGGDGPDDCPLVVTILPDTGERYLSAGVFD

SEQ ID NO: 3883 - protein, 381 aa, Synechococcus sp. CC9311
MKIAFFTETFLPKVDGIVTRLTKTVKHLVDAGDEVVVFCPEGAPSHYMGAKVVGVPAMPLPLYPELKLALPRPAVSEAIDAFQPDLIHVVNPAVLGLGGIWLAKTKSIPLIASYHTHLPKYLEHYGMGMLEPLLWELLKAAHNQAVLNLCTSTAMVQELSDKGIQHTALWQRGVDTELFRPELRSPELRQRLLGEYDDRGALLLYVGRLSAEKQIERIRPVLEALPDTRLALVGDGPHRQQLEKHFEGTATTFVGYLAGEELAGAYASGDAFLFPSSTETLGLVLLEAMAAGCPVVGANRGGIPDIISDGVNGCLYEPDGADAGAGSLIEATGKLLGNDLERQALRNAARSEAERWGWAGATEQLRGYYRQVLSSDISSAA

SEQ ID NO: 3884 - protein, 367 aa, Nierembergia sp. NB17
MAPSTLTALAEEKTLQTSFIRDEDERPKVAYNQFSNEIPIISLKGIDDDQSGKRGEICDKIVKACEDWGIFQVVDHGVDVELINKMTTLAKEFFALPPEEKLRFDMSGGKKGGFIVSSHLQGEAVQDWREIVTYFSYPIRARDYSRWPNKPEGWIAVTEKYSDTLMALACKLLEVLSEAMGLEKEALTKACVDMDQKVVVNYYPKCPQPDLTLGLKRHTDPGTITLLLQDQVGGLQATKDNGKTWITVQPVEGAFVVNLGDHGHFLSNGRFKNADHQAVVNSNSSRLSIATFQNPAPEAIVYPLKIREGEKSIMEEPITFAEMYRKKMSKDLELARLKKLAKEQQLQAEVAAEKTKLESKPIEEIFA

SEQ ID NO: 3885 - protein, 170 aa, Helianthus annuus
DSFTIIFSHPGDFTPVCTTELGAMAAYADKFAQRGVKLLGLSCDDVQSHKEWIKDIEAYNKGKKVTYPIAADPNREIIKQLNMVDPDEKDASGQNLPSRALHIVGPDKKIKLSFLYPASTGRNMDEVVRALDSLIKASQHKIATPVNWKEGEPVVIAPSVSNDEARKMFP

SEQ ID NO: 3886 - protein, 216 aa, Hyphomonas neptunium ATCC 15444
MNSEDSIKPSRRDVMVVGAASSALLVNACQSATPTTYAEEGPPVVNETTSTVTLEVNGTPHRLTIDNRVTLLDALREHLRLTGTKKGCDHGQCGACTVIVNGRRINSCLSLAVMHAGDEIKTVEGFGTPDAPGPMQAAFIREDAYQCGYCTPGQICAAIGVLEEIRAGVPSHVTPSLTGPVEASPEEIRERMSGNICRCGAYSNILSAIQSVSGAV

SEQ ID NO: 3887 - protein, 428 aa, Cyanothece sp. ATCC 51142
MAFCAEKVRRPLFKIYMKVLHINQSDIMGGAAIAGYRLHQALLNSGVDSRLFVAETNLDDPRIREIPQKRRTQDLLRNISDPLGLNFVNIVSTFLMPQDPFFQEAEIVNFHNIHRGYFNYLALPQLTKNKPGVFVLHDMWTFTGHCVYSYDCDRWKIGCGQCPYPETYPSINRDNTHVEWRLKQWLYQQSNLSVVSPSRWLIEQVQQSPLLQNLPLHHIPHGIDTEAYQPLDPEMCRAALGIPTHKKVLMFVADLLQDYRKGSDLLLEALSQLPDSLKVDTILLTLGLGSESFWSSCGLASINMGVVRNDRLKSVIYSAADLFVFATRADIFGLVLQESMACGTPMISFKIGGVPDLVRPGITGYLAEPENSQDLCQGIIYLLEDNTLRQQMSQHCRDIALNEYSLDKQAQRYLEVYNKILGIAPKLS

SEQ ID NO: 3888 - protein, 382 aa, Synechococcus sp. WH 7803
MKIAFFTETFLPKVDGIVTRLTKTVKHLVDAGDEVIVFCPEGCPEEYMGARLIGVPAMPLPLYPELKLALPRPAVSEAIDSFQPDLIHVVNPAVLGLGGIWLAKAKSIPLVASYHTHLPKYLEHYGMGMLEPLLWELLKAAHNQALLNLCTSTAMVQELSDKGIQHTDLWQRGVDTELFRPDLRSAELRQRLLGRHDDRGALLLYVGRLSAEKQIERIKPVLEALPDARLALVGDGPHRQQLEKHFEGTATTFVGYLAGEELAGAYASGDAFLFPSSTETLGLVLLEAMAAGCPVVGANRGGIPDIISDGVNGCLYEPDGADGGAASLIAATQRLLGNDVERQALRNAARSEAERWGWAGATEQLRGYYRQVLKQPQLNAAA

SEQ ID NO: 3889 - protein, 230 aa, Ralstonia solanacearum GMI1000
MRPGTTDAWPIAAHSPIVAGRVRPPLACLAGALLVCRTPSAAPPQEKPMKTIGDKLEPFKVIGVKPGFNRHEENGQSAFEDITEASFPGKWKVIYFYPKDFTFVCPTEIVAFARLNQDFEDRDTVVLGGSTDNEFVKLAWRREHKDLDRLKQWSFADTTGALIDQLGVREHEAGVALRATFIVDPDNVIQHVSVNNLNVGRNPDEVLRILDALQTDELCPCNRAVGGATL

SEQ ID NO: 3890 - protein, 316 aa, Bacteroides fragilis NCTC 9343
MAKIAKKLTELIGHTPLMELSGYSRKYGLQENIVAKLESFNPAGSVKDRVALSMIEDAEERGVLQPGATIIEPTSGNTGVGLAMVATIKGYRLILTMPETMSLERRNLLKALGAQIVLTNGQKGMAGSIAKAEELKKSIPGSVILQQFENPANTEVHARSTGEEIWQDTDGEVAVFVAGVGTGGTVCGVARALKKHNPNVYIVAVEPASSPVLEGGKAASHRIQGIGANFVPGIYDASVVDEVMPVPDDEAIRGGRELASTEGLLVGISSGAAVYAARQLAGRPEFKGKMIVTLLPDTGERYLTTELFAFDAYPLD

SEQ ID NO: 3891 - protein, 145 aa, Nostoc sp. PCC 7120
MPLAVGTDAPAFTVKDTNGNTVSLSDFAGKTVVLYFYPKDDTPGCTKQACSFRDAQSDYKNKDVVVLGVSADDEGSHQAFTQKYNLNFPLLADTNKTLISAYDVDGGGYAKRVTYVIGPDGKIVHVDASVNTTTHAGDVLAALGL

SEQ ID NO: 3892 - protein, 326 aa, Arabidopsis thaliana
MPLLLPTSSFKTTATVVIAGVSSIATAMILTVPSVSHFVVSCFPIIYDNTVFLLKPPYLYLVINSIIVCIIATSKLTHKSSSVDDSEISEVVTPIPIPVPVHLPSDIDSGYLNVVHVVSDYTGFVEKIDDVSINPTVEAIRKFPEVQEAEKSKESSDSPEPETEKPKLKNDSPEISILKHSTRKPPRFNQQKSLKSNSEGGNKKTALGVTKPPRRQDTLETTWKKITEGRSTPLTKHLTKSDTWQERAHVQSSPENKEKMTKSENLKDINTPTEEKTVLKREPSPGQEELNRRVEAFIKKFNEEMRLQRLESLAKYNEMVNGGTRL

SEQ ID NO: 3893 - protein, 725 aa, Mycobacterium marinum M
MTHAFSAAGGISGQPINRVDGPLKVTGKARYAADHPIPGLVYAALVCSTVARGAVDHIATGAAMRQPGVLAVLTDFTGVRLPFGTGQVFFFGQPIAVVVATTHEAAAHAVSLVDVSYSTWPQLTDIDAPQAVGYPGRLIADYVRGTPDQVMIRAAGISDLNFSIARNNHNAVELPATIAKWDGDRLTLWDKVQHINGARRSYARAFGMSEERVRLISPFVGGAFGSAGRMWPHQLLTAFAARRMQLPVKLVLTRKQMYSSVGFRPTSRQRMAIGADPSGRLMAMIHEGRTETAQYGIYEDGIVRSPQLMYQVPNMSSTYRVVPLDINLPWFMRGPGAVTGTFALESTMDDLAHRLGIDPIELRLRNEPRIDQINGLPFSTRRLVDCIKQGSTDFGWHRRNSIPGANRDGDSFVGIGMATAAYFTYRSKCAAIARISADGTAEVCSAASDMGPGTYTSMTQIAADALGLPLQRVRFSLGDSRFPPAPAHSASRTTASVGSAVFTVANMLRDKFIRAAVTDPQSPLTGLRPEDVMVTNGHMFSTVATDGPARGESYQDLLRRRGWPALESEHTWTPDDADKRYSTYAYGAVFAEVAIDALLPTVRIRRIYACYDAGRVINPKLAHSQAIGGMIGGIGMALLEGTELDYRDGRVVNANISDYLVPVNADVPALDASFLPAQDTIADPIGVKGLGELVIIAVPAAIANAVFNATGKRVTDLPIRVEQLL

SEQ ID NO: 3894 - protein, 178 aa, Pseudomonas putida KT2440
MANRPLQLTLNGQPVGPVEVPADLAMIDYLHEHQNLTGSRLGCGQGICHACVVIVDNPDGTSEEVRTCITGAHYFEGKKVRTIEGHAKKDEAGNLTLNPIQQKFVDLFAFQCSYCAPGFVNAATVLVETAQRQPLKKSEVEDRIEASLGHHICRCTGYVRYYDATRKVLNDLGLVKEG

SEQ ID NO: 3895 - protein, 188 aa, Erythrobacter sp. NAP1
MGIIGSTIKPFTATAFKAGEDFYEVSEKDLEGKWSVFFFYPADWTFVCPTELEDLGEKYEMLQSMGVEVFAVSTDTHFSHKAWHDTSEKIGKLKFPFLGDQMHVLSNNFGVLREGVGLADRATFVVDPDGVIQIMEITCEGVGRNANELTRKIKAAQYVRDNPGQVCPAAWEEGSETLAPSLDLVGKI

SEQ ID NO: 3896 - protein, 329 aa, Synechococcus sp. PCC 7335
MDIKSGFVGTVGNTPLIRLNSFSEETGCEILGKAEFLNPGGSVKDRAALYIIEQAEKEGTLKPGGTVVEGTAGNTGIGLAHICNAKGYKCVIIIPETQSEEKISLLRTLGADVRTVPAVPYKDENNYVKLSGRLAAETENAIWANQFENLANRQAHYETTGPELWAQTDGKIDGWTAATGTGGTYAGVAMFLKEKNPEARCIVADPMGSGLYSYVKTGEIKPEGSSITEGIGNSRVTGNMEGAPIDDAIQIDDHKALSAIYQLLYKEGLFMGGSVGINVAAAVALAKEMGPGHTIVTILCDGGARYQSKIFNRDWLASKGLWSDEFLPG

SEQ ID NO: 3897 - protein, 173 aa, Rhodobacter sphaeroides 2.4.1
MKTTLTINGEHREIEAEARVTLLDALRHDVGLTGTKKGCDHGQCGACTVIVDGRRINSCLTLLCTQEGAEVTTIEGLGEPGRLSALQEAFLAQDGFQCGYCTPGQICSATAMIEEAAKGWPSWVSEDLEGEAVLSREEISERMSGNLCRCACYPNIVEAIAKVAEARMAEAAE

SEQ ID NO: 3898 - protein, 187 aa, Thermus aquaticus
MSLVGKKVQPFRAQAYHNGEFIEVTEQDFMGKWSIVCFYPADFTFVCPTELEDLQDHYATFKELGVEVYSVSTDTHYTHKAWHDTSPAISKIEYVMIGDPSHQLSRMFDVLDEEQGLAQRGTFIIDPDGVIQAVEINADGIGRNASTLIDKIKAAQYVRNHPGEVCPAKWKEGAETLKPSLDLVGKI

SEQ ID NO: 3899 - protein, 305 aa, Acidovorax sp. JS42
MRVDNILHTIGNTPHVRINRLFGAGANVWVKSERANPGGSIKDRIALAMVEAAERSGALQPGGTIIEPTSGNTGIGLALVAAVKGYQLVLVMPDSMSIERRRLMLAYGARFDLTPKEKGMKGAIARAQELVAATPGSWMPQQFENPANVEVHMRTTAQEIAADFPDGLDALVTGVGTGGHITGVARVLKAQFPQLKVFAVEPSQSPVLSGGQPGPHPIQGLGAGFVPQIMDTSLLDGVIQVEAEPAREYARRAAREEGLLVGISSGATLAAIAQKLPELPAGARVLGFNYDTGERYLSVEGFLPA

SEQ ID NO: 3900 - protein, 457 aa, Coprinopsis cinerea okayama7#130
MPSLRLGNTAPDFEADTTTGRIKFHEWIGDSWAILFSHPGDFTPVCTTELGEVARRAPDFAKRNVKVIGISANGLDEHHAWVKDIESYGAKVAPTQVSYPIIADPDRKIATLYDMLDEQDATNVDTKGLPLTIRTVFIIDPKKKIRLTLAYPASTGRNFDEIIRVIDSLQLGDKHRITTPVNWKQGEDVIVHASVTNDEAKTLFPEHTVHLPYLRTTPLKHGKLVQIEHALAAVAQGTTSLGIKASNGIVIATEKKTSSILIDDSVIDKVAVICPNIGIVYSGMGPDFRILVTKARKSAQAYWKMYGTYPPTRVLTQEIATVMQQATQSGGVRPYGVSLLVAGWDSHRGPTLYQVDPSGSFWAWKASAIGKNMVNAKTFLEKRYNDDISLEDAIHTALLTLKEGFEGQMTEKTIEIGVVTVPAPEELEEENKDGATGRVKPTFRKLSEEEVRDYLAL

SEQ ID NO: 3901 - protein, 198 aa, Helianthus annuus
INLHDYVGDSFTIIFSHPGDFTPVCTTELGAMAAYADKFAQRGVKLLGLSCDDVQSHKEWIKDIEAYNKGKKVTYPIAADPNREIIKQLNMVDPDEKDASGQNLPSRALHIVGPDKKIKLSFLYPASTGRNMDEVVRALDSLIKAPQHKIATPVNWKEGEPVVIAPSVSNDEARKMFPKGFQTVDLPSNKDYLRFTSV

SEQ ID NO: 3902 - protein, 185 aa, Mycobacterium avium subsp. paratuberculosis K-10
MARPARGCNATANSRPIFRRGVTTGGGARSVSPMKPGDTVADFELPDQTGTPRKLSDLLAAGPVVLFFYPAAMTPGCTKEACHFRDLAAEFAAVGANRVGISADPVDKQAKFADLQKFDYPLLSDTDGAVAAQFGVKRGLLSKLLPVKRTTFVIDTDRTVLDVISSEFNMDTHADKALATLRARA

SEQ ID NO: 3903 - protein, 219 aa, Vitis vinifera
MPGLTLGDTIPNLEVETTHGRTKLHDYIGDRWTIIFSHPGDFTPVCTTELGKMAAYTEEFARREVKLLGLSCDDVQSHKEWIKDIEAYTPGSKVTYPIAADPKREIIKQLNMVDPDEKDSSGNNLPSRALHIVGPDKKIKLSFLYPASTGRNMDEVLRALESLQKAAKHKIATPANWKPGEPVLIPPSVSNEQAKRMFPQGFQTCGLPSKKEYLRFTQV

SEQ ID NO: 3904 - protein, 377 aa, Moorella thermoacetica ATCC 39073
MHIGIFTDSYLPYTSGVVRSVVTFSRELRALGHRVVIFAPAYGHHDPERDIYRFRSFRAPTFKEFALAIPVAPGLTNTLRQLGIDLIHVHSPFLMGQLGVRMARRLGLPLVATYHTLYEEYIHYFPLAPGLLRRVVRNYTLSFYNGCRLVITPTDTIARYLQENGLKVPVVSIPTGIELERFQDVDTGWLRRHLQLPREEIILLHVGRLGKEKNISFVLQAFAKIHGEVPATRLVLVGSGPLKGELEHQAHSLGIAQAVTFAGSFSFEQMPAVYAGADLFVFASVTETQGLVVGEAKAAGLPVVAVRARGVQEMVEDGRDGFLVPLDIETFSARIRQLVLDAGLRKEMGRQGRLNASSLAAATMARRLADQYQELLG

SEQ ID NO: 3905 - protein, 212 aa, Burkholderia pseudomallei K96243
MSLRLGDIAPDFEQDSSLGRIKFHEWLGNSWGVLFSHPADYTPVCTTELGLTAKLKGEFEKRNVKVIALSVDSVESHKGWIDDINETQATSVGFPIIADGDRKVSELYDMIHPNANETLTVRSLFVIDPNKKVRLIITYPASTGRNFDEVLRVIDSLQLTDHYKVATPGNWKDGDDVVIVPSLQDPDELKQRFPKGFKAVRPYLRLTPQPNK

SEQ ID NO: 3906 - protein, 200 aa, Synechocystis sp. PCC 6803
MTEVLRVGQPAPDFTATAIVDQSFQTVKLSTYRGKYLVLFFYPLDFTFVCPTEIIAFSDRHSEFTALDTEVVGISVDSEFSHLAWIQTERKMGGIGNINYPLVSDLKKEISQAYNVLEPDAGIALRGLFIIDREGILQYATVNNLSFGRSVDETLRVLKAIRHVQSHPNEVCPVDWQEGDKTMIPDPEKAKTYFETVAEP

SEQ ID NO: 3907 - protein, 329 aa, Synechococcus elongatus PCC 7942
MPKILNRLTEWIGNTPLVRLQETAQQYGAIAEVLLKLEYLNPLGSVKDRTALSLIQSARSQGLITAGTTLIEPTTGNTGIGLAFAAAAEQLRLILVMPDRVSAERIRLAKLLGAKVVLTPAAEAMLGCIAKAQALQQQIPDSVILQQFQNPANPSIHQATTGPEIWRDTDGEVDIVVAGVGTGGTLMGISRYLKPLRPRLQSIAVQPARSPVLSGGAAGSHQLTGMGPNFVSPLVDRSLIDEILSAYEEDAIAVIRTCAAREGIPLGVSSGAIVWAALQVAKRPENAGKRIVAVCPSGSERYLSSTLLADISLESDDVSDWVAIPQGQA

SEQ ID NO: 3908 - protein, 342 aa, Vibrio fischeri ES114
MKIYHINLARGFSGGEQQTLALIKQHQKQQQEIAVIALANSPFHQAVSDLGCEVITVRHYLLGHTISLPKDAVLHVHEGHAIYWAAIQHKVSQTPYIITRRLDNPIKKKWLTTFAYSNAAAIVGISTCVSEVVRTRLPQQHIVTIPDSPVIYPVNHSEVANIRERFKDKFLVIQAGNMIPHKGFDVTVNAAMRLKDPNVHLCLLGDGKQRSELEEQASGLANISFMGRQHNMGDWFAAADLLIHPSYTEGLGSVILEGMNAGLPAIGSHAGGIPDIIEHDKSGLLIEPGNSVELAENIEKIANDATLKERLIEGGREKLTSFMIEHTAALYFKVYQRALQHD

SEQ ID NO: 3909 - protein, 381 aa, Paeonia suffruticosa
MSLLLDSSTNTHLTCPPMELKGDRENGVLLFDSLQKQANLPTEFVWPQGDLVRTQEEELKEPLVDLAGFYTGDELATTHAAELIRTACLNHGFFQVINHGIDANLISAAHDEMNVFFKLPISKKLSVRRKPGGVWGYSGAHSDRYTSKLPWKETLSFGYQGSASHPVVVDYFKSSLGKDFEHTGWVYQSYCEAMKELSLVIMELLAISLGVDRLYYRKYFKDGSSIMRCNYYPPCNEPGLTLGTGPHCDPTSITILHQDQVGGLEVFANNKWQGVRPRPDAFVINIGDTFMALSNGKYKSCLHRAVVNRESERRSLVFFVCPKEDKVVRPPQDLVGREVPRKYPDFTWSDLFEFTQKHYRADVTTLQSFFQWLLSSKPSKF

SEQ ID NO: 3910 - protein, 200 aa, Moritella sp. PE36
MVLVGRQAPDFTAAAVLGNGEIVDNFNFAEFTKGKSAVVFFYPLDFTFVCPSELIAFDHRLEEFQKRGVEVIGVSIDSQFSHNAWRNTSIEDGGIGPVKYPLVADVKHDICQAYGVEHPEAGVAFRGSFLIDTNGVVRHQVVNDLPLGRNIDEMLRMVDALNFHEKNGEVCPAQWEAGKEAMEASPEGVAKYLSKNAKGL

SEQ ID NO: 3911 - protein, 381 aa, Symbiobacterium thermophilum IAM 14863
MRSLMICTEKLPVPPVRGGAIQTYIHAVAPRLGRHHRVTVLGVADPELPDREIRDGVEYWRVPAGTFPQYRDRVVNLLRRAGRKFDVVHLFNRPRLVLPVREALPESRLILSLHNEMFRPEKIGPEEARAAIAATERIVTVSNFIGRGVEALYPEARGKWSTIYSGVDLDRFLPIWTPEARRIRQRLRAEHGLGRGPILLYVGRLSPKKGADVVARALGPVARRYPEATLVLVGSKWYGEDRISDYVAYVRALAARAPMKVLATGYVPADRVHEWFAAGDLFICASQWEEPLARVHYEAMAAGLPIITTARGGNPEVVRGQGNGLVVEEAGSPEIFARAILRLLGDADLRTRMSRRGRALAEAHFGWDRVAAEIRALWERG

SEQ ID NO: 3912 - protein, 915 aa, Silicibacter pomeroyi DSS-3
MMDRPLSTTTDFTLNGALTSASPQPGERLSRMLRERCGAREVKVGCDAGDCGACTVLVDGAPVCACLTPAHQVAGRRVDTLRGLSNDPVAERLSDSFLAHGAAQCGICTPGMMVATTALLRETPEPTETQVLDALGGVLCRCTGYRKIIQAVMRAGAPLLAAPAGDGHSGTAIPRLDGAGKVAGTEAYGDDVAPAGTLEILLVGAPYPRAGFTLGDIESWRSAHAGVVSVLTAADLPGRNRFGVMPGFEDQPVFAETETRFRGEPVAAIVAPPEVAATLDLALFPVTWTRLDAVENIADATAPGAPQLHPDRAGNVMVTGFVACGDAEAALAASGVVVEARYATPFVEHAYIEPEAGYAYLDGDKVVVHACTQAPVLDRDGLQMVLGLGPDRIRIIPTGVGGGFGAKLDMSVQPYLAIAALKTGQPVRLAYSRVQSMQMSTKRHPSELHLRIGASTDGRLKGFSLQGRFNTGAYASWGPTVANRVPVHGSGPYFIRDYRAEAQGVHTHCPPSGAFRGFGVPQAAIAQETLFDELAEKLGLDPLEFRLINALATGQPTVCGQVFTQGVGIRACLQALKPDWTRERAAAEAFNAGNTVLKHGVGIAAGWYGCGNTSLPNPSTIKCGIRADGTLVLHQGAMDIGQGANTVITQLFATALGIPTHRIELIGPDTDLTPDAGKTSASRQTFVTGNAARLAGAALRAAILTRVNAGPEATLTLDQGRIHVTDTDRAHVIDLTDLPADADGYVLGATETYDPPTKPLDKNGQGVPYAQFGYAAHLAVVEIDTRLGTIRPLRFTAAHDVGHAVNPALVEGQVEGGIAQGLGMALMEEYIPGRTDNLHDYLIPTIGDVPPIETLIIEDPDEHGPYGAKGLGEHALIPTAPALLNAIRHATGVAIRQTPVTPARLRAALKEAGHD

SEQ ID NO: 3913 - protein, 387 aa, Myxococcus xanthus DK 1622
MNAPLNVAITCFPTFGGSGMVATEIGLAMADRGHRVHFIARDLPVRLHGANRKVVFHEVTESDYPALQQSGTYPIALASKMIEVASYERLDILHVHYAVPHATAAWMAREVLGHKAPRVVTTLHGTDTTLVGIDPSYLPITRFSITRSDAVTVPSAYLRRATWRGFDIPESVPIDVIANFVDTARYAPVRDRACLRALFPALRDHEPVLIHVSNFRPVKRITDVVAIFTEVHRHRPCRLVMVGDGPERSPAERMLREMGLEGRVAFLGKQDRFEELVAASDVFLLPSEQESFGLAALEALSCGIPVVASDLGGIPELVTHGETGFLAPLGDVPAMARHVLTLVEDAERWQGFSHRARAQVLERFQKEPAIDRYEALYRRLLTGPLRR

SEQ ID NO: 3914 - protein, 454 aa, Rhodospirillum rubrum ATCC 11170
MTAPVDLLAQIGHTPIVRLDHLDTGPCSLFVKLESQNPSGSIKDRIAVSMIDAAERDGRLKPKGRIVEATAGNTGLALALVAARRGYHLTLVIPDKMSREKIAHVRAMGAEVVLTRSDIGKGHPAYYQDLAQRIADETGAFFTDQFNNPDNPIAHETGTGPEIWEQMDGRVDAVVAGVGSGGTLTGLSRFFARVSPQTDIVLADPKGSILADYVTSGRIGAAGSWLVEGIGEDFVPPVSDLSRVTHAYTIPDGESFATARGVLRQEGLLIGSSSGTLLAAALRYCREQTSPKRVVSFVCDSGNKYLSKMYNDFWMADQGLSNRPRFGDLRDLIARRQDEGAVVSVAPGDTLAIAYQRMKLYDVSQLPVLDGTRCVGLIDESDVLLSLRERGGLFDVAVSAAMSTDLETVGPDADADHLVGLFDRGRVAIVVDDSGFLGLITRIDFLNHLRGKAA

SEQ ID NO: 3915 - protein, 157 aa, Solibacter usitatus Ellin6076
MARVTELLVNGSRRRIDVDPDRTLLSVLRDDLDLTGAKFGCGEGQCAACTVLVDGVATKSCLTRIGSVGAKGVVTIEGLAPEGKLHPVQQAFLDADALQCGYCTPGMILGAVALLKRTPNPSESEIASGMNGHICRCGTYPRVVRAIRSAAGQGGRA

SEQ ID NO: 3916 - protein, 218 aa, Zea mays; identical to SEQ ID NO: 3623

SEQ ID NO: 3917 - protein, 201 aa, Legionella pneumophila
MSVLVGRKAPDFTVAAVMGNGEIVDKFNLHEHLKGKYGLVFFYPLDFTFVCPSELIALDHRIEEFKRRNVEVVAVSIDSHFTHNAYRNTPVKNGGIGPVRFALAADMTHSICQSYGVEHPVAGVAFRGAFVIDTNGMVRSQIVNDLPIGRNIDEILRIIDAVQFFEENGEVCPAGWQKGQAGMKASPKGVAEYLSEHSESL

SEQ ID NO: 3918 - protein, 167 aa, Helianthus annuus
DSFTIIFSHPGDFTPVCTTELGAMAAYADKFAQRGVKLLGLSCDDVQSHKEWIKDIEAYNKGKKVTYPIAADPNREIIKQLNMVDPDEKDASGQNLPSRALHIVGPDKKIKLSFLYPASTGRNMDEVVRALDSLIKASQHKIATPVNWKEGEPVVIAPSVSNDEARK

SEQ ID NO: 3919 - protein, 353 aa, Moritella sp. PE36
MKIMVEIIQHLKPGGIEKLVFDIMRLQESNIEVYIVALEGEKSECLTHWPILKRYQERLIFLDKQPGFKLVTVRRLRKVLMSLDTNIIHTHHIGPLLYGVMATLRLTNIQHIHTEHDVWHLLDNKQLQMTKLMLRLNHITLVADAATVGTQLTRVLGRGVAPVTILNGIDTEKFSPSLNHKRYKYRSRVFKIGCAARLVTEKSLDILIKAVADIPNVELYIAGDGPEKQNLTNLVQELDLSTKVKFIGYTDDMVGFYHQLDLFVLTSSNEGLPLSILEAQSCNVPVVCSDVGAVHEGVCKQTGHLIKLNTVNEFHVAIQAQMKRRTEHYPRNFITKHFDIRMMIKAYNQLIKE

SEQ ID NO: 3920 - protein, 491 aa, Blastopirellula marina DSM 3645
MLSPTRDDTSGNVMTTVPPCIVGSSAPEFTLPAALPDLGQQRLQSADYRGRWLAILFYPRDFSFVCPTELTGFSAEKSRFDERGCDLLGISIDSVESHLKWLQTPSSAGGVEGLQFPLASDPHGELCKRFGVWREQDGLPNRGLFLIDPSGQLRYAASYDLSVGRNVEDVLRSLDALQAGGVCPANWKRADGVLDVASLLQPGRVLGHYRIERELGRGAFGQVLQADDLRLERKVALKVISKQDGQTETKLLREARSAASINHPNVCTVYSADTIDTLPTIVMEYLEGRPLVEVIGHGFDQRRFRRMAHKIALGLSAAHAQGVVHGDLKPANILLRENNEPVLVDFGLAQSLRQNGVESAAEVTPSKDAGESPLDPSKTLEFAAATATTSRPGGISGTPAYMSPEQASGERLNESSDIFSLGLIFAQMLTGKSPMSDLSVIEIITSLRRKDFVESLVEKIPSTYRADLVDMLAMKPEERPSAGDVCQRMAQ

SEQ ID NO: 3921 - protein, 1363 aa, Aspergillus nidulans FGSC A4
MAPGVLLQPSQSELEAASPPKAAASLLQLTEEWDDTIRFYLNGTKVILDSVDPEITLLEYLRGIGLTGTKLGCAEGGCGACTVVVSQINPTTKKLYHASINACIAPLVAVDGKHVITVEGIGNVKNPHAIQQRLAIGNGSQCGFCTPGIVMSLYALLRNDPKPSEHAVEEAFDGNLCRCTGYRPILDAAQSFTSPIGCGKARANGGSGCCMEEQKGTNGCCKGSSEETTEDVKHKFASPDFIEYKPDTELIFPPSLWKHELRPLAFGNKRKKWYRPVTVQQLLEIKSIHPDAKLIGGSTETQIEIKFKQMRYGASVYLGDLAELRQFAFHDNYLEIGANISLTDLESVCDQAIERYGSARGQPFAAIKKQLRYFAGRQIRNVASPAGNLATASPISDLNPVFVATNTTLVARSLDKETEIPMTQFFRGYRSTALPPDAIISSLRIPTASEKGEYLRAYKQSKRKDDDIAIVNAALRVSLSSSNDVTSVSLVFGGMAPLTVSARNAEAFLTGKKFTDPATLEGTMGALEQDFNLKFGVPGGMATYRKSLALGFFYRFYHDVLSQIEARSSDLDNSVVAEIERAISTGEKDNEASAAYQQRVLGRAGPHLSALKQATGEAQYTDDIPAQKNELYGCMVLSTKAHAKLLSVNTEAALEIPGVIDYVDHKDLPSPRANWWGAPNCDEVFFAVDKVTTAGQPIGMILANTAKAAEEGARAVKVEYEELPVILSIEEAIEAQSFFERFRYIKNGDPESAFRDADHVFEGVSRMGGQEHFYLETQACVAIPKAEDGEMEIWSSTQNPTETQSYVAQVTGVAANKIVSRVKRLGGGFGGKETRSVQLAGICATAAAKVRRPVRCMLNRDEDIATSGQRHPFYCKWKVGVTREGKLLALDADVYANGGHTQDLSGAVVERSLSHIDNVYRFPNIYVRGRICKTNTVSNTAFRGFGGPQGLFFAESIISEVADHLDLQVEQLRILNMYEPGDMTHFNQELKDWHVPLMYDQVLQESEYFERRKAVEEYNRTHKWSKRGMAIIPTKFGISFTALFLNQAGALVHIYHDGSVLVAHGGVEMGQGLHTKMTMIAAEALGVPLSDVFISETATNTVANTSSTAASASSDLNGYAIYNACTQLNERLKPYREKMPNATLKDLAHAAYFDRVNLSAQGYYRTPDIGYTWGENKGQMFFYFTQGVTAAEVEIDTLTGDWTPLRADIKMDVGRTINPSIDYGQIEGAYIQGQGLFTTEESLWHRTTGQIFTKGPGNYKIPGFRDIPQIFNVSLLKDVEWENLRTIQRSRGVGEPPLFMGSAAFFAIRDALKAARKEWGVTDVLSLVSPATPERIRVSCADPIIERARVKAEEGEKSFFVAI

SEQ ID NO: 3922 - protein, 426 aa, Mesorhizobium sp. BNC1
MTRSVIRAGAPRLLAINNYFYRRGGAEAVFFDHMALFAEIGWDVVPFAMKHERNEPSEWSDYFVSEIEYGNQHGVLTKALDAAKVIYSFEAQRKLSQLIAAAPPTIAHAHNVYHHLSPAIFSTLKNAGIPVVMTAHDLKLACPAYKMLRQGMICEQCKGGRIYNVALNRCVKDSAAVSGVVFIETLVHRFLGLYRDKIDRIVVPSRFYREKLIEWGWPGEKLVYIPNFVDVSQIKTGWTERDYFVYAGRLAPEKGIATLIRAAALAGQKLLIAGTGPEEKALRDLALASGADVTFAGYVSGEKLHRLIGESKALVLPSEWYENAPISILEAYALGRPVIGSAIGGIPEMIREGETGRTAKAGSPEDLARALTDLASLSTAERAAMGMRGRDWISGEFSAEAYRQRTLDLYATLVGSDFGAARPYGT

SEQ ID NO: 3923 - protein, 739 aa, Rhodobacter sphaeroides 2.4.1
MTAHLVFDEPDKRNRLDAMAQEVVGRPIDRSEGALKVSGRAVYAAEQASSLWSEKRADCAYGVFVRATVPLGRVASLASDAARAVPGVLKVLQDPRLVRHPAQGMARKSPPQDPSEVTYFGQPLALVVAESFEAAREAARLVRVDYETSADAELDPAQAPSEFPEKKQSAQGDLEAALREAAVSLDATYSTPSMAAAAMEPHAALAWWEGDRVTLCGAYQMVSQNAEELADALGIAPEKVRVLAPFIGGGFGSKLGIAPEAVAAAVASETLGRPVMVTLARQREFEIAHRRSETEQRVRLALDADGRLTGIGHEARVSNLDGESFSEPVQQATHFTYRGEHRQIRHEVARVNLTCAGSVRAPGEAVGVTIFEMALDELAEKAGLDPLELRLRNIPEEDPETGKPFTSHMLAEALRDGADRFGWSDRRAPGERRQGEWLIGMGMASAVRVNMLHKARVRVTLTGEGALVESSMTDIGTGTYTILTQIVAEMLGLAPDRVRTVLGDTDLPEGSGSGGSIGAASNGSAAFLACEEIRRQIAAGMGCPEEELTLKDGRATCGNRTRDLAEIVTQPLSAEGHFEPGKALKGVRSSTFGAHFAEVAVNEITGEVRVRRMLGAFAAGRILNEKTARSQCLGGMTFGIGMALMEEMVHDRRFGQVVSRDLANYHIPAHADVPALEVHFLEERDSYGGTLQAKGIGELGICGSGAAVLNAIHNACGVRVRDLPATPDKVLDGLCALGR

SEQ ID NO: 3924 - protein, 501 aa, Salinibacter ruber DSM 13855
MCGGRGNSSPRFPGGNIPKRQRPQGRLLPGAFLVPVPRVGRPEDGLRYFLLVEGGCVISKILSQLRVPCGRCVHVPGAVSRSPFARALTCMSPAPNPQSSRADRPSRRSTRRIALFAGAYTHIADGVSLTLNRLVEHLEQQGAEVRVFAPTVDDPAIEDHAGTLTSVPSLPVPGRSEYRLSLGLTPSVRQALDDFAPTLYHIATPDLLGHNALQRAQDTDTPVVTSYHTHFSSYLKYYHLGLLEAPVWGYLRSFYNQCRQVYVPTHAMADVLRGHGIDSDLRLWPRGVDTDRFAPSRRSAAWRRAHGIGTDEVVVAFVSRLVWEKGLDVYADVIDRLERQGVPHHSLVVGDGPAREELETRLPNATFPGFLDGTDLAEAYASSDVFLFPSDTETFGNVTLEAMASGLPTVCADAAGSRDLVDDGTTGRLCSPGHVEAFAEAVRTLVVDERRRDRMGTAARKRAQDFTWPAVLNRMSRYYDEVLPHPPSPSPQDPAPTGATA

SEQ ID NO: 3925 - protein, 168 aa, Helianthus annuus
TIIFSHPGDFTPVCTTELGAMAAYADKFAQRGVKLLGLSCDDVQSHKEWIKDIEAYNKGKKVTYPIAADPNREIIKQLNMVDPDEKDASGQNLPSRALHIVGPDKKIKLSFLYPASTGRNMDEVVRALDSLIKASQHKIATPVNWKEGEPVVIAPSVSNDEARKMFPK

SEQ ID NO: 3926 - protein, 399 aa, Erythrobacter sp. NAP1
MQTDDLRIALFSGNYNYTRDGANQALNRLVGSLLDKGASVRVYSPKVAEPDFPPTGDLVGVPNVRMPVKGRGEYRLPLRLGGAVKRDLEKFKPNIVHLSSPDPAGHAALRWAQQHDIPVLASVHTRFETYPRYYGLAFTEPLVVGILKRFYNRCDALVAPSQSMIDELLAMDMHDDIALWSRGVDRTIFSSQKRDLEWRRSMGLEDDDVAIVFLGRLVMEKGLDVFAETIVQLRKRQVPHKVLVIGDGPAHDWFKDALPGGIFAGFKTGEDLGQALASGDIFFNPSVTETFGNVTLEAMACGLPVVAAGATGASSLVNDGVTGRLVPLTGKKGDKSPDSEGLAEAIAPYCTDPALRMAHGRAGEERSFEYSWDAINQVVADTYIRLIEDRRALQAAEAQ

SEQ ID NO: 3927 - protein, 279 aa, Bacillus sp. SG-1
ADVYLKLEYMNPGSSVKDRIALAMIEAAEESGNLKSGDTIVEPTSGNTGIGLAMVAAAKGYKAVLVMPDTMSMERRNLLRAYGAELVLTPGSEGMGGAIRKAEELAKEKGFFMPQQFKNEANPEVHRRTTGKEIVDQMDSLDAFISGIGTGGTITGAGQVLKENFPNVKIYAVEPADSPVLSGGSPGPHKIQGIGAGFVPDILNTNVYDEVITIQNEEAFDYARRAAKEEGILGGISSGAAISAALKVAKELGKGKKVLAVIPSNGERYLSTPLYQFEN

SEQ ID NO: 3928 - protein, 375 aa, Verbena x hybrida
MAPTKTCLTTLAEENSVHQKFIRDEDERPKVPYNQFSDQIPVISLAGIVDETGGGGDRAEACKKIVAACEEWGIFQVVDHGIDAKLIKDMTRLAREFFALPAEEKLRFDMSGGKKGGFIVSSHLQGEVVQDWREIVIYFSYPINGRDYSRWPDKPEGWRSVTEMYSEQLMKLNCKLLEVLSEAMGLENDALAKACVEMDQKLVINFYPKCPQPDLTLGLKRHTDPGTITLLLQDDVGGLQATRDGGKTWITVQPVEGAIVVNLGDHGHYLSNGRFKNADHQAVVNSNYSRLSIATFQNPAPDAIVYPLKINEGEKAVMEEPITYSEMYKRKMNKDLEIARLKKLATEKKLQEAELEKLANQVEVKPCKGLEEILA

SEQ ID NO: 3929 - protein, 135 aa, Glycine max
NLVLISTGALGMVMGLKLTLPLLSHFLLNQAPHVWTFLLTCFTPPYLYILLNFIVLLPSDPVIYALPPAAVQILAPETANISAVVQTDYNAAASEKYLYETKPTLSYDTATEGNGSVGYVYDENTPVKATANNDD

SEQ ID NO: 3930 - protein, 373 aa, Magnetococcus sp. MC-1
MRRRHLCHLVYRFDVGGLESVLVELMQRLPAERYRHSLVALTEVGVLQQRLQGYGVAFYALHKQPGKDLAVWWRLYRLLRQLRPDLLHSCNLATIEGQLPAFLAGVPRRIHAEHGRDSYDLDGSNRKYRWLRRLLNPLIHHWVAVSGELHDWLAGPLKIQPAKIVTIANGVDLERFHPARADRAQLLAKSGFADEQVIALCVGRLWPVKDQANLLTALALLQQQGRLGGLRLVLVGDGPQRGALEQQVSASGLATVVRFLGTQFDVAPLMAAADLLVLPSLAEGTPLTVLEAMACGVPVVATAVGGVPALLQAGQQGALLPPGDAPALAEALQPYGVVSAKAWRRAQGAQGRARAEAQFGWARTVAAYEGLFQ

SEQ ID NO: 3931 - protein, 782 aa, Silicibacter sp. TM1040
MSVSTPLPHDAAALHVTGQARYVDDIPTPKGTLHLAFGLAPIASGSITAMNLAEVHASDGVVAVLTADDLPFDNDVSPSAHDEPLLAKGEVHYLGQPVFLVVATSHRAARVAARKGDIEYRKTDALLSVEAALAADSRFEDGPRIYEKGDAPAAIQASLHVIEDSFDIGGQEHFYLEGQAALALPQEDGGMIVNSSTQHPTEIQHKVAEAIGLPMHAVRVETRRMGGGFGGKESQGNALAVACAVAARLTGKACKMRYDRDDDMTITGKRHSFRISYRAGFDAEGRITGVEFTHLVNCGWAQDLSLPVADRAMLHADNAYAIPAIRIESHRLKTNLQSATAYRGFGGPQGMVGIERVMDHAAQVLGMDPVELRVRNYYAAPLASKGGSAPRSATSPRDISGKEKDNTTPYGMEVIDFELHEMTAQLVKSADYAARKAEISAWNARHDRLKRGLAFSPVKFGISFTLTHLNQAGALVHVYQDGSIHLNHGGTEMGQGLFQKVAQVAAARFGVDLGRVKITATDTAKVPNTSATAASSGSDLNGMAVKAACDIIRDRMAAHLAEVYQQPQSAVSFEKDQVRIGSERISFEAAAMQCYTGRVSLSATGFYKTPSLEWDRIKGAGRPFFYFAYGAAITEVVVDRLTGENRILRADILHDAGASLNPALDIGQVEGAYVQGAGWLTTEELVWDETGRLRTHAPSTYKIPACSDRPDVFNVALYDGSNREETIYRSKAVGEPPFMLGISAWLALSDAVSRFGEGHPHLNAPATAEEIWRATETLRHGV

SEQ ID NO: 3932 - protein, 303 aa, Clostridium acetobutylicum ATCC 824
MNYIDDIRQIIGNTPIIKINNFGLNSGVNIFAKLELLNPGGSVKDRVGVYMIEDAEKKGKLKKGYTIVEGTAGNTGIGIALAAINKGYNVIFVVPEKFSIEKQTLMKAFGAKIINTPREEGMQGAVKKANELLSTIPNSISLGQFVNQANPLAHYETTGPEIYRDLEGNIDYVVAGAGSGGTYAGVLKFLKEKKPNIKGVLADPEGSTMGGGEEASYDIEGIGNDFIPDTMDMNLVDEVIKVNDAEAFHMVRQLALKEGLIVGSSSGAAMAAAIKLSKKIKSGNIVTIFPDRGDRYFSKNILG

SEQ ID NO: 3933 - protein, 224 aa, Prosthecochloris aestuarii DSM 271
MSQAFDDEMYFEMSMPLLGDDFPELKVQTTHGPMNIPGDLKGSWFVLFSHPADFTPVCTTEFVAFQERVDAFNEIGCKLIGMSVDQVFSHIKWVEWIKENLDVEITFPIVAANDRIASQLGMLHPGKGTNTVRAVFVGDPDGKVRLVLYYPQEIGRNMDEILRAVKALQISDKNKVAIPADWPNNTILKDRVIIPPANNIEDAKKRPEQYDCYDWWFCHKPLDK

SEQ ID NO: 3934 - protein, 517 aa, Glycine max
MTQQPPWQELVATDLHGNEWHFRHIFRGQPRRHLLTTGWSVFVSSKKLVAGDAFIFLRGENGELRVGVRRLMRQQSNMPSSVISSHSMHLGVLATASHAIATGTLFSVFYKPRTSRSEFIVSVNKYLEARSHKLSVGMRFKMRFEGDEVPERRFSGTIVGVGDNKSSVWADSEWRSLKVQWDEPSSILRPDRVSPWELEPLVSTPPTNPQPSQRNKRSRPPILPSTMPDSSLQGVWKSPVESAPFSYCDHQHGRDVYPSTNFNSTATGFLGFGGNCYASNKSIYWSSRMENSTESFSPVALKEFGEKRQGTANGCRLFRIQLHDNSNSNEESLPMVTLSGRMGDDGPLPSLDAESDQHSEPSNVNRSDIPSVSCDAEKSCLRSPQESQSRQIRSCTKVHMQGMAVGRAVDLTRFDGYEDLLRKLEEMFDITGELCGSTKKWQVVYTDNEDDMMMVGDDPWLEFCSIVRKIFIYTAEEVRKLSPKIGLPISEEVKPSKMDSEAVANPEDQSSIVGPGC

SEQ ID NO: 3935 - protein, 980 aa, Gibberella zeae PH-1
MGIPAAFRWLSTRYPKIISPVIEDQPLVMEDGSTIPVDTTRPNPNGEEFDNLYLDMNGIVHPCSHPEDRPAPKDEEEMMMEVFRYTDRVVNMVRPRKILMIAVDGVAPRAKMNQQRSRRFRSAQEAQEKEQDKQELIKMLKQQNGGNLSTESLETVTKKAFDSNSITPGTPFMDILALSLRYWCQYKLNTDPGWAKLKIIISDATVPGEGEHKIMNFVRSQRASPDHDPNTRHVIYGLDADLIMLGLATHEPHFRVLREDVFFQDQKARLCKICGQKGHDAQNCRGEEKKKDGEHDEKDKGVALKPFIWLHVAVLREYLAVELGVPNLPFRFDLERAVDDWIFMCCFVGNDFLPHLPALEIREHGIDTLTKIWKDNLPVMGGYVTKDGHIDLERAQVILDGLAQQEDNIFKRRKEQEDRREANFKRRKLQNEVNGRGGRQGGPSHPKKINGHENPENGLPLQAVGAYTGRHEQTLTHDMVVNRSTAPDANVANKSAASVLKAQLQSQKSLSNPKPENPEQESPSALGKRKASSIEEGNSSVPDAASVSTPSTSAEEGPVDDVRLWEDGYADRYYEKKFHKDPKDIEFRHGVGRAYVEGLAWVLLYYFQGCPSWEWYYPYHYAPFAADFKDIAKMNISFEKGRVSKPFEQLMSVLPAASRHALPEVFHDLMLNPESNIIDFYPEDFEIDLNGKKFAWQGVALLPFIEMPRLLAAVQSKYPELSAADSARNEMGRDVLIFSEGHESLYDEVLTKFYSKKQGDSKFKLNPKKSDGLSGRVEKKEGYVPHSELKYPLERNSMPDLDYDRSVSVYYDFPQASQTHKSMLLRGVQLPTPALTQNDIQDMRSRANRGGRGGFGRGHDRGGYNGPGMTRGSQYNRNQGGYGRGNGHYPPAPASHVPPPPGAPGFGIGVPPPPPPNSYHNQPYDNRYGASSGYNQYRGPPHPANGAPGYHGHGDASSERGRGSGGYSSRGRYRDNRSYR

SEQ ID NO: 3936 - protein, 273 aa, Arabidopsis thaliana
MSMASIASSSSTTLLSSSRVLLPSKSSLLSPTVSVPRTLHSSSASSSSLCSGFSSLGSLTTSRSASRRNFAVKAQADDLPLVGNKAPDFEAEAVFDQEFIKVKLSEYIGKKYVILFFYPLDFTFVCPTEITAFSDRYEEFEKLNTEVLGVSVDSVFSHLAWVQTDRKSGGLGDLNYPLVSDITKSISKSFGVLIPDQGIALRGLFIIDKEGVIQHSTINNLGIGRSVDETMRTLQALQYVQENPDEVCPAGWKPGEKSMKPDPKLSKEYFSAI

SEQ ID NO: 3937 - protein, 326 aa, Triticum aestivum
MVVLASTPAVDHIPLLRSPDPGDYFSGMPVVDLSSPGAPRAIADACERFGFFKLVNHGVPADTMDRLESEAVRFFSLPQADKDRSGPAYPFGYGSKRIGLNGDMGWLEYLLLAVESASLSGACTVPSCALFRAALNEYIAAVRKVAVRVMEAMAEGLGIAPVDALSAMVTAGGSDQVFRVNHYPPCHALQGLGCSATGFGEHTDPQLISVLRSNGTSGLQIALQNGQWVSVPSDRDAFFVNVGDSLQVLTNGRFKSVKHRVVANSLKSRVSMIYFGGPAMTQRIAPLPQLLGAGEQSLYKDFTWGEYKKAAYNSRLGDNRLAQFHR

SEQ ID NO: 3938 - protein, 187 aa, Marinobacter sp. ELB17
MGIINSEIKPFNATAFKRGEFVEISETDVKGKWSVFFFYPADFTFVCPTELGDVADKYAELQKMGVEVFSVSTDTHFTHKAWHDSSETINKIQYYMVGDQTGNITNNFGVMREGQGLADRATFLIDPDGVIQAVEITAEGVGRDASELMRRVKAAQYVRKHPGEVCPAKWQEGEATLSPSLDLVGKI

SEQ ID NO: 3939 - protein, 305 aa, Bacillus cereus ATCC 10987
MKLCENVTELIGDTPVVRLSKFIPEDAADVYVKLEMFNPSRSVKDRAAYNLLHVAEENGHIKPGDTIIEPTSGNTGIGLAMNAAAKGYKTILIMPDNMSKERINLLKAYGAEVVLTPAEQRMPGAIAKALELQKQIPNSFIPQQFENPANPNIHRYTTALEIYEQMDGELDAFVATAGTGGTITGTGETLKEKLPNLYIAVVEPKGSPVLSGGVPGPHKLVGTSPGFIPKNLNTEVYNEIIQIADEEALTTMRNLARQEGLLVGPSSGASVYAAIMIAKRLGAGKKVLCIAPDTGERYLSMGLFE

SEQ ID NO: 3940 - protein, 158 aa, Fulvimarina pelagi HTCC2506
MTVNGRKVSGECEDRTLLVHFLRDNLHLTGTHVGCDTSQCGACVVHLDGKAIKSCTMLAVQASGSDVTTIEGIANGQDLNPVQTAFKEHHGLQCGFCTPGMIMTITDMINRHGSDLDEETVREELDGNICRCTGYHNIVKAALDAASKMGTPQQVAAE

SEQ ID NO: 3941 - protein, 158 aa, Thermus thermophilus HB27
MPAMEVGTLAPDFALPDQEGRTHRLSDYRGRWVVLYFYPKDDTPGCTKEACGFRDQMGSLKALDAVVLGVSADDVESHKRFAEKYGLNFPLLADPERKVIGAYGAWGKKNLYGKEVEGVLRQTFLIDPEGRIARVWRKVSPEGHALEVAEALKALRGA

SEQ ID NO: 3942 - protein, 781 aa, Fulvimarina pelagi HTCC2506
MGVEGIGAKVLRKEDRRFITGQGRYTDDMSVPGMKYAAFVRSPHAHAKITSIDASAAREMPGFIEFLDGQQLKADGIGNIICGWAVTSKDGSPMKMGAYPALADGIVRYVGQPIGIVIAETQAQARDAAEGVMIEYEELPVVVNGPDAMKAGAPQLHPEAENNICFDWELGDADATAKAFENPAKVIKLDIVNNRLSPNPIEPRAALGHYNSAEDHYTCYTTSQNPHVARLVMSAFYNVAPEHKLRVIAPDVGGGFGAKIYIYPEEIVCLWASKRTHVPVKWTSDRTEAFLTDAHGRDHVSDVEMALDANNKILGLRVNTVANLGAYMSLFSSATPTYLYATLLSGQYNIPAIYANVKGVYTNTAPVDAYRGAGRPEATYVIERTMETAARELGMSPAEFRRINFIREFPHQTPVIMNYDTGDFEATMEAAMKTADVAGFEGRRQEAKSRGKLRGLGMSCYIEACGIAPSKAVGSLGAGVGLWESAEVRVNPVGTIEILTGSHSHGQGHETTFAQVVSQRFGVPVDNVQIVHGDTDKVQFGMGTYGSRSGAVGCSAISKALDKVEAKAKKIGAHLLEADEGDIVIENGEVKVAGTDKKLAWHEVCLGAYTGHNLPDGMEPGLKEGAFYDPQNFTFPAGCYICEVEVDPDTGVTEIVQFVAADDFGNIINPMIVEGQVHGGLAQGIGQALLEGVNYDETGQLVTASYMDYAMPRAWDLPMFKVETLVTPCTTNPLGLKGCGEAGAIGSPPAVMNAITDAIGNNDLTMPATPEKVWNAINAVN

SEQ ID NO: 3943 - protein, 148 aa, Bradyrhizobium sp. BTAi1
MEVTINGKRHQVTMADDTPLLWVIRDELGMTGTKYGCGIAQCGACTVLIDGQVTRSCVTPVGSVAGQQVTTIEAISDDAVGRRVVEAWVANQVPQCGYCQSGQVMAATALIKQTPKPSEQDIAAAMVNLCRCGTYNAIAAAVRQVAQG

SEQ ID NO: 3944 - protein, 735 aa, Xanthomonas axonopodis pv. citri str. 306
MKFDTPAGTNPIDQLTVVGKPVDRIDGPLKTTGQAPYAYEHHDLPGQAAYGHVVGAGIAKGTIRSIDLSAARKAPGVLGIVTAQNAGKLQKGKFNTAKLLGGPEIAHYHQAIAVVVAETFEQARAAGQLIKVDYGRHVGAYDLEKARAGATVTKKGDAPNSNVGNFDAAFATAPVQLDAEYSTPDHSHAMMEPHASIAMWDGDKLSVWTSNQMINWGAGDLARTLGIPRENVRIMSPYVGGGFGGKLFLRADAVLASLAARQVGRPVKVMLPRPLIANNTTHRPATLQRIRLAAGRDGKLTAIAHESWSGDLPDGSPEIAAAQTQLLYAGANRLITTRLAVLDLPEGNAMRAPGEAPGLMALEIAMDEMAEKLDMDPVKFRIVNDTQVDPENPQRPFSQRQLVTCLEDGARRFGWSKRKAKPASTRDGRWLVGMGVAAAFRNAPVMTSGARMRLEQGGRVVVETDMTDIGTGSYTIIAQTAAEMLGVPLNWVDVLLGDSSFPASAGSGGQWGANSSTAGVYAAAVKLREAVAKQLGLDPASAEFADGYVRAGGKRVALGDAAANGALVVEDKIEFGDLSKTHQLSTFGAHFVEVGVDIATAEVRIRRMLAVCAAGRILNPKSARSQVIGGMTMGAGAALMEELAVDKRLGFFVNHDLAGYEVPVHADIPHQEVVFLEENDPLSSPMKAKGVGELGICGVAAAIANAVYNATGVRVRDYPVTLDKLLPHLPEMLRA

SEQ ID NO: 3945 - protein, 160 aa, Mycoplasma penetrans HF-2
MLIGRKYINFFSKAYSGKTDSILNYDLTKNMGKNGTLLFFIHQDFYPTSTSEIIELNQKHQNFVNLGVNPIVISVDSELTHQQLVKNLKDKKTINNMSLDFVSDISKEISRDYLVLFEEGYSLPSTIFIDKKGIIKYFSTGSVEVKRDIDSILKTIATYQ

SEQ ID NO: 3946 - protein, 157 aa, Helianthus annuus
MSIVSSLFGGRRSSVFDPFSLDVWDPFRDFPISSSSDVSRETSALVNARVDWKETPEAHVFKADLPGIKKEEVKVEVEDGNILKITGERNIEKEDKNDKWHRVERSSGKFTRRFRLPENAKMDQVKAAMENGVLTITVPKEEVKKPDVKSIGDLWLE

SEQ ID NO: 3947 - protein, 222 aa, Xanthomonas axonopodis pv. citri str. 306
MLEMPAMRDIKMTRREVLIAGTASAASVAATQSMTATAATAMSQRPASEPANASSQVGFEVNGKPVTLTLDNRTTLLDALREHLHLTGTKKGCDHGQCGACTVIVDGQRMNACLSLAVMHEGAKVTTIEGLGTPDKLHPMQAAFVKHDGYQCGYCTPGQICSAVAVLDEVKRGIPSHVTEDLTGKLRLTTPELQERMSGNICRCGAYSNIVEAIDDVAGGRA

SEQ ID NO: 3948 - protein, 212 aa, Legionella pneumophila subsp. pneumophila str. Philadelphia 1
MFIVLIKTIDFIYLAVSPKFNNENGVNLMRRKLMITVGNKFPEFQLKATVANDVSNAFQMISNETYRGKWLVVFFWPKDFTFVCPTEIAEFGRLNSEFADRDAQILGGSTDSEFVHLAWRNQHPDLNNLPFPMLADVKRELTANLGILDDEEGVAQRATFIVDPQGITRFVMVTDLNVGRNPAEVLRVLDALQTDELCPCNWKKGEETIHIK

SEQ ID NO: 3949 - protein, 187 aa, Klebsiella pneumoniae subsp. pneumoniae MGH 78578
MSLINTKIKPFKNQAFKNGEFIEVTEKDTEGRWSVFFFYPADFTFVCPTELGDVADHYEELQKLGVDVYSVSTDTHFTHKAWHSSSETIAKIKYAMIGDPTGALTRNFDNMREDEGLADRATFVVDPQGIIQAIEVTAEGIGRDASDLLRKIKAAQYVASHPGEVCPAKWKEGEATLAPSLDLVGKI

SEQ ID NO: 3950 - protein, 467 aa, Silicibacter sp. TM1040
MTITFHLNGEQVSLAKPDPTTTLLDWLREERGLTGTKEGCNEGDCGACTVMVTDQSGAKALNACILFLPQLHGKSVRTVEGVAAPIGTLHPVQRAMIDHHGSQCGFCTPGFVMSMVTAHTNGATDHDDQLAGNLCRCTGYAPIIRAAEAAQDAPVPDHIAQDRSFTFSEIPLGEDADRGAEPPNALRPCSSDDLARVYAARPEATLIAGATDVGLWVTKHLRQLRDVIFLDGCRDLKKITISDAEVRIGAMADMNHLRAALAPLHPSYAEMLRRYASQQVRAAATLGGNIANGSPIGDNPPALIALRATLHLRKGDMRRSLPLQDFFIDYGKQDRAPGEFIEAVSFDRQPDSLRVYKLSKRFDQDISAVLGAFNVTVVNGNVTAAVIAFGGMAAIPKRATHVEEALVGRPWTEATLVAAQATFDHDFTPLSDMRASAAYRLDCARNMLRRYFSDLNGAPEHVLEVQP

SEQ ID NO: 3951 - protein, 163 aa, Aeropyrum pernix K1
MPGVGEQAPDFEGIAHTGEKIRLSDFRGRIVVLYFYPRAMTPGCTREGVRFNELLDEFEKLGAVVIGVSTDSVEKNRKFAEKHGFRFKLVSDEKGEIGMKYGVVRGEGSNLAAERVTFIIDREGNIRAILRNIRPAEKHADLALEEVKKLVLGKKAERAGEVI

SEQ ID NO: 3952 - protein, 362 aa, Citrus sinensis
MAPSTLTALAGEKTLNPSFVRFQDERPKVAYNEFSNEIPVISLAGIDDVGGKRAEICKKIVEACEDWGIFQVVDHGVDAKLISDMTRLATEFFALPPEEKLKFDMSGGKKGGFIVSSHLQGEVVKDWREIVTYFSFPKQSRDYSRWPDKPEGWMEVTKEYSDKLMGVACKLLEVLSEAMGLEKEALTKACVDMDQKIVVNYYPKCPQPDLTLGLKRHTDPGTITLLLQDQVGGLQATKDNGKTWITVQPIEGAFVVNLGDHGHYLSNGRFKNADHQAVVNSNSSRLSIATFQNPAPEATVYPLKIREGEKPVLEEPIPFSEMYRRKMSKDLELARLKKLANEKKQYSEKAKLDAKPIEEILA

SEQ ID NO: 3953 - protein, 360 aa, Bacillus sp. SG-1
MKVLHVINNLEFGGAENLLKELISIQVEEGIEVDLYLLERSGMKDGGVTLPGVKLLEAQASSRYSLTNLFFLRNIFHHYDIIHVHLFPSQFWVASAKFVSKKNPVLITTEHSTMNRRRNKKFFYLLDLFMYGQYNKIVCISEGTASGLIERYKSLEKKIEIIHNGIRSARFLEIDPVHIEGLTVKDPVILTVGRLEKEKNHEVIIKALKFTSNVHLLVAGDGKRKGELESLAINSGVSSRVHFLGERQDIPELMKMASIYIQPSKWEGFGLAVLEAMTSGLPVIASDIPGLREVVGSSGLLFDPENVQDLVKKIEDLLNDPGLIKELRLKSIERSKEFSVEKTAEQYLKLYEKLSKKKLH

SEQ ID NO: 3954 - protein, 327 aa, Streptomyces avermitilis MA-4680
MPDKTFPGILSTVGNTPLVELERLLPDFGSRVFGKIERFNPGGSIKDRSALGMLLAGIRSGEVQPGRTVIIESSSGNLAVGLAQICRYFGLRFICVVDGKTTEQNLAILSAFRAEVEVVTERDELTGEFLPVRLRRVRELVAATPDAYWPNQYASLLNPKAHETTMREIEESLDGAVDFLFCSVSTFGTLRGCRDHIRARGLDTTIVAVDALGSAIFGLESTQRLIPGHGASVVPPLMDASAADEVVHISDLECVVACRRLIGREAVLAGGSSGATVAALWKIRHRIPEGSNCVLIFPDGGDRYLDTIYSDAWVNQNFGDVAHLWKD

SEQ ID NO: 3955 - protein, 187 aa, Pectobacterium atrosepticum SCRI1043
MSVINTQVKPFKNMSFKDGQFIEVTEKNIEGKWSVFFFYPADFTFVCPTELGDVADYYDEFQQRGVEIYSVSTDTHFTHKAWHSTSETIGKIKYTMIGDPTGQLTRNFENMREAEGLADRGTFIVDPQGIIQAVEITAEGIGRDASDLLRKVKAAQYVASHPGEVCPAKWKEGEATLAPSLDLVGKI

SEQ ID NO: 3956 - protein, 401 aa, Parvularcula bermudensis HTCC2503
MTDQENMPQGRSHRIKDLGGRVRSLTRARQKFEMPNAESPNPQSGLKIVIATDAWKPQLNGVVTTLDTLGRILTKFGNEVLYITPQDFKSIPMPTYSEIRLSLFPNRKVASMLNKFKPDAIHIATEGPIGRATRRFCRRRKYPYTTSFHTRFAEYAHERTGFPISWGYALLKDFHKHGEAMMVATPGLIEELSGRGFENMRLWERGVDTDQFRPLDSDVLKDLPRPIFTYVGRIAVEKTLEDFLDLDLPGSKVIVGAGPQEAELRQKYPAVHFVGKHFGDDLVKYYSASDVFVFPSRTDTFGLVNVEALACGVPVASYPVRGPLEILADAPPGCGCLDEDLKTACMTALETRDPEACRAHALTFSWDAAARQFIANLEIPGFDDQFWLRSAKMIEDPILPT

SEQ ID NO: 3957 - protein, 368 aa, Kineococcus radiotolerans SRS30216
MIRRIAVVALGGLRRGAVASLARRDAEFAAAQGDQVTLVALGGREEPLSLPSGVRIVRVGGPLPKTARHLRRRAAGLSRLLELVAAAPAIGAVVRSHDVVVSHGGLEAALASTLPGRARTVFRMHNYQAGVAAAGRSYRRGERWLFAVADRVGVRRSNAVVAVSATLADQVARGAGRRPEVAINGLTPAATPDVDAPRDVDVLFVGRLVAEKGVRLLPDLAGVLREGETLVVAGQGVLGADLARTLAPSPRARLLGEVPAHQVPSLMARAKIVVVPSLDEPYGMVVVEALTAGACVVASAVGGIPEILADGEGGRLLPPGATAAWRAEVRRLLDDPTARKALVAAGRQHAARHDESKTLPALHGVYAG

SEQ ID NO: 3958 - protein, 360 aa, Vibrio cholerae
MKKTKKNGDYPEIIVSDIGALDMPTYEVHQSVPINRYRMKVSKIPIINFLISNYKAYRIYRNKFEEDSERIVIARFHLSALFAKLAGFKKVIYLVPSVVKFQCEKEMSETSTKYIRFRSILWIYIHNYLQKLALNNSDVFVFSETMRQQCSEVVGYELSAKITKPGVDSVRFKPINDKSTSIRSQLLINDEKKIVLFVGRFVKAKCVDYIITAVSSLDECVLLLIGEGQELESYREKISKLKLQDRVIIIPPTRDVEKYYSSADVFVMSSSYEPLGQTIIEALSSGLPVAAFKNSNNVKTATQELGMDDYICYAKDFSSQELSIAISTILSSSYDREKIHRSTVDKFSWSRLYTELVGRY

SEQ ID NO: 3959 - protein, 355 aa, Thiomicrospira crunogena XCL-2
MTNKLYQNTQQENWLDTKGIQRLTLVSDAWRPQVNGVVTTLTQLVQQLQKAGIEVDVIHPNDYTTIPLPTYPEIPFVWRADGLEKRITGFNPDAIHIATEGALGWKARRIALRHRLPFTTAYHTKYPEYIHKRFPIPTRWVYHILKRFHRPAYNTFVPAPSILTELKTKGFPHLVLMTRGVDTELFNPSRAHNLAQQKPCYLYVGRVAPEKNITAFLDLQLPGQKIVVGKGPDLENLKAAYPDVDFVGPKAGIELAEYYANANVFVFPSLTDTFGVVNLEAIASGTPVAAFPVTGPKDIITQGVNGILDHNLKTAIEKASLLKAPHSIANSIPDYTWQAAAQQFLNHLAITPKST

SEQ ID NO: 3960 - protein, 323 aa, Mycobacterium sp. MCS
MARYDSVLEALGNTPLVGCPHLSPRWDDDENGPHVRLWAKLEDRNPTGSIKDRPALRMIEQAERDGLLQPGSTILEPTSGNTGISLAMAALLKGYQMICVMPENTSIERRQLLELYGARIIFSPAEGGSNTAVAHAKELAAANPDWVMLYQYGNPANADAHYYGTGPELLADLPEITHFVAGLGTTGTLMGTGRFLREKVPGVQIVAAEPRYGEGVYALRNIDEGFIPELYDPDVLTTRFSVGSFDAIKRTRELVTKEGIFAGVSTGAILHAALGMAAKAIKAGERADIAFTVCDAGWKYLSTGAYTGSLVDAEDALEGQLWA

SEQ ID NO: 3961 - protein, 419 aa, Azoarcus sp. BH72
MLPAPILRSPEDIPVRILHILDHSLPLHSGYTFRTAAILREQRALGWETFHLTTPKQGFSAATEEEADGLLFHRTPAPNGAGLVSQMRLTAARLDELVGTLRPDVVHAHSPVLNVLPALWVARRRGLPVVYEMRASWEDAAVDHGTTTEGSLRYRVSRALESFALHRADQVTTICEGLRGDITVRGVAADKVTVIPNAVDADSFRFGAQADAALRQQLGLEGCTVIGFAGSFYGYEGLSLLVSALARLVERFPAVRLLLVGGGVQEAALRAQAQEQGVAERVVFTGRVPHAEVQRYYELIDVLAYPRLPIRLTELVTPLKPLEAMAQGRMFVASDVGGHRELVRHGETGFLFEAGKVDALADAITAVLENRAQWPAIRAQARAFVERERTWKNSVARYREVYRRALASRGRDMTLAEAR

SEQ ID NO: 3962 - protein, 381 aa, Thiomicrospira crunogena XCL-2
MKVFLFTDTLGDLNGVSRFIQDMGEQADHHPDVNFELHIATSTSKPIPDTSYIHNLPYRLKVAMPFYQELDLVLPDRKAIRQFLIKQQPDHVHISTPGPFGWAAKKEAEKLSIPLFGTYHTDFPAYLYDLTRSHWVKKQTDKIMTRFYQNFAHIFSRSDTYIDILQKDLKLPKDRLSTLFPGTHLQRFHPDHRSPFIWEAFNLPPQRLKILYVGRINIEKNIPFLLEVWQTLYQKNPDLKADLILVGEGRYRKWADKMRPFHIHFIGPIQGQTLSELYASSDCFVFPSTTDTLGQVIMEAQASGLGCLVSDKGGPQSLLHKNSGQVIEANNIQAWVNALLEVLTNEEIRNLWANNSRPNAEQYDIVKSFQQFRYQHLTEVP

SEQ ID NO: 3963 - protein, 355 aa, Fulvimarina pelagi HTCC2506
MGRYLFATDAWEPQVNGVVRTLAHLKDALERRGHATSILSPADFRTFPCPTYPDIRVALATTNKAAARITAFEPTNIHIATEGPVGSAMRRACLAEGLPFTTSFHTRFPEYLRARAPVPQNWSYAWLRRFHAPSAACLVPTNVMKQQLEERGFRDLVTWTRGVDHQVFRPYPPLPLELPKPLFVTVSRLAPEKNIEAFLDLDLPGSKLVVGDGPSRAELMARYPNVHFAGLQTGEALARYYASADVFVFPSLTDTFGIVLLEAIACGTPFAAFAEPGPLDVLDDSQAGSISKDLKTACLKALELNRSDALARASDFTWDACAEIFVQATKLEGPSVPTARHVDVRKHKEPETLSA

SEQ ID NO: 3964 - protein, 240 aa, Oryza sativa Japonica Group
MAAPFALVSRVSPAARLPIRAAWRRARPTVGLPSSGRARQLAVASAAQENRDNTAVDVHVNQDGGNQQGNAVQRRPRRSSALDGISPFGLVDPMSPMRTMRQMLDTMDRIFDDVALGFPATPRRSLATGEVRMPWDVMEDDKEVRMRFDMPGLSREEVKVMVEDDALVIRGEHKKEEGEGAEGSGDGWWKERSVSSYDMRLALPDECDKSKVRAELKNGVLLVTVPKTEVERKVIDVQVQ

SEQ ID NO: 3965 - protein, 391 aa, Clavibacter michiganensis subsp. sepedonicus
MRVAVVSESFLPTVNGVTTSVCRVLEHLRDRGHQVMVIAPDAGAPSEFAGFPVHGVPAFAYRQFPVGIPSPQVLRLLTDFTPDVLHTASPLFLGAQAIAAATRIDTPSVAVFQTDVAGYARRNRLAATAPYVWRLVRWIHQGADLTLAPSSAAAADLAAAGVERVARWGRGVDLDRYHPRNRAMEDAVALRHRVAPGGETVVGYVGRIAPEKQLERFSALRGIPGVRFLIAGDGPSQASARRALAGMPVTWLGRVGGRELAAAYAAMDVFVHTGTEETFGQTVQEAHASGLPVVAPHAGGPIDLVAHGTDGFLFDPASPRDAHLRRLVDELVASEPMRLRMGEAGRRAVLGRSWATIGDELIGHYGRAVSARRSALQAAGPADAGPVPVVA

SEQ ID NO: 3966 - protein, 240 aa, Zea mays
MAAAPFAIAGRLSPVARLPVRAWRPAHGFASSGRARSLAVASAAQENRDNSVDVQVSQNGGNRQQGNAVQRRPRRATALDISPSPFGLVDPMSPMRTMRQMLDTMDRLFDDAVGFPMGTRRSPATTGDVRLPWDIVEDEKEVKMRIDMPGLARDEVKVMVEDDTLVIRGEHKKEEGAEGGSGGDGDGWWKQRSVSSYDMRLALPDECDKSKVRAELKNGVLLVTVPKTEVERKVIDVQVQ

SEQ ID NO: 3967 - protein, 201 aa, Alteromonadales bacterium TW-7
MGVLVGRQAPDFTAAAVLGNGEIVDSYNLHETIKGKKAVIFFYPLDFTFVCPSELIAFDKRFEEFKKRGVEVIGVSIDSQFSHNAWRNTPVADGGIGKVQYALVADVKHEICKAYDVEHPEAGVAFRGSFLIDEEGNVRHQVVNDLPLGRNIDEMIRMVDALAFHSENGEVCPAGWTEGKKGMDASPEGVAKFLSENEGEL

SEQ ID NO: 3968 - protein, 158 aa, Clostridium tetani E88
MFKVLGNTVLTLNVNGEDRDVMVKPSDILLHTLRHEFGLTGAKPGCENGDCGACTVLIDNWPIKSCLMLTVEAVGKRILTVEGLKDAPIQKAFVENWGFQCGYCTSGFLMVCHALSKIHPNANDHVIEQWLQSNLCRCTGYEEIENAIKSILNGEVKN

SEQ ID NO: 3969 - protein, 224 aa, Penicillium marneffei
MATPERVPLRLGSTAPNFKAETSKGPIDFHEFIGDNWVVLFSHPDDFTPICTTELGAFAKLEPEFAALGVKLIGLSANNVDSHHAWIKDINEVNKANLTFPIIADYDRKIAYLYDMLDYQDTTNVDQKGLPFTIRTVFVIDPNKKIRLTLAYPASTGRNTAEVLRVVQALQTTDKKGVTTPINWLPGDDVVIPPTVSTEDAEKKFGKDNIRVVKPYLRFTNIGK

SEQ ID NO: 3970 - protein, 153 aa, Mycobacterium avium subsp. paratuberculosis K-10
MLSVGTPAPDFTLRDQNQQRVTLSSYRGSKNVLLVFFPLAFTGICQGELDQLRDHLPEFENDDSAVLAISVGPPPTHRIWALESGFTFPVLSDFWPHGAVSQSYGVFNDEAGYSNRGTFVVDRSGIIRFAEMKQPGESRDQRLWTDALAALKA

SEQ ID NO: 3971 - protein, 306 aa, Moorella thermoacetica ATCC 39073
MKIARDVTQLIGQTPILRLNRLVEDGMEVYLKIEFFNPGGSVKDRIALSMITAAEADGRLKPGDTIVEPTSGNTGIGLAMVAAVRGYRLILVMPETMSIERRKLLAAYGAEFVLTPGNLGMKGAVDKANELVRENPGYFMPQQFENPANPAIHRQTTAREILEQMDGKVDAFVAGVGTGGTLTGVGEVLKKEIPGVRIVAVEPAASPVLSGGQPGPHKIQGIGAGFVPPVLRREVVDEIITVTNEDAMETARRLAREEGLLVGISSGAAAFAALQVARRLGRGKRVLAIAPDTGERYLSTELFKIG

SEQ ID NO: 3972 - protein, 125 aa, Glycine max
MACSATSASLFSANPTPLFSPKPSLSLHLNPLPTRPSPSLTRPSLSLTRPSHSRRSFVVKASSSELPLVGNTAPDFEAEAVFDQEFINVKLSDYIGKKYVVLFFYPLDFTFVCPTVLAPCMDPNR

SEQ ID NO: 3973 - protein, 160 aa, Mycobacterium tuberculosis
  misc_feature (52)..(52): Xaa can be any naturally occurring amino acid
KVPRGSHMLNVGATAPDFTLRDQNQQLVTLRGYRGAKNVLLVFFPLAFTGIXQGELDQLRDHLPEFENDDSAALAISVGPPPTHKIWATQSGFTFPLLSDFWPHGAVSQAYGVFNEQAGIANRGTFVVDRSGIIRFAEMKQPGEVRDQRLWTDALAALTA

SEQ ID NO: 3974 - protein, 652 aa, Trichophyton equinum
MRFAASIAVALPVIGAASAQGFPPPVEGVTVVKSKFDENVKITYKENDICETTEGVRSFTGHVHLPPDDNDFGVYRNYSINTFFWFFEAREDPKNAPLSIWLNGGPGSSSMIGLFQENGPCWINDDSKSTTNNTFSWNNKVNMLYIDQPNQVGFSYDELTNITYSTINDTVYVADFSNGVPAQNLSTLVGTGSSQNPWATANNTVNAARSIWHFAQVWFQEFPEHKPNNNKISIWTESYGGRYGPSFASYFQEQNEKIKNHTITEEGEMHILNLDTLGIINGCIDLMFQAESYAEFPYNNTYGITAYTKEKYDAIIHDIHRPDGCFDKLAKCREAAKEGDPHFYSNNATVNAICADASSSCDNYLMDPYQETNLGYYDIAHPLQDPFPPPFYKGFLSQSSVLSDMGSPVNFTQYAQAVGKSFHGVGDYARPDVRGFTGDIAYLLESGVKVALVYGDRDYICNWIGGEQVSLGLNYTGTAEFHRAGYADVKVNSSYVGGLVRQHGNFSFTRVFEAGHEVPGYQPETSLKIFERIMFNKDIATGELDIAQKPDYGTTGTESTFQVKNEIPPSPEPTCYLLSADGTCTQEQLKAIKEGTAVVENYIIKSPAASKGDPPPTTTTSPTAAPTAGSAMLQAPVAMLAISVLTALAFFL

SEQ ID NO: 3975 - protein, 383 aa, Porphyra yezoensis
MAFVLSASPALTGRSPTPALCGARSSFATGTPVVAAAAAATPSLRQCEAFPMAAAMMSAAAMSKKAPVSDATGLIGNTPLVQLHKIPASAGCVANIYAKLESMEPCSSVKDRIGRGMILDAEAEGKITAGKTVLVEPTSGNTGIALAFIAASKGYKLILTMPDSMSIERRMVLRAFGAEVVLTPAAGGMKAAVSKAESIAAETPDSFILQQFANPSNPKAHYETTGPEIANAIDCDVFVSGVGTGGTITGAGRYLKEKNPETRVVAVEPVESPVLSGGKPGPHKIQGIGAGFVPAILDTAIYDEVVTVSSADSIAMARRIAVEEGLLSGISTGAALAAALEVGKRPEMAGKNVVFIAPSFGERYLTSALFDEQREEAYAMKAE

SEQ ID NO: 3976 - protein, 82 aa, Triticum aestivum
GGGNEEPATANGLNLQEQIRSNETGVEPLTDAASVLPSTNNDRDDGANLNPRRIENIFSHPRQPRSRSVRPRLCLSIDSDSE

SEQ ID NO: 3977 - protein, 384 aa, Bacillus sp. SG-1
MEEEVHKVAFVATVFRHLEAFHLPFIKMLQKKGVEVHAISRKGNGKQALVDEQVKCHEIEFRRFPFHPANISALYHLIQNFKKEKYKLVHVHTPVGSILGRYAAKAAKIPKVIYTAHGFHFHEQGSTFNWLFYPIEWFFARWTDVLITINTEDAARASSFPVRKKAIFIPGVGVDTGKFGPVKKASVRKQKREELGIPESAFVILCVAEINKNKNQVQLLRAIRLLKTRYPQIKCLLVGEGNGERELKKYVKDMSLQAEVMHAGFRTDIDELLAAADLFCLTSKREGLPKAVMEAMSAGKPVIATKIRGCRDLITHGENGYLVPVNNHELTASYIAKLIENPSLLERMGESSLQLVRQFELSSILSDMEKVYVECLMDPLKEPE

SEQ ID NO: 3978 - protein, 368 aa, Gossypium barbadense
MAPSTLTALAEEKTLQASFVRDEDERPKVAYNQFSNDIPVISLAGIDDVDGKRGEICKKIVEACEDWGVFQVVDHGVDTKLVSEMTRFAREFFALPAEEKLRFDMSGGKKGGFIVSSHLQGEAVQDWREIVTYFSYPLKSRDYSRWPDKPEGWIEVTKEYSEKLMGLACKLLEVLSEAMGLEKEALTKACVDMDQKVVVNFYPKCPQPDLTLGLKRHTDPGTITLLLQDQVGGLQATRDNGKTWITVQPVEGAFVVNLGDHGHYLSNGRFKNADHQAVVNSNCSRLSIATFQNPAPDATVYPLKIREGEKPILEEPITFAEMYRRKMSKDLELARLKKVAKEQQQLKEKEAENEKPKLEAKPLEEILA

SEQ ID NO: 3979 - protein, 187 aa, Clostridium thermocellum ATCC 27405
MSLIGTEVKPFTAEAYHNGKFITVTEQDFKGKWSIVVFYPADFTFVCPTELEDLQNNYEKFKALGAEVYSVSTDTHYTHKAWHDTSEAIKKITYVMIGDPSHTLSRNFDVLNEATGLADRGTFIIDPDGVIQYVEVSAENVGRNAEALIDKIKAAQYVRNHPGEVCPAKWKEGGATLKPSIDLVGKI

SEQ ID NO: 3980 - protein, 309 aa, Bacillus pumilus SAFR-032
MKVAQNIAELIGDTPLVQLQRLQPDNAAAVYLKLESFNPSGSVKDRAAYNMIVEAEKQGKLTKGATIIEPTSGNTGIGLAMNAAARGYQAILVMPDTMTKERINILKAYGAQVILTPGEEKMPGCIRKAEELAAQIPHSFIPMQFDNRANPDAHRGTTAVEIMDAVKQIGKPLGAFVATAGTGGTITGTGEELKKAFPQLTIRVAEPKGSPVLSGGTPGKHKLVGTSPGFIPQILNEHVYDEIVQVSDEDAYTITRQLARLEGILVGPSSGAACYAAIETAKQLPADQIVICMTADTGERYLSSDVYQD

SEQ ID NO: 3981 - protein, 153 aa, Bdellovibrio bacteriovorus HD100
MANLPNPWRERSLANPFREFGRHQERIDRLLNELMELRSGTLGEDMSLMPSSELVEEEKNYLLKVDLPGIKKEDVKVEVEGDRLTIRAERRSEKEEKSKKRYFSEISYGSCMRSFALPQSIDEKKVDAKFENGVLSVTIPKTTESKSKQISVH

SEQ ID NO: 3982 - protein, 797 aa, Pseudomonas fluorescens PfO-1
MSNHHGVEKTQAELAELFAKDLTTGVGRSVKHDSAAKHVSGEAQYIDDRLEFPNQLHVYARLSDRAHAKIISIDTQPCYAFEGVRIAITHEDVPGLKDIGPLLPGDPLLAIDDVQFVGQPVLAVAAKDLETARKAAMAAIIEYEDLEPVLDVVEALRKRHFVLDSHTHQRGDSANALATAEHRIQGTLHIGGQEHFYLETQISSVMPTEDGGMIVYCSTQNPTEVQKLVAEVLDVSMNKIVVDMRRMGGGFGGKETQAASPACLCAVIAHLTGQPTKMRLPRVEDMLMTGKRHPFYVEYDVGFDSTGRLHGIAMDLAGNCGCSPDLSASIVDRAMFHSDNSYYLGDATINGHRCKTNTASNTAYRGFGGPQGMVAIEEVMDAIARHLNLDPLAVRKANYYGKTERNVTHYYQTVEHNMLEEMTAELEESSQYAERREAIRRYNANSPILKKGLALTPVKFGISFTASFLNQAGALVHVYTDGSIHLNHGGTEMGQGLNTKVAQVVAEVFQVEMDRVQITATNTDKVPNTSPTAASSGADLNGKAAQNAAETIKQRLVEFAARHYKVSEEDVEFHNGHVRVRDHILTFEALIQLAYFNQVSLSSTGFYKTPKIYYDRSQARGRPFYYFAFGAACCEVIVDTLTGEYKMLRTDILHDVGASLNPAIDIGQVEGGFVQGMGWLTMEELVWNNKGKLMTNGPASYKIPAVADMPLDLRVKLVENRKNPEDTVFHSKAVGEPPFMLGIAAWCAIKDAVASLGDYKHQPKIDAPATPERVLWGCEQMRQLKAVKAVEAETEVV

SEQ ID NO: 3983 - protein, 209 aa, Idiomarina loihiensis L2TR
MTLRIGDTAPNFTIDTTQGSIEFHDWAKGSWVFFFSHPADYTPVCTTEMGRTAQLAPEFEKRNVKPLGLSTDTVEAHKGWINDVNDTQNTLLEFPIVADKDLEVAQLYDMIHPNESATATVRSVFIIDPNQKVRLIMTYPMTVGRNFNEILRVIDALQTTDRDEVACPADWLPGDSVIIRPTVSDEEAKEKFPQGWKTLRPYLRLTDIK

SEQ ID NO: 3984 - protein, 484 aa, Pseudomonas fluorescens PfO-1
MIQFLLNQELRSEHALDPNLTVLNYLREHVGKSGTKEGCASGDCGACTVVVGELQTDDDGREHIRYRSLNSCLTFVSSLHGKQLISVEDLKHKGELHSVQKAMVECHGSQCGFCTPGFVMSLFALQKNSDAPDQAKAHEALAGNLCRCTGYRPILAAAEQSCCGKQPDQFDAREAETIARLKAIAPTSIGELNSGDKRCLVPLTVADLADLYDAYPQARLLAGGTDLALEVTQFHRTLPVMIYVGNVAEMKRIEHFDDRIEIGAATALSDCYEALNAEYPDFGELLHRFASLQIRNQGTLGGNIGNASPIGDSPPLLIALGAQIVLCKGETRRTLALEDYFIDYRVTARQESEFIEKIIVPRATTEQRFRAYKVSKRLDDDISAVCAAFNLRVENGVITDARVAFGGMAAIPKRAAHCEAVLLGQPFNNAVVERACTALGEDFTPLSDFRASKEYRLLSAQNLLRKYFIELQTPHIETRVTAYV

SEQ ID NO: 3985 - protein, 390 aa, Corynebacterium glutamicum ATCC 13032
MRVGMMTREYPPEVYGGAGVHVTELTRFMREIAEVDVHCMGAPRDMEGVFVHGVDPALESANPAIKTLSTGLRMAEAANNVDVVHSHTWYAGLGGHLAARLHGIPHVATAHSLEPDRPWKREQLGGGYDVSSWSEKNAMEYADAVIAVSARMKDSILAAYPRIEPDNVRVVLNGIDTELWQPRPTFDDAEDSVLRSLGVDPQRPIVAFVGRITRQKGVEHLIKAAALFDESVQLVLCAGAPDTPEIAARTTALVEELQAKREGIFWVQDMLGKDKIQEILTAADTFVCPSIYEPLGIVNLEAMACNTAVVASDVGGIPEVVVDGTTGALVHYDENDVETFERDIAEAVNKMVADRETAAKFGLAGRERAINDFSWATIAQQTIDVYKSLM

SEQ ID NO: 3986 - protein, 148 aa, Bacteroides fragilis YCH46
MNVGDKAPELLGINEKGEEVRLNNYKGRKIVLYFYPKDNTSGCTAQACSLRDNYAELRKAGYEVIGVSVDNEKSHQKFIEKNNLPFTLIADTDKKLVEQFGVWGEKKLYGRAYMGTLRTTFLINEEGVIERIIGPKEVKTKEHASQIL

SEQ ID NO: 3987 - protein, 153 aa, Cleome spinosa
MSLIPSFFGNRSSRIFDPFSLDMWDPLKDFPFPSSSLSRENSAIASARVDWRETAEAHVFKADLPGMKKEEVKVEIEDDSVLKISGERHVEEDKSDTWHRVERSSGKFSRRFRLPENVKMDQVRASMENGVLTVTVPKVETKNPDVKSIQISG

SEQ ID NO: 3988 - protein, 187 aa, Bifidobacterium longum NCC2705
MTLLQHELTDFKVNAFQNNEFHEVTKDDVLGHWSLFFFYPADFTFVCPTELEDLAENYAKFKEIGCEIYSVSCDTHFVHKAWHDANEKIAKIEYPMLADPTALLAKDLDTYNEADGVAERGDFIVSPEGKVVAYEVISSNVGRNAEELLRRVQASQFVYEHGDQVCPANWTPGEETIEPSLDLVGQL

SEQ ID NO: 3989 - protein, 787 aa, Clostridium tetani E88
MKGEQYMRDISRLGVSTLRKEAWDKVTGAAKYNCDTKTPDTLHAKMLTSTHAHAIIKLIDTSEALKAKGVQAVITGDYFSVLSGSVIEDRPPIAKDKVRYFGEPVAVVVANSEEEAMSAVKLIKVIYEPLPIVNSINEAIKPGATLIHENLGEYHCPVKDVYPQPNSNIANHVKIRKGDMNKGWSESEVIVESSFSLPQSDHLAMETRNAKVEILPNGTVIINTSSQGPFSVKEQISKLYNIPEGNIIVRVPLVGGAFGGKATIQPEFIAYLASRAVGGRKVKMANSREEDISMAPCKIGTEGSLKIGATKDGLIKALECTYHVDCGAYADTGPNMTKAIAVNCSGPYNIENISCDAFTIYTNHTYVTSYRGFGHSALTFCMERILDKLATTIGIDPLELRMKNAIYEGCFSPTQDKITLSNTGNLGSCILKLKEAINWEEGRRVETDKGTIIAKGTACFWKTSTSPTNASSGAIITVNSDGSLNLNLGAVEIGPGMKTTMVQILAEKMRMDIDKISIYMSVDTQTTPKHWKTVASMTTFMVGNAVVKAADDLIQQLKKLGAIVLKCTPEDLEIKEQKVYLKDDLEIYISFEDLVHGYKYPGGTSIGGQMIGRGTYIMKHLTKLEKETGKGKVGASWTVGAQAVEIEYDPKKYTYRLLKAATVIDVGKLINPKTARGLIMGGMSMGLGLATREEFLYNQDGILEDTSLRTYKLMRYGENPDYIVEFIETPQIDAPFGARGIGEHGILGISAAFANAISLAAQADFDKLPISPESIWKTKTGGQYDTF

SEQ ID NO: 3990 - protein, 169 aa, Bordetella parapertussis 12822
MSDITESTAQHVSLTVNGRACGGCAEPRMHLADFLRGELGLTGTHIGCEHGVCGACTVLVDGYSTRSCLMLAVQAQDSRVDTIEGLAGEDDALHPIQQAFHELHALQCGYCTPGILMSVAELLAANPDPDEVQVRDVLSGHLCRCTGYQNIVAAVLRAAQLMRAEAGHD

SEQ ID NO: 3991 - protein, 320 aa, Dehalococcoides ethenogenes 195
MDNITPEHNKHTNQNIAPDITKLIGNTPLVRLNRIGSGLKAEIVLKLESFNPTHSAKDRPALHMIEKAEQEGKLRPGSIIIESTSGNTGIALAAVCAARGYRLMLTMPESFSLERRRLLRLLGAELVLTPKELGMQGALEKAAELKNKLPETFIPGQFVNPANPESHCQTTAAEIWRDTNGKVDILIAGVGTGGTLSGTAKGLKAVKPSVQIIAVEPVESPVLSGGEPHPHLIQGIGAGFIPRILSVELIDKVIQVPGEEAVKMALRLAREEGIMAGISSGAALWAALETAKQGENCGKLIVAIMPDSGERYLSSLPLGD

SEQ ID NO: 3992 - protein, 404 aa, Dehalococcoides ethenogenes 195
MNILHLGSGSLKIPPEGYGGIEKYVFESARCLAARGNKVVIFDIRPDKADAKSERIEGVEIVRIHRMSTNRSSSLWLANIYSVLNLLVFSLRARSYIKRNRFEIIHIHRTLVGLILVLVLPSQRQKMIYTLHSPVWVMEKGSFKDRMSRKLDIFVIRHIKRVLVQSAQIKAILEMERVKSAKIGLLPCGVDTEAFNPAHRSNLIRSKYGIGERLLVLFVGRIVPYKGVEYLVRAANLVVNKAGFRECAFLLAGPIAEHGLDALEHAGYPGRVKGLIKEYKLEDFVFLTGSLPQDELQTAFASADIFVLPSLAESSPAVVLQALASGCGVIASNISGIREQVIDGVNGVLVKAADEAELAKQILEFLQSPGRRFAMGANGIALVKEQFSWEVLCGRLEGIYRESV

SEQ ID NO: 3993 - protein, 383 aa, Verrucomicrobium spinosum DSM 4136
MKFMIISDTFPPDINGVARTLQTLARGLARRGHQVSVLTTTEGAGGENLSHGVEVKAVNSLPVPGYAGIRMGLATRRFFSRRIGDFKPDGIYVAVETLMGCNAIRAAHQCAKRVVSGFHTNFHSYSDDYRLPFFKRAAMWYLQWIHNRTARTLTPSESTAEQLRGLGIKNVGVLGRGVDTDLFNPERRDAELRRSWGADEATPVALFVGRVAAEKNLPLAVRAFQRIQELQPKARAVFVGDGPKAAWLKQRHPEFIHAGARTGEDLARHYASADLFVFPSLSETFGNVLTEALASRLVTVSYDYAAARQVVRHGVNGFVAPEKDEAAFLAATELALQHWNDGALRTAAHATALRLSWNAIIEQFEQELLGTVPAPPSGTEARL

SEQ ID NO: 3994 - protein, 150 aa, Bradyrhizobium japonicum USDA 110
MIKVKINGQEQSWDGDPNLPLLWFLRDEAGLTGTKFGCGQALCGACTVIVDKEAVRSCVTSINDVAGREVTTIEGLHPNGDHPVQKAWRQVNVPQCGFCQAGQIMQAAALLMDNPKPSHDQIREAMSGNICRCGCYQRIENAVHLASTGV

SEQ ID NO: 3995 - protein, 199 aa, Candidatus Blochmannia floridanus
MLVSYRAPDFTAPTILGNGEIVNDFNLFKYIQNKMAMIFFWPMDFTFVCPSELIACDKRYFEFQKRETEIIGISIDSVFVHNAWRKIPINKGGIGSVKYPMVSDIKREIIKDYGIEHTDKGVALRASFLIDKLGIIRHQVVNDLPFGRNFDEMIRMIDALLFNETHGLLCPAQWDQNKVGLHASQDSVEEYLTNHLSQL

SEQ ID NO: 3996 - protein, 381 aa, Bacillus pumilus SAFR-032
MKKLKVGITCYPSVGGSGIIATELGKRLAEKGHDVHFITSSIPFRLNKVYPNIYFHEVDVNQYAVFQYPPYDLALASKLAEVARREKLDIIHAHYAVPHAVCAYLAKQMTGHSVKVVTTLHGTDITVLGYDPSLKEVIRFAIESSDRVTAVSHSLAAQTYDLIKPNKKIETIHNFVDERVYLRDDHNVLKRHYGLLDHEKVVIHVSNFRKVKRVHDVIHVFKKISEQVNAKLLLIGDGPEKSVVCELVKKLGLTDRVLFLGKQEKVEELYSISDLKLLLSEKESFGLVLLEAMACGVPCIGTDVGGIPEVITHGETGFLVPLGDIDAAAKHAVSILKDKALHEQVSAAAQSSVQAHFSSEKIVSEYEELYLELIEGDDEHE

SEQ ID NO: 3997 - protein, 265 aa, Arabidopsis thaliana
MASVASSTTLISSPSSRVFPAKSSLSSPSVSFLRTLSSPSASASLRSGFARRSSLSSTSRRSFAVKAQADDLPLVGNKAPDFKAEAVFDQEFIKVKLSDYNGKKYVILFFYPLDFTFVCPTEITAFSDRHSEFEKLNTEVLGVSVDSVFSHLAWVQTDRKSGGLGDLNYPLISDVTKSISKSFGVLIHDQGIALRGLFIIDKEGVIQHSTINNLGIGRSVDETMRTLQALQYTGNPDEVCPAGWKSGEKSMKPDPKLSKEYFSAI

SEQ ID NO: 3998 - protein, 344 aa, Burkholderia sp. 383
MKIMIVTDAWEPQVNGVVRTLKSTSRELTALGHRVEMLTPLEFRTVPCPTYPEIRLSILPYRKLRARIDAFAPDALHIATEGPLGLAARRYARSRKLPYTTAYHTRFPEYVQARFGIPLAATYRFLHWFHGPSLAVMAPTPVVKQDLEKFGFTNVVLWTRGVDLDVFRPMESKVLNTVRPIFLYVGRVAIEKNVEAFLRLDLPGSKWVAGEGPALAELKSRYPEANYLGVLSQAELAKVYAAADVFVFPSRTDTFGLVLLEALACGTPVAAYPVTGPIDVLGGGDAGAMHEDLQEACLEALKIERTTARAWAERFSWRAASEQFASHLKPLPKTAYSPAEGAAV

SEQ ID NO: 3999 - protein, 388 aa, Microcoleus chthonoplastes PCC 7420
MRILSVHNHYQIRGGEDESQKAEVRLLQDKGHQVDVYEEHNDRIPTLGKIDLASQTVWSRETYQILKSRFTEQTYDLVHVQNFFPLISPSVYYAAQAKGIPVVQTLRNYRLLCPNAQFFRQGHVCEDCLEQFIPLPGVIHACYRESRAATATVTAMITVHRALGTWTNQVDVYIALTEFARQKFIQGGLPAEKIVVKPNFVHPDPGWGEGGGNYALFVGRLSPEKGLDTLLQAWEKLGHQIPLKIVGDGPLANQIAEASTRLPGVEWLGRQPLSQVYNLLGEALFLVFPSSWYETFGRVAIEAFAKGTPVIAANIGAIAELVEHSRTGLKFRPSDWEDLTAQVEWALSHPAELTQMRQEARTEFEAKYTADKNYQQLMGIYETVIKNR

SEQ ID NO: 4000 - protein, 151 aa, Wolbachia endosymbiont of Drosophila ananassae
MSNIVHSNKNNKCDNFSVRGLQRAVDNIFDSFFTGWDSELSRRGSSLLPACDFYETKESYCLSLELPGISKESIDISISSDSLIVKGEKTCNNESKDKQFYHRERYYGSFYRSIQLPVNVEQDKVSANFSDGILHVTIPKSEKHIKRIDVK

SEQ ID NO: 4001 - protein, 192 aa, Triticum aestivum
MARAAPILAVSKPSPLPLIAPPASEADSRPRRIALFVEPSPFAYVSGYKNRFQNFIKYLREMGDEVIVITTHEGVPDEFHGAKLIGSWSFPCPWYQKVPLSLALSPRIIGEVARFKPDIIHASSPGIMVFGALIIAKLLCVPLVMSYHTHVPIYIPRYTFSWLVKPMWLVIKFLHRAADLTLVPSVAIGRDL

SEQ ID NO: 4002 - protein, 166 aa, Solibacter usitatus Ellin6076
MSIRWVTDAYMKQKLTLTINGKPYSDEVEPRLLLIHYLREVAGLTGPHIGCETSICGACTVMLDGMAVKSCTIFAVQAEGRSVLTIEGLAQNGKLDPLQEAFWNEHALQCGFCTPGMILTARQLLADNPSPTEQEIRRGLDGNLCRCTGYQHIVNAVKSAAKAGGA

SEQ ID NO: 4003 - protein, 776 aa, Solibacter usitatus Ellin6076
MATTTTKPETLFGKRVRRQEDPRLITGTALYLDDLKVPGMHHACIVRSPHAAARIRAIETRAALAAPGVVAVFTGDDIKDLGPIPCAASLPGLRRPHHHLLAQDRVYFVGHAVAVVVATDRYLARDAADLVEVDYERLPAVADPEKALAPSAPAVHPQWPDNIAFNFHQEGGDTEKAFRDADLVIRQRITSQRLLPTSIETRGVLAEWRAGEKSLTLHSSTQIPHLLRSLLAGILGMPENRLRVITPEVGGGFGAKADVYCEDALMAFIAMRINKPVKWVESRRENYQATIHGRGHVDYFELAARRDGTILGLKLKLIQDLGAYHQLLTPIIPTLSVLMMPGLYRFQNVSADVVGVFTNCMPTDAYRGAGRPEATHGIERMVDMLAQELKMDPAEIRLKNFVHADEFPFPTATGLLYDSGDYAKPLHKAMNEAGYQQLRQEQAAARAEGRLVGIGISTYGEICALGPSIALPAGGWESATVKIEPSGKVTVLTGSSPHGQGEETTFAQIVSDELGVPMDDVLVVHGDTAVVQYGIGTFGSRGTAVAGTALFYALQDIKAKMKKFGAMMLGTEDVNFSGGRCVDETCGKSVTFAEMATAAHHAKQLPPNTAPGLVATHFWEPPNFTFPFGAHIVVTEVDRETGAIEIQRYVCVDDIGRIINPLIVDGQVHGGVAQGLGQALWEQAVYDDTGQLVSGELTDYALPKASGMPWIESSHTETPSPVNPLGVKGVGEAGTIGCSPAVVNSVVDALAPLGVKHIDMPLTPEKIWKLIQEARA

SEQ ID NO: 4004 - protein, 171 aa, Sulfolobus solfataricus P2
MIYMKVFEKDQKVKVHLKVNGQDYEVETEPRRLLVHVLRELGFTGVHIGCDTSNCGACTVIMDGRSVKSCTILAVEADGAEITTIEGLAKDGKLHPIQEAFWEKHGLQCGYCTPGMIMEAYWLLKENPNPTEEEIREGISGNLCRCTGYQNIIEAVKLASEKLRMEIPKAH

SEQ ID NO: 4005 - protein, 447 aa, Sinorhizobium meliloti 1021
MTGKRLLAINNYFYRRGGAEAVFFDHMSMFGEIGWDIVPFAMHHELNEFSPWSDYFVSEIEYGRRTGLLRKAVQAASVIYSLEAQRNLGRLIDRARPSVAHAHNVYHHLSPAIFSTLKAAGIPVVMTVHDLKLACPSYKMLRDGRVCEDCRGGRVYNVLRHRCVKGSAPLSAVVLAETVLHRLLGLYRDKVDRLVVPSRFYLEKLAEWGWPREKMVHIPNFVDVTALSGDWQEGDYFAFAGRLAPEKGLATLIRAAALSNQRVVIAGTGPEEQTLRSLAAELKADVTFAGYLSGEKLHRLIGESGALVLPSEWYENAPISVLETYALQRPVIGAAIGGIPEMVKEGETGLLAAPGDAGDLARALREMAALSPGERARMGRPPGPGSRANSPPPPTARGRSIFMGKSARPEASHPILIPVPVTGIQPAQVLGLKELFPRHRRGAAGSL

SEQ ID NO: 4006 - protein, 408 aa, Clostridium thermocellum ATCC 27405
MRILMLSWEYPPRIVGGISRVVHGLAQKLGARGCDVHVITCWEMGTREFERDKYVKVHRLHSYDVTPNNFVDWVLHLNFAIVEHATRLINETGKFDIIHAHDWLVAFAARVLKHAYSTPLVATIHATEHGRNWGIHNDTQRYINNVEWWLAFEAWRLIVNSEYMKNEVMSIFKIPNDKIDVIPNGVDLDKFKGYEKDMEFRRRFAQDNEKIVFFVGRLVNEKGVHVLIDALPKVCHYYNDVKFVIAGKGPQFDHLKWKAESMGMAHKVYFTGYISDEELLKLYKCVDVAVFPSLYEPFGIVALEGMVANVPVVVSDTGGLGEIVEHGVDGMKSYTGNPNSLADSILEILHNPDKAERMKKKALEKVRSIYNWDVVAEKTLNVYKTILEENKHIYWGSPIMKEETERLN

SEQ ID NO: 4007 - protein, 116 aa, Glycine max
  misc_feature (66)..(66): Xaa can be any naturally occurring amino acid
  misc_feature (78)..(78): Xaa can be any naturally occurring amino acid
  misc_feature (91)..(91): Xaa can be any naturally occurring amino acid
  misc_feature (102)..(102): Xaa can be any naturally occurring amino acid
YTKKKTQTRKIKKFSTNPTPLFYPKSYLSLPNNSIHLNPLSTRPSLYLTLPSHTRLSLVFKASFIXLPLLVNTSPDFXSQAAFDQDFINVXLSDYILKKFVXLFFYPFDFTFCCPT

SEQ ID NO: 4008 - protein, 350 aa, Sulfitobacter sp. EE-36
MNIRTQVKTHSHTATPFAATRIADNVLDLIGQTPMVRLPRYLDREDVNLVAKVEALNPGGSAKDRPARHMIERALADGRLKPGDTVVESSSGNMGIGLAQACAVHGLQFICVVDPNAQSQNVAIIRALGGQIELVDHAPDGDFLAARLDRVAKLLEENSRRFWPNQYANLDNPESHELGTIAEIDAALGGQIDVLFVACSSTGTARGCRDYLRRMGRKTKVVAVDAMGSTLFNGTAGPRKISGMGAGRIPELANGQEFDDLVRVSDVTCVAGCRRAVAREGLLVGGSGGGVLEAVRGMQDELAGLTVAAIIHDSGSRYLGTVFDPEWVERELGICEADVTALAGLAPADS

SEQ ID NO: 4009 - protein, 763 aa, Anabaena variabilis ATCC 29413
MARYIGKEMSRVDGIAKVTGKAKYAAEFQVSNLAYGFIVLGTVAKGTIKSIDTGEAERAAGVIRVFTHLNTPKLDPKFSMVQAPSRATDEQDKSFRALQSDKIFFNMQPVALVVAETYEQARYAARLVKVSYNTEPHTTDTEAVRAIARVPTQAPPLKPRGNPEETMRTAAIETQPLVVEHTLTRGNPEETMRTAAVKVEAEYRIPIEHHNPIEPHAAIAVWQGDKLTIFDKTQGVYGVRAHLASSFGVPEENVSVLSPFVGGAFGSSLRPNYYPALTAMAARELKRPVKVVYTRTQMFTGHGYRPYTIQKVALGAERSGKLSTMIHEVVHNTSNIEEFSDETTLFTRQVYACPNLYAPLKITNTDLPTPTWMRAPGAVSGMFALECAMDELAYALKIDPLELRLINYAEVDPESGKPFSSKALRECYRLGAEKFGWKKRQFEPRSMRDGRLLVGWGMATGVWGAFQMPAAALITLRVDGTAQVASATSDIGPGTYTVMTMIAAEYLGLKLEQVKFELGDTKFPRSPSQGGSWTTASVGSAVRGAALAIGTKLLALANQEPNSPLKGAAAADVEMLDGRLRLKSDPSRFVNISGVMKRNGLTAITETFESRPSEEREKYATLAHGAQFIEVKVDPDVGTVHVTRAIEVTASGKIMNPKASHSQEFGGVVWGIGMALQEATEIDHRYGRIMNPNLQHYHVPVNADILEIETIFVEEDDKIVNPLGVKGMGELGMVGIPAAIANAVFHATGKRIRDLPITPDKLL

SEQ ID NO: 4010 - protein, 417 aa, Microcoleus chthonoplastes PCC 7420
MQVLHLSTSDISGGAAIAAYRLHQGLQRLGVPSQMLVDKKSSDDRTVFAQKTNLSKALGILKPTLDRFPLRLYRNCDHTKLSLEWLPDQVSPKTTKLAPDILNLHWVCGGFLKIETLAQLKQPIVWTLHDMWAFTGGCHYSQDCDRYTNSCGNCPLLQSGQNWDLSRWVWQRKTKAWKNINLTLVTPSTWLAKCVRSSSLFKDRRVEVIANGLDPEQYKPIDKRLARELLKLPQDKQLLLFGAMGSTSDHRKGFHLLQPALQCLSQSENQYKTELVVFGSSAPSPQPDFGFKAHYLGKLNDDISLALVYAAADVFVAPSVQDNLPNTVMEAIACGTPSIAFNIGGMPDMIEHQWNGYLAHPYDTKDLANGIAWVLQDEQRRQACSLRSRDMFEQNFTLDIQAKSYIKLYQDILFSYT

SEQ ID NO: 4011 - protein, 427 aa, Cyanobium sp. PCC 7001
MAHIAWLGKKSPFCGNVTYGLTTTHALRERGHSISFIHFDTPPGQMGRQPVEVAASGGKGRPRRLRQGAGSSSGPGAGTLRRRSRTDAPATESADPEVTLPYLVKSQVYTIPSPGAQRELRESLERLRPDLVHASLTLSPLDFRLPDLCQQLQLPLVATFHPAFDAGLRNLTAGTQQLTYQLYAPTLARFDRVIVFSELQADVLLRLGVQAERLAVIPNGVDTALWQPASGPPSAELAALQQRFAGRRVFLYMGRIATEKNVEALLKAWRLVRPAGCVLVIVGDGPLRSALQGSSEESDVVWWGYEPNLATRVALQQLAEVFLLPSLVEGLSLALLEAMASGTACVATDAGADGEVLEGGAGIVISTQGVTTQLRTLLPVLHDQPVLTAELGRRARARALERYTLENNLNTLEQLYAELVGSRTVAA

SEQ ID NO: 4012 - protein, 280 aa, Anabaena variabilis ATCC 29413
MDDNQERQDFDLTESDEQLSADEKTLLDELGIVGAARRKFLEQNMAAALGTFAFHLLAKEEVFATLAASPDAVFASTAGVENAVKVLLKINGSTQRLEVDSRTVLLDALRERLGLTGTKKGCDQGQCGACTVIVDGRRVLSCLTLAASCEGKEVTTIEGLADADNLHPMQAAFIKHDGFQCGYCTPGQICSAVALLQEAKNGDVSHVTNNLRTSPQNLELSDEEIRERMSGNICRCGAYPGIVAAIKEVHSGRETAQTRHFASDEEIAIAFNEGKADEIV

SEQ ID NO: 4013 - protein, 315 aa, Bacteroides fragilis YCH46
MGKIAKKLTDLVGNTPLLELSNYNASNGLKARVVAKLEYFNPAGSVKDRISLAMVEDAEAKGTLKSGATIIEPTSGNTGVGLAFVAAAKGYKLILTMPDTMSMERRNLLKALGAELVLTPGANGMKGAIAKAEELRAATPGSVILQQFENPANPAVHVRTTGQEIWRDTDGKVDIFVAGVGTGGTVSGVGAALKEHNPAVRIVAVEPVDSPVLSGGVPGPHKIQGIGAGFIPKTYHAAVVDEIRQVGNDDAIRTSRELAAKEGLLVGISSGAAVYAATELAKLPENEGKLIVVLLPDTGERYLSTILYAFEEYPL

SEQ ID NO: 4014 - protein, 696 aa, Solanum lycopersicum
MGVPAFYRWLADRYPLSIVDMVEEEPKDDVPVDISKPNPNGMEFDNLYLDMNGIIHPCFHPEGKPAPATYNDVFNSIFDYIDHLFSLVRPRKLLYMAIDGVAPRAKMNQQRTRRFRASKDAAESEAEEKRLREEFEMEAAILVPTEKPETSDSNVITPGTPFMAVLSIALQYNIHSRLNKNAGWRFTKVILSDANVPGEGEHKIMSYIRLQRNIPGFNPNTRHCLYGLDADLIMLSLATHEVHFSILREVITPPGQQEKCFACGQVGHLAASCHGTNGNHGKDGKAVNDTPIHKKKYQFLHIWVLREYLQYDLEIYNPPFQIDFERVVDDFVFLCFFVGNDFLPHMPTLEIREGAINLLMSIYRRDFTTMGGYLTDAGEVFLDRVEHFIQAAAVYEDQIFQKRARIQQSIENNERVRKEANAQPHPPAEDKVKLGEPGYKERYYSEKFGVSTAEDIHEVRQDVVQKYMEGLCWVCRYYYQGVCSWQWFYPYHYAPFASDLKGLADLEITFFPGEPFKPFDQLMGVLPAASAKALPEKYRMLMMDPSSPISDFYPTDFELDMNGKRFAWQAVVKLPFIDEKKLLAETKKLEDTLTDTEQLRNSVMFDLLYVHHHHTLAPYIISYYHHNVMIPSRAQRPWIIDANLSGGMNGFIWLSERNGLRDRVPSPLNGLEDILNNKILNITFLNPAPHKHITQP

SEQ ID NO: 4015 - protein, 213 aa, Dehalococcoides sp. CBDB1
MEEVARAMPRIGDIAPQFEALTTHGVLKLEDFKGQWLIIFSHPADFTPVCTTEFIAFTEIYPELQKRGVELLGLSVDSNSSHIAWVRNVEEKTGIKIPFPIIADLNKEVSSAYGMLHPGQSKTETVRCVFILDPGQKIRLIMYYPMNVGRNMQEILRVIDALQTADEYKVALPANWYPGDKVVVPSPSTQEMAEERMGQGYECVDWYLCKKQL

SEQ ID NO: 4016 - protein, 685 aa, Physcomitrella patens subsp. patens
MGIGNGAGIDEKKIAKLVLHAHPSLLRWAPPCKHNFTPAQFEALKAVCDTIVPSLPPPFKDGEAFELMRGVTAEDVARFYEANASDEGVAEVVNEYGYNVSWKAIGYPGVAPEVRNRTEADYKQPRPLGDAHVDAKEAGAGLKSILASKGFVVEEVESFRSQSEKLGFSKNDNDVYLQCDAVVVGSGSGGGVMAAALAKQGFKVVVLEKGQYFAAQDMSTLEGPTLLNMFEKMGAMATDDGGVALIAGKSVGGGTTINWSVSLKTPQNVRDEWANEHGLDMFNSERYDKATQAVCDRISVQPNVDKHSIQNIILREGCKKLGYHHGTLSRNCASDHYCGWCTYGCPTGKKQSTAQTWLVDAVNTGNALILSNCTADYVFHGANPGGVKGSKAQGVAATIVGGPNRVYIKANATVVSCGALMTPVLLLKSGLKNPNIGKYLRLHPASTCYGYFPEGTGPEGRPYEGGIMTEYAPVNFRKPTEYGGLLETGVFHPGAFSAFHAWGSGADNKERLLRHGRTSHITVVVRDKGFGTVEIDKGRNPKISYKMSKYDQETTVAGMVQSLRVLVAAGAVEVGSQQLGAERFNAKGASPSDIEAYLNRVERRGASETTAQIISAHQLGSCRMGTSPSTSAADPRGEIWEVEGLFVGDGSVLPTAPGVNPMVTIQSVAFCTAEHIVQYLNKFKI

SEQ ID NO: 4017 - protein, 320 aa, Nostoc sp. PCC 7120
MRVARNITELVGRTPLVQLNRIPQEEGCVAQILVKMESMNPSSSVKDRIGVSMINAAEQEGLIAPGKTVLVEPTSGNTGIALAMAAAAKGYRLILTMPETMSGERRAMLRAYGAELELTPGMEGMSGAIRRAQEIVNTTPHAYMLQQFRNPANVKIHRETTAEEIWEDTDGQVDMIVAGVGTGGTITGVAEVLKARKPSFQAIAVEPANSPVLSGGKPGPHKIQGIGAGFVPQVLKTQLIDEVITVTDEEAIAYGRRLAREEGLLSGISSGAALFAAIRVAQRPENAGRLIVLIQPSFGERYLSTPLFQDLETKATASIS

SEQ ID NO: 4018 - protein, 1130 aa, Cryptococcus neoformans var. neoformans B-3501A
MGVPALFRWLSKKYPKIVERVKEDTPKKIRGPDGEIVEEPIRYENPNPNGFEVDNLYLDMNGIVHPCTHPEGRPAPETEEEMMVEIFKYTERVVNMCRPRKVLMMAIDGVAPRAKMNQQRSRRFRAAQEAADKEEERREAIKLFEAMGHAVSEETANHKSWDTNAITPGTPFMDLLSISLKYWVSHKLTTDPGWKDLKIILSDSSVPGEGEHKIMDWIRRQRSYPTWDANTSHVIYGLDADLIMLSLATHEPHFRVLREDVFAQSSKGPHACKNCGKVGHIAANCKSDKKFKDPNVAEVAKTEDPKPFIFLDVACLREYLAVELVVPGMPFPFDLELAIDDWIFMIFFVGNDFLPHLPSLEIREGAIDVLLKIWRAELPRMGGYLTNHGKVNLDRAQVILEGLAKSEDEIFQKRKDDEERQEHSQKRRRIEEHKRQDEDKAREEDRNTLTLNGTEYVAVDNPAATARGGPLHPSLPSRPAFDLVPKEDAVKQPEDQDQKAKKAMAGSNSDIVKNRKAIRMANMSAAQALKAELEGGNDVNVDDKKAIAQEGKEEDEAVVTVERTEDEEKEQLTKEEARGTLEEQGEKEGVDEEVVPPAIQTDEDEGEAPVGDATVAENDESTIPEDDEDPTHVPRKRKRGDSDGDEDSNEEDDDDDDDDAPPNPEADQPIPKKKLKVNADGTVDYEDDVKLWEPGYRERYYEKKFGVKLSEREFIDKVTKSYMEGLCWVLEYYYQGVPAWDWFYPYHYAPFAQDFRDVGSMDIKFETSIPFKPFAQLLGVFPAASRIHLPEPLQTLMIDEDSPILDFYPPDFEIDMNGKKMAWQGVALLPFIDQNRLLTALKSKEELLSDDEKRRNSWGDNVMFIANENPLYDLFCDKLYGLRAKDVSKPIPIDTKASYGITGSVLPDPNCVPASTFDTPIPSISECPDLNPNDSISVRYYFPRQAHPHRSILLRGYKPEPARLTESDKDWVRRGGQGGRRGHRHNGGGNGNVTGGPGMARGRYESGPPRTNGYQPPPPRSNYGGSSGYGYGAPAPLPSRPPVSSYGGGAGGYGYSNPYAAAPNPYAGGYGAPAPYAAGGYGQRPYVPPLPPPNPYSAPPPAYGRPPGGGYGYGAPPPRGGGYNPYPSRR

SEQ ID NO: 4019 - protein, 1123 aa, Aspergillus nidulans FGSC A4
MAEGRAAPLRLGSTAPNFTADTSNGPITFHDYIGDSWAILFSHPDDFTPICTTELGAFAKLEPEFTARGVKLIGLSANGTESHKAWIKDIDEVTGSKLTFPIISDPERKIAHQYDMVDYQDTTNVDSKGMALTIRSVFIIDPAKKIRLIMTYPASTGRNTAEVLRVVDALQTTEKHGVTTPINWLPGDDVVIPPPVSTEDAQKKFGDVRVVKPAYPYSSQLHRIYTSRFFLASKTPPRTRVRTASTGVLGTPISSSTVPPHRIAVAPSADLPDSATGTPAPNSSPNPVNLSGLVCNVRRTSGREPPPLVGATTTILGDKLYVFGGRILSKTRPHLTSDIYELDLIRRHWSKIEASGDIPRPRYFHSVCALGDSKLVCYGGMSPIANPPKDSTNGGNEPQPEVVVMSDINIFDVPTRTWTRINTHDSPQGRYAHCATILPSSAYFTSATAPLSAIHHNPASANPHQGSIGVDIDGLGGAEMVVVGGQDSTNRYIEQISVFNLRSLKWTNTSPLGRSCGAYRSVAAPLTGMRLSDIGSASADQEAQDPIEDVGAPGFPMLIYSNYNFLDVKLELQIRLPDGRLVEKPMPSQASPPGLRFPNGAVINGHFVVSGTYLTSSKQEYALWALDLKSLTWGRIDAGGSVFGHGSWNRGVLWSRRNTFVILGHRKRNLVEDYNHRRINFTHLCMVELEAFGLYNNPCRTSPTSAYISHSGPAVPASFQQKLAQLRSGGRPFSAAAAELGRLAQTVPEMADMELQAVGGERISVNSRILSRRWGPYFIQLLRESSDTASDTATLRTGLQPYPSRNSSITITPSLDHGSTYSNATTLASSNNNPAKSILANLELPSAHSLPPTSRPRVLFLPHTVLTLQVLVFYLYTSALPPVGSPLCTPQILCSLLQLARPYQVDGLLEAVVERLHQVLDGRNAAAVFNAAAMAAGGGRGTGFISGPGGTLEALNGAHAANELADLTNAISLTDTRSRLNSDSSDTEHGTASAVSVASSSAGGGTRGVPLRINTNIFSRRQGREREDSISNASTSSASATSYDFSDSEGLPGDMARSSRRRRGTHGDNEVWTGDLSSVIGLQKRGLRGLMEGRRLRERSAKPPSSGQASVAAVPVDHTANVI

SEQ ID NO: 4020 - protein, 326 aa, Triticum aestivum
MVVLAGSPAVDHIPLLRSPDPGDNFSGMPVVDLSSPGAPRAIADACERFGFFKLVNHGVPADTMDRLESEAVRFFSLPQADKDRSGPAYPFGYGSKRIGLNGDMGWLEYLLLAVEAASLSGACTVPSCALFRAALNEYIAAVRKVAVRVMEAMAEGLGIAPVDALSAMVTAGGSDQVFRVNHYPPCHALQGLGCSATGFGEHTDPQLISVLRSNGTSGLQIALQNGQWVSVPSDRDAFFVNVGDSLQVLTNGRFKSVKHRVVANSLKSRVSMIYFGGPAMTQRIAPLPQLLGAGEQSLYKDFTWGEYKKAAYNSRLGDNMLAHFHR

SEQ ID NO: 4021 - protein, 484 aa, Pseudomonas putida KT2440
MIQFLVNQELRSEHALDPNMTVLQYLREHLGKTGTKEGCASGDCGACTVVVGELIQDDQGNDSLRYRSLNSCLTFVSSLHGKQLISVEGLKQQGQLHSVQQAMADCHGSQCGFCTPGFVMSLFALQKNSSGPDLHQAQEALAGNLCRCTGYRPILDAAEQSCRQPCRDQFDTQQAQTISRLKAIAPTQTGELNSGDKRCLVPLTVADLADLYSSHPEARLLAGGTDLALEVTQFHKTLPVMIYVGHVAELKRIEKTASHLEIGAATPLTDCYAALNEEYPDFGALLHRFASLQIRNQGTLGGNIGNASPIGDSPPLLIALDAQVVLRQGERQRVMPLEDYFIDYRITARQDSEFIEKIIVPRASNDWAFRAYKVSKRLDDDISAVCAAFNLSIEDGVVSGVRIAFGGMAAIPKRARACEAALRGKPWDQAAIERACQALAEDFTPLSDFRASKEYRLLTAQNLLRKYFIEQQTPYIETRVTAYV

SEQ ID NO: 4022 - protein, 360 aa, Magnetospirillum magnetotacticum MS-1
MYLVSHPIQYQAPLLARLAAEPGIALRVVFGRTDTEGGYFDSGFGVRLAWDVPLRQGYDSVALAETDLRTEILKADVVWLHGWGSSMLLRALALAKVEGRPVLMRGENQDQAMPDGKGLRGWAKRRFLNWVFARTAAFLAIGSANRDYYLRRGVAPEQVFHVPYAVDNAAFAAGAAAADLAGLRRELGIPEDSQVVLFAGKFQRRKRPDLLLDAWERMAAPRPVLLMVGDGEMRAELEARRATGIVFAGFRNQSELPALYAMADAFVLPSESEPWGLAVNEAMACGTAIVVSDQVGAARDLVDAGCGAVFPAGDAQALAQALSRVLAHSQEMGRAAASRIATWDFEADLAGLREALAHVR

SEQ ID NO: 4023 - protein, 349 aa, Magnetospirillum magnetotacticum MS-1
MERLITTYPAFAVRRFLPADLPVRTIAWLEALRRLPLVPSPDLFIGKAFARFVAANLPEEPGILVGWSGATLEAMDPARARGFRVVIERGSSHIRHQAEVLAAEAKRFGLASAGVDPRMIEREEAEYVLADLISVPTGFARDTFLARGVAAEKLVVNPYGVDLAGFAPAAHRRESEAPRILFVGRVGLRKGVPTLLEAGRRLKGACEVRLVGPVEAGMDTLLGAGGAHVAGPKPGAALPGEYAEADIFCLPSLEEGLPLTLLQAMASGLPVVATPETGAADLITHGVEGLIVPSHDPEALTAALRGLAADPERRRAMGEAARRRVEAGFGWSDYGERAVAAYDRLVQRP

SEQ ID NO: 4024 - protein, 404 aa, Candidatus Kuenenia stuttgartiensis
MKILFANKYFYLKGGAEHVFFDSAKLLENSGHKIVFFSMHHPKNLSSAYEKHFVLNVDYEKGSIKNKIDSSVKLLYSLEVKRKAEELIKEEKPDIAHLQNIYHQISPSIIHALKKFHIPIVMTLHDYKMACASYQMLANGRICEACKGGKYYNCFFKKCVKDSEAKSLLNTIEMYLHHKIFHIYDLVDVFISPSMFLKNKVEEMGFKGKIIYLPNFVNLEDYRPQYDWQENAIVYFGRLSKEKGLFTLIEAMKGLNTKLKIIGEGPIKEGLKLSVRSLELKNIKFLGYKAGEELKDEIRKSMFVILPSEWYENNPRSIIEGFALGKPAIGARIGGIPELVKDNETGLTFEPWNADDLKRRISQLIENPSEISRMGKNARKMVNEELNPDIHYGKLMEIYRQFVR

SEQ ID NO: 4025 - protein, 760 aa, Xanthomonas campestris pv. campestris str. ATCC 33913
MNARPDELIAPVADPGTGHRPTGTGMPRIDGRAKVTGQARYAAEWPVPDLAYGVVVNSSIAKGRIVAFDLEAARAVPGVLEIVTHENRPHMRGMDLFYKDMTAPAGSPFRPLYDNAILYSGQPIALVVAETFEAARHAAHLVQVEYASEPHDTNLMANLGRMHKPKPLKAGFSPPPKDKGEPDTAFVNAAHQIQADYYSAVEHHNPMELFASTVIRDAQGHFTIYDKTQGSQNSRWYVSHVFGLSKQKVTVRNPYVGGAFGSGLRPQYQLALAVMASILLDRSVRVVLTRQQMFTFGHRPETVQRLKLGADRDGTLRAIWHEAIAETSRIEDYVEVVVNWSGQLYACDNVHLGYNLVSLDQYTPIDMRAPGAAHGVHALEVAMDELSYEIGMDPLALRLKNYAEVNPADDKPYSSKALRECYQQGAERFGWAQRPLQPRARKEGREWVGWGMATGQWDAMQMFARAHAVLHADGRLVVSSAASDIGTGTYTVMAMIAAEALGLPMEQVTFQLGDSTLPVAPIEGGSSHVTTVGSAVDGACGKLRARLLRLAQALPNSRFTKAKLDEVVFADGTLALRADAGTTIALPELLRAAQLEQIEDKFLLLPNVFKQRNYTRATHGAVFVEVRVDEELGTVRVTRVVSAIAAGRILNPITARSQIVGGVVWGIGQALHEHTQSDHRFGRFMNHDFAMYHVSANADIHDIDVTFADEDDRIVSSLGAKGVGEIGLIGVSAAICNAIFHATGKRIRSTPMTPDKVMAD

SEQ ID NO: 4026 - protein, 158 aa, Azotobacter vinelandii
MPVVLEQPVPDFQAQATGGQTVSLAALRGRQVVLYFYPKDSTPGCTTEGQGFRDRHDEFQAANTLVFGVSRDGLKSHENFKSKQAFPFELISDKEEQLCRLFDVIKLKKLYGKEYLGIDRSTFLIDEDGVLRQEWRGVKVPGHVDAVLAAARALQQSR

SEQ ID NO: 4027 - protein, 155 aa, Wolbachia endosymbiont strain TRS of Brugia malayi
MELAVGNNAPDFSLPTDSGENLSLSDFFDKKNIVLYFYPKDDTPGCTLEAKGFRDKINDFSSLDTVIIGASRDSIKCHASFKAKYSLPFYLISDENAKMLEKYGVWVEKSMFGKKYMGIERTTFLIDKKDKIVRIWENVKVSGHVNEVLEAVKKI

SEQ ID NO: 4028 - protein, 662 aa, Arabidopsis thaliana
MAASNHSSGKPGGVLSDALCRELWHACAGPLVTLPREGERVYYFPEGHMEQLEASMHQGLEQQMPSFNLPSKILCKVINIQRRAEPETDEVYAQITLLPELDQSEPTSPDAPVQEPEKCTVHSFCKTLTASDTSTHGGFSVLRRHADDCLPPLDMSQQPPWQELVATDLHNSEWHFRHIFRGQPRRHLLTTGWSVFVSSKKLVAGDAFIFLRGENEELRVGVRRHMRQQTNIPSSVISSHSMHIGVLATAAHAITTGTIFSVFYKPRTSRSEFIVSVNRYLEAKTQKLSVGMRFKMRFEGEEAPEKRFSGTIVGVQENKSSVWHDSEWRSLKVQWDEPSSVFRPERVSPWELEPLVANSTPSSQPQPPQRNKRPRPPGLPSPATGPSGPDGVWKSPADTPSSVPLFSPPAKAATFGHGGNKSFGVSIGSAFWPTNADSAAESFASAFNNESTEKKQTNGNVCRLFGFELVENVNVDECFSAASVSGAVAVDQPVPSNEFDSGQQSEPLNINQSDIPSGSGDPEKSSLRSPQESQSRQIRSCTKVHMQGSAVGRAIDLTRSECYEDLFKKLEEMFDIKGELLESTKKWQVVYTDDEDDMMMVGDDPWNEFCGMVRKIFIYTPEEVKKLSPKNKLAVNARMQLKADAEENGNTEGRSSSMAGSR

SEQ ID NO: 4029 - protein, 336 aa, Rhizobium sp. NGR234
MLHTTVTQLIGQTPVMSIDVPERDATLVLKIEKNNPGGSMKDRMARSMVVAALEDGRLAPGGTIVESSSGNTGTGLALAALEFGLRFIAVVDHHAAPDKIRMMRALGAEIRYVEGDFAEDQVAVVERQRLAAQLGAQLPGAMFMNQSDNPANPDGYAGLVDELIAQLPGGIDAFVGCVGTGGSMTGIAQRLKRHNPAVRTIAVEPAGSIVFGKPGHPYYQSGTGTPAGDEVGKVLDYGCIDEGVQVTDVQAFETARYIARRKGLLVGGSTGGAIFKALEFIVEGKLTGTVVTTVADGGEKYLGTIFDDEWMAKRRLLEPAIAAQLDGWLAGRARAA

SEQ ID NO: 4030 - protein, 1384 aa, Oryza sativa Japonica Group
MGSLTRAEEEETAAAEEWSGEAVVYVNGVRRVLPDGLAHLTLLQYLRDIGLPGTKLGCGEGGCGACTVMVSCYDQTTKKTQHFAINACLAPLYSVEGMHIITVEGIGNRQRAVWNYLCDEVVTCWLKTLRKERLAMAHGSQCGFCTPGFVMSMYALLRSSEQPPTEEQIEDSLAGNLCRCTGYRPIIDAFRVFSKRDDLLYNNSSLKNADGRPICPSTGKPCSCGDQKDINGSESSLLTPTKSYSPCSYNEIDGNAYSEKELIFPPELQLRKVTSLKLNGFNGIRWYRPLKLKQVLHLKACYPNAKLIIGNSEVGVETKFKNAQYKVLISVTHVPELHTLKVKEDGIHIGSSVRLAQLQNFLRKVILERDSHEISSCEAILRQLKWFAGTQIRNVASVGGNICTASPISDLNPLWMATGATFEIIDVNNNIRTIPAKDFFLGYRKVDLKPDEILLSVILPWTRPFEFVKEFKQAHRREDDIALVNAGMRVYIRKVEGDWIISDVSIIYGGVAAVSHRASKTETFLTGKKWDYGLLDKTFDLLKEDVVLAENAPGGMVEFRSSLTLSFFFKFFLHVTHEMNIKGFWKDGLHATNLSAIQSFTRPVGVGTQCYELVRQGTAVGQPVVHTSAMLQVTGEAEYTDDTPTPPNTLHAALVLSTKAHARILSIDASLAKSSPGFAGLFLSKDVPGANHTGPVIHDEEVFASDVVTCVGQIVGLVVADTRDNAKAAANKVNIEYSELPAILSIEEAVKAGSFHPNSKRCLVKGNVEQCFLSGACDRIIEGKVQVGGQEHFYMEPQSTLVWPVDSGNEIHMISSTQKAPQKHQKYVANVLGLPQSRVVCKTKRIGGGFGGKETRSAIFAAAASVAAYCLRQPVKLVLDRDIDMMTTGQRHSFLGKYKVGFTDDGKILALDLDVYNNGGHSHDLSLPVLERAMFHSDNVYDIPNVRVNGQVCFTNFPSNTAFRGFGGPQAMLIAENWIQHMATELKRSPEEIKELNFQSEGSVLHYGQLLQNCTIHSVWDELKVSCNFMEARKAVIDFNNNNRWRKRGIAMVPTKFGISFTTKFMNQAGALVQVYTDGTVLVTHGGVEMGQGLHTKVAQVAASSFNIPLSSIFISETSTDKVPNATPTAASASSDLYGAAVLDACQQIMARMEPVASRGNHKSFAELVLACYLERIDLSAHGFYITPDVGFDWVSGKGTPFYYFTYGAAFAEVEIDTLTGDFHTRTVDIVMDLGCSINPAIDIGQIEGGFIQGLGWAALEELKWGDDNHKWIRPGHLFTCGPGSYKIPSVNDIPLNFKVSLLKGVLNPKVIHSSKAVGEPPFFLGSAVLFAIKDAISAARAEEGHFDWFPLDSPATPERIRMACVDSITKKFASVYYRPKLSV

SEQ ID NO: 4031 - protein, 394 aa, uncultured bacterium
QSILASILLERPVKWIEDKSGNLISTGFARDVYLKGELALRKDGKILAVRMHTDADHGAFFADAQPSKFKIGLMHSTFACYDIPVAHLTARGMYTNKAPGGVAYRCSFRVTEAMFFQERMVQAAADDLGIDQAQFRRINFVRDDDFPHRTPFGFLTDSGQYEKCLRVGLEAIGYEDFLRQQAEAAKEGRLLGIGISTMTEPLGAGNSREYDILGIKMFDSAELRVHMTGKAILRTGAKTQGQGHETTWAQIVAHELGIPADDVVVEEGDTDTAPFGMGTYASRSTPVAGAAVAMVSRKIRAKARKLAAHLLEVSEEDIDWELGRFYVRSAPDRGVTIQECAMAAYSNMPDGLEPGLENTAYYDPPNLTWPFAVYICTVEVDPQTGVWDVLNFVA

SEQ ID NO: 4032 - protein, 704 aa, Candida albicans SC5314
MDSIFPSKVEYKQIDTFIALCDGLIYDTTVDEIKDVIAPDFPQEKLQEYVKTFTRPSQTPGFREAIYDTINSNTTNASRSFGILCNILGSRILAPTLTNSLTPIKDMTLKERETLLASWRDSPLAAKRRLFRAICALSGTTIVRLASELHLKAIHFPQRDLRETAYEGQVIDPFRYDFMEKPSFEGAEIYLPDIDVIIIGSGAGSGVVAHTLANDGYKTLVLEKGKYFSASELQFDDHTGVKQLYQGGGAVATLNQQMLILAGSTFGGGTTVNWSACIKTPFKVRKEWYDDFGVEFAATDSYDKDQDYVFKQMGASTDGITHSLANEVIMEGGKKLGYASKEINQNSGGHPHHPCGFCHLGCKYGIKQGSVVNWFRDAAANGSKFMEQVRVVKILNKNGIAYGVLCQDVATGVNFTITGPKKYVVSAGSLNTPTVLANSGFKNKNIGRNLTLHPVTTVFGDFGREVQADHFHNSIMTAVCTQVDDLDGRAHGAKIETILNAPFLQAAFLPWRGSNEFRRDLLRYNNMVAMLLITRDSTSGTVKGDPYRPDALYVDYTINKFDRNALLQALLITADMLYIEGAKRILSPQSWVPIFESNVPKDQRSIDDKDYVEWRKKVAGIPFDQYGAAYGSAHQMSSCRMSGKGPGYGAVDTNGKLFECSNVYVADASVLPTASGANPMISTMTVARHIGLGLAKDLKTKAKL

SEQ ID NO: 4033 - protein, 139 aa, Campylobacter lari RM2100
MPDLDIFLAGFGTGGTISGVGEILKEHNPNVKIIALEPAASPLLSQNIAASHKIQGIGANFIPKILNQKIIDEIVCVSNEDAINTALELGKNGIMAGISSGANVYMARKIALENPNKKVLTMLNDTAERYLSTDLFANL

SEQ ID NO: 4034 - protein, 195 aa, Lactobacillus acidophilus NCFM
MLVKNVSELIGHTPLLELPIKIPNHNKIYAKLEMNNPCDSIKDRLGQFLIEDAINKGKINKKTTIVEPTARNTGIGLALAAQKYHLRTILVVPEKFSFEKQTLMRALGADIINIPGELGMMGALKKSYEIASELANAYVPNQFDNLANPEAYRKTIVPKIIPDLNEVKVDAFVAGPGTGGTFAGIAQGLHDFFQI

SEQ ID NO: 4035 - protein, 601 aa, Arabidopsis thaliana
MANVEADFRTSGSNDDELYTELWKACAGPLVEVPRYGERVFYFPQGHMEQLVASTNQGVVDQEIPVFNLPPKILCRVLSVTLKAEHETDEVYAQITLQPEEDQSEPTSLDPPLVEPAKPTVDSFVKILTASDTSTHGGFSVLRKHATECLPSLDMTQPTPTQELVARDLHGYEWRFKHIFRGQPRRHLLTTGWSTFVTSKRLVAGDAFVFLRGETGDLRVGVRRLAKQQSTMPASVISSQSMRLGVLATASHAVTTTTIFVVFYKPRISQFIISVNKYMMAMKNGFSLGMRYRMRFEGEESPERIFTGTIIGSGDLSSQWPASKWRSLQIQWDEPSSIQRPNKVSPWEIEPFSPSALTPTPTQQQSKSKRSRPISEITGSPVASSFLSSFSQSHESNPSVKLLFQDPATERNSNKSVFSSGLQCKITEAPVTSSCRLFGFDLTSKPASATIPHDKQLISVDSNISDSTTKCQDPNSSNSPKEQKQQTSTRSRIKVQMQGTAVGRAVDLTLLRSYDELIKELEKMFEIEGELSPKDKWAIVFTDDEGDRMLVGDDPWNEFCKMAKKLFIYPSDEVKKMRSKSLLGDKGTIVNLESDQRTVHV

SEQ ID NO: 4036 - protein, 152 aa, Synechococcus sp. WH 7803
MALKTGDAAPSFALEDQDGQMRRLEDLKGKILVLFFYPKDDTPGCTAEACTFRDQYSDLTALGAEVWGVSGDDAVSHRRFAERHQLPFPLLSDNTGNLRRSFGVPKTFGLLPARVTYVIDQQGVIQLVFNNLLDGPAHVKEAEAVVRTLAAG

SEQ ID NO: 4037 - protein, 392 aa, Bacillus licheniformis ATCC 14580
MKVLWITSVYPSSQRPGEGVFHETQVQALQMQGVDVTVICPLPVNPAPLRLLKKKYRQVRTVPEYEERKGIPVYRPPYTALPGQLKWAQPHRRIAKSVLRTIEKHGLAPDLIHAHFAMPSGGAAAVVSQKLKVPYVLTLHGSDVNIYPHYSKGAFRAFETAVHSAAKVLAVSEALKAKTKEMTGAESSVLPIGVNLDRFQKPSASTLELREKLGLPQDKKLLTFVGRLVKGKGVAELAEAVRQLDDSYRAVFIGDGPEKQNIRQIAGEKAVLTGQVANHEISEYLAASDLFVLPSYSEGMPTVVIEALALKVPVLCTAVGGVPSLFGKHEHLLIKPHSASSITEAVKGYLEGGNWQEAIAEELYQTVHEDYDAFKNAGKLLDVYGDVVKNKN

SEQ ID NO: 4038 - protein, 270 aa, Sorghum bicolor
QLQQQEDDRILGLPGQPNGVAFGMYGGYVTIDDNNGRALYYWFQEADTADPAAAPLVLWLNGGPGCSSIGLGAMQELGAFRVHTNGESLLLNEYAWNKAANILFAESPAGVGFSYSNTSSDLSMGDDKMAQDTYTFLVKWFERFPHYNYREFYIAGESGHFIPQLSQVVYRNRNNSPFINFQGLLVSSGLTNDHEDMIGMFESWWHHGLISDETRDSGLKVCPGTSFMHPTPECTEVWNKALAEQGNINPYTIYTPTCDREPSPYQRRFW

SEQ ID NO: 4039 - protein, 398 aa, Thauera sp. MZ1T
MIRVLMVSDVFFPRVNGVSTSIATFRRALAAQGVEVRLIAPRYAGEAEEPGIVRVAGRRLPLDPEDRLVDARAMHAAALREAAVCDLVHIQTPFLAHRAGLRAARAQDRPVLLTYHTFFEEYLHHYLPFLPAGVLRGLARRVSRTQCNAVDAVVVPSTAMHERLAGYGVRSPMEVLPTGIPLQDFAAGDGPHFRRLYDIPEDAPMALYIGRVAHEKNIGFLLEVATRLKARRPDFVLVVAGEGPANARLQRQALAAGLGSTVRFVGYLERRRRLPDCYAAADVFVFASRTETQGLVLLEAMAAGLPVVALSAMGTTDILRPERGARIAPDHPDGFAAVVDVVLADPRLRRRLAAEARGYAAEWADGVMAGRLAALYRRLLAAPQSVPPVHASQVVSTR

SEQ ID NO: 4040 - protein, 152 aa, Methanosarcina barkeri str. Fusaro
MKFPMKRTDRDMYSWDPFDEIRRMQNYMENMFRTFPALESRFGNEAFSPLTDVMEEDEKVVVTTDLPGVDREDVELNLRDNVLVISAGKGKEEEAEKEGYLRKERSFMRYYREIPLPDGVTEEGTTAQLKNGVLTVTLPKTKSVAGKRIEIE

SEQ ID NO: 4041 - protein, 702 aa, Mycobacterium marinum M
MTTAPATRGAMRFARVEAYSKITGTARYAADHRPEGLLYAVLVGAPVAAGRLKAVDADAALGSPGVVAVLIADDLPDFPLLSPPSAVRRMPLMNNEIHYEGQAVAIVIAESIEAAEAARALVVVDCERTNAVVLGSGTREPADGEYSDPFDKGDFDTAWSNAAIRVERTYLQPPRHHHAMETSGTVAQWDEDQLTLWDAVQASATVPPVIATALGIDAHRIRIVAPHIGGGFGSKSFVWPHQTLAAAAARVTGRPVKLHLRRADQFSSVGYQPWMEQTMRLAADRTGRLIGIEHVAVNNTGMVDNYVEPATTATKGLYAADAIRTRQFVERVNLNVPTPMRAPLEGPGMWALESAMNELADEAGMDPLDLRLANYAENSPADGRPWSSNRLREAYAEGARRYRWRERYERPRAEGPWAIGHGMATCTMGSFRFPSQARVRLRDDGTAVVEANVHDIGTGVQTILCQIAAAELGISSDRVEILWGDTDLPTAGPAYGSSTTMSVGSAVAAAARHVVNQLAALGIDDPAATGIAEVVGEGRFSTPGGGTNLDGEGTPFAIRAWGAVFVEVGVDRDLGLIRLRHAVGVYSAGRILNPVTARAQMIGGIIWGWGKATLEASTQEPTYGRWLAKNLSNVALPVNADIPAAIDVSFIDEFDSAASLIGARGIGELGATGVDAAVAAAVYDAVGVRVRELPILPWQVLS

SEQ ID NO: 4042 - protein, 903 aa, Rhodococcus sp. RHA1
MKLTVDGQSVDADPRPGQCLRTFLREQQRFAVKKGCDAGDCGACSVLLDGVPVHSCVVPAHRAENREVTTAAGLGSPDRLHPVQQQFVDAAGFQCGFCTPGIVVTASALDSGQRADLPRSLKGNLCRCTGYRAIRDAVGGVCTTESDRAGESFGRSIPAPAAARVVCGAEPYTLDLAVEGLTHIQILGSPHAHARITRLDTSAAERLPGVHAVLTHRDSPDVAFSTARHEFRTDDPDDTYVFDTILRFRGQRVAAVVADSVDIARRAVELIDVEYEVLEAVFDPDLARRPGAPLLHGDKGADSRIADPARNLVAEVHGEVGDLAAGLAAARDTGAVVEGTWQTQRVQHAHLETHSAIGWLDSDGRLTLRSSTQVPFLVRDELAHLFSRDRSQVRVFTARIGGGFGAKQEMLVEDLVALAVLRTGRPVQYEFTRSDQFTIAPCRHPMRVSVKVGADGDGKLTALAVDVLSDAGAYGNHSVGVMFHGCSESVALYRSPNKRVDAQAVYTNNLPSGAFRGYGLGQVIFAVESALDQLATQLGIDPFELRRRNVVVPGDDFVDAEVEHGDLTYGSYGLDQCLDLAEAALRRGNDVRPPDGPQWRVGEGMAASMIATIPPRGHFADVSCTLVEGGRYELRVGTAEFGNGTTTVHAQLAASALGTTADRISVLQSDTDVAAHDTGAFGSAGTVVAGKAVHLAGTRLREQLFEVARRVAGATEDADCALTPEAVEVAGRVVELDKLVPEGPIRAEGRHDGTPRSVVFNVHAFRVAVDTVTGEVRILQSIQAADAGTVLNPQQCRGQVEGGVAQAIGSALYEEILLDGAGTVLNPQLRNYHLPQLVDVPDTEVYFADTYDELGPHGAKSMSESPYNPVAPALANAIADATGARLRRIPMTPAAVWRALPRP

SEQ ID NO: 4043 - protein, 728 aa, Parvularcula bermudensis HTCC2503
MRVLVLTTLYPYPGRPNHGVFVENRIKALAALGHNIRVIAPIPWFPSRWRGFGDWARYADAPDRESRFGIDIHHPRYLILPKVGMTLAAKTLEMAFSRAIADQIADGFLPDLIDAHYYFPDGVAAAAAAEKVDIPVVITARGSDVTLLPRYKKVRRAILDASTKAAATITVSEALRTDLTRLGAAPASIHPIRNGVDLERFSPDGLMIDRTTAPVLLSVGHLIPRKGHDIAIGALARLPQAVLVIVGTGPEEKALKDLAARLGVAHRVFFRGQQPHSRLPLFYRGADVLILASTREGWPNVLLEAMACGAPCVASDVGGNAEVIASAAAGRIVKERTPDAFADAIADVLASGPARSETRLYAEGFDWRSVARRVETVWQEARGAVRHGGWGLPSPLFVDGKARCVLTIDTEECFSWDGDYGSWTLPPVSAVEAIQAAAETAGVKPLYFVTFPLLEDDAIGHYLAGLHHEGRAYCGIHFHSWATPPGQGPTDDFHSYQHNLTPHQHRAKLDRLIEAFEFRFGEPPIAHRAGRYGCAPWVLDQLMDRGIYLDFSPSAGFDFRGDGGPNYAHFPTGPRFRRVGRDTQWVIPVSGARVLPKLSVPLPKIFSGGQAPFSALSRTITTPVRLTPEGNDIATMLRLARMLLAGGDRLLTPTLHLSTLVPGATHYAATPEEVRNLLKTLTYFLMEVQKLGATPTDLLDLDHAAQRDRRVATAWSHRQPKMAADSVG

SEQ ID NO: 4044 - protein, 337 aa, Yersinia pestis CO92
MKIIYDGIINSLQNMGGVTVYFSELVSRLPATDFYWYSYADEISGFGVGNVKIKSRLLERYRNFSLDTINYNSLSVFHSSYYRLPDFDIPIVTTVHDFTYEKFVNGPAKWVHSWQKNRAVNNSDLIICVSENTAKDLQMYCSVPSNKIRVIYNGVSDKYHYIKGVKITTNKVIFVGARGGYKNFDIAVKAISKTPHLELSVVGGGAFTSKELSLLNHYLPGRYHGLGRLSDEALNEAYNSAYALLYPSSYEGFGIPILEAMSAGCPVISVNVSSIPEVAGDAAILVQKPTIDELVDGLLAVESERSKLIGYGMKQAAKFSWDKCYQETLDVYKELNK

SEQ ID NO: 4045 - protein, 799 aa, Pseudomonas putida KT2440
MSNHHVAKSQAEMAELFSQDLTTGVGRGVKHDSADKHVSGEALYIDDRLEFPNQLHVYARTADRAHARILRIDTTPCYAFEGVRIAITHEDIPGLKDIGPVVAGDPLLAIDKVEFFGQPVLAVAARDLETARKAAMAAIVEYEDLEPVLDVVEALRKKHFVLDSHTHQRGDSAAALASAPHRIQGTLHIGGQEHFYLETQISSVMPTEDGGMIVYCSTQNPTEVQKLVAEVLDVPMNKVVLDMRRMGGGFGGKETQAASPACLCAVIARLTGQPTKMRLPRVEDMTMTGKRHPFYVEYDVGFDDNGRLHGINFDLAGNCGYSPDLSGSIVDRAMFHSDNAYYLGDATVHGHRCKTNTASNTAYRGFGGPQGMVAIEQVMDHIARHLGRDPLAVRKANYYGKTERNVTHYYQTVEHNMLEEMTAELEASSDYAERRESIRRFNANSPILKKGLALTPVKFGISFTATFLNQAGALIHIYTDGSIHLNHGGTEMGQGLNTKVAQVVAQIFQVDFSRIQITATNTDKVPNTSPTAASSGADLNGKAAQNAAEILKKRLTEFAARHYQVTEEDVEFRNGHVRVRDQIVSFEQLVQQAYFAQVSLSSTGFYRTPKIFYDRSQARGRPFYYFAFGAACVEVIVDTLTGEYKMLRADILHDVGDSLNPAIDIGQVEGGFIQGMGWLTTEELVWNAKGKLMTNGPASYKIPAVADMPLDLRVKLVENRKNPEDTVFHSKAVGEPPFMLGIAAWCAIKDAVASLADYRVQPQVDAPATPERVLWGCEQMRKAVAETQSRERELETITP

SEQ ID NO: 4046 - protein, 169 aa, Mycobacterium marinum M
MSNVADTAPTFSRRLPIRVRINGEEVEAEVEARTTLLDWLRETLGLTGAKKGCNEGACGACTVLVDGTHMNSCLTLAVQCSGRDVTTVEGLVGPDGELHPVQQAFAEHDAFQCGYCTPGQIVSAVACIAEGYATDEISVREWMSGNICRCSSYPQITSAVLAAANSSVR

SEQ ID NO: 4047 - protein, 192 aa, Xanthomonas campestris pv. campestris str. ATCC 33913
MNATPAAARDTAPATATTVAPTYPVALRINGQPYQLQLEAWVSLLDLLRDRLDLTGTKKGCDHGQCGACTVLVDGRRINSCLTLAVMQDGADITTVEGLAEGEQLHPLQRAFIAHDAFQCGYCTPGQLCSAVGLINEGQAHDRDQVRELMSGNICRCGAYPQITDAVMEVLGTPSDSSDSADTPWTPGTVPA

SEQ ID NO: 4048 - protein, 157 aa, Leifsonia xyli subsp. xyli str. CTCB07
MALENDTQAPDFELPNQHGQAVRLSDFRGRKAVTIVFFPLAFSGTCTGELCELRDNLALFEDHRVELLAVSVDSKFTLRAWEEHEGYGFSLLADFWPHGGIAKEYGVFLPEKGFANRATFVIDESGIIRASFITAPGRARSIDTYRTALDLLPAHVG

SEQ ID NO: 4049 - protein, 150 aa, Synechococcus elongatus PCC 6301
MAIAVGDVAPDFSLPAQDGTTVSLSDFRGQKPVVLYFYPKDDTPGCTIEACSFRDSYTAFQEVGAVVLGVSSDSIDSHQRFAQKYNLPFQLLSDAGDRLRQTYGVPKTLFVIPGRVTYVIDKEGKVRHIFDSLLNAQAHIQESLNILRSL

SEQ ID NO: 4050 - protein, 735 aa, Xanthomonas campestris pv. campestris str. ATCC 33913
MKFDTPAGTNPIDQGKIVGKPVDRIDGPLKTTGMAPYAYEHHDLPGKAAYGHVVGAGIAKGTIRSIDLSAARNAPGVLGIVTAQNAGKLQKGKLNTAKLLGGPEIQHYHQAIAVVVAETFEQARAAGQLIKVDYGRHVGEYDLARARPKAEVTKEGGAPNSTVGDFAGAFAAAPVQLDAEYTTPDHSHAMMEPHASIAMWEGDKLNVWTSNQMINWGAGDLARTLGLPPENVRLMSPYIGGGFGGKLFLRADAVLAALAARQVKRPVKVMLSRPLIANNTTHRPATVQRIRIGAQRDGKITAIAHESWSGDLPGGAPEIAASQTQLLYAGANRLITTRLAVLDLPEGNAMRAPGEAPGLMALEVAMDEMAEKLAMDPVKFRVVNDTQVDPENPQRPFSQRQLVKCLEDGAKQFGWSKRKAKPGSTRDGRWLVGMGVASAFRNAIATTSGARMRLEQGGRVVVETDMTDIGTGSYTIIAQTAAEMLGVPLDWVDVRLGDSSFPVSAGSGGQWGANSSTAGVYAAAVKLREAIATQLGLDPSKAEFADGHVRAGGKRIALGDAAAQGPLVVEDKIEFGDLAKKQQLSTFGAHFVEVGVDVVTAEVRIRRMLAVCAAGRILNPKTARSQVIGAMTMGAGSALMEELVVDKRLGFFVNHDLAGYEVPVHADIPHQDVVFLEETDPMSSPMKAKGVGELGICGVAAAIANAVYNATGVRVRDYPVTLDKLLPHLPEPLRA

SEQ ID NO: 4051 - protein, 331 aa, Zea mays
  misc_feature (209)..(209): Xaa can be any naturally occurring amino acid
MAAAVLAPKPPPPLPTRAFPSSSPSRFAPAFISPRHPLRRLLLRPIPCASSPSSVLMPNPDLETEPAHDGDGDGDEAPPESRPRRIALFVEPPPFAYVSGYKNRFQNFIKYLREMGDEVIVVTTHEGVPQEFHGAKLIGSWRVSSFPCPWYQKVPLSLALSPRIIAEVARFKPDIIHASSPGIMVFGALIIAKLLCVPLVMSYHTHVPXSYIPRYTFSWLVKPMWLIIKFLHRAADLTLVPSVAIGRDLQAARVTAANKIRLWNKGVDSESFHPRFRNMEMRSRLTNGEPEKPLVFYVGRLGVEKSLDFLKRRALICPWYFDCYGLWYVQA

SEQ ID NO: 4052 - protein, 507 aa, Acidovorax sp. JS42
MTTPRPIRFVRRGRTVQLHGIAPDRTLLEILREDLGATGTKEGCGEGDCGACTVVLGEARQGRMHYQAVNSCIRLAHSIDGMALWTVEDLAHDPLIRPASGPKGSALHPVQEALVQCHGSQCGFCTPGFAMSLFGLYQNEVCQNRGITRAQAAEALSGNLCRCTGYRPILDAAQQMQQLPRVQVDETALLQQLELLALAPQALEADFSYISPATLPDLLAARAAHPDAQLVAGATDLGLWITKQHRRFPRLLDVTRAAELTGVVEHDGQLTLGAAVSLTDAFSALQARWPQLHRFAARFAGLPVRNSGTLGGNVANGSPIGDSMPLLIALGAQVELASTRGSRRMPLEDFYTGYRQNQLAADELLTFIHLPLPTPDQGLADQRLAAYKVSKRFDDDISAVCLAIHLRIEGQTITQARIGAGGVAATPARARQTEAALTGQPWTAATAERAAAVLQAEFNPISDMRASGAYRREVLGALVRRFWRETRGGAETPALERLQPLTLEATP

SEQ ID NO: 4053 - protein, 315 aa, Microcystis aeruginosa PCC 7806
MLIARDITQLVGRTPLVQLNRIPVAEGVKARIVVKLESMNPAASVKDRIGVSMVEDAEAAGLIHPDKTILVEPTSGNTGIALAMVAAAKGYRLVLTMPETMSLERRAMLKAYGAQLELTPGSQGMEGAITRAEEIVENTPNAYSLQQFRNPANPKIHRETTAEEIWADTDGLVDIVIGGVGTGGTITGIAETIKPRRPQFQAIAVEPSNSPVLSGGQPGPHKIQGIGAGFIPAIFRPELIDEVIIVDDTEAFAYARRLARQEGLLSGISAGAALWAAIQVGKRPENEDKLIVMIQPSFGERYLSTALFKDLEDID

SEQ ID NO: 4054 - protein, 801 aa, Acidovorax sp. JS42
MKRDDDHAPTARTTAGRAAAGNPPAMTQPAMGQPAMGQPAMGQPHAHESARAQVAGSAHYIDDLPEVKGTLYAAPILSTVAHGRLESVDTQAALQLAGVHGVVLAQDIPGDPVLAAFAHDEPVFAQATVQHIGQVIGLVVADSVMQARRAARQVKLSITALPAILTVRDALAAESYVLPPVHVRRGDAAQALAQAPHRLQGRLEVGGQEHFYLEGQIAYALPQEQGQWLIHSSTQHPGEVQHWVAHALGIDSHAVRVECRRMGGGFGGKETQAGHLAVWAALAAHKFGRPVKLRLDRDDDFMVTGKRHPFAYEWDVGFDDAGRITGLKLMMAANCGFSADLSGPVADRAVFHCDNAYFLEHVEIASYRCKTHTQSHTAFRGFGGPQGVIAIETILGDIARALGRDALDVRMANLYGLHECNVTHYQMTVEDNILHELLPQLEQSALYRQRQEAVSAWNAANPVLKRGLGLTPVKFGISFTATLFNQAGALVHVYTDGSVQVNHGGTEMGQGLHTKVAQIVADELGVPLSRVLVTASDTAKVPNASATAASSGTDLNGRAAQFAARHVRDNLAAFVCGLDGCGAGAIRFAGGQVISPKRTRRWEDVVKEAYANRIQLWSDGFYRTPKIHYDKTTLTGRPFYYFAYGAACTEVAIDTHTGESRVLAVDILHDVGHSINPAIDLGQIEGGFVQGMGWLTTEQLVWNDEGRLATHAPSTYKIPATGDVPEHLRVQLWHQPNREDNVGGSKAVGEPPFMLAISVYEALRNAIAAARGDGGGDARAPVQLTAPATAENVLRALGRLE

SEQ ID NO: 4055 - protein, 310 aa, Bacillus clausii KSM-K16
MRVVDNIADLIGQTPLVRLNKLPDSEGASVYLKLEMNNPSGSVKDRAAFSMIIQAEKDGHLQPGSTIIEPTSGNTGIGLAMNAAARGYRAILVMPDTMSQERINLLKAYGAEVVLTEGDKKMPGAIEKAKELAESIPGSFMPMQFENEANPDAHRRTTAIEIKQDLDAIGATLSGFVAASGTGGTITGTGEVLKTYYPDALIHVVEPAGSPVLSGGKPGPHKLVGTSPGFVPPILNTAIYDQIRRIEDEDAYKTAKDLARLEGILVGPSSGAACFAALEMAKTLDKGDHVVAIACDTGERYLSTDLYQSE

SEQ ID NO: 4056 - protein, 300 aa, Burkholderia cenocepacia J2315
MAYKTIEDTIGNTPLVQLVRLPDDEIRARNNVVLAKLEGNNPAGSVKDRPALSMISKAEARGRIKPGDTLIEATSGNTGIALAMAAAIRGYKMVLIMPEDLSVERRQSMAAYGAEIILTPVKGGMELARDLAEQMQREGKGVILDQFGNPDNPIAHYEATGPEIWRDTEGRVTHFVSAMGTTGTIMGTSRYLKEQNAAIEIVGAQPEDGSRIPGIRKWPEAYMPTIFDRSRVDRVENVSQAAAETMARRLAAVEGIFAGISSGGACEVAMRIARQVENATIVFIVCDRGDRYLSTGVFPA

SEQ ID NO: 4057 - protein, 512 aa, Deinococcus radiodurans R1
MTLPLTSNSSPALPARAATRIALYTEGTYPQAHGGVSVWVDQLVRGLSDHQFAVQAIAGLPFTRMALEVPGNVQVEQVPLWGPPPGGAGGRLWQQAHRRAFAGEVLTAYETLLTGLCRLDVPTFSVALRRLSDLGQRGSLTPALDSARAAQLTLNLWDREAQTLAAQRDRLSPRLPRPTVAEALDVQIWLEHALRPLTAVPPEADVGHAVSNGFAAMLALHGLWQRGTPFVLTEHGIYLRERYIEFRRGRHAPGYKTMLLRFYRLLCSVAYQNAALVLPGSHYNRRWEERLGADPDRIQCVYNGIDPNIFPPAESEPEGPVVSWVGRVDPLKDLETLIRAFDLVRRRRPDARLRLFGGTPVGNEGYEQHCRQVAAGLNLDEHVKFEGRVDDITDAYRAGQVVALTSVSEGFPYTVIEAMAMGRPPVATRVGGVPEAVGDAGLIVRPRDALGVANALTKLLDDPALRQQLGQAARARVMDLFTLDGCLDAYRRAYPVARAARLSPSQGPGELW

SEQ ID NO: 4058 - protein, 309 aa, Frankia sp. CcI3
MRIAEDITQLIGNTPLVRLRRVTDGVGAQVVAKLESFNPAHSVKDRLGVALIDAVERAGLIGPDTVILEPTSGNTGIALAMVCAARGYRCVLTMPETMSTERRMLLRALGAELVLTPGAEGMPGAIAKAEELAKNDERYLIPQQFENPANPAIHRATTAEEIWRDTDGQIDVLVAGVGTGGTITGVAQVIKERRPEARFVAVEPSASPVLSGGVKGPHPIQGIGAGFVPPVLETGLVDEIIQVDGEDAFDLARRLAQEEGLLVGISSGAAVSAALQVARRPENAGKLVVVVLPDFGERYLSTPLFAGLG

SEQ ID NO: 4059 - protein, 383 aa, Synechococcus elongatus PCC 6301
MRIAWLGKKSPFCGNVTYSREITNALRDRGHDVSFFHFAQSEAEASDEGSEGIEVSLPCLYKSQIYTIPSFRSSKVLKSSLEEIRPDLVHASLTLSPLDFLLPEICEELGLPLVATFHPAFDHKLRNISSGTQHLTYQLYAPCLARYDRTVVFSQIQRDLLIRLGVPSDRIAVIPNGVDIDRYSPGPSDFKQQLGVDRLFVYMGRIAAEKNVEALLRGWKLANLGPESRLLIVGDGTLRSLLEVSYGPEQGVQWWGFEADEQRRIQMLRAADAFILPSFVEGLSLSLLEAMACGVACLATDAGADGEVLEGGAGIVLNPQRTSAQLQTLLPVLRDQPELSAILGCKARQRVLDRYTLEGNLDRLEQLYQDLLPAAVLSASAVS

SEQ ID NO: 4060 - protein, 507 aa, Saccharomyces cerevisiae
MTKSEQQADSRHNVIDLVGNTPLIALKKLPKALGIKPQIYAKLELYNPGGSIKDRIAKSMVEEAEASGRIHPSRSTLIEPTSGNTGIGLALIGAIKGYRTIITLPEKMSNEKVSVLKALGAEIIRTPTAAAWDSPESHIGVAKKLEKEIPGAVILDQYNNMMNPEAHYFGTGREIQRQLEDLNLFDNLRAVVAGAGTGGTISGISKYLKEQNDKIQIVGADPFGSILAQPENLNKTDITDYKVEGIGYDFVPQVLDRKLIDVWYKTDDKPSFKYARQLISNEGVLVGGSSGSAFTAVVKYCEDHPELTEDDVIVAIFPDSIRSYLTKFVDDEWLKKNNLWDDDVLARFDSSKLEASTTKYADVFGNATVKDLHLKPVVSVKETAKVTDVIKILKDNGFDQLPVLTEDGKLSGLVTLSELLRKLSINNSNNDNTIKGKYLDFKKLNNFNDVSSYNENKSGKKKFIKFDENSKLSDLNRFFEKNSSAVITDGLKPIHIVTKMDLLNYLA

SEQ ID NO: 4061 - protein, 791 aa, Bradyrhizobium japonicum USDA 110
MSAPLTSLDRPNSYIGRSVPRPNAKRLLAGRGRYVSDLRLPRMLYAAFLRSPHAHAKIVAVNTEQTRALEGVHLVATGEDLAKICTPWTGTLDHFKGMTSAPQLPLPLDRVVWAGQAVVAVVAESRAIAEDALELIEIDYEDLPLVVDIDSAREAGGPVINPGSANNTCFRAQLDNGTVDEAFAHAAHVVEEEFSFGRHTAVTLEPRAIVADYDPAAGALTVHHGTQTPYQFQDLYSRHYGIPEARVRVIATDIGGSFGMKLHVYHEDMAVVGLSILLGRPVKYVADRIESFVSDIHARDHRVRARMAVDAKGEILAMDVLDLTAIGAFSTYPRTSVVEGNQVIRLMGAPYRFRNYRATLEVLFQNKVQTSQYRAVGHPIACAVTERLVDMAAAKVGLDPFAIRAQNVIADDAYPQTSPTGYRFEALSHQACLKRLHEMMDYDALRAEQANLRKRGIYRGIGIATFVEITNPSPAFYGVGGARISSQDGAILSLTPSGEVRCLISVTEQGQGTEAIISQIVADQLGLAQERVKVITGDTEVTPHGGATWACRGAGIGGETALQATRALKRNILEIAALILQEQPSALDIIDGEVVDAVTRNQRMPIAEIARIAYFRSDTLPPGTQAQLTVSHHFAPQGYPFAFTNGIQGCSLEVDVETGFIKVLKHFIVEDCGRVINPMLVDEQLRGGVVQGLGAALFEECRYSETGQLMNGSLADYLVPMPMEMPDIVIGHVETPTADTVLGAKGVGEAGTAAASACVLNAVNDALAPFGATINSIPITPTKVLKALKRF

SEQ ID NO: 4062 - protein, 174 aa, Bradyrhizobium japonicum USDA 110
MSGFDETLLGDADETVRVRLVVNGRKVACEVAPRETLVDCLRNALELTGTHAGCEMGACGACLVQLDGRAVHSCLMFAVQADGAKIETIEGLTESGVIADLQAEFHRRNALQCGFCTPGMLVNANELLSRVARPNREEIRDALSGNYCRCTGYEAIVDAIDAVAKARSDNGGAT

SEQ ID NO: 4063 - protein, 308 aa, Arabidopsis thaliana
MASWMKAVLISTGVVATAMHLKVIVPVAMDFSQNPIILSSFLTWLKPPYLYVITNVIIIVVGVSYRITTVSSHVDGKDYEASYSGDNKFQTDHQQIVQEAPLRRRTETKDADFGFIGKVLQIVKEPEVVYEEKERPATVEEEEKKCIIVVSKSENQPPVEKPLVTARIGQKKPVVKTTPAERNSMRALRVAKPKRNETLENTWKMIMEGNKSTLPLTSYYKRPDTFGLGEETKQSGVLKKSETFSDRTNCYQSLPPPPPPLVKVKKVKVSRSRDELNRKVEAFIKKCNDERFASMKLDNEVARHGLSY

SEQ ID NO: 4064 - protein, 166 aa, Burkholderia sp. 383
MIAITVNSVQHTLDIDPTTPLLYVLRNDLHLHGAKFGCGLGQCGACTVIVDDKPMFSCLIPIAAIGQRHVRTIESLGTLERPGPLQRAFIDHQAAQCGYCIAGMIMRAQALLERNPHPTESELRAHMEPNLCRCGTHMRILAAVRQVAGLQQPENASEPVTVSKAL

SEQ ID NO: 4065 - protein, 396 aa, uncultured bacterium
SWSILASILLERPVKWIEDKSGNLISTGFARDVYLKGELALRKDGKILAVRMHTDADHGAFFADAQPSKFKIGLMHSTFACYDIPVAHLTARGMYTNKAPGGVAYRCSFRVTEAMFFQERMVQAAADDLGIDQAQFRRINFVRDDDFPHRTPFGFLTDSGQYEKCLRVGLEAIGYEDFLRQQAEAAKEGRLLGIGISTMTEPLGAGNSREYDILGIKMFDSAELRVHMTGKAILRTGAKTQGQGHETTWAQIVAHELGIPADDVVVEEGDTDTAPFGMGTYASRSTPVAGAAVAMVSRKIRAKARKLAAHLLEVSEEDIDWELGRFYVRSAPDRGVTIQECAMAAYSNMPDGLEPGLENTAYYDPPNLTWPFAVYICTVEVDPQTGVWDVLNFVAV

SEQ ID NO: 4066 - protein, 188 aa, Erythrobacter sp. SD-21
MGIIGSTIKPFNATAFQAGKDFFDVTDEDVKGKWAVFFFYPADFTFVCPTELEDLGEQYNMLQKMDVEVYAVSTDTHFSHKAWHDTSEKIGKLNFPFLGDQNHVLARNFDVLREGAGLADRATFVVDPDGVIQIMEQTCEGVGRNANELARKIKAAQYVRANPGQVCPAAWEEGSDTLAPSLDLVGKI

SEQ ID NO: 4067 - protein, 230 aa, Oryza sativa
  misc_feature (85)..(85): Xaa can be any naturally occurring amino acid
  misc_feature (139)..(139): Xaa can be any naturally occurring amino acid
MGQQAAEAQPLLLQGDQVDAEWGCRPHRIVLFVEPSPFAYISGYKNRFQNFIKHLREMGDEVLVVTTHKGAPEEFHGAKVIGSWXFPCPLYQNVPLSLALSPRIFSAVAKFKPDIIHATSPGVMVFGARFIAKMLSVPXDLTLVPSVAIAEDFETAKVVSANRVRLWNKGVDSESFHPKFRKHEMRIKLSGGEPEKPLIIHVGRFGREKNLDFLKRVIIFLACTYHCLSV

SEQ ID NO: 4068 - protein, 156 aa, Ananas comosus
MSLVRRSNIFDPFSLDLWEPFEGFPFGGALSFPRPSASFPAETASFAGARIDWKETPEAHVFKADLPGVKKEEVKVEVEEGNVLQISGERTREKEEKNDTWHRVERSSGKFLRRFRLPDNAKVDQVKAAMENGVLTVTVPKEDVKKPQVKSVQISG

SEQ ID NO: 4069 - protein, 502 aa, Arabidopsis thaliana
MRKGQGYSYSVIASVLVLLCVVVSRIECSSQVHALSRLYLSKRGVGGSSTMDTSHFKAVKDLKPSSLRSAANQEGLRKRDLIRRLPGQPPVSFDQYGGYVTVNESAGRSFFYYFVEASKSKDSSPLLLWLNGGPGCSSLAYGALQELGPFRVHSDGKTLFRNRYAWNNAANVLFLESPAGVGFSYTNTTSDLEKHGDRNTAADNYIFLVNWLERFPEYKGRDLYIAGESYAGHYVPQLAHTILLHHRSFFNLKGILIGNAVINDETDLMGMYDFFESHALISEDSLARLKSNCDLKTESASVMTEECAVVSDQIDMDTYYLDIYNIYAPLCLNSTLTRRPKRGTTIREFDPCSDHYVQAYLNRPEVQAALHANATKLPYEWQPCSSVIKKWNDSPTTVIPLIKELMGQGVRVWVFSGDTDGRIPVTSTKYSLKKMNLTAKTAWHPWYLGGEVGGYTEEYKGKLTFATVRGAGHQVPSFQPKRSLSLFIHFLNDTPLPDTSRY

SEQ ID NO: 4070 - protein, 217 aa, Oryza sativa Japonica Group
MAFAVSTACRPSLLLPPRQRSSPPRPRPLLCTPSTAAFRRGALSATTTPTPARAALPSTTGRNRIVCGKVSKGSAAPNFTLRDQDGRAVSLSKFKGRPVVVYFYPADETPGCTKQACAFRDSYEKFKKAGAEVIGISGDDAASHKEFKKKYKLPFTLLSDEGNKVRKEWGVPADLFGTLPGRQTYVLDKNGVVQYIYNNQFQPEKHIGETLKILQSL

SEQ ID NO: 4071 - protein, 152 aa, Campylobacter upsaliensis RM3195
MKALKIGDFAPNFELLNQDGVKIALKDFIGKKVILYFYPKDNTPGCTSESCDFSTLYEKFHTKNAVILGISPDSIKSHEKFIQKYHLNQTLLSDENKEVCKAYGAWGLKKNYGKEYEGLIRSTFIIDEKGKIAQIYSPVRVKDHALKVLESL

SEQ ID NO: 4072 - protein, 455 aa, Azotobacter vinelandii
MAPRPRANASGGRSPRHARPTDDLPIATERRPSPERQPAVIGLTCHAPRLTVMTDILHIALISETFPPEVNGVANTLGRLCDGLRARGHHVQVVRPRQSTDQGRRGDERLVLTRGWPLPGYPGLQWGQSATGKLLHRWKRERPDVIYIATEGPLGLSALRCARRLGIPAISGFHTNFQQYSSHYGFGLLTRLLTGYLRWFHNHSRLTLVPSASQRMELTRRGFERLELLSRGVDSHLFHPARRSASLRASWGVGDDDLVVLHVGRLAPEKNLGLLGSSFRSLQAAHPQRRLKLVVVGDGPLYASLRQQWPEAHFCGMQLGETLATHYASGDLFIFPSLSETFGNVVLEALASGLGVVAYDQAAAAQHIRHGHNGALAEPGDEQGFIEAANWLLEDEENLRRVRLNARQHASHQGWEAIVGQFEEHLRGTLQAPAVQASGKRHAQPSTAPAAHSRR

SEQ ID NO: 4073 - protein, 777 aa, Desulfotalea psychrophila LSv54
MSKFKVVGQNIKRRDGVDKTTGRGLFTSDMSLPGMLHAKVLRSPHPHAKIVSIDVSAAEKMIGVRAIMTHENGPKNLFNAAAPMFLTAPHLERVLDQYLFDDIVRYVGDEVAAVAATTEAIAEQAIKLIRVEYEILPAVLDLEEAMGPDAPELHGDKGCTPEGKNIPGEIIRIPYGDIEKGLAESEVIIEKSFKLPIVKQVQMETQSAVAQVDGNGEVTVWSTTQTPHPTKAILGKIFAMPASKIRVLAPPYVGGGFGVRIGLSGLAEPIAMALAMLAKKPVKLVYSRKEDFIASDTRHPAVVTVKLGADRDGTFRALDVKALFGTGAYCSFGAELPGVCGAMTLAIYRIPHQRYYGHSVYTNQTIGGAMRGFGNPQGNLALEQVVDLMAIELGMDAYELRMKNITQVGDKWCLPFPCLSSELAECMRQGAESIGWKRRGSLNSPGSKKVRGLGMAVGTHVSNAWPFCVDYDNAYVTIQSDGTANVASGVPELGTGVCTSLVQIAAETLSMDVDKISLTYGDTQSTPFDIGSHASRTCYAAGLAIQIAATDAKKQMLEYAAPLFSVTPEDLQIKDDRVELVDATVASEHCSLDDIAGGKGNSVTLEELVYHAHVRNKQFIGVARNVPANAAPWHACFAEVEVDKETGQVEVIKLAAAHDVGTAINPMIVEGQIEGGAVQGIGYALTEEIRYNNRGGQVNSSMHNYMLPTAEDIPPIDAIIVEASDPTGPFGAKGAGECSLVCPASAIANAVADATGIRFVELPITPERVFAALHLEN

SEQ ID NO: 4074 - protein, 168 aa, Desulfotalea psychrophila LSv54
MNMSKQLITFTLNGEPVEVYVDPFELFVDVLRDKLHLTGTKKGCGEGGCGSCTVLVNGKAVNSCLLPAMRVIGTKVETIEGVESSKGLHPLQTSFIEKGAVQCGFCTPGMIMSSKALLDKNKSPSKDQIREAVSGNVCRCTGYVKIEDAIEDAARKLRASAVKGEKYE

SEQ ID NO: 4075 - protein, 1102 aa, Vitis vinifera
  misc_feature (410)..(410): Xaa can be any naturally occurring amino acid
  misc_feature (802)..(802): Xaa can be any naturally occurring amino acid
  misc_feature (927)..(927): Xaa can be any naturally occurring amino acid
  misc_feature (935)..(935): Xaa can be any naturally occurring amino acid
MLNLLRDFRTSPEEDSVRWKGEGNGVFGVKGAYKMLIGSSACAFPNRRIWMDKVPTKVSFFAWEASWGKILTLDKFQRRGWQLPNRCFLCGCEEENANHLLHCTVVKTLWEIALAIFGVQWVFPESVKEVLLSWRAFYRWLADRYPLAVVNAVEDRPAVVNGVSVAVDTTRPNPNGNEFDNLYLDMNGIIHPCFHPEGLPAPKTYTDVFKAVFKYIDRIFSLVRPRKLLYMAIDGVAPRAKMNQQRARRFRAAKEAADDASGTERLKTVFESEMEMLALLDQTKKLDSNVITPGTEFMALLSSALKYYIHLRMNLDPGWRGIKVILSDANVPGEGEHKIMSYIRLQRNLPGFDPNTRHCLYGLDADLIMLALATHEIHFSILREDVHKAYRKDKNNKPRKDSLLVNKRGXSKQGEVGGEDIEDFISRQKFQFLNIWTLRDYLAHDMSIPDRSLKTDLERLIDDFVFMCLFVGNDFLPHMPSLEISEGAIDLLMTVYKKEFVQIGGYLTNSSEVYLERVERFMQVVGSHENAIFRKRSQVQKKRGVRFQGSSNKKTVSDYSTTPCVEPQGMTGSSGSSLEPRKTPFCQDSKNIKLGEDGWKERFYVEKFEAKTEDDRERVRRHAVLKYIEGICWVMHYYYQGVCSWQWFYPYHYAPFASDIYGLDQLDIQFTLGKPFKPFDQLMGVLPAARCTYSAHALPLYYRKLMMDETSPILDFYPADFELDMNGKRYPWQLGETPCLDFSRASMIAQPVWMFVLAILLKAVREYEAAYASVVIMLLCIVVDPFATTCLGWPHIHSFEDXYFMHAICKLPFIKESRLLAEIAKVESTLTDKEKLRNRLGMDALFIHISDPLAVKIFSFYKRKKDHPKLPMAKVKRKIDPKFRLTPQTQALQNLTVTTSKLPYALPLISSNELSKVSAGRYAYVPXVQRTQADXGGLRWFKSQPTICKLPNLELLHTVIKPHLLRPPVLWHETSAVCGRKFSERPIPNSVSGPCLAKLAHRLVFEYCLAKRQETLGRGELSDHIGPDTLRQSPSKETGNARGIDGYNESCVDGRSRKRKRSSHKDGPHDKFKNQNHRGNGRLRKGKRRKVTEPRNGRARFP

SEQ ID NO: 4076 - protein, 158 aa, Acetobacter pasteurianus
MIKFKLNGRDVSVDVPEDTPLLWALRDDLDQTGTKFGCGVGQCGACTVLVGGRATRSCITPISSIEGADVTTIEGLHPEGKHPVQEAWKDIQVPQCGYCQSGQIMQAVSLLKDYPDPTDEQIDGVMGGSLCRCMTYVRIRKAIKKAAAAMQKEEASHG

SEQ ID NO: 4077 - protein, 222 aa, Xanthomonas campestris pv. campestris str. ATCC 33913
MLEMPAMRDIKMTRREVLIAGTASAASVAASQSMAAGAANALSQRQAAEPANASSEVAFEVNGKPVTLTLDNRTTLLDALREHLHLTGTKKGCDHGQCGACTVIVDGQRMNSCLSLAVMHQGAKVTTIEGLGTPDKLHPMQAAFVKHDGYQCGYCTPGQICSAVAVLDEVKRGIPSHVTDDLTAKTRLTTVELQERMSGNICRCGAYSNIVEAITEVAGDRA

SEQ ID NO: 4078 - protein, 335 aa, marine gamma proteobacterium HTCC2143
MTSHNTLPDMIGNTPLVYLREVSEATGCEIYGKAEFLNPGGSIKDRTALGIIRDAETKGQLHPGGTIVEGTAGNTGIGLTLIANALGYKSVVVMPQTQSKEKIEILDLYGADLRLVKAARYDDPKHYVHQAQRLAEKLNKTCENGAIWAGQFDNLANMDIHSRTTGEEIWQQTNGKVDGFICAAGTGGTLAGVSNALKTHSSAIKIGIADPMGSSLYNYYNSGELKSEGRSISEGIGISIVTENIKQAIVDMAYQISDEEALPYIYSLLKHEGLCLGGSSAINIAGAVHLANEMGPGHTIVTILCDYGNRYQSKLYNPAFLRRMKLPVPQWLDDK

SEQ ID NO: 4079 - protein, 175 aa, Bacillus clausii KSM-K16
MAFTRANNRKVSLTFQINGQTRQVETYASVRLADVLREELGLTGTKVSCGIGRCGACAVLMDGKVVNSCLLMAFQATNVELQTIEGITASAENGVDPVQQAFLEEGGFQCGYCTPGMVVAAKALLNENQAPSDEEMAEALSGNLCRCTGYAGIIRAVRKAAKGKQSDVEGPNSSA

SEQ ID NO: 4080 - protein, 749 aa, Bacillus clausii KSM-K16
MEKRTIRYDGIPKVTGSLHYLTDLTFRDTLYGKILRSPYPHARILSIHTEKAKQLPGVKAVLTYADVPAVNGYGIIVPDHPVFCDTHVRYVGDAVAAVAAVSVEVAKAALVLIEVEYEELPVLDSPEKALEPQAIKLHPEGNILHVAHHQKGDIGQGFADAAAIVEETYELPRQMHAYMETEGGTVVPEADGGITVYMGTQHGFKDRFQLARILGIPEQQIRIVSSPMGGSFGGKDELNLQPYAALLALKTGRPVKIHHTRMESVRAGLKRHPMKITVRTGADQMGCLTAHHVEIIADTGPYTTLGPAILDFAVEHAVGPYRIPHVLVNGKSVFTNNANAGEFRGFGGNQMTFALEGQMDRLADKLGMCPVELRRRNLRRADDLGPLEQRIVPTDGARLVLERLAETTMREHTTSSRKRVGTGFALTMHGGGLGYGRLDRGGGRLCLTKEGKIEAAFGFEEAGQGILTVIETMMLKAFQCGRSDLDIQIGDTGRVPPTGSTTASRGTSMVWTAIERLKEPFTKALLDQAMRATGIEEKRLQLGAGGVYEQGTLVIDYKSLARFSEMPLCLETSFDFPTSPDPTEGGHYLYTFAAVKAKVEVDRITGRVQVLDLKQAVAAGPVVNELGYRGQIEGGGVMALGYALMEEAIMEQGKYATENFDTYMIPSIKDVPFDMETEAIETLEQGDCYGPRGVGEIGTVAVAPAIAKAIHQACGCWVAKLPVSPERLLEAMEEREEDSWHSHVLTTEK

SEQ ID NO: 4081 - protein, 367 aa, Escherichia coli O157:H7 EDL933
MKILFTESSSDIGGQELQALAQMTALQKQGHSVLLACREKSKIAPEARKRGHDVTFIPFRNSLHLPSILRLRRIIGEFKPDLVICHSGHDSNIAGLSRLICCHRFSIVRQKTYITRKTRTFSLNYLCDFIVVPSSAMMAHLMAEGVRTPVTVIPPGFDWPALHNEAMRPLPLHIHAWAASADNVPLIVQVGMLRPEKGHEFMLRVLYQLKMEGKSFRWLVVGAGREEYEARLRQQTEHLGMSGDVLMAGALFPALPVYRIASVVVMPSENEAFGMVLAEASVSGVPVIASETGGIPDVIQKNVTGTLLPVGDVSAWTGALRDFLSRPERFRMMAASAREDIEYRFDINRTAQIIVSLASQAKGKCNR

SEQ ID NO: 4082 - protein, 275 aa, Riccia fluitans
MATACAAVSAVAVPVASVANHIASSSSGTPSLAIPRSYEGLNKSFGARIAPRSTSAFRKPVTGVSLKQFSKGKVASARCASPLVGNVAPDFEAEAVFDQEFVKIKLSEYIGKRYVVLFFYPLDFTFVCPTEITAFSDKHEEFEKLNTEVIGVSTDSVFSHLAWIQTDRKSGGLGDLKYPLVSDLTKKIAEDFGVLIPDQGIALRGLFIIDKEGVIQHATINNLAIGRSVEETLRTLQAVQYVQENPDEVCPAGWKPGEKTMKPDTKLSKEYFAQV

SEQ ID NO: 4083 - protein, 300 aa, Burkholderia xenovorans LB400
MAYKTIEDTIGNTPLVQLVRLPDDEIRSRNNVILAKLEGNNPAGSVKDRPALSMIKKAEARGRIKPGDTLIESTSGNTGIALAMAAAIRGYKMVLIMPEDLSVERRQSMAAYGAQIVLTPVTGGMEYARDLAEQMQREGKGIILDQFANPDNPAAHVEGTGPEIWRDTEGRITHFVSSMGTTGTIMGVSTYLKEQNQAIEIIGAQPEEGSRIPGIRKWPEAYLPKIFDRSRVDRVENVSQAAAEAMARRMASVEGIFAGISSGGACEVALRVARQVENATIVFIVCDRGDRYLSTGVFPA

SEQ ID NO: 4084 - protein, 742 aa, Magnaporthe grisea 70-15
MAGRLEQKDSATKTDKMEKNSAIAPARPQVIELGEMQAGDFWTPVQWAVLVSLVDAILAPVVPESEVADKKTQIKIPDHKYNALLEELHSTIAGNPDKEVLKAVFLESFSTNPALVGHMKRTVCTSVHPKLRARLGGVLAAVSTRVGAFFLTGYCTPVHEQPLHIREAIVRGWSVSRLTDIRLLVKSLSMFAQIAWLQCSPLFKQASGYIDVPHNWKPGPSFDFEFLQFGRPPNVEDNLAPFPMPQEQGSRLLCENGGVVVTADGSTNIAAGSTWGGGGTINWSVCLQTQGFVRREWSQDRGLVFFETEEFQDCLDRVCDYMGAGRGSEHAVKQTHRGQVLLDGCRKLGWHAAALPQNSGGAEHWCGRCMMGCGSAEKQSPAVSWLPAAKKAGATFIEGFQVDKITFDEASGGKVATGVVGTWTSRDSSGGVTGPKEQRAVRKVSIKAKKVIVSAGSLWSPVILSKSGVKNRHLGHNLYLHPCNFIGAYYKEDIQAWDGGIITSFCTSFEDLDGHGHGVKLEPTCQIPYTNMSMLPWKSSTDFKAAAIKYRHMDVYIALTRDRDSGRIQVDPTTGTPVVHYTPSDFDRAHTLEGVIATAKCCYLMGATEIRAFLPGVEPFIRRPTSASSTTSADTNDDVKKSNLGVSDPDFAAWIKEVRRVGNRPPVAPFSSAHQMGTCRMGINEGEGVVDPKGHVWGYKNLFVADASVFPSASGVNPMITNMAISDYIARGVDRELASKSA

SEQ ID NO: 4085 - protein, 385 aa, Oxyrrhis marina
LDLAGSPPTQCSTAAMRVLAAPQARRFTRGLRTTAPRRRVYDSILDTIGDTPVVRVNHLAPANVEMYVKCEYFNPLSSVKDRMALSVINAAEKAGDLKPGDTVIEATSGNTGIALAMVCAARGYKCVVTMPDSLSIERRQVMRALGAKVVLTPASLGGVGMVRKAEELAEKHEFFLARQFENEANTAGHASTTGPEILRDFANRRLDYWVSGYGTGGTVTGVAKALKAARPEIKIILAEPAAAPLVMSGQPQDRLPDNAPVGPHPAWTGAHPIQGWTPMFIPYNLQHTLDNGFAEEVLPVTGEEANKAARDLASKEGIFTGISGGASFSVALDVAKKAPDGSVILAMLADTMERYLSTPLVGNIPIEMDEEEVAYSNSTPHARYE

SEQ ID NO: 4086 - protein, 295 aa, Nitrosomonas europaea ATCC 19718
MHNTIENFIGHTPLVRLKRIPSETSNTILAKLEGNNPAGSVKDRPAYSMIMRAQQRGDIRPGDTLIEATSGNTGIALAMAAAILGYRMILVMPENLSLERRQVMSAYGAEIVLTPKEGSMELARDTAEQLCNAGKGIILDQFSNPDNPLAHYETTAPEIWQDTAGTVTHFVSSMGTTGTIMGCARYFREQEQKVEIIGVQPQENAQIPGIRKWPEAYLPKIYQPELVDRILLVSQQEAEEMARRLAREEGLFTGISSGGALAAALKVSAQVQNAVIVFIVCDRGDRYLSTGVFPS

SEQ ID NO: 4087 - protein, 497 aa, Streptomyces coelicolor A3(2)
MVTARITVNGKESPIAPAAPHTTVLDFLRERGLTGTKEGCAEGECGACSVLVARPGVNKPTDWVPVNACLVPVAALDGQEVVTSEGLATVEAPGTPPVLHPVQEEMAVRGGSQCGYCTPGFVCSMAAEYYRPDRCAHADPGPDATAAADGAEGGDAEHGPNGFDLHALSGNLCRCTGYRPIRDAAFAVGTPTDEDPLARRREQDPPAPVATEYRQDDSAFLRRSTLAETLRLLRERPQAVVVAGSTDWGVEVNIRSRRADCVVAVDRLPELRDLRVESDHVEIGAALTLTEIERRLDGSVPLLAQLFPQFASRLIRNGATLGGNLGTGSPIGDSPPVLLALEASLVLADADGEREVPLADYFTGYRQSVRRPGELIRAVRVPLPLSPVTAFHKIAKRRFDDISSLAVAFALDVEGGTVRKARIGLGGVAATPVRALATEAALEGRPWTTGTAEAAAEVLRGEGTPMSDHRASARYRAAMLGQSLLKLYAQTTEAVPS

SEQ ID NO: 4088 - protein, 806 aa, Streptomyces coelicolor A3(2)
MSHLSERPEKPVVGVSMPHESAVQHVTGAALYTDDLVQRTKDVLHAYPVQVMKARGRVTALRTGAALAVPGVVRVLTGADVPGVNDAGMKHDEPLFPDEVMFHGHAVAWVLGETLEAARIGAAAVEVDLEELPSVITLQDAIAADSYHGARPVMTHGDVDAGFADSAHVFTGEFQFSGQEHFYLETHAALAQVDENGQVFIQSSTQHPSETQEIVSHVLGVPAHEVTVQCLRMGGGFGGKEMQPHGFAAIAALGAKLTGRPVRFRLNRTQDLTMSGKRHGFHATWKIGFDTEGRIQALDATLTADGGWSLDLSEPVLARALCHIDNTYWIPNARVAGRIARTNTVSNTAFRGFGGPQGMLVIEDILGRCAPRLGVDAKELRERNFYRPGQGQTTPYGQPVTQPERIAAVWQQVQDNGHIADREREIAAFNAAHPHTKRALAVTGVKFGISFNLTAFNQGGALVLIYKDGSVLINHGGTEMGQGLHTKMLQVAATTLGIPLHKVRLAPTRTDKVPNTSATAASSGADLNGGAVKNACEQLRERLLRVAASQLGTNASDVRIVEGVARSLGSDQELAWDDLVRTAYFQRVQLSAAGYYRTEGLHWDAKSFRGSPFKYFAIGAAATEVEVDGFTGAYRIRRVDIVHDVGDSLSPLIDIGQVEGGFVQGAGWLTLEDLRWDTGDGPNRGRLLTQAASTYKLPSFSEMPEEFNVTLLENATEEGAVFGSKAVGEPPLMLAFSVREALRQAAAAFGPRGTAVELASPATPEAVYWAIESARQGGTAGDGRTHGAAASDAVAVRTGVEALSGA

SEQ ID NO: 4089 - protein, 148 aa, Azotobacter vinelandii
MELTINGTKRQVDAAADTPLLWVIREELGLTGTKYGCGAAQCGACTVLADGHPIRSCVMPVSAVANQAITTIESIEEDPVGKRVVEAWIEHQVPQCGYCQSGQVLTATALLKQNAKPSEAEIAAAMINLCRCGTYNAIADAMQQLAKG

SEQ ID NO: 4090 - protein, 381 aa, Ralstonia metallidurans CH34
MIDIYHNILWPRYKGAVFSEAFSHAHKAGHKVRFFHISSTGYGRTAYSGVDTSYHRYPYEILFDEPYEAIPTWKMSLRLMREVWRSKNRLILMPGYHRVEFWAMLVACMLSGKRRAVFCDSTIQDQADHPMKRRLKRFFFSRCDGVFVYGRRSAEYAIAMGADPTKVICHCQAAALPHSYNAAEANRIRIANAPPAEAPRFLFAGLVCRAKGIEDLLRAFVEVRRQLPAATLVLAGPVVAADQLPELARSLGLGDAAQFLGAMDIDQLAQQYSRATCLVLPSHTEAWGLVVNEALNYGCPAVVSDCCGCIPELIKEGRTGHTFVTRDVDDLARVLLKATSSFADVQATMRNCVDVVRKYTPARAGRSIIKGCQKILKRART

SEQ ID NO: 4091 - protein, 790 aa, Bradyrhizobium japonicum USDA 110
MQEHTKSSTLENAIALQKYGVGQPVRRKEDDTLVRGKGRYTDDFNLPGQAYAVVVRSTHAHGIIRGIGLDAAKAMPGVLGVWTGTDLDAAGYGPFTCGLPLKSRDGSPLLQTNRQPLATDKVRFVGDPVAFVVADTLAQARDAAEAVELDIEPLPAVTDPEEAAKPGAPQLYDHIPNNVALDYHYGDMEQVNAAFASAAHVTKIDIENTRVAVVSMEPRVGLASYDKKAERYTLQVPTQGVAGNRANLAKNLKVPNEKVRILTANVGGSFGMKNINYPEYMCILYAAKALGRPVKWLDERSTSFLSDSHGRAQKIHAELALDAEGHFLAAKLEGYGNLGAYITGVAPGPLSLNTGKNFSSVYRTPLMGIDIKTVLTNTTLMGAYRGAGRPEANYYMERLIDRAADEMGINRLTMRKRNFIKPTQMPFPASSGVTYDSGDFQAVFNKALEISDHENFAKRKKESKKAGKLRGIAVGSYLEVTAPPSPELGKIVFDPDGSVQLITGTLDYGQGHATPFAQVLCEQLGVPFESVKLVQGDSDIVHTGNGTGGSRSITASGMAIVGAAKLVIEKGKRAAAHMLEASEADIEFEGGSFTIAGTDRSIDIMELAKRLHDGKVPEGVPDSLDVDHTSEPVPSAFPNGCHVAEVEIDPDTGVVQIVRYSAVNDFGTVINPLLVAGQLHGGVVQGIGQALMEHVRYDESGQPITGSLMDYALPRAEDVPFMTVGDHPVPATTNPLGSKGCGEAGCAGSLSTVVNAVLDALSDHGIKHIDMPLTPERVWRAIQDAKGKAA

SEQ ID NO: 4092 - protein, 407 aa, Xanthomonas oryzae pv. oryzae KACC10331
MIEAAEQRGDLTPGATLVEGTAGNTGLGLALVAQQKGYQLILVVPDKMSREKIFNLKAMGANVVLTRSDVAKGHPEYYQDLAAKIAAETPGAYFINQFGNPDNPAAHEFGTGPEILAQMDGQLDAIVFGCGSSGTMTGLSRAFASASPHTELVLADPVGSILTQYIEEGTVSEKSGSWLVEGIGEDFLPDISDFSRVKKAYSISDAESFHTARELLAKEGVLGGSSTGTLLAAALKYCREQTTPKRVLVFVCDTGNKYLSKMYNDYWMLDNGFLERPQYGDLRDLILRPYNKRDTVVVGPKDLLTTAYQRMKLYDVSQLPVIDDGELVGIVDESDVLLHVYGDEARFRDPISTAMVSKLDRLDVASPIEALLPVFDRGQVAIVMNGKQFLGLITRIDLLNYLRRRVQ

SEQ ID NO: 4093 - protein, 426 aa, Thermobifida fusca YX
MTSTHQAAHRTGSTMRLRILIATDTYPPDVNGASYFTYRLATGLAERGHDVHVVCASASGPPRVEVQDGVVLHRMRSVPVLVHPTMRTALPLGLTGHIARIVDRLAPHVVHVQSHFTISRTALRCGRMAGVPVVLTNHFMPDNLFAHAHIPPRLHGVVGSLAWQDMIRVARTADYVTTPTQRAAELLASKGFTRTVEAVSCGIDLDRFRPRPQDRAQARAHFGLPDRETMVFVGRLDEEKRIDESIRALPVLLRHRDVQLVLAGTGQRREELERLARSLGVAERVHFLGFVPDDDLPLVYVAADLFVIGSVAELQSIATLEAMSTGLPVVAADALALPHLVRPGRNGYLYPPGDVAQLAQRLLDVLESPDRRTAMGRASRDIAQTHDHHRSLDRFEQIYTEVRPRSWTLSRSASPAARQRDTTVAA

SEQ ID NO: 4094 - protein, 422 aa, Nostoc punctiforme PCC 73102
MNSTTEKRIALISVHGDPAIEIGKEEAGGQNVYVRQVGEALAQLGWQVDMFTRKASLEQDSIVEHSDNCRTIRLKAGPLEFVPRDEIFEYLPEFVENFLKFQVKNEIQYELVHTNYWLSSWVGMQLKKIQGSKQVHTYHSLGAVKYNTIENIPLIASQRLAVEKQVLETAERIVATSPQEQQHMRSLVSTEGNIDIIPCGTDIQRFGSIGREAARAELEIAKDAKVVLYVGRFDQRKGIETLVRAVNESELRDSKNLKLIIGGGSTPGNSDGIERDRIEQIVHELGITDLTIFSGRLSQDILPTYYAAADVCVVPSHYEPFGLVAIEAMASGTPVVASDVGGLQFTVVNEQTGLLAPPQDVGAFASAIDRILFNPEWRDELGKAGRKRTESQFSWHGVATQLSELYTQLLEPSAKEPALLVK

SEQ ID NO: 4095 - protein, 163 aa, Capsella rubella
MSMIPSFFNNNNNRRSNNFYDPFSLEAWDPFRELTLTTPSSSLLSRDNSAIVNARVDWRETPEAHVFKADLPGLKKEEVKVEIEEDKSVLKISGERHVEKEDKNDTWHRVERSSGQFTRRFRLPENVKMDQINAAMENGVLTVTVPKAETNKADVTRSIQITG

SEQ ID NO: 4096 - protein, 187 aa, Bacillus anthracis str. Ames
MLLIGTEVKPFKANAYHNGEFIQVTDESLKGKWSVVCFYPADFTFVCPTELEDLQNQYATLKELGVEVYSVSTDTHFTHKAWHDSSETIGKIEYIMIGDPTRTITTNFNVLMEEEGLAARGTFIIDPDGVIQSMEINADGIGRDASILVNKIKAAQYVRNNPGEVCPAKWQEGSATLKPSLDLVGKI

SEQ ID NO: 4097 - protein, 575 aa, Gibberella fujikuroi
MRFSLISTLLAFGTLSQAAFNKGAINAFNRVHPRRYDERRAAAPVAPEESAFEKRSKSKFLNKNSEKFVVNGSAIPEVKFDVGESYAGLLPISQDPKEERKLYFWFFPSTNPKAKRDEVVIWLNGGPGCSSLSGLLTENGPFLWQEGTLAPVPNTYSWTNLTNVIWIEQPVGVGYSQGKPNITNEVELGKQFIGFWKNFINTFELKGATTYITGESYAGYYVPYIADAFITANDDDYYKLGGVAINDPIIGDGTLQQQAVIYPYIEYWSNLFYLNQTYMNALRWTHQHCGYEKYLKKYGTFPPPEEKFPVLPDPYADTNPKSNYTCDIFDYAYAAALDSNPCFNIYHITDTCPHPYSQLGIVNQGDYSPPGAQVYFNRTDVKKALNAPTDVTWYQCTPNNVFGFGNPKSSRSDTSLAPAQTDVLKRVIEHTNNTIIGVGRLDFLLPPNGTLFAIQNATWNGKKGFQKYPQDKQFYVPFHIDYNGGRLSEEGIVGQWGEERGLTWYEVQLAGHELPGYSAGSGYRVLEKLLGRIKNLGTIENFTTQKGNFQGNPHERDFSVVNPLGLPWGHGFTYA

SEQ ID NO: 4098 - protein, 774 aa, Mesorhizobium loti MAFF303099
MEASSQTASLDFRLPQSGHAIGASPVRLDGVPKVTGAEKFGGDSFPADALAVLVVRSPHYHAGFAFGDLDGWTRKHPGIVGIFTAADIPGKNCFGVIGPFADQPALAEGFARLRGEAVALVAGEREAILDLDLSDFPIRWTELPHVLQPSEAQGEGAALIHPHRPSNLLTSGFVERGDPEAALANAAVTVTGAIDTSYVEHAYIEPEAGHAYMDGDTLVVVACTQAPYMDRDDMAKVLGLPVDKVRIVPTATGGGFGSKLDVSLQPLIGLVALKTGRPAALAYTRNESMMSTTKRHPAEMKATIGADADGHVTGMIFSGDFNTGAYASWGPTVANRVPVHASGPYATPNYRAEGRAIHTHGPISGAFRGFGVPQATIMQETLYDELAGKLGIDRLDFRLRNCLRNGSETVTGQRLESGVGIAECLEALRPHWARALADAGAFNSNHADKKRGVGVASCWYGCGNTSLPNPSTIRVGIAADGTVILHQGAVDIGQGSNTVISQICADALGLPLERFRLKSADTAISPDAGKTSASRQTFVTGKAAEKAGRALREKILRFANVSEKASLQLDGAVIVIREGEATRRIDLASLDMDADGFVFRAEETYDPPTLPLDAKGQGKPYAVYGYGAQIAELEVDLKLGTVKLLKITAAHDVGKAINPLLVEGQIEGGIAQGIGMALMEEYIPGRTENLHDYLIPTIGDVPPIETILVEVPDPEGPFGAKGLGEHVLIPTAPAILNAIRHATGVLVTKVPATPTRIRAGIREKDGIREKEARA

SEQ ID NO: 4099 - protein, 400 aa, Lactobacillus sakei subsp. sakei 23K
MNIGIFTDTYFPQVSGVATSIKTLKEGLEKKGHSVYIFTTTDPHVDKETIEPNIFRFASVPFVSFTDRRIAVRGLFHAYQVAKELDLDIVHTQTEFSMGYIGKFVAKNLKIPCLHTYHTMYEDYLHYVLNGKLLRPYHVKQMSKAFLYHMSGIVAPSERVSQTLNRYQVKAPIRIIPTGVDISRYEKQVTLDVRESLGLTKEQPVLLSLSRVAYEKRIDVIIDALPRLVAQKPDLMLVIAGEGPAREDLEAQVARLGMSEHVIFTGMIDNDDVSNYYHMADLFVSASDSESQGLTYIEAMAAEVKIVVMASPYASELLTDPSIGTTFTTEDEMLHQILNYLNHPGAFDDPAPRQNKLHAISADYFAEQMVQFYKQSQVLYDELKLDQDELLELEDMDTKK

SEQ ID NO: 4100 - protein, 335 aa, Robiginitalea biformata HTCC2501
MEYASNILGTIGNTPLVRINRITSDLPCLVLAKYETFNPGNSVKDRMALKMVEDAEADGLLSPGGTIVEGTSGNTGMGLALAAIVRGYRMICVISDKQSREKIDILRAVGCEVHICPTDVAPEDPRSYYSTARRLAEEIPGAWYVNQYDNPGNTRAHYESTGPEIWQQTDGRVTHFVVGVGTGGTISGVGRYLKEQNPDIRIWGVDTYGSVFKKYHETGIFDPDEIYPYVTEGIGEDILPENVDFEIIDGFTKVTDRDAALYTRRLAREEGMFLGNSAGAAVKGVLQLAEHFGPEDVVVVLFHDHGSRYVNKIYNDQWMRDQGFLDPESGPPVKE

SEQ ID NO: 4101 - protein, 157 aa, Mesorhizobium loti MAFF303099
MTKIPVHLDINGQHHELQLEPRVTLLDALRERLGLTGTKKGCDHGQCGACTVHIDGERVLACLTLAAQAEGRAITTIEGLAREGELHPVQAAFLEQDAFQCGYCTPGQIMSAVACIREGHAGSDEEIREYMAGNLCRCGAYPHIVAAVRQAAQEFAS

SEQ ID NO: 4102 - protein, 418 aa, Pseudomonas fluorescens Pf-5
MTTALHITLITETFPPEINGVANTLGRLCEGLRARGHQVELVRPRQGCDQSRASDEALLLCRGWPLPGYPGLQWGQSSMHKLLRRWKRQRPDVLYIATEGPLGLSALRAAKRLGISVVSGFHTNFQQYSSQYGLGLLTRLLTHYLRWFHNRSQLTLVPSASQHLELERRHFERLALLSRGVDSQLFHPAKRLDTLRADWGLGTDDLAVIHVGRLAQEKNLGLLKRCFERLQATYPQRRMKLIVVGDGPQRGALEKSLPEALFCGSQRGEALAAHYACGDLFLFPSLTETFGNVVLEALASGLAVVAYDQAGAAQHIRHGYNGVLAMPGDESAFCDAASWLLEEPETLRRVRLNARQHASRQGWAAVIEQFEDRLRSACEHGPAEDYEGLIEATVKPRSAVETLGTARGLPPSPPGAGS

SEQ ID NO: 4103 - protein, 256 aa, Zea mays
TDAAGSGYPERYQEDASVGTSGLGLLRQNTGEFEINNWQMLSYPQPEQGFQFFVTDTDVGNPFVAPHNSFTIAPEDYSLGCNVGIEDPSAAHDVSICRNSNDVHGSLVDNPLALTGDDPSLQIFLPSQPSTVPLQQELSERSDTPNGVHPNDWRISLTLAAGGGGNEESTSVGGLKSQPKVSSKEAGVEPLLDAACRASRGSSGLRFEASALGSMNNDRCTGSNLNPKRIENIFSHPRQPRSVRPRLCLSLDTDSE

SEQ ID NO: 4104 - protein, 770 aa, Mesorhizobium loti MAFF303099
MTVHNIRVGESRRGDASDGALAEAVGGRLSRVDGPAKITGAAKYAVEQQLEHLAYAVLVESTIASGKVRAIDTAQAEAAPAVLQVLTPDTIISLRTASDWFGTPPPDKPYCPLARDITFSGQHIAAVVAETFEQAVAAAALVKVSYDETPSIVDLSDGKAGDGIPIDAMTKEWGDAPAAFAAAPVRICAAYNTPREYQAPMEPHGLIARWEGDHLTVWEPSQWLDGMARTYAEWFEVPFENVRLVSPYIGGGFGSKALALSHGAVAASAAKMLGRPVKLVMTRPQTFTGYGGRAATRQTVTIGANHDGMIQSIVHRGVNETSIDGMWVEPLGSVTSIMYATPNFSSKQNVVRVNSVVPGAMRAPGENPSAFGIESAIDELAYEVGIDPLEIRLRNYAEQDPHARKAWSTRQLREAFAAGAERFGWSRRSSKPRSMRDGNQLIGWGVAAGTYPVRRAYGEALVRILADGSVEVESSSIDMGQGTYTILAQTAAETVGVPADDVVVKLGDSRFARAGVSGGSRLAGVMTGAVHKAATSALDQMVGLAISDPRSPFHALQANTLVVANGRIGSPRGDGPDVSIAELLKSVGRDRIEATGDTMPANSTAEDRYKNYTTIAMALPHTEGDYSRYSWCAHFIEVRVDEDFGTVRVSRVVSALDSGRLYNPKLAESQWKGGIIMGIGQALLEEGIMDRRHGRIVNNNLADYLVPTNADIPDIEVISVGIPDPHSSALGGKGVGELGIVGVAPAIANAVFHATGKRVRDLPITLEKLI

SEQ ID NO: 4105 - protein, 363 aa, Caulobacter crescentus CB15
MRILLATDAWEPQVNGVVRTLSRVTEELRAMGHIVDVVSPDQFPTFPLPTYPEIKLAIGAYEPVQERFKLFEPEAIHIATEGPIGLAARRICLEWKLPFTTSYHTKFPEYVSARLPLPLAAGYTYMRWFHKPSGRLMVATPTMRDELAKHGFRNLSPWSRGVDTDIFKPRQPGEPDLFEGLARPIFLNVGRVAVEKNIEAFASLDLPGTKVVIGDGPQREELAEKYPEVKFLGAKFGDELGRYFGCADVFCFPSLTDTFGLVILEAMAAGVPVAAFSAPGPVDIIPGSNAGVLAPGQTEGLREACLACLDLDRTVVRKFAERFSWRACAEEFFRNLQPYPEPEKTRFWRRLRRLARLRKKTAA

SEQ ID NO: 4106 - protein, 158 aa, Solibacter usitatus Ellin6076
MAAVKFTLNGKPQTVDVAPAMPLLWVLRDTLGMTGTKFGCGMSLCGACTVHLNGQPVRACVTPISNVASKTVTTIEGLSADRANPIQAAWIQEDVPQCGYCQSGQIMTAAALLAKTANPSDADIDEAMRNNICRCGTYQSIRRAVHLAAELRRNGGAK

SEQ ID NO: 4107 - protein, 155 aa, Lentisphaera araneosa HTCC2155
MEEGKQAPNFSLLDQNGNSHSLTDYKGKYLVIYFYPKDNTPGCTKESCTFRDNLSEFTAANCAILGVSADSAASHEKFIAKHNLNFPLLVDEEKEMLQAYNAWGEKNNYGKKYMGIIRSTAIISPDGTLLKHWKTVRGAEDHPLKVLEALKELQA

SEQ ID NO: 4108 - protein, 394 aa, Propionibacterium acnes KPA171202
MYVSVLTREYPPTIYGGAGVHVAQLVPQLRTLIDVDVQCMGQPREEATAHAENYPEGANGALRAFGADLSMVDAIPDEVDLVHSHTWYTNLAGLLAGVFHDVPHVISAHSLEPDRPWKAEQLGGGYRLSSWAEKTAYDAADAVIAVSEGMRADVLRAYPELDPDKVHVVRNGVNTDEFHPVTETDVCRDIGMDPDRPSVVFVGRITRQKGLVHLVHAATELDPETQLVLLAGAPDTPQIGEEFKAAFEEVRSSRRAPVIWVPEMLPRSSVRQVFSAATVFACPSVYEPLGIVNLEAMACATPVVASRVGGIPEVVVDGSTGHLVDGVPTDLSTPEDVATFESAFAAAINDLTRNMERAKAFGTAGRQRCIDEFSWPRIAAQTVEVYQTAIKRHG

SEQ ID NO: 4109 - protein, 505 aa, Salinibacter ruber DSM 13855
MLFLRVAAESHLWTSLPSFSPPVRSPAFLPMPMWHDSVLGTIGDTPLVRLNEIGSDLPPTILAKVEFFNPGGSVKDRIGRALIEEAEKEGRIEPGGTIIEGTSGNTGAGLAITAIAKGYRCIFTTTDKQSQEKVDVLRGLGAEVLVCPTNVEPDDPRSYYSVARRLSEEIPNSIYLNQYDNPANAKAHYETTGPELWEQTEGQITHFVAGAGTGGTISGTANYLKEQDDDISVIGVDPCGSVFHKYFHEGVFDEDEIYPYFTEGVGEDILPDNMDFDIVDDFVEVNDKASMQMTRRLAREEGLFIGQSCGLAVAGTLQWVKAHRDELTPDDVVVVLLPDSGFRYLSKTYNDDWMQNHGFLEKSPDVTADKVLNVQQEETDVIAAAPDDNLGNVIETMTDQGISQMPVLDADQEVVGSITETRVLNELIEDPESRKAPVREIMGTPFPVVPASLHLEHLSAYLEEDAGAVLVDHGPESQGSYSILTKSDLISALADVGQSNGNGAA

SEQ ID NO: 4110 - protein, 832 aa, Arabidopsis thaliana
MDLEANCKEKLSYFRIKELKDVLTQLGLSKQGKKQELVDRILTLLSDEQAARLLSKKNTVAKEAVAKLVDDTYRKMQVSGASDLASKGQVSSDTSNLKVKGEPEDPFQPEIKVRCVCGNSLETDSMIQCEDPRCHVWQHVGCVILPDKPMDGNPPLPESFYCEICRLTRADPFWVTVAHPLSPVRLTATTIPNDGASTMQSVERTFQITRADKDLLAKPEYDVQAWCMLLNDKVLFRMQWPQYADLQVNGVPVRAINRPGGQLLGVNGRDDGPIITSCIRDGVNRISLSGGDVRIFCFGVRLVKRRTLQQVLNLIPEEGKGETFEDALARVRRCIGGGGGDDNADSDSDIEVVADFFGVNLRCPMSGSRIKVAGRFLPCVHMGCFDLDVFVELNQRSRKWQCPICLKNYSVEHVIVDPYFNRITSKMKHCDEEVTEIEVKPDGSWRVKFKRESERRELGELSQWHAPDGSLCPSAVDIKRKMEMLPVKQEGYSDGPAPLKLGIRKNRNGIWEVSKPNTNGLSSSNRQEKVGYQEKNIIPMSSSATGSGRDGDDASVNQDAIGTFDFVANGMELDSISMNVDSGYNFPDRNQSGEGGNNEVIVLSDSDDENDLVITPGPAYSGCQTDGGLTFPLNPPGIINSYNEDPHSIAGGSSGLGLFNDDDEFDTPLWSFPSETPEAPGFQLFRSDADVSGGLVGLHHHSPLNCSPEINGGYTMAPETSMASVPVVPGSTGRSEANDGLVDNPLAFGRDDPSLQIFLPTKPDASAQSGFKNQADMSNGLRSEDWISLRLGDSASGNHGDPATTNGINSSHQMSTREGSMDTTTETGLFPV

SEQ ID NO: 4111 - protein, 281 aa, Glycine max
SIWSLPNPLPGTPRLTTAAMACAFSASTVSTAAALVASPKPAGAPQCLSFPRAIAGAAARPSRLAAASSRTARARSFVARASAEYDLPLVGNKAPDFAAEAVFDQEFINVKLSDYIGKKYVILFFYPLDFTFVCPTEITAFSDRHEEFEKINTEILGVSVDSVFSHLAWVQTERKSGGLGDLKYPLVSDVTKSISKSFGVLIPDQGIALRGLFIIDKEGVIQHSTINNLGIGRSVDETLRTLQALQYVQENPDEVCPAGWKPGEKSMKPDPKGSKEYFAAI

SEQ ID NO: 4112 - protein, 346 aa, Synechococcus sp. PCC 7335
MKIAHDITALVGCTPLVQLNRIPQAEGCVARIVLKLESMNPASSVKDRIAISMIQAAEDQGLIFPGQTILIEATGGNTGIALAMAAAVKGYALMLTMPDTMSLERRRLLRAYGAELVLTPGNLGMKGAIAQATELLAAIPHAFMLQQFQNPANPEIHRQTTAEEIWADTEGRVDIVVAGAGTGGTITGIAAALKARKPDFQAIAVEPAASAVLSGGTPGSHQIQGIGAGFIPPVMQVDWIDEVIAVADDTVIAYSRRLAREEGILSGISTGAALCAAVQVAQRPENTEKLIVVIQPSGGERYLSTALFRELAVSSASPSQSWPRQSRLGHVHQTIKPTATAAMGQR

SEQ ID NO: 4113 - protein, 438 aa, Opitutaceae bacterium TAV2
MDAVQGCEGVIVTKKRIHRTTTPISRNHTHRSHMKIALVTETFPPEINGVAMTFGVISRELGRRGHEITVYRPWRKDLPPASEHPEFREVAMPGLPLPGYPMLRLGLPAWRTFRRIWRGGVGAGGAPDLVHVATEGPLGASAVSVARELRIPVTSSFHTNFHQYGRHYGGRWLGRVAGRIALAWLRHVHNRTLRTFAPTEELCAELAASGFCRVGLLSRGVDTRQFDPALRSASLRASWGAGADDPVMIHAGRMAAEKNYPLLARACEAMKAANPRCRFVFVGDGPLRPWLRRMYPDFIYTGFLPREELARHYASADIYIHASLTETFGNVLTEAMASGLAVAGFDYAAARQFVTCGRNGLIVPCDAADALVDAAAWLARDAGLRMRLRGAAREAVAAHSWERVISRFVADLQAAAGVAPGMAGRAVPGKPFVAGVVS

SEQ ID NO: 4114 - protein, 162 aa, Dehalococcoides sp. CBDB1
MTLERWQPGWSLRPWRPFREVLSPGLWNMLTNERDWLPATEMVELKDKYLIKAEMPGINEEDIEVSVSDNVLSIKGEKKCDCEISEENYYFSERSYGSFSRSMTLPNNTDPQNIAATLDNGILEITIPKSSEAKPKKVSVIKAAKPKKTDLNTQSIKPKAQS

SEQ ID NO: 4115 - protein, 187 aa, Herminiimonas arsenicoxydans
MSLINTQVQPFKAQAFHNGKFIEVTEQSLKGKWSVLIFMPAAFTFNCPTEVEDAADSYAEFQKLGAEVYIVTTDTHFSHKVWHETSPAVGKAKFPLVGDPTHALTNAFGVHIPEAGLALRGTFVINPEGVIKTMEVHDNAIARDVSETLRKLKAAKYVAEHPNEVCPAKWKEGEKTIAPSLDLVGKI

SEQ ID NO: 4116 - protein, 387 aa, Desulfitobacterium hafniense Y51
MRIAYFTDTYLPQINGVTNTLGRLGDYLKNRQTEHLFFAPQYEREPSGLTCLCPSPVARFKSVTLPFYPECRLSLPNYTKLAGIADRFRPDLIHLTDPLGIGLAGLRYAKERRIPVVSSFHTNFDAYLSYYKMEYLEGMVWALFQWFHNSCAMNFCPSQTTMQVLAAKGIENLALWARGVDSVRFSPHHRREEIRRRFISRPQQLLFLYVGRLAPEKDLDILTQSIKQVNQTHQEKIRFIIAGDGPYAQDMREQSDGNVLFTGYLQGAELSSLYASCDAFVFPSSTETFGNVVLEAMASRLPVITVRSGGVTDNVVDGQNGLLCAPRDEASLAEAMIRLADQDELREALAANALAHASSQSWNTIFDRLLRDYRFVLDKYSDTVQSA

SEQ ID NO: 4117 - protein, 337 aa, Zymomonas mobilis subsp. mobilis ZM4
MNIASSSVPKKAENILSMIGNTSLVRLEGPSELTGCNIYAKCEFTNPGGSIKDRAALSIIEDAEEQGIIEPGGVIVEGTTGNTGIGLTLVGAAKGYHTIIVMPETQSSEKIATLQALGAELVLVPETSYSNSAHYVHMSRRLAQETDNAIWANQFDNLANRMAHIKTTSQEIWAQTEGHIDGFICAAGTGGTFAGTGLGLIEHNPDIVVALADPYGAVYIIIILAVNCGQRGILFAEGFGQSRVTGNLDGAPVDNQFLISDQEGLRKSISCFKKRDCLLGCRRGSISAGAIKLAKELGPGKTIVTILADSGLRYLSTLYNRHWLIAHDLPVPEWLAK

SEQ ID NO: 4118 - protein, 181 aa, Parvularcula bermudensis HTCC2503
MLGIGDKLPEFKVVGVKPGFNNIEEGGESAFEDLTQDSFSGKWKVIYFYPKDFTFVCPTEIAEFGRLAKEFEDRDAVVLGGSTDNEFCKLAWRRDHPDLDKHPAWQFADTLGHLVDGLGIRSDEGVALRATFIVDPHNVIQHVYVNNLSVGRNPQDTLRVLDALQTDELCPCNRPLGGDTL

SEQ ID NO: 4119 - protein, 156 aa, Vigna unguiculata
MSLIPSFFGTGRRTNVFDPFSLDVWDPFETALSFPRSEVSSETAAIANTRIDWKETPEAHVFKADLPGLKKEEVKVEIEEGRVLQISGQRTKEKEDKNDKWHRVERSSGSFLRRFRLPENAKVNEVKAAMENGVLTVTVPKEEVKKPDVKPVQITG

SEQ ID NO: 4120 - protein, 320 aa, Nocardioides sp. JS614
MRYDNLLASVGNTPLVGLPRLSAQLAGPGADVRLWAKLEDRNPTGSIKDRPALKMIEEAEKDGTLRPGCTILEPTSGNTGISLAMAAKLKGYRIVCVMPENTSEERRQLLRMWGAEIVSSPAAGGSNEAVRVAKRIATEHPDWVMLYQYGNAANALAHEEGTGPELLADLPSITHFVAGLGTTGTLMGVSRFFRAHKADVRIVAAEPRYGELVYGLRNLDEGFVPELYDADLIDSRFSVGPRDAVRRVRELLELEGIFAGISTGAILHAALGQAAKAVKAGESADIAFVVADGGWKYLSTGAYEGTVDEAEDRLEGQLWA

SEQ ID NO: 4121 - protein, 1474 aa, Ashbya gossypii ATCC 10895
MGIPKFFRYVSERWPNISQLIDGTQISQFDNLYLDMNSILHTATHGNEDDIKKRLSEEEVFARIFVYIDHLFHTIKPQQTLYMAIDGVAPRAKMNQQRARRFRSAMDAETSLNRARERGDEIPEGEPFDSNSITPGTEFMHKLTTNLKYFIHEKVSSDSLWQNKNIILSGHEVPGEGEHKIMQYIRTLRAQQDYNPNTRHCIYGLDADLIMLGLSIHDTHVALLREEILYGRAQKPKALEQQNFYLLHLAIMREYLELEFQEISDELEFKFDFERLLDDFILVMFVIGNDFLPNLPDLHLNKGAFPVLLQTFKETLKHLDGYINENGTINFARFSVWLDYLSKFELMNFERDDIDVDWFNSQLENISLEGERKRKRIGKKLLLKQQKKIVGAVKPWLMKKFSETLSPDVTEEEITMTPWLEKDLAEKNIDFLKEFALELGLIVVHSDSNDTYTFKIDLDSYSMNQSAEEHQTRVAELRRSIKKFEQAIIINDEEELEEAQEKYNERFIRWKDSYYKEKVGFSIHDEDKLKEMANNYIEGLQWVLYYYYQGCPSWSWYYRYHYAPRISDIRKGLDVNISFSLDQPFKPFQQLMAVLPARSKELLPPVYRPLMYDDKSPILDLYPAEVELDKNGKTADWEAVVKLKFVDQDRLLAAMAPLDDLLTPEEKKRNIVGTDLIFVFNPQVDNVYKSPLKGVFTDIANNHCVEREYVHPSMEGRSILYGLPEGAKLGTSALAGFPTLKSIPFNAQLAYNECTIFNQPSRHHSMLLTIKDVYQSSNLSVNDVAERYLGEIVYSNWPYIRESKMVSIIDNNYVYIASEKCKKSGGTSVVRKPATPEEKKAFSSMVKNIIHGYSKKKGIVLPEVRAIARVLPVTGLIRQPDGSYQKCFSKVEELYPLQLIVEDVENKDERYMERPPLPIDEEFPTGSRVIFLGDYAYGGEATVDGYTSATRLKLTVNKQSTKAEPNIGKRRAEMDRKAVHYWPSFVVAKRLGLHPLFLSRITSRFLIEVDNRSVNVGLMVKFPARDEKVLGYARKNRESWEYSNLTLQLVDQYRKNFPDFFNALMNVDKKIPKLKDLLSRRNAEEASAMLASITAFIKDARQSFVIVPLESDSLTKASIQAVEKEIMRIADLPDQSEKRQLAKVPREAILDPRQSFALLRTQRFDLGDRVIYVQDSGKVPLFSKGTVVGYTTIGSRISIQVLFDQELAAGTTFGERLQTNRGIGVDSSCLLNISKRQFIYHSKASKQYTDKAAKKKQTNVRQPPKITPEQRRKRVEETKKQQAHEMLNRIRNENSSVPDNSNQLSGTNFANGIKGPSIIMNTQVPLNTVGKSVANNVYNAVVSQLANPAMDQNIPFGLQSAHMMANHMPHSGIVPLPPNGMVPMHQPVVFGFPPHGGAPPNMPVSRDFSRPSMVPQAFHVNAIGNITNPPVDEASTAAMKNLIHPQRQDKKEAGRSQYSGRGRKGPYRGNHAKK

SEQ ID NO: 4122 - protein, 151 aa, Clostridium acetobutylicum ATCC 824
MEIREGMKAPDFSLKGSDGKEHKLSDYIGKKVILYFYPKDNTQGCTKEACEFRDSSNKISDLNAVVLGVSKDSIKSHNNFIDKFKLPFVLLSDEEEVVCKLYDVIKEKSMYGRKYMGVERSTFIIDENGIVKSIFRKVRVNGHVENIIKSL

SEQ ID NO: 4123 - protein, 200 aa, Salmonella enterica subsp. enterica serovar Typhi str. CT18
MVLVTRQAPDFTAAAVLGSGEIVDKFNFKQHTNGKTTVLFFWPMDFTFVCPSELIAFDKRYEEFQKRGVEVVGVSFDSEFVHNAWRNTPVDKGGIGPVKYAMVADVKREIQKAYGIEHPDEGVALRGSFLIDANGIVRHQVVNDLPLGRNIDEMLRMVDALQFHEEHGDVCPAQWEKGKEGMNASPDGVAKYLAENISSL

SEQ ID NO: 4124 - protein, 913 aa, Roseovarius nubinhibens ISM
MTDPISKVKLGFTLNGAAVEIAPEAGERLSQSLRERLGRRDVKIGCDAGDCGACSVLIEGENHCACLVAAHQVQGLRVETLAGLVEREPITQGLMERFQDHGAAQCGICTPGMMVSATALLREEPAPSDTQIEDALGGVLCRCTGYRKIIDAVAGRAPRLDGRAEVGGAIRRLDGLAKVRGEERFGDDVAPQGTLELVVIRSPHARAGFEFGDLEAWAAATPGVVTVLTAADIPGENCFGVIPPFADQPVFAEGEARFRGEAVAAVVLTPEARRDFAQGDFPVTWQERPAVMGVAEAREEGAPQLHEGRAGNLMITGFVARGDAEAALGRAEVVVEGRFESGFVEHAYIEPEAGFAQMAGDKVEIHACTQAPVMDLEALEIILGMDRSRIRIVPTGVGGGFGSKLDISVQPFLALAALKTGQPVRIAYSRTESMQSTTKRHPSQIHLRIGADGEGRLCGFAFDGDFNTGAYASWGPTVANRVPVHASGPYQLGDYRAEARGIHTHCPPSGAFRGFGVPQAAIAQESLFDELAGKLGLDPLEFRIQNALRDGVPTVCGQVFGQGVGIGACLEALRPAWAELRAEAEAFNLDQAGPLRRGVGVAAGWYGCGNTSLPNPSTIRAGLRPDGQVVLHQGAMDIGQGANTVISQVFASALGLAADRLVLIGADTDVTPDAGKTSASRQTFVSGNAAKLCGAALRGEILRAMNAGEGAVLRFEAGAVLAEENGRQQRLDLAALPMDDLGYVMRAEETYDPPTKPLDENGQGEPYAQFGYAAHLAMVEVDTRLGTVRARKFVAAHDVGRAINPMLVEGQIEGGIAQGLGMALMEEYLPGRTENLHDYLIPTIGDIPPVQSLIIEVPDAHGPYGAKGLGEHVLIPTAPAILNAIAHATGVRMRSVPVTPSKLAAALKGDKNG

SEQ ID NO: 4125 - protein, 153 aa, Methanosarcina barkeri str. Fusaro
MRWPMRRSFSGPARWDPFDEIRRTQERLNQLFEDFMPMEEWGGGKVYTPAIDIKEEDDKLLVTTDLPGINKEDVQINLKEDILEISAKTGKEKETEEEGYLRRERAYTQFYRAVRLPASVKEEGSTAKMENGVLTITLPKMQLEELTKKIAIE

SEQ ID NO: 4126 - protein, 219 aa, Azoarcus sp. BH72
MSLRINDIAPDFTAETTQGTIRFHDWIGDGWAILFSHPKDFTPVCTTELGYMAKIEPEFRRRNCKIIGLSVDPVDNHARWAKDIEETQGYLPAYPMIGDPNLEVAKLYNMLPAEEPGTSEGRTPANNATVRSVFVIGPDKRIKLMLTYPMTTGRNFDEILRVLDSMQLTAAHKVATPVNWKHGEDVIIAGSVSDDDAKTLFPQGWKAPKPYLRIVKQPG

SEQ ID NO: 4127 - protein, 322 aa, Bradyrhizobium sp. BTAi1
METAAATPRPGRGRVFDSIVDAFGNTPIVRLRKLPEQHGVKATILAKLEYFNPAASVKDRIGVGMILAMEQAGVIKPDTVLIEPTSGNTGIALAFVAAARGYKLKLVMPESMSIERRKMLAFLGAEIVLTPAAQGMKGAIAAAEELLRTTPNSVMPQQFKNLANPEIHRRTTAEEIWNDTAGNIDVFVAGVGTGGTITGVGQVLKSRKPGLKVVAVEPEESPVLSGGQHSPHKIQGIGAGFVPDILDRSVIDEIVKINSTTAIETSRALARNEGIPGGISSGAAIAAAIELGKRPENAGKTILAIVPSFSERYLSTALFEGI

SEQ ID NO: 4128 - protein, 317 aa, Clavibacter michiganensis subsp. sepedonicus
MKVEPMAGRVYDDITQLVGGTPLVRLNRLTEGLDATVLVKLESHNPASSVKDRIGVAIIDAAEEAGALKPGGTIVEGTSGNTGIALAMVGAARGYKVVLTMPETMSIERRLVLRAYGAEIVLTPGPEGMRGAVDRAKQIVDETPNSIWAQQFANAANPQKHRETTAEEVWADTDGSVDVFIAGVGTGGTITGVGQVLKERKPGVKIVAVEPLDSPILNGGKPGPHKIQGIGANFVPEILDTGIYDEVVDVSLEDSIRVSRALATDEGILCGISSGSIVWAALEIAKRPESKGKTIVAIVCDFGERYLSTVLFDDLRD

SEQ ID NO: 4129 - protein, 268 aa, Glycine max
MVLLSKATTEQYSYIKNYMPTAFSSTIPIVDLSKPDAKTLIVKACEEFGFFKVINHGVPMETISQLESEAFKFFSMPLNEKEKVGPPKPYGYGSKKIGHNGDVGWVEYLLLNTNQEHNFSVYGKNAEKFRCLLNSYMSSVRKMACEILELMAEGLKIQQKNVFSKLLMDKESDSVFRVNHYPACPELAVNGQNLIGFGEHTDPQIISLLRSNNTSGLQIFLRDGNWISVPPDHKSFFINVGDSLQVMTNGRFRSVRHRVLANGSPILQ

SEQ ID NO: 4130 - protein, 307 aa, Exiguobacterium sibiricum 255-15
MIAKSVRDLVGNTPLYEITSFDLPAGTRILAKLEWMNPGGSVKDRLGIQLVDAAIEQGYVTRGGTIIEPTAGNTGIGLALAAKKYDLQVICVVPEKFSQEKQTLMRALGATVVNTPTELDMQGAIDKAKELGQTIPNSYVPLQFENEENPVTYQRTLGPELMAELDQIDWFVAGCGSGGTFAGTAAYLKERLGTKGAIVEPEGSVLNGGPAGPHKTEGIGTAKWPSLVSRDLVDEIHTISDHDAFTKVHELAAREGLLVGSSAGAALVAALDLAHRFPGSTIVTVFADSAERYLSQQIFEKVDETHA

SEQ ID NO: 4131 - protein, 173 aa, Mycobacterium smegmatis str. MC2 155
MSQPDHTSHVTLEVDGARRELTVDNRVTLLDALREHLQVTAPKKGCDHGQCGSCTVLLDGRRVTTCLTFAVAADGARITTAAGLGLNDELHPVAQAFCDEDAFQCGYCTPGQICSAVGMLDEVKAGAPSFVADDLDAPPVLSEREIRERMSGNLCRCAAYPNIVAAIERAANR

SEQ ID NO: 4132 - protein, 200 aa, Phanerochaete chrysosporium
MVAQVQKPAPTFKAQAVVDGVFQDVSLSDYLGQWVVLFFYPMDFTFVCPTEILAFNDSLEAFKELNTVVLGVSTDSAYSHFAWASQPRNQGGLGPNLKLPLIADRNMKISRDYGVLLEEDGVALRGLFIIDPKGVLRQITVNDLPVGRSVDETIRLIKAFQFVEKYGEVCPANWKEGGKTMKADPKGSLEYFSTVNTNAQ

SEQ ID NO: 4133 - protein, 172 aa, Oceanicola granulosus HTCC2516
MAVTITVNGQDHTLDLDPRVTLLDALRDHLHLTGSKKGCDHGQCGACTVLLNGRRVNSCLCLAVMHDGDEVTTIEGLAEGGPSPLQEAFVAHDGMQCGYCTPGQICSATAMLDEVAAGWPSHVSASLDCPVELTHDELAERMSGNLCRCSCYPGINAAITEVARRGKTEATE

SEQ ID NO: 4134 - protein, 305 aa, Pseudomonas aeruginosa PAO1
MIYDSLLDLIGGTPVIRLSKLSARLGVSVFAKLESFNPGGSHKARIALWMILDAERKGILVRGKGQTILEPSGGNTGIGLAMAGNILGYRVSLVVPDNYSPDKRQLLELYGAHVVLSDSRKGNNSHGELAIQILLEHPEFVMLNQQRNPANPQAHREATALEILRDFAGQPPPDFFFAGIGTGGHITGVGEVLRNHWPDMAIYGVQPEQCDLLDDRHASHEIQGLSIGIVPEVCNLGIVTGMVGVSKSACLSMIREVLQNDSVSMGLSSAANLVAVLNMASAMPSGARVLTMIYDGVESYMDAFR

SEQ ID NO: 4135 - protein, 194 aa, Prochlorococcus marinus str. AS9601
MSLRVGQEAPDFSATAVYDQEFKEVTLSGLRGKWVVLFFYPLDFTFVCPTEITAFSDRYQDFSALNTEILGVSVDSKHCHLAWIQTPRNEGGIGDINYPLVSDLKREICQAYNVLNDDGEADRGLFLINPEGVVMHTTVNKAPVGRNVDETLRILQGYQYVAANPDEVCPANWTPGEKTMLEDPKGSKEYFSAL

SEQ ID NO: 4136 - protein, 622 aa, Arabidopsis thaliana
MSQTSLEPLIISIIKLQILQLWLKLIAVGWNLGSNDDELYTELWKACAGPLVEVPRYGERVFYFPQGHMEQLVASTNQGVVDQEIPVFNLPPKILCRVLSVTLKAEHETDEVYAQITLQPEEDQSEPTSLDPPLVEPAKPTVDSFVKILTASDTSTHGGFSVLRKHATECLPSLDMTQPTPTQELVARDLHGYEWRFKHIFRGQPRRHLLTTGWSTFVTSKRLVAGDAFVFLRGETGDLRVGVRRLAKQQSTMPASVISSQSMRLGVLATASHAVTTTTIFVVFYKPRISQFIISVNKYMMAMKNGFSLGMRYRMRFEGEESPERIFTGTIIGSGDLSSQWPASKWRSLQIQWDEPSSIQRPNKVSPWEIEPFSPSALTPTPTQQQSKSKRSRPISEITGSPVASSFLSSFSQSHESNPSVKLLFQDPATERNSNKSVFSSGLQCKITEAPVTSSCRLFGFDLTSKPASATIPHDKQLISVDSNISDSTTKCQDPNSSNSPKEQKQQTSTRSRIKVQMQGTAVGRAVDLTLLRSYDELIKELEKMFEIEGELSPKDKWAIVFTDDEGDRMLVGDDPWNEFCKMAKKLFIYPSDEVKKMRSKSLLGDKGTIVNLESDQRTVHV

SEQ ID NO: 4137 - protein, 427 aa, Listeria monocytogenes str. 4b F2365
MNIGIFTDTYSPQISGVATSIMIMENELRKQGHTVYIFTTTDPNADRESEEGRVFRLPSIPFVFFPERRVAIAGMNKFIKLVGRLDLDIIHTHTEFSLGLLGKRIAKKYHIPSIHTYHTMYVDYLHYIAKGKILTPSMVGKMTKSFCDSYDAIITPTAKVRHHLEEQGIHKLMYTVPTGTDISSFAPVEKQRILNLKKLLGIGENDPVILSLGRIAHEKNIDAIINAMPEVLQTKTTAKLVIVGDGPVRKDLEKLVEEKQLADHVIFTGAVDWENISLYYQLGDLFVSASTTETQGLTYAEAMAASLPVVAKRDESIEGFLSDRETAFLFNEDDELASLLINILSDKNTATLVATNGRVKVESISADQFGINIESTYNEVREIYRVKRQNGTIKVKPTLIKSKIASQVFSLSSSTHVQRKERSSRRD

SEQ ID NO: 4138 - protein, 216 aa, Pyrococcus horikoshii OT3
MVVIGEKFPEVEVKTTHGVIKLPDYFTKQGKWFILFSHPADFTPVCTTEFYGMQKRVEEFRKLGVEPIGLSVDQVFSHIKWIEWIKDNLSVEIDFPVIADDRGELAEKLGMIPSGATITARAVFVVDDKGIIRAIVYYPAEVGRDWDEILRLVKALKISTEKGVALPHKWPNNELIGDKVIVPPASTIEEKKQREEAKAKGEIECYDWWFCYKKLE

SEQ ID NO: 4139 - protein, 211 aa, Cyanothece sp. PCC 8801
MALQLGDVVPDFTQESSQGTISFHEWAGDSWVVLFSHPADYTPVCTTELGAVASLKSEFDKRNVKVLALSVDSVESHRGWINDINETQNTTVNYPILADADKKVADLYGMIHPNSLNNLTVRSVFIIDPNKKLRLTITYPASTGRNFDEILRVIDSLQLTDYHQVATPVNWKDGDDCVVVPSISTEEAKQKFPKGVTEIKPYLRMTPQPNK

SEQ ID NO: 4140 - protein, 533 aa, Shewanella oneidensis MR-1
MAIVDPIVTGLNAGWLHTDASQLQANQQFEADVVIVGTGAGGGVAAEILTQAGLSVIMIEAGPLKSSSDFNMEERVAYPNLYQQAAAMKTADKAIGIFQGRAVGGSTTINWTTSIRTPKEALAFWAQHKSVAGLDPEALAPWFDQMEQRLNIHEWNYEPNRNNGALKQGCINLGWDYTVIKRNVAGCWNTGYCGMGCPVNAKQSMLVTTIPSALEKGAQLISRAKVVKIEHHNGQVFALKAQALDVNLRPTAVELLFKAKHYILSAGAIHTPTLMMRSEVPDPHQLLGKRTFLHPTVLSGGVFADTINAHSGAPQSIYSDEFVWKNGADGELGYKLEVPPVHPILIASKTIGYGVSHAELMAQFNQLQVTIALIRDGYHPDSQGGQVHLTPTGFSLDYPLTDAFWRAVRRAYASMAELQFSAGALKVLPISDGMPYLSSWKEAKESIAQMDLAPLKTVVASAHVMGGCPLGEDEKLSMVNSYGQSHYLNNLSVMDGSIFPTSLGANPQLSIYGITARNATALAQKLKDGREPQ

SEQ ID NO: 4141 - protein, 136 aa, Bacillus sp. SG-1
MAAVAAIYPVFQSLNAEVLAISTDSVYAHKVFTEVSPSLSKVAYPLVSDRTHEISRSYRVLNEKTGAALRATIIIDPEGVIASRLVNPLEVGRNVYEILRLLQALQYSRETGELVPANWVPGNPGISRQSKLFGKI

SEQ ID NO: 4142 - protein, 184 aa, Synechococcus sp. RS9917
MQRRTLLQLLLVGGVVLWRTPQQALALGGTLPRLNQPAPGFDCPGTSRRDPSRSQWSLRDFRGQWLVLYFYPRDFTSGCTLEAHGFQAALAEFEAAGASIAAVSADPVDEHASFCSSEGLDFVLLSDPKGQVSQRYGSWMAPFSMRHTFLIDPQGVLRQIWTGVRPAGHAREVLASLQTVQAAG

SEQ ID NO: 4143 - protein, 387 aa, Streptomyces coelicolor A3(2)
MRVGLLSREFPPDVYGGAGVHVEFLARELARLVDLDVHSWGEGRTDGVLRHRPWSALDGANDALRTFSVDLAMTAALEGRELVHSHTWYANLGGHLAKLLHGVPHVVTAHSLEPLRPWKAEQLGGGYELSGWAERTAFEAADAVIAVSGAMREDILGCYPDLDASRVHVVHNGIDTRLYRPDHGTDVLDRVGLDRSRPYVLFVGRITRQKGVPQLLRAVRDIDPAAQVVLCAGAPDTPEIDQEFRDLFAGLSRAREGVHWIPRMLPRTEVIQLLTHAAVFVCPSVYEPLGIVNLEAMACGTPVVASRVGGIPEVVTDGVTGVLVPREDGADDAFEAGLARALDSVLGDPAGARRMGEAGRARAVEEFGWDAVARRTVRLYEEILKQA

SEQ ID NO: 4144 - protein, 326 aa, Triticum aestivum
  misc_feature (76)..(76): Xaa can be any naturally occurring amino acid
MGCARTVKAGAAAAAAVLVAAGVRLVGPAAAGFVAEEIPRAQAAAATWLTPPYLYLVINAIIISIAASSKFQTSRXRRAPTPAVGTEPVPVPSPALAMPMELPAPAVAMAMAVPVPVARVPDDVPVVKTPPAPVPAPEMAEEEDFLISRSAWTPQRRVTEAEVEVAPFADLTNKREKPLSSARFGRKAAKPSPEGSRALRVSRPRREDTLESTWKAITEGRAPPLARHLKKSDTFDTRPGRRPSGGGEEVVPPAATMRKAETFNDPAIAMGGAGERKVRREPSLGQDELNRRVEAFINKFNMEMRLQRQESLKHYSEMVGSGGGRY

SEQ ID NO: 4145 - protein, 778 aa, Burkholderia xenovorans LB400
MIGQPLPRVEDRRFVTGNGKYTDDLQIEGQTYAAFLRSPHAHAGLLSVDISAALDAPGVIAVLIGQDYLEDGYQGVDHVPNPIDAVDATKKAFLTSLTGQIFNQRHIPLPVDRVRYVGEPIAMVIAQTPLAARNATEMIEVEYDVLDAVVNAADAMQDGAPQMWDGAPGNLCFQAQIGERDEARRIIAGAPLVVQREFHHSRVVNCQMEPRSAIGAYDGETGVYTLISGSQGAVRQKLCLADALKVPPAQVRVVCPDTGGGFGPRSFIYVEQLAVVWAARRIGRPVRWTSDRSEAFLSDYQGRDAIVRATFGFSKDGRILAIDNEWLGNVGAHTVSYVPMSNGTRIMTTVYDVPVAAVHISAVMTNTVPTAPYRGAGRPEATHVIERMLDLAAAELGLDRAEIRRRNLIAHEKLPYRSPMGLTYDSGEFARNMTRALELAEWNSFSERRAAARANGRLRGIGLANYIESPVGAPRERIELTVLPEGRIDIVAGTQSTGQGHETTFAQVIAQHLGVPMASVTLRTGDTAFVSVGGGSHSDRSMRLGGMLLVDTAAQIVATGRQVAAALFDASPERVAFADGGFADPASDRRIGLFEVAARIASDGVPGDPAQRKLYAHAEVNTRVPAHPTGAAVCELEVDPDTGVVELVNYTSVDDVGQPINPLIVEGQVHGGLAQGIGQALSETCYLDRATGQVLTGSYMDYGMPRAGAIPPLRVELTEDPTHGNPLRVKGGGESGITPATATIFNALADALKEFGNEELAMPATPKVVWEYIHRRAG

SEQ ID NO: 4146 - protein, 469 aa, Magnetospirillum magnetotacticum MS-1
EDYQDAVAPPGAPFQALASDRIVFSGQPVALVVAEDFETARYAASLVRVDYEVTAPQTDIAARTDDSYDPPMKREGIKPPPEPWGDASKAFDAAEIRVSAQYRMADEHHNPMEPHASTVVVEKDGTYTVYDKIQGVTNTHQYIGGAFGLKPEQVRVLNPYLGGGFGSGLRPQYQLFLAMLAARDLGRSVRVTLTRDQMWSFTYRSEAIQTVALGAERSGKLTALKHDAVQGTSTYEDYQEVVVNWSGVLYECDNVALNYSLTKIDTPTPGDMRAPGAVTGVYAIETAMDELAYATGQDPIELRLKNYTDHDQTEDKPFGSKALKDCFRQGAERFGWSRRDPQPRSMREGRELVGWGMATGIWESMMMQSSAQAVLTADGRLEIGNQTGDLGTGTYTILTQIAADTLGLPLDHVTTKLGDTKLAQAPVAGGSWTAASSGTAVMKACRDIAEQAFKLARGLENSPLANCRF

SEQ ID NO: 4147 - protein, 188 aa, Bacteroides fragilis YCH46
MEPIINSQMPEFKVQAFQNGSFKTVSSEDVKGKWAIFFFYPADFTFVCPTELVDVAEKYEQFQAMGVEVYSVSTDSHFVHKAWHDASESIRKIKYPMLADPTGVLSRGFGVMIEEDGMAYRGTFLVNPEGKIKIAEIQDNNIGRNADELLRKVEAAQFVATHDGEVCPAKWKKGEATLKPSIDLVGKI

SEQ ID NO: 4148 - protein, 206 aa, Brassica napus
  misc_feature (21)..(21): Xaa can be any naturally occurring amino acid
SGCRAILRPPLAGPASYAGLXPWVSGADLKERMMKYGRTSHLFALVRDYGSGEVLKENEVTYRTSKKDRENLRVGLRQALRVLVAAGAVEVGTYRSDGQRIKCEGITREAMEEFLDSVDAVGGVSTKGEYWTTYFSAHQMGSCRMGRTAEEGAVDEKGESWEAEGLFVCDGSVLPSAVGVNPMITIQSTAYCISTRIVASLTEGKN

SEQ ID NO: 4149 - protein, 377 aa, Synechococcus sp. PCC 7335
MRIAIFTETFLPKVDGIVTRLKHTVEYLQSFGNEVCVFCPEGGLTEYKGAKVKGVSGFPLPLYPELKLAFPRPSMREAIEDFDPDLIHVVNPAVLGLGGIYYSKALNIPLVASYHTHLPKYLEHYNLGLLEGVLWELLKAMHNQAAINLCTSTAMQQELTEHEIERVRVWQRGVDTELFRPDLRSEEMRSRLTQGHPEAPILIYIGRLSAEKEIDRIKPVLESIPDARLALVGDGPYREELEEHFEGTPTHFVGYLAGEELGAAYASADAFIFPSRTETLGLVLLEAMAAGCPVIAADAGGIPDIVTNGVNGFMFDPADEQGAITATQKLLGMKAEKELLRQNARVEAERWGWEGATRQLERFYIEVLNAGIGAIAA

SEQ ID NO: 4150 - protein, 225 aa, Chlorobium tepidum TLS
MSQQVDDDLYYDISMPLLGDDFPELKVQTTHGPMNIPGDLKGSWFVLFSHPADFTPVCTTEFVAFQQRVEAFEKIGCKLIGMSVDQVFSHIKWVEWIKENLDVDITFPIVAANDRIANKLGMLHPGKGTNTVRAVFVGDPNGKVRLVLYYPQEIGRNMDEILRAVKVLQISDSNKVAMPADWPNNLLIKDHVIIPPANNVEDAKKRKEQQYDCYDWWFCHKPLDK

SEQ ID NO: 4151 - protein, 409 aa, Prochlorococcus marinus str. MIT 9313
MCIGLDFDPSGGHQEPLLNSLPTPPAEPVKIAFFTETFLPKVDGIVTRLTKTVQHLVEAGDEVMVFCPEGCPSEYMGAELIGVPAMPLPLYPELKLALPRPAVAEALETFEPDLVHVVNPAVLGLGGIWLAKTNGIPLIASYHTHLPKYLEHYGMGMLEPLLWELLKAAHNQAILNLCTSTAMVAELSEKGIQNTALWQRGVDTELFRPELRNETMRLRLLNTNDDQGALLLYVGRLSAEKQIERIKPVLDRIPEARLALVGDGPHRQQLEKAFEGTATTFVGYLEGEELASAYASGDAFLFPSSTETLGLVLLEAMAAGCPVVGANRGGIPDIITDGVNGCLYEPDGVDGGSTSLINATRRLLGNDLERQGLRKAARQEAERWGWASATQQLRSYYRTILGQPLNLAA

SEQ ID NO: 4152 - protein, 184 aa, Prochlorococcus marinus str. NATL2A
MKRSEFIKSFILFSSILFIKPSRLFASINSVKIGKKAPNFLLNGYNKNSPNKKQWSLDDFSKKWLVLYFYPKDFSSGCTLEAKNFQDNLSKYNKINASIVGISADSEEEHESFCTSENLGYTLLSDANSVISKSYDSWLDPYSKRNTFLINPEGIVVYKWIGVRPIGHAQEVLKELTKQQKIYA

SEQ ID NO: 4153 - protein, 181 aa, Helicobacter pylori
LVTKLAPDFKAPAVLGNNEVDEHFELSKNLGKNGAILFFWPKDFTFVCPTEIIAFDKRVKDFQEKGFNVVGVSIDSEQVHFAWKNTPVEKGGIGQVTFPMVADITKSISRDYDVLFEEAIALRGAFLIDKNMKVRHAVINDLPLGRNADEMLRMVDALLHFEEHGEVCPAGWRKGDKGMKA

SEQ ID NO: 4154 - protein, 157 aa, Rhizobium leguminosarum bv. viciae 3841
MITLNINGNQHEVDADPETPILWVLRDTLGMTGTKFGCGAALCGACTIHLDGEAVRSCSTPLSAAEGLNITTIEKATDGSDRVGAAVSAAWVKHDVAQCGYCQSGQIMSATAFLASLPSGSQPTASEIDTAMEGNICRCGTYVRIRAAVADAASNLV

SEQ ID NO: 4155 - protein, 217 aa, Ralstonia metallidurans CH34
MAIRLGEEAPDFTADTTEGKIHFHEWIGDSWAILFSHPKDFTPVCTTELGYMAKLKPEFDKRNTKIIGLSIDPVGDHSRWVKDIEETQGATVNYPMIGDHDLKVAKLYDMIHPEASGGPRTAADNATIRAVFMIGPDKKVKAMLVYPMSAGRNFDEVLRLLDSLQLNAKHTVATPVNWKPGDDVIIPTSVSDDDAKKKYPQGFKTLKPYLRTVAQPK

SEQ ID NO: 4156 - protein, 322 aa, Bradyrhizobium sp. ORS278
MESSAATQRPGRGRVFDSIIEAFGNTPIVRLRKLPEQHGVKATILAKLEYFNPAASVKDRIGVGMILAMEQAGVLKPDSVLIEPTSGNTGIALAFVAAARGYKLKLVMPESMSVERRKMLAFLGAEIVLTPAAQGMKGAIATAEELLRTTPNSVMPQQFKNLANPEIHRRTTAEEIWNDTAGNIDLFVAGVGTGGTITGVGQVLKSRKPGLKVVAVEPEESPVLSGGQHSPHKIQGIGAGFVPDILDRSVIDEIVKINSATAIETSRALARNEGIPGGISSGAAIAAAIELGKRPENAGKTILAIVPSFSERYLSTALFEGI

SEQ ID NO: 4157 - protein, 204 aa, Marinobacter sp. ELB17
MSLRLGDTAPDFEQDSSEGKISFHKWLGDGWGVLFSHPADFTPVCTTELGLTAKLKGEFAKRNVKAMALSVDPVDSHHDWIKDINETQGCAVNFPIIADHDGKVAELYDMIHPNANSTLTVRSLFVIDPNKKVRLIITYPASTGRNFNEVLRVIDSLQLTDEHKVATPGNWERGGDVVIVPSLQDEDEIKQRFPKATSGKSYCV

SEQ ID NO: 4158 - protein, 376 aa, Oceanicola granulosus HTCC2516
MRKIGFFTLTPSPPAPPANARTLAALRRALPGCEIEVIEVIPRLKRAPLAYGTAAAVAAATYAPDLLRGNKSLRHAALRTPYIFRWIKGMAARVARDSNFDATFQMQSLFDASAPGIPHYVYTDHTHLENLNYGAAGAAAMYSKAWIACERSIYRNAETVFVRSTNVAASLMRDYDCPEARVACVHAGSNAATPAAPADVTAPGQRKTILFAGIDWERKGGPTLLAAFRRVLARHPDARLRIVGCAPDTGGVANCDVVGRIPLSEMPGHFASAGIFCLPTRREPFGIVFVEAMWHGLPIVATDIGAVPDMVVPGVNGALVAPGDATALADRLCALLDDPALAARQGAASRRRAEDRYHWDRVAARMVARMATAAET

SEQ ID NO: 4159 - protein, 305 aa, Enterococcus faecalis V583
MIVQSILDTIGATPLFEFTSEQYPMPEGTKIYAKLEYLNPGGSVKDRLGVHLLKEAMKTGKINQATTIIEPTAGNTGIGLGLAASQLGLKTIFVVPEKFSQEKQQLMQALGAKIVPSPTEQGIVGAITSAQDLAKEIPNSYVPLQFENPDNPAAYYEGLGPEIVQDLGGKITSFVAGLGSGGTFAGVGRYLKEQNSKTQLWGVEPEGSILNGGPAHGHEIEGIGVEFVPPFLKQIPVDGFYTISDEDGFFWVKQLAKKSALLVGSSSGAAFAAALREARRLPAGSTIVTIFPDGSDRYLSKNIYS

SEQ ID NO: 4160 - protein, 673 aa, Gossypium barbadense
MAFPASDIPSAEQQADDPLYRELWHACAGPLVTLPRVGERVYYFPQGHMEQLEASMHQGLEHQMPSFDLPSKILCKVASVQRKAEPDTDEVYAQITLVPEVDQSEVMSPDDPLQEPERCIVHSFCKTLTASDTSTHGGFSVLRRHADDCLPPLDMTQQPPWQELIATDLHGNEWHFRHIFRGQPRRHLLTTGWSVFVSSKKLVAGDAFIFLRGANGDLRVGVRRLMRQQANMPSSVISSHSMHLGVLATASYALSTRSMFSIFYKPRTSLSEFIVSVNKYLEARSHKLSVGMRFKMRFEGEEVPERRFSGTIVGVEADKSSGWADSEWRSLKVQWDEPSSIIRPDRVSPWELEPLVATSNSSISQPAQRNKRARPPVLPSPSSDLSSLGIWKSPVESPFSYCDAQRGQPSPKLSSTAKPNSVGFSGNSSLAAVSSSSKYWPNRVENVTESVAPVVNKESSERKQGTGNGCRLFGIQLIDNINMEENSPLATISGTGVNDQPLHSLDANSDQQSDPSNLNQSDLPSISCEPEKCLRSPQESQSKQIRSCTKVHMQGMAVGRAVDLTRFDCYEDLLKKLEYMFDIKGQLCGSTKNWQVVYTDDEDDMMMVGDDPWNEFCSMVRKIFIYTSEEVRKLSPKIKLPVNDDDDDSKATKAGVDTVINPEDRSSIVGQGC

SEQ ID NO: 4161 - protein, 351 aa, Gluconobacter oxydans 621H
MTDISPNRQTIPQSSTKGWQTVSPGMTAAIGGTPLIRLRRASEETGCDIYGKAEFMNPGGSVKDRAALAIIEDALKSGALKPGGTVVEGTAGNTGIGLTLVAHAVGCKAVIVVPETQSREKLDFLRMIGADLRLVPAKPYRDPGNYVHVSRRLAEEIGGFWANQFDNTANREGHRATTAREIWEQTGGKVDAFTCACGTGGTLAGIALGLRDQAQATGKTAPRIVLADPEGSALYGWVKSNDLTITGGSITEGIGQGRVTANLEGSHPDDAERIPDAEALEQIFSLTSEEGLSVGGSSGINVAAAIRTARRLGPGHTIVTILCDGGARYQSKLFNPEFLRAKNLPVPPWLA

SEQ ID NO: 4162 - protein, 151 aa, Bacillus cereus G9241
MVTVGEMAPEFTLEGSNGEQVRLADFRGKNVVLYFYPKDMTPGCTTEACDFRDAYGLFQEKDTVILGVSPDSANRHLKFIEKHELPFVLLVDEDHKVAELYDVWKLKKNFGKEYMGIERSTFLINKDGELVKEWRKVKVKGHIEDVLSYIK

SEQ ID NO: 4163 - protein, 157 aa, Thermoanaerobacter tengcongensis MB4
MVEVGKKAPDFVLPDADGRQVSLSDFLGKNVVLYFYPKDNTPGCTKEAVAFRDSIKTIEDKNAVVIGISLDDEASHRKFIEKYSLPFVLLSDKEAKVSTEYGVYKEKNMYGKKKMGIERSTFIIDSKGIVRKIFRKVKVDGHVDQVLKALDEIKEGV

SEQ ID NO: 4164 - protein, 226 aa, Gibberella zeae PH-1
MSAPAPLRLGSTAPNFQAETTKGNIDFHEFIGDNWVILFSHPEDYTPVCTTELGAFAKLQPEFTKRNVKLIGLSANTIQSHEGWIKDIGEVTGGNVEFPIIGDKERKVSLLYDMIDQQDATNVDEKGIAFTIRSVFIIDPKKTIRTIFSYPASTGRNAAEVLRVIDSLQTGDKYRITTPINWVPGEDVIVHPSVKNEEAKTLFPEFRIVKPYLRFTPLAKEKVLPQ

SEQ ID NO: 4165 - protein, 212 aa, Psychrobacter arcticus 273-4
MAHLRLGDTAPNFDATTTEGDINFHEWAGDNWVVFFSHPADFTPVCTTELGRAAALNGEFQKRGVKPICISVDGIDDHHAWAKDIGETQGTELNFPIIADPNKEVAELYDMMHPNADSTHTVRSVFIIDPSKKIRLTLTYPASCGRNFDEIIRVIDALQLSDEYNIATPVDWKDGDDVIIPPSVKNEDIAAKYPKGHTEIKPYLRTTPAPNK

SEQ ID NO: 4166 - protein, 409 aa, Cyanothece sp. PCC 7424
MRIAYLTGEYPRATDTFIQREVTGLRKQGIEVHTFSVRRTGDEHMVGPEQELERQNTFYILPPNPLKLLIAHLLLLIGSPNQYLQALKLAWSTRQLGLKGTIYQLFYFLEAGILAHEIKQRQIQHLHNHLGTSSASVAMLAAALGGFTFSMTLHGPHLFFEPYRWRLDAKIQQALFVCCISHFCRSQAMLFAPFEKWNRLHIIHCGIEPSLFELTSHQSDRKRLLYVGRLAVEKGLPILLEALATLKSYHQDMLLIVVGDGSDRPKLESLTQNLGLSNNVKFVGYQSQGEVRNYLQQTDIFILPSFAEGLPVSLMEALAAGVPVVTTQIAGVSELVEDGVNGYLVPPGDSTLLAKRIDLLLKDPDQRRKLGTSGRAKVEQDFNIYSETERLSKVIHCALAGKVEAIRPN

SEQ ID NO: 4167 - protein, 483 aa, Azotobacter vinelandii
MSSPRAPKASAWRWSRPWAAAFRSSPRRWAARRRSSSPASPAGCCRKRRRPPSPMSSKRPGGSARDGWKAWANGPAAPSRDVSNQPATRPGWKPCTDDSPRERPKASMEKIRILHCLETIGSGGVEQRRLTLARRLDGSRYQQSLVCTKAVGALPARFAEAGCPLHAVGVFRGVLDREPYRRALRVVREYRPHIIHGAVFEGVSMATILGRLSGVPVIIGEETSDPVGRHWRAHLLFRLLGTLSHQMVAVSPAVERYLLERLHLPRSKVTLINNGVAEPAPPDERQVNALRERFGLAPEHFVIGTVGRLLDRHKRVSDLLRALAALLPACPEARLLIVGRGPDEGMLRELAGRLGVAAQVRFAGYQADPQPCYALMDVFALASAMEAFGLVLVEAMQAGLPVVATRVGGIPDVVDEGKSGLLVPPARPQALAEAILELRRDPLRRRAMGRVGQLLASTNFGAERYVREVDWLYRRLAAQRIAS

SEQ ID NO: 4168 - protein, 151 aa, Hyphomonas neptunium ATCC 15444
MANLKVNGKPVSVEADESTPLLWVLREQLGLTGTKYGCGIAACGACTIHIDGAAVRACVYPLGALSGEEEITTIEGLSADGSHPVQQAWVELDVPQCGYCQPGMIMAVAGMLNSNPNPTDEDIDLEITNICRCGTFTRVRKGVHLAKTKKA

SEQ ID NO: 4169 - protein, 204 aa, Brassica napus
AYMQSVNMSVSNTYSPDFYSTQYLNYGVAASEVEVNILTGETTVLRTDIIYDCGKSLNPAVDLGQIEGAFVQGLGFFMLEEHLMNSSTHASAHASGTYKIPTVDTIPRQFNVEILNSGHHKNRVLSSKASGEPPLLLAASVHCAVRAAVKEANKQIQTWSNNQQGVDMSFDLPVPATMPVVKELCGLNVVEKYLDWKIKQRKNI

SEQ ID NO: 4170 - protein, 1478 aa, Ustilago maydis 521
MGIPKFFRFMSERYPMISQLIEDNKIPEFDNLYLDMNGIIHNCSHPNDNDASFRITETQIFLAVFAYIEHLFNKIKPRKVFFLAVDGVAPRAKMNQQRSRRFRTAKEAKEIKEKAESRGEVLPEEEAFDSNCITPGTPFMAKLSQQLEYFIAKKITEDADWRNVQVILSGHDVPGEGEHKIMEYIRLSKAQPDYNPNVRHCLYGLDADLIMLGLLSHDPHFCLLREEVQFGPRRKSKGSLEMQNFFLLHLSLFREYLDLEFQDLRSSLPFPYDFERIIDDFILLNIFVGNDFLPHLPGLHINQGAMDLLFNIYKRILPAAGGYLNESGTLRTDRLELVLSELRNFEMEQFERDYGDTTTHKAKVSKKKKSISQAKAKGGLVLTVSQRGLLDKVHAFVKAQRNDPVSAPKELLVPADLPNKDRRFLEDLASSLKLRTSFNKVDPASQIPAITLSFPAIGIEDGDSEESPSDEDADNSKQNSDNAATGNKDTSAISEADTAVDRVLIRYLKAKVDTASDDEADPEEDYKKRLEAQMTAWKQSYYKEKLEIDYNNDEAMSKLAFRYIEGLQWVLHYYYDGVASWGWFYDYHYAPKISDLKNVGQMKFEFTLGKPFRPFDQLMGVLPALSSQHIPSAFRDLMTDPNSPIIDFYPTNFEADLNGKKQDWEAVVKIPFIDEKRLLEALDKREVYLGIEERKRNGFGNSREFTYNENEESFFPSSLPGTFPDLVHNRANVKNFNLPTLDGLHLVKGLTKGVELGARALAGFPSLKTLPHYGRLGHHGVNIFQAESKGVSVVVTIENTYEDAKTETIAAAMIGNRAFLNWPFLTEGLVVGVSDRLFRYEMGMIGGQQKVVANPHQGANLSEFHRKAESTEFHYSKRLGVLIGDVDVLVHIRPLKGLKRLDDGAFIKDYEDSSKKEISQAVQVTVTNVVHDDARFLESPARPIREEYPDKTRIFFLGANAYGTPAHVVGSTNASLAIEVAFFPNQAKENAYLRDLVSKRARVNYFPSYQVAKKCGISSLALSKLASSMMFAWKDQKVNVGLRLKFESKGEKVLGYSRRTAVGWEYSEKSLELVKEYVQTFPEITNMLSQNSSVDITRATQIWDESVVDEKMAQLKEWLKVKGVRDLETVPLYAEQLSKETVQTIEAFTSRLVDTRTAIGAAGQVKRVFIKGIPRTALLKPSHAPFRLQAQRFELGDRVIMVQDSGNVPLSARGVVVGINSNSLEVVFDVPFLSGTTLGDRCSPYKGATVSFVSVLNLTQPQFVCAGTAGESDTSASVGSALERTLGPIGGTGTGQANGNGKGAHGYGAGNSSYRPPNAFRPSASADHGRGGSTQILQRPRQPYAPVSQDIAFSGVARGLHKPTLAAASANQVEEINPIMAALGIRQPINSNAPARGAARGVARPARPARPHFVNQAQQPVVPAGAATSAPAHAGGRGGRGGGTSRGRGAPVSRGAPVSRGAPASRGARGGRGGAADP

SEQ ID NO: 4171 - protein, 384 aa, Microcoleus chthonoplastes PCC 7420
MNSIADSRIAWLFPGLKRGFYWHPVLSEFTKRFKNTIIYTGNWPGYVSGFEETFTVKVVGKTKFVETNLPEGGYSRGSYYVSPKIIGHLLGFKPHVIFALSFSAWTLLAILFKPLARWRVVIVYNGSSLNVDRRDSKVHIFYRRMMVRLADALITNSQAGKAYLTQILEANENHVFARPYGVPTPTALLEQQEKANLSIPELQHPVFLFIGVVEYRKGLHFLLKACNQLQQQGNQNYTLLVAGEGSQREELKDFIKQNHLEQQIHWAGWVDYSQLGAYFEKTDVFVFPTLEDIWGMVLLEAMACGKPVLCSQWAGAKELVEVGENGYIFDPYNPDELAALMRRFIDHPELIPTMGQKSKQLIAPHNPEAAANFLAEVTAFVLDH

SEQ ID NO: 4172 - protein, 299 aa, Campylobacter jejuni RM1221
MKVYEKVSELIGNTPIIHLKKFGINVFAKCEFLNPSHSIKDRAAFEMIKDALDSKKINQDTTIVEATSGNTGISLAMICADLGLKFIAVMPESMSLERRKMITLFGARLELTPANLGMKGAVDKANEILLNTPNSFMVSQFENISNKNAHRKNTALEILRDLDNELDIFVAGFGTGGTISGVGEILKEKLEKVHIVGVEPLNSPLLSKGEAGSHKIQGIGANFIPAILNKEVIDEVITVSNEDAINTAKELAKSGLMVGISSGANVFAASMLAKKFPDKRILTMLNDTAERYLSTDLFA

SEQ ID NO: 4173 - protein, 464 aa, Streptomyces avermitilis MA-4680
MEGAPRRPDRHARSEEERHVSQYASRLGRRSPAAPTRRRMLRKPRRVAMLSVHTSPLHQPGTGDAGGMNVYIVELAQRLAAINIEVEIFTRATTAALRPTVELSPGVLVRHVDAGPYEGLAKEDLPAQLCAFTHGVMQAWAGHRPGYYDLVHSHYWLSGHVGWLAAQRWGTPLVHAMHTMAKVKNAALAEGDTPEPAARVIGEMQIVAAADRLIANTSEEADELVRHYEAERGKVAVVHPGVNLDRFRPADGRAAARARLGLPQDALIPLFAGRIQPLKAPDVLLRAVAVLLDERPELRSNLVVPVVGGPSGSGLAKPEGLQKLAARLGIADVVRFRPPVGQEQLADWFRAASVLVMPSYNESFGLVAIEAQAAGTPVLAASVGGLPVAVADGRTGFLVQGHDPAAYARVLRDFADDPALSARMGRAAARHAECFGWDTAASATADVYTAAMQAHRRRVRSHHG

SEQ ID NO: 4174 - protein, 615 aa, Glycine max
CYRIDESEDNVAWKAIGYCGPDPEFKARLKSHFLDGTSKGGQEDKEDEDAEEVIGPLYKGLVHLNYPRDITADALKRLGFPVSVIRQKHKAAANLSSPSLVIQCDAVVVGSGSGGGVIAGVLAKAGYKVLVLEKGGYSARNNLSLLEGPTMDQMYLNGGLVASDDMGVFILSGSTVGGGSAINWSACIKTPQHVCKEWSDKHGLELFESELYREALNAVCEKMEVQSEIEDEGFNNAILRKGCQEMGYPVSNIPRNSAADHYCGWCCMGCKDGRKKGTSETWLVDLVKSGNGAILPGCEAIKVLHKKKEGRDRKIARGVAFEFEYKGTKDICVVESKVTIVACGALSTPALLKKSGLRNQNIGRNLHLHPVAMAWGYFPDAPESEVWPEAYKKSYEGGIMTAMSTVVAEFEQSGYGAVIQTPSLHPGMFSIVTPWTSGIDIRDRMRKFSRTAHIFALARDQGSGTVKAPDRISYKPAGVDEENLKKGIEKVLRILAAAGAEEIGTHHNKGRTLNVKQVRYHEFEKFVKEESSRSLTDLTTPLCSAHQMGSCRMGSNPKQSAVNQTGETWEVEGLYVADTSVFPTALGVNPMVTVQAIAYCTAQSVVEVLRRKRTK

SEQ ID NO: 4175 - protein, 370 aa, Nocardioides sp. JS614
MRIAQLANFIGPASGGMKTAVAALGAGYVTAGVDRLLVVPGPVDAATTTEHGDVVQVRAPRVGGGYRLIVEPWRVVDVLERFAPTSVELSDKLTLLPVTRWARRRGVGSVLFSHERLDDMFAMRSGLETTSKVSIGLLNRLLVRSFDTLVVTSDYAQREFQALADAAGCPTVRVPLGVDLETFRPHPAAASDVLRLAHVGRLSREKSPHLAVATAVELHRRGVPVRMDVYGDGPHLDELVELAAGAPVTFHGFIAGRADLSHRIAAADVALSVCPGETFGLAVLEALASGTPVVTASRGGARELVDEQSGGWAESDPAALADAVLEVAARPVAVRRQAARRRAELFPWQATVDRMLAVHAAVTDGARVPA

SEQ ID NO: 4176 - protein, 737 aa, Xanthomonas campestris pv. campestris str. ATCC 33913
MKFDTPAGATPADQLKVLGQPVDRVDGPLKVTGQAHYAYEWHDQPGQMAYGYILGAAIGKGRITALDTAAALAAPGVIAVLTHQNVPALGTGDFYVQRFLAAPQVDHYHQPVAVVVAESFEQARAGAALVRVRYARERGHYDLAAQQASAPVAPQAPFGGPPQTAQGDFAAAYAAAPFTVDATFRTPDQAHAMLEPHATIARWEGEQLICHTAIQQMNWGTRDLGKALGMPKERIRLLSPFIGGGFGGKGTAQADLVLAALAARITRRPVKLALQRPLMFNSTIHRPATIQRLRLGAGADGRLTAIGHESWSGNLRGGRSEPTPLSTRALYAGANRMTAVRLAVLDLAEGNAMRAPGEAPGMMALEVAMDELAERVGMDPVQLRIVNDTQVDPEQPQRPFSTRPFIACLRSGAQRFGWSRRNPTPASVRDGRWLIGMGMAAAIRGAPISKAAARARLDRSGTLTIETDMTDIGTGSYTIVAQTAAELLGLPLHQVVVRLGDSSFPETPGSGGQQGAASVTAGVYAACMQLRATVAQRLGMPVDQARFADGQVHAGPRSIALAQAAAGGELVAEDAMEFGTLKQQYAQQTFGAHFAEVAVDADTGEIRVRRLLAVCAAGRILNPKTARSQVIGGMVMGVGAALMEDMVVDTRLGFFVNHDLAGYEVPVHADIPHLEAHFIDEVDPTMSPLKAKGVGELGLTGVAPALANAVYNATGIRVRDYPITLDKLLAQLPRRAG

SEQ ID NO: 4177 - protein, 133 aa, Zea mays
  misc_feature (111)..(111): Xaa can be any naturally occurring amino acid
  misc_feature (126)..(126): Xaa can be any naturally occurring amino acid
MSQTGEAQVPLLQTQEADAEWSSKPRRIALFVEPSPFAYISGYKNRFQNFIKHLREMGDEVLVVTTHKGAPEEFHGAKVIGSWSFPCPLYQNVPLSLALSPRIFSEVNKFXPDIIHGTSPGNMGLXALAISKM

SEQ ID NO: 4178 - protein, 367 aa, Haloarcula marismortui ATCC 43049
MALPHVATFTDTYLPTVNGVTYTVETWRDRWRDRGGRMDVVYPKSDHDSSENEYPVRSLPFPFYEGFRLGMPQIPKGVRDAELVHAHTPFSLGMAGQRLAGKLDIPFVASYHTPTSEYAEYVSFNGAVESAVRSSAESYERWFLGRADTVIAPSERAATHLRESIGLDTTVTVVPNGVDTTAFEPVDTTAFRERYDLPDGPIVGYTGRHGYEKCLEDIVTACEGLDVTVVFAGDGPARESLEATAEHSDADVRFLGFLDRVELPELYSTLDVFAFPSPVETQGLVALEANCCGTPVAGVDAGALSDTIEDGETGYTYDEGDIDGFRRAIERVLDEQEHLRERCLARRDIISVEHAIDKLADVYDSVL

SEQ ID NO: 4179 - protein, 156 aa, Prosthecochloris aestuarii DSM 271
MKLLAHGDPAPLFESVDQDGQPVKLVDYKGKKVILYFYPKDDTPGCTKEACAFRDNFPKFKEIGVEVLGVSVDSEKRHKKFTEKYDLPFRLVVDEEKTIVEHYGVWGLKKFMGREYMGTARVTYLINEEGVIDMVWPKVKPEKHASEIVAYLEQNN

SEQ ID NO: 4180 - protein, 309 aa, Candidatus Kuenenia stuttgartiensis
MTKIYDDITATIGNTPLVRLNKISKGLDCIITAKMESFNPMASVKDRIGIAMIEAGEKAGLIKKDTVLIEPTSGNTGIALAFVAAARDYKLILTMPDTMSLERRELLKAFGAEIVLTPGSEGMKGAINKAEEMLQNIPNSFMPQQFKNDANPEIHRKTTAEEIWNDTDGQIDIFVGGVGTGGTITGVGEVIKKRKPSLKVIAVEPSGSAVLSGGKPGPHKIQGLGAGFVPEILNTKIIDEIVKVENEQAFALSRQLARDEGILVGISSGAAAYAALQVAARPENKGKLLVVVFPDTGERYLSTVLFKEL

SEQ ID NO: 4181 - protein, 175 aa, Bacillus sp. SG-1
MSPPVILGKLIVIKVTGGDYMVETGKQAPPFELEASNGETIKLSDYKGKNVVLYFYPKDMTPGCTTEACDFRDQHEQFEELDAVILGVSPDPKGKHEKFVEKHGLPFLLLVDEDHKVAEEYGVWKLKKNFGKEYMGIERSTFIIDKDGNIAKEWRKVRVKGHVEEALNYIKENLS

SEQ ID NO: 4182 - protein, 181 aa, Helicobacter pylori
LVTKLAPDFKAPAVLGNNEVDEHFELSKNLGKNGAILFFWPKDFTFVCPTEIIAFDKRVKDFHEKGFNVIGVSIDSEQVHFAWKNTPVEKGGIGQVSFPMVADITKSISRDYDVLFEEAIALRGSFLIDKNMKVRHAVVNDLPLGRNADEMLRMVDALLHFEEHGEVCPAGWRKGDKGMKA

SEQ ID NO: 4183 - protein, 367 aa, Magnetococcus sp. MC-1
MSIDLAMRQTEPHMENPNPTFGRNKRILIATDAWDPPQVNGVALTYQDTVDQLRLWGDHLEVIHPRRFEKKWFTLKGDNVEMIRDQGLTARLIESFQPEHIHIATEGPIGMAACRYCRNHHLAFTTTYHTQWPEYAQRRSRGLISSNWVYPLMRRFHNRAACIMATTPPMADMLKEKQFNTRIALWMRGVDTQLFRPRPATEKPEILRHAKGPIYLYVGRLAREKNLDPFIHADVAGTKVLVGEGPDQERLQRLGGNTLFAGLQRGEALARFYAAADVFVFPSLTDTFGKVLIEALASGTPIAAFHHLAPAFVLGQSGAGVMHDDLKIAMLAARQIDPLLCLKRAADFSIAGATAQFRNNLVPCAAG

SEQ ID NO: 4184 - protein, 380 aa, Bacillus anthracis str. Ames
MRVAIFTDTFTPQVNGVAKTLERLTRYFQKEKIAYSVFAPQHTAEDNFVANVNKMRSIPLTILYPECRFSFPTPRIRRELLSFKPDMIHIATPFNMGLCGLYYAKKLNIPVVGSYHTDFDAYLRYYKIEFLSNMLWNYLKWFHSHMQKNFVPSPETLHQLKHKGFQALSIWGRGVDCNLFHPAYNTEIFRKKYNITAKYVLSYVGRITPEKDIDTLQNLIVKSAHTRNDIHWLIAGDGPLATSLREAVPKTNVTFTGYLQGVDLAEAYACSNMMVFPSATETFGNVVLESLACGTPVIGANSGGVKNIITDGKTGVLCPPKNEDVFLSSIYSLLQNEEKLEQMGIAASSYAKSKSWDEIFRGLLSHYEEVLQHNASELLA

SEQ ID NO: 4185 - protein, 219 aa, Picea sitchensis
MALRSVSVAKPSFSVNAISNAYCKPGTMDSPPIKIVAVGDSQLFGTKISTSTIRPMPARTFQTRRMIAVAKVSKGSVPPSFNLKDQDGRLVSLSKFKGKPVVLYFYPADESPGCTKEACAFRDSYEKFKKAGAEVIGISGDSPESHKDFAKKYRLPFTLLSDDGNKLRKEWGVPGDFFGSLPGRETYVIDKKGVVQLVYNNQFQPEKHIDETLNVLQSL

SEQ ID NO: 4186 - protein, 218 aa, Glycine max
MPGLTIGDTVPNLELDSTHGKIWIHDYVGNGYVILFSHPGDFTPVCTTELAAMANYAKEFEKRGVKLLGISCDDVQSHKEWTKDIEAYKAGSKVTYPIMADPDRSAIKQLNMVDPDEKDAEGQLPSRTLHIVGPDKKVKLSFLYPSCTGRNMDEVVRAVDSLLTAAKHKVATPANWKPGECVVIAPGVSDDEAKKMFPQGFETADLPSKKGYLRFTKV

SEQ ID NO: 4187 - protein, 174 aa, Bradyrhizobium sp. ORS278
MSQSRESAASLTKPAPLSVSLRINGESRTLSVAPWTTLLDLLRNHLDLTGTKKGCDHGQCGACTVLIDGRRALSCLTLAVMKDGAEITTIEGLAKGDELHPLQQAFIDHDAFQCGYCTPGQICSAAGLIAEGRAKTKDEIRELMSGNICRCGAYPNIVGAIEQAMTKQAMGGGQ

SEQ ID NO: 4188 - protein, 202 aa, Bromus secalinus
STHGKIRIHDYVANGYVILFSHPGDFTPVCTTELAAMANYAKEFEKRGVKLLGISCDDVQSHKEWTKDIEAYKPGSKVTYPIMADPDRSAIKQLNMVDPDEKDAEGQLPSRTLHIVGPDKKVKLSFLYPSCTGRNMDEVVRAVDSLLTAAKHKVATPANWKPGECVVIAPGVSDEEAKKLFPQGFETKDLPSKKGYLRFTKV

SEQ ID NO: 4189 - protein, 229 aa, Zea mays
MPGLTIGDTVPNLELDSTHGKIRIHDYVGDGYAIIFSHPADFTPVCTTEMAAMAGYAKEFEKRGVKLLGISCDDVESHRQWTKDVEAYGGKQQQQQATTTKVTFPILADPARDAIRQLNMVDPDEKDAAGRSMPSRALHVVGPDKAVKLSFLYPATTGRNMDEVLRAVDSLLTAAKHGGKVATPANWKPGECAVIAPGVSDEEARKMFPQGFETADLPSKKGYLRFTKV

SEQ ID NO: 4190 - protein, 218 aa, Hordeum vulgare
MPGLTIGDTVPNLELDSTHGKIRIHDYVGNGYVILFSHPGDFTPVCTTELAAMANYAKEFEKRGVKLLGISCDDVQSHKEWTKDIEAYKPGSKVTYPIMADPDRSAIKQLNMVDPDEKDAQGQLPSRTLHIVGPDKVVKLSFLYPSCTGRNMDEVVRAVDSLLTAAKHKVATPANWKPGECVVIAPGVSDEEAKKMFPQGFETADLPSKKGYLRFTKV

SEQ ID NO: 4191 - protein, 152 aa, Wolinella succinogenes DSM 1740
MESAPAFCLKNQDEAEICLRDLKGAWIILYFYPKDSTPGCTQEACDFTESLPRFETLQAIVLGVSPDSPRSHQNFIAKSDLKITLLSDPTKEVAKAFGAWGEKKLYGKVSEGIIRSTFIIDPQGRIAHAWRRVKVAGHAKEVLETLEKLQKS

SEQ ID NO: 4192 - protein, 211 aa, Aegilops longissima
MASAVDCKGEGAAPASLLKSGAPVAFCPLRSPAITAAHRPYNTQAKEASRYDDDDDDYSGRDLVIPSFFSQDPLGAPTSMARLLSLMEDVATQTGLSSTAGAGASRLARWVAKEDDEAVYLKVPMPGLTKEHVKVRADKNILVIEGEGEKQPWDGDDDSAVPRYNRRIEMPAADAYKMDKIKAEMKNGVLWVTLLKVKEEERKDVFHVKVE

SEQ ID NO: 4193 - protein, 218 aa, Syntrichia ruralis
MGGGWALGDLVPDIQADSTMGHIKVRDYCKDGWTIIFSHPGDYPPVCTTELGKIAAYNPEFEKRGVKLLGLSTDTVEDHQGWIKDIESYTPDAPVLYPILADPDRKITVALNMMDPDEKDANGKPLASRALHIIGPDCRLKLSLLYPGTTGRNFDEVLRVLDSLQLASKHKIATPANWQKGEPVVISPSVSDEKAKQMFPQGWETVNLPKALRMTFVD

SEQ ID NO: 4194 - protein, 177 aa, Agrobacterium tumefaciens str. C58
MQFTINGTAVEVEADIRTSLLDLMRNYLGFTGTKKGCDQGACGACTVLVDGERINSCLALAVQYQGRSITTVEGLAANGNLHPLQKAFIEHDGFQCGYCTPGQLCSAIGMAGEIERNIPSVVTADLSSNSITVDDTEIRERMSGNLCRCGAYNGIVEAISDTLVQQTAVPSEERARA

SEQ ID NO: 4195 - protein, 375 aa, Nocardia farcinica IFM 10152
MARTLLVTNDFPPRPGGIQSYLQALAGQVPSDELVVYAPRWRGDSHVKFDAEQKFRVVRHPTTLMLPTPAVLRRAARLVRAERCDTVWFGAAAPLALLAPGLRRAGAQRVLASTHGHEVGWSMLPVARQALRAIGETTDVVTYVSKYTRGRFAAAFGPNAALEYLPPGVDPEVFRPDPAARAELRARYGLGERPTILCLSRLVPRKGQDALIVAMREIRTRVDGAVLVIAGSGPYEQKLRALAQTLDLERDVVFTGRVPSAELAAHHTLADVFAMPSRTRGAGLDVEGLGIVYLEASATGVPVIAGRSGGAPETVREGETGRVVDGRRVTEIADAVTAILSDPDAAAAMGAAGRAWVRERWHWDTIGARLRHLLR

SEQ ID NO: 4196 - protein, 767 aa, Agrobacterium tumefaciens str. C58
MSTDSQTLPEAGKLGRWQPAVTSDPLLRKHGALGQGISRIEGPMKVQGKTRFAAEFPYDNISYAALAFSTVARGRVIDLNVSAAEAAPGVILVMTHKNAPRMKAPSLMMSSPTAAGASNLPVMQSDEIHWNGQPIALVLAETQEQADHAASLVTAKYELLPAVTSFDDAKKSPRQLDNLLGQPPFIDIGDAETALANAEVKVDLVYRTPRHNHNAIELHAATVVWKDDELRVHDASQLLDLTTGQLADIFGLDVSKVHVTSPYVGGGFGGKCFWDHQILACAAARLAGRPVRIMLSREGVFRIIGGRTVTEQRVALGAKADGTLDALIHTGTAAMTLHNSCPEQFTFPARHLYAAKTFHIGQDVADMDMLANTFMRAPGESVGTFALECALDELAEKLGLDPIELRRRIEPEKDPTTGKPFSSRYLIEAYEKGAEQFGWSKRSQTPRQKREGEWLIGMGCATATYPYHRFPGGAVRIKLTVDGRVTVSTAVHDMGMGTATAQMQHLAARLGLPLDHVTFEYGDSKLPRGVIAGGSTQTASIGGAVIAATEVLVEELIKLSGNDSPLAGLSLLEVEARDGGLSHISDNSLFESYQSILRRAGREELVCEAEAPAPAEMEAFSMHSYGAQFCEVHVSARTGETRVSRFLGSFDAGQILNSKMATSQFKGGIIMGIGLALTEETNFDERTGRIVNASLADYHVPVQMDVPAIEILYTNKPDPQAPMGARGIGEIGITGVGAAVANAVYNATGVRVRDLPITLDKLTGGLD

SEQ ID NO: 4197 - protein, 328 aa, Xanthobacter autotrophicus Py2
MAGPAAKIVPAAQPRPGRGRVYDSITETIGNTPLVRLKRLAELRGAKAEILAKLEFFNPISSVKDRIGVAMIEAMEAAGVLDQDTVLVEPTSGNTGIALAFVAAARGYRLILVMPESMSVERRKMLAILGAELVLTPANLGMKGAVARAEQLIAELPKAAMPQQFKNKANPDIHRRTTAEEIWNDTDGKVDAVVAGVGTGGTITGIGQVLKPRKASLKMIAVEPEDSPVLSGGSPGPHKIQGIGAGFVPDVLDRSIIDEVVTVGNQTAFDTARALARYEGIPGGISSGAAVAAALEIAVRDDMAGKSIVVIVPSFAERYLSTALFEGL

SEQ ID NO: 4198 - protein, 165 aa, Shewanella sp. MR-7
MAIPSSEAAKDQSLAMPSQNLTINGRSFTLNADPNMPILWALRDILGLTGTKYGCGAGLCGACTVHLDGQPVRACLTSVSQAQGKQLTTIEGLDNQKLKNAWAEHNVPQCGYCQAGQLMSAAALVTQHPKPSAEQIDAAMSGNLCRCGTYPRIKAALQSYAKQEG

SEQ ID NO: 4199 - protein, 227 aa, Metarhizium anisopliae
MASTLALSSRSPFLASKALASAKPNGISRSASFPSPPRRLPALRAQAGGDGSVDVAVNQGSNNQGTQMEKRPSARRLAMDVLPFGLLDPMSPMRTMRQMLDTMDRIFEDTMTLPGTRSRSGGEIRAPWDIKDDENEIKMRFDMPGLSKEDVKVSIEDDVLVIKGEQNKEGNNDDAWSSKSFSSYNTRLQLPDNCDKSKVNAELKNGVLYITIPKTEVERKVVDVEIK

SEQ ID NO: 4200 - protein, 368 aa, Zea mays
  misc_feature (58)..(58): Xaa can be any naturally occurring amino acid
  misc_feature (85)..(86): Xaa can be any naturally occurring amino acid
  misc_feature (247)..(247): Xaa can be any naturally occurring amino acid
LFLRNGFPQLIGWTPLVELKRIASEAGIDARIVGKMEAYQPLCSIKDRSALRMIEDAXERGLISPGVTTLVEPTSGNMGLGLVLXXIQRGYRLIAVMPAKYSLDKQILLRFMGAELYLTDPALGFPGMFDKVEQLRKQLPNVHVLNQVTNKANSEAHFRLTGPEIWKDTAGKVDVFVAGSGTGGTVSGVGKYLKMQKPGVKIICVEPAESPVISGSATQMQKEQLTRNNLFEALSSGLTKIQYLLVXELALHLHIGKHWCSSGGAPGKHKIQGVGPGFLPEVLDTSVIDETVTVSTEEAMANARRLAREEGLLVGISSGANLAACLKVASRQENKGKMIVTVFPSGGERYINSDLFADVREECIAMTF

SEQ ID NO: 4201 - protein, 348 aa, Magnetospirillum magnetotacticum MS-1
MSAHPAVSPDVLAAVGGTPLIRLRRASEETGCTILGKAEFLNPGLSVKDRAALSIVRDAEARGLIRPGGTIVEGTAGNTGIGLALVAAVRGYRTVIVIPETQSAEKKETLRLAGARLVEVPAVPFANPNNYVHAARRLAERLAQTEEAGAFFADQFDNTANRAAHIETTGPEIVAQTGGTVDGFVCAAGTGGTLAGVAEALRAQKPGVTIALSDPEGSALHAYYTTGTLKAEGSSITEGIGQGRITKNLEGFKPDLSFRIPDAEALGIIFRLMREEGLSLGGSSGINVAGAIRLARELGPGHTIVTILCDGAARYASKLFNPAFLTERGLPVPGWLGQSGEALPDWRA

SEQ ID NO: 4202 - protein, 320 aa, Crocosphaera watsonii WH 8501
MKIAHNITELIGHTPLVQLNRIPQAEGCKAQIVVKLEGMNPAASVKDRIGVNMINAAEKEGFIIPGKTLLVEPTSGNTGIALAMAAAAKGYKLILTMPETMSQERRAMLKAYGAQLELTPGSEGMGGCIRRGQELAETLPNAYMLQQFNNPANPEIHRLTTGEEIWEDTDGRVDFLIAGVGTGGTLTGVAEVIKQKKPSFQAIAVEPTSSPVLSGGSPGGHKIQGIGAGFVPGVLKVELIDEVVTVTDEEAMSYGRRLAKEEGLLSGISTGAALCAAIKVGQRPENIGKLIVMVQPSFGERYLSTPLFQDVEPPQLAMVH

SEQ ID NO: 4203 - protein, 231 aa, Mycobacterium marinum M
MPRIGDPAPEFTAVTTQGPINFPADYAGKWVIFFSHPADFTPVCTSEFITFASMQQQFAAYNTELVGLSVDGLYSHIAWLRTIKDKISFRDMHDVQVNFPLIEDVSMEIAGKYGMIMPGEDSTKAVRAVFVIDPTGTIRAIIYYPLSLGRNFDELLRVIKALQTADHYDVATPADWRPGDPVIVPPAGSCGTAKERMEGQVDGVECEDWFFCTKELSAETVESAITAGAQP

SEQ ID NO: 4204 - protein, 342 aa, Streptomyces avermitilis MA-4680
MPGSLRRPSVVSRVSDLIGYTPLLELAATETGSRLLLKLEMFNPTGTAKIRMARQMITDAEERGELRAGGRIIESTSGNTGLGLAVIAAERGYTFTAVVDNHAAVDKLRAMKALGAELVHVVDDGTDELATAAREELAEEMARGQDNTIFTEQHNNPSNGVGYFPVAHELHEALDGRLDVLVGAVGTGGGLCGTARELRTLIPGFTTIGVEPKGSIAFGGPAHDYYQSGTGTPEGAPIGALVDFGLIDEGAKVGDVEAFATCRAVARTGLLIGGSAGGVVHEALTRLPGLPPGTTMVALINDGGEKYMDTVFNDDWMRARDLLDPAAEREVDELLTKLRGNR

SEQ ID NO: 4205 - protein, 323 aa, Mycobacterium sp. JLS
MARYDSVLEALGNTPLVGCPHLSPRWDDDENGPHVRLWAKLEDRNPTGSIKDRPALRMIEQAERDGLLHPGSTILEPTSGNTGISLAMAALLKGYQMICVMPENTSIERRQLLELYGARIIFSPAEGGSNTAVAHAKELAAANPDWVMLYQYGNPANADAHYYGTGPELLADLPEITHFVAGLGTTGTLMGTGRFLREKVPGVQIVAAEPRYGEGVYALRNIDEGFIPELYDPDVLTTRFSVGSFDAIKRTRELVTKEGIFAGVSTGAILHAALGMAAKAIKAGERADIAFTVCDAGWKYLSTGAYTGSLDDAEDALEGQLWA

SEQ ID NO: 4206 - protein, 204 aa, Glycine max
LEPGTSVGSPEVHLSARLQVTGEAEYTDDTPMPPNGLHAAFVLSKKPHARINRIDDSEAISLPGFVSLFLAKDVPSDNKIGPVVADEDLFAVDYVTCVGQVIGVVVADTHENAKIAARKVIVEYEELPAILSIRDAINARSFHPNTEKCLSKGDVDHCFQSGQCDRIIEREVHMGRQEHFYLEPHSTLIWTVDGGNEVHMISSS

SEQ ID NO: 4207 - protein, 182 aa, Burkholderia vietnamiensis G4
MKTVGDKLEAFTVVAAKPGFNNHEENGQSAFETVTETSFPGKWKIIYFYPKDFTFVCPTEIVEFAKLAKQFEERDAVLLGGSSDNEFVKLAWRREHKDLDKLNHYSFGDVKGELIDQLGVRDKEAGVALRATFIVDPDNTIQHVSVNNLNVGRSPEEVLRILDGLQTDELCPCNRAVGGATL

SEQ ID NO: 4208 - protein, 487 aa, Clitoria ternatea
MAAFSSTHSACGILLLPLVVSSLICFQLASCGTIVEFLPGFDGPLPFVLETGYVGVGEGEDVQVFYYFVESENNPNEDPLMLWLTGGPGCSAFSGLALEIGPLIFKREEYNGGLPNLILRPHSWTKVSSIIFVDLPVSTGFTYARTDAAAQRSDWTLVHHAHEFLRKWLIDHPKFLQNELYIGGDSYSGIPIPVIVQEISQENEKGIQPWINLQGYILGNAITTRREKGYSIPFAHGMALISDELYESLRKNCKGEYLNVDPENVLCSRDIDSYSKATSRISFAHILERTCNSGDIKTSLRRSTIQRHHTKKFLNTNLKLPPLTCRTYANFQCGLWANDDNVRSALHIHKGSIGEWHRCSIRLPFTSDIPNSFEYHVNLSRKGYYRSLIYSGDHDMMVPFLGTQAWIRSLNYSIVDDWRPWNTNGQVAGYTRTYSNRMTYATIKGGGHTAPEFKPEECFAMYSRWISKRPLYENNTMSSYTNLASIL

SEQ ID NO: 4209 - protein, 382 aa, Prochlorococcus marinus str. NATL2A
MKIAFFTETFLPKVDGIVTRLTKTIQNLVASGDEVTVFCPEGCPSSYMGAKVVGVPAMPLPLYPELKLGLPGPGVSDELENFKPDLIHVVNPAVLGLGGIWLAKTNNIPLVASYHTHLPKYLEHYGMGMLEPLLWELLKAAHNQATLNLCTSTAMVQELSEKGIQNTALWQRGVDTDIFKPELRDEEMRKRLLGSFSDEGSLLIYVGRLSAEKQIERIKPVLEALPSTRLALVGDGPYRQQLEKIFQGTSTTFVGYLSGNELASAYASGDAFLFPSSTETLGLVLLEAMAAGCPVVGANKGGIPDIISDGENGCLYNPDGENDGALSLIEATKKLLGNEIERTSMRKAARSEAERWGWAGATKQLKSYYEDVLDKKRSNIAA

SEQ ID NO: 4210 - protein, 185 aa, Cytophaga hutchinsonii ATCC 33406
MQNRILSVGSAFPAFKKTAVVSIEKGKEFTEISSENLVNEDNQWTVMFWWPKDFTFVCPTEIAEFNNAFGDFRDRDTTLIGASTDSEFVHAAWRRDHEDLRGLKFPMLADTSKSLAEELGILEAAEKVALRATFIIDPQGIIRWVSVNDLNVGRNVKEVIRVLDALQTDELCPCNWEKGQETIHA

SEQ ID NO: 4211 - protein, 543 aa, Burkholderia xenovorans LB400
MAIYVREAGFSATPCVTRARSALSFGFAMTTQTIRFYHQGSIREVADVPASRTVLQHLREDLHCTGTKEGCAEGDCGACTVVVGELDAHGGLALKAVNACIQFLPTLDGKALFTVEDLRAADGALHPVQQALVDCHGSQCGFCTPGFVMSMWALYENQPAAAGLPTRDEINAALSGNLCRCTGYRPIVDASQKMFDYPQYPRVTLDRQAVANQLRELQRRDTFEYRAPDTRGAAFGSPTFYAPVSLDAFAKLRAGHPQARLLAGSTDVGLWVTKQFRDLGDILYIGNVAELKTVERDTQTLTIGAAVTLEDAYAALAVDYPELAELWTRFASLPIRNTGTLGGNVANGSPIGDSMPALLALGAEVVLRHGPKTRTLPLDAFYLGYQKTALAAGEFVAALRVPRPAGNLRFRTYKVSKRYDQDISAVCAAFALHVDENGAIRQARIAFGGMAATPKRAAQTEAALTGATWNDSTARQAMNALAADYQPLTDMRASSAYRLKVARNLLWRFHLETRNDAPLALFDVNAFAFEAGAPDAAVAKEPS

SEQ ID NO: 4212 - protein, 802 aa, Burkholderia xenovorans LB400
MNRTDAFVEPAATHAAAHESEASIGVSLPHESAALHVSGEATYTDDVPELQGTLHAALGLSRHAHARIVSMDLDAVRNAPGVIAVLTAEDIPGENNCGPVLHDDPILAVEEVLYLGQPVFAVIAESHELARRAAALAKSDDVIRYEPLEAILTPAEAKARQQFVLPPLHLKRGEPAAKIAAAPNRISGTFEVGGQEQFYLEGQIAYAVPKEMDGMLVYSSTQHPSEMQQVVAHMLDWPAHNVVCECRRMGGGFGGKESQSALFACVASLAAKRLRRPVKLRADRDDDFMITGKRHDAIYEYEAGFDDSGRILGARVEIALRAGYSADLSGAVATRAVCHFDNAYYLSDVDIVALCCKTNTQSNTAFRGFGGPQGALVMEVMLDSIARQLNCDPLDVRLANYYGIGERDTTPYGQRVEDNIIAPLTDELLGTSDYRARRTAIAAFNANSPVLKRGLAFSPVKFGISFNVPFLNQAGALVHVYKDGSVLVNHGGTEMGQGLNTKVAQVVANQFGLPLSRVRVTATDTSKIANTSATAASTGSDLNGKAAEAAARTIRERLAELAARQLGGSAGDAQFANGQVSVNGGAMPFEQLVGAAYLARVQLWSDGFYTTPKVHWDAKTLTGHPFYYFAYGAAVSEVVIDTLTGEWKLVRADVLHDAGQSINPAIDIGQVEGGFIQGMGWLTTEELWWNCDGRLMTHAPSTYKIPAVSDTPAAFHVQLYQNHNAEPTVFRSKAVGEPPLLLPFSVFLAIRDAIAAAVPDAREAPPLRAPATPEAILDALDALQPQRAPQPATEPATTDTAA

SEQ ID NO: 4213 - protein, 180 aa, Microcystis aeruginosa PCC 7806
MSRRQLLSFLIAVILAFFALIPDANALGGPQPPLNQPAPDFTLPTNTGEGNISLSDYRGKWVVLYFYPKDFTPGCTLEARRFQQDLPKYMAKNTQVLGVSADDVDSHAEFCDSEGLKFPLLADTTGDVSKAYGSWMGYVSLRHTYLIDPDGILKEIYLGVNPAIHSAEVLARLEELQASS

SEQ ID NO: 4214 - protein, 60 aa, Zea mays
  misc_feature (22)..(22): Xaa can be any naturally occurring amino acid
MASGNARIGKPAPDFKATAVVXGAFKEVKLSDYKGKYVVLFFYPLDFTFVCPTEIIAFSN

SEQ ID NO: 4215 - protein, 353 aa, Bradyrhizobium sp. ORS278
MRILIATDAWHPQVNGVVRTLTSLSRAAAGLGADITFLTPEGFPSFAVPTYPGLRLAIPRAGEIARRIEAAAPDAIHIATEGTIGWAVRRYCLRRGLPFTTSYTTRFPEYVSVRTGIPDAVGYWVMRRFHDAAAMTMVATNSLRQDLASRGFKRLGFWTRGVDTKLFNPDAPAALDLPRPIFLSVGRVAVEKNLEAFLSLDLPGSKVVVGDGPAKAELARRFPTAHFLGEKTGQDLTAHMAAADVFVFPSLTDTFGVVQLESLACGTPVAAFPVTGPLDVIADHPIGAIDWDLRAACLKALTMSRADCRSFALDRSWENSARQFIGNLAILQPSRVLRPAPAPVLAGESVVRG

SEQ ID NO: 4216 - protein, 343 aa, Glycine max
ACLCLIEKKKKRMGYVSVKVVVISTGVLSMAMGLKLTLPLLSHFLLNQAPHLWTLLLTCFTPPYLYIFLNFIILTIVASSKLNNHHHSPPDTTLLPAIYDGPPASVQIPAPAAAVQSDYNAVSSDKYLYETKPTLSYDSVAGGNGSAGYVYDENTPVKAAVNNNDDDDDEAVGVGVLSPSLQRKDSSDFAFADENEKPLVSARFSHRKSVRSSPEGGKVVALGVAKAKKQETLESTWRTIREGRAMPLTRHLKKAETWETTQQGTPLRDLNGGGGPVMKKSETFAGREKNASARLLRKEPSLSQDELNRRVEAFINKFNADMRLQRQESLRQYKEMMMNRGAH

SEQ ID NO: 4217 - protein, 212 aa, Marinobacter sp. ELB17
MTLQLGETAPDFNVESTEGNIQFHEWLEGSWAVLFSHPADYTPVCTTELGAFAMRKDEFDRRSVKLIGVSVDPLDSHNDWAKDIERTQGTGLNYPLLADKDQVVANLYGMIHPKADPKLTVRTVFIIDSAKKIRLMLTYPPSTGRNVDEILRVIDSLQLTDNHKVATPVDWKNGDDVIIVPSLSNEEARERFPQGWDEQTPYLRVTRQPGRK

SEQ ID NO: 4218 - protein, 219 aa, Picea sitchensis
MALTSVSVAKPSFSVNAISNAYCKPGTMDSPPVKIVSVGDSQLFGTKISTSTTLSMPARTLQTRKMIAVAKVSKGSVPPTFNLKNQDGRMVNLSKFKGKPVVLYFYPADETPGCTKEACAFRDSYEKFKKAGAEVIGISGDSPESHKAFAKKYRLPFTLLSDEGNKLRKEWGVPGDFFGSLPGRETYVIDKKGVVQLVYNNQFQPEKHVDETLKMLQSL

SEQ ID NO: 4219 - protein, 816 aa, Desulfovibrio vulgaris subsp. vulgaris str. Hildenborough
MSADTLKVDLHVHSRFSTRPSQWLLQKLGCSESYTAPQAIYDIARKRGMDLVTITDHNTIAGSLEIAHLPGAFISEEVTTYFPEDGCKIHVLAWNITEAQHGEITMLRPNVYDLVDYLVATGIPHACAHAMYSMNERLTVSHMERLLLLFRVFELNGSRDAYQNAILRDLLRGLTPQTMDAMAERHDLAPRMDMPCVKHLMAGSDDHSSLNIARSHTTVRGVRGEGLARVESLLEGVMQGRGEQAGTDASPETMAHNLYAIAYQFYKQRFQLARHVGFDPLLRFADHALTATPEPSGGLLARLHGLIHFRRPRRATTSRSVQEHLRHEALRIISDDVELQALAAGDGATGHEVEQAWMRFVDRASDKVLRHFADTLLDNAVGADLFSVFQVIGSAGSLYAILSPYFVAYTLFTKDRAFARQCAAHFLPAHGERERLHVGHFTDTFYDVNGVARTLQTQLDMAIKHGKRLQVLTCAPPDEVQQPFAGRADVRTFTPTGAFAMPEYPELKLHYPPMLRILRHCYDAGFTHLHSATPGPMGLVALAVARILKLPIHGTYHTAFPQYVMQLTEDAGLEEAMWQYMIWYYGQMDKVYVPSLATGDELVARGIPRERIVFYPRGIDTQAFSPVHRNGYFNAHPQAAGRTRLLYVGRLSREKNLHILAEAFRTACAQNPGLALVLVGDGPIRDELARTLTDLPVIFTGYIEGDALAEAYASSDIFVFPSGTDTFGNVVLEAQASGLPVIVTDRGGPRENLLPGRTGCIVPEGEADALSAAMLDLAADPVRLGRMSAEARAYAESRSFESAFTRQWELYREVAA

SEQ ID NO: 4220 - protein, 365 aa, Dimocarpus longan
MAPATLTALAQEKTLNASFVRDEDERPKVAYNEFSKEIPVISLAGIDEVDGRRAEICKKIVEACEDWGVFQVIDHGVDTKLISDMTRLAREFFALPPEEKLRFDMSGGKKGGFIVSSHLQGEAVQDWREIVTYFSYPMRTRDYSRWPDKPEGWIDVTKEYSDKLMGLACKLLEVLSEAMGLEKEALTKACVDMDQKVVVNYYPKCPQPDLTLGLKRHTDPGTITLLLQDQVGGLQATRDNGKTWITVQPVDGAFVVNLGDHGHYLSNGRFKNADHQAVVDSNCSRLSIATFQNPAPEATVYPLKIREGEKPILEEPITFAEMYRRKMSKDLELARLKKLAKEQKLQLQDNEKSKLEAKPIEQILA

SEQ ID NO: 4221 - protein, 247 aa, Brassica napus
  misc_feature (174)..(175): Xaa can be any naturally occurring amino acid
  misc_feature (233)..(233): Xaa can be any naturally occurring amino acid
  misc_feature (244)..(245): Xaa can be any naturally occurring amino acid
MGERPIANKYREVKMKRTLKRESKSASLRSAFAQRSSLSSSSRRSFAVKAQTDDLPLVGNKAPDFEAEAVFDQEFIKVKLSEYIGKKYVILFFYPLDFTFVCPTEITAFSDRYAEFEKLNTEVLGVSVDSVFSHLAWVQTDRQSGGLGDLNYPLVSDVTKSISKSFGVLIHDQXXRGLFIIDKEGVIQHSTINNLGIGRSVDETMRTLQALQYIQENPDEVCPAGWQPGEKSXKPDPKLSKEYXXAI

SEQ ID NO: 4222 - protein, 731 aa, Silicibacter pomeroyi DSS-3
MPIVDSRMQFRDLCPPGQACRIKATDTVAETPVTRSAPYTGQALPRREDPRLLRGEVRYAGDIHLPGALHLAFLRSPYASGQLVACDTSAARAMPGVAAVLGVADLGALGGLQVNPVLPLDHATPYPILAGDTVSAVGQPIAAVLAETPDQALDAVEEISAEIEETPAPPPELLAMQHWQSGDAAVEFARAAHVVAVRVAHPRLAPSPMEPRAIAVLPEGGGLTVWLSTQTPHRARADLARILSLDPAQLRVIARDVGGAFGMKASLYPEEVLAVWAAHHLGRPVRWTASRSEEFLSATHGRGLSSEGQLAIDAEGRFLALKARVEAPLGHWLPNSALIPAWNAARILPGPYDIPATDLGTSARRAHTAPTGIYRGAGRPEACALMERLADAAARATGLDPAEIRRRNLHRANGPRDLPAGRVEGADYVTALNHFLTLADYPAWRARRDALRAGGALAGIGLGFYVEPSGKGWESARVTLEAGRATVEFGGSSQGHGRETALAQIAADALDLTPADITVQHGDTATCPPGIGALASRSTPIGASAVLEACGEITRRRDAGETGPITADTIYTAPGEAWGHGCYLAAIEIDRDTGAPHLTRMACLDDAGQLINPLLAEGQVMGGFAQGLGEAMMEALHFDDGQLLTGSFMDYAMPRAADLPPLTIHKTETLATTNALGAKGIGEAGTIGAPAAILNAALDALAPLGVSELQMPLTSLSLWQAITDASKGCET

SEQ ID NO: 4223 - protein, 149 aa, Prochlorococcus marinus str. AS9601
MQIGDKIPEFSLLDQNGVKRSNKGLKNPLVLFFYPKDDTPGCTIEVCGFRDKYDLFKVLGAEVWGVSNGSTSSHLAFANKNKLQYPLLCDTNDALRQTFKVPKVLGFMDGRVTYVIDRKGTVRHIFRDLLNGPEHIKEAIRVLKEIQNQ

SEQ ID NO: 4224 - protein, 207 aa, Vibrio cholerae O1 biovar eltor str. N16961
MLRSKKMVLVGRKAPDFTAAAVLGNGEIVDNFNFAEFTKGKKAVVFFYPLDFTFVCPSELIAFDNRYEDFLAKGVEVIGVSIDSQFSHNAWRNTAVENGGIGQVKYPLVADVKHEICKAYDVEHPEAGVAFRGSFLIDEEGMVRHQVVNDLPLGRNIDEMLRMVDALNFHQTHGEVCPAQWEAGKAGMEASPKGVAAFLSQYSADLK

SEQ ID NO: 4225 - protein, 109 aa, Oryza sativa
  misc_feature (38)..(38): Xaa can be any naturally occurring amino acid
  misc_feature (93)..(93): Xaa can be any naturally occurring amino acid
PRGTHGDDKEVRMRFRHAGLSREEVKVMVEDDALVIRXGEHKKEEGEGAEGSGDGWWKERSVSSYDMRLALPDECDKSKVRAELKNGVLLVTXVPKTEVERKVIDVQVQ

SEQ ID NO: 4226 - protein, 370 aa, Propionibacterium acnes KPA171202
MRVMVLSRGIPSPEAPLRGIFEYDQAVALHQQGHEVILAVLDARSVRHWRKFGTRVEHAVDRNDGMTVVRLDVPLGAASARIDHRVHAIAARHLHRIVTSQWGIPDVSHAHFARFAAAAARAGFPEPLVWTEHDSHLAHPDQRLNEDIIIAGDRADAVISVSQGLCDRLAGHGVTSTVVPNIVDVELFDRPDRRHEGTIVVSVATLNPGKGMIELAQAVERLPEVQLRIIGDGPQRHQLEAIAAGNPRIVLLGPQSRDRIAEELAGADAFALASHAETFGVACAEALAAGLPVLTTACGGPQEFIDDSNGVVVPIGDVDALTEGLCQVLARSWDHEQIAGYVRSRFAAAPVVDQLETVYRKAVADHGMAG

SEQ ID NO: 4227 - protein, 214 aa, Suaeda salsa
MATLSLPNHSPTFALPSQTPKPHSSQNLSIISKSAHSQFCGIKLSHSSSLSPPLYPRSYKASIVAKVSEGSMPPAFTLKDQDGKNVSLSKFKGKPVVVYFYPADETPGCTKQACAFRDSYEKFKKAGAEVIGISGDDSSSHKAFKQKYKLPYTLLSDEGNKVRKDWGVPSDLFGALPGRQTYVLDRNGVVRLVYNNQFQPEKHIDETLKFLQSL

SEQ ID NO: 4228 - protein, 373 aa, Prochlorococcus marinus str. MIT 9301
MFTETFLPKVDGIVTRLTKTIEFLIKNGDEVIIFCPEGCPESYMGATVVGVAAMPLPLYPELKLGLPGPAVSDKLEKFNPDLIHVVNPAVLGLGGIWLAKTNNIPLIASYHTHLPKYLEHYGMGMLEPLLWELLKAAHNQALLNLCTSTAMVNELKDKGIQRTALWQRGVDTYSFRPDLRSEKMRDKLFGKYKDANYLLIYVGRLSAEKQIERIKPVLESIPNACLALVGDGPYRNQLEKIFENTKTNFIGYLSGDELASAYASGDIFLFPSSTETLGLVLLEAMAAGCPVIGANKGGIPDIISDGINGCLYDPDEKDNGVQSLIEATKKILENEDKREIMRKEARNEAEKWDWNQATLQLQNYYSDTLKEID

SEQ ID NO: 4229 - protein, 325 aa, Burkholderia sp. 383
MDVRQGFVDCVGRTPLIRLTKLSAETGCEILGKAEFMNPGGSVKDRAALYIIRDAERRGVLKPGGTVVEGTAGNTGIGLAHICAARGYRCVIVIPDTQSPDKLAILRTLGAEVRPVPAAPYRDPNNYQKIAGRLADELDNAVWANQFDNVVNRQAHYETTGPEIWRDTAGTIDAFVCATGTGGTLAGVSRYLKEQNPDVRIVLADPCGSGLYGYVKTGDLGAEGSSITEGIGSTRVTMNLAGTPIDDAVRIDDQQCVTMVYRLLREEGLYVGGSSGINVAAAVWLARRMGPGHTIVTLLCDRGDIYRARLFNREWLREKGLDPGD

SEQ ID NO: 4230 - protein, 228 aa, Arabidopsis thaliana
MASTLSFAASALCSPLAPSPSVSSKSATPFSVSFPRKIPSRIRAQDQRENSIDVVQQGQQKGNQGSSVEKRPQQRLTMDVSPFGLLDPLSPMRTMRQMLDTMDRMFEDTMPVSGRNRGGSGVSEIRAPWDIKEEEHEIKMRFDMPGLSKEDVKISVEDNVLVIKGEQKKEDSDDSWSGRSVSSYGTRLQLPDNCEKDKIKAELKNGVLFITIPKTKVERKVIDVQIQG

SEQ ID NO: 4231 - protein, 169 aa, Geobacillus kaustophilus HTA426
MIKIEKGQKVLVKLKVNGKLYEEYTESRKLLSDFIREDLGLTGTHVGCEHGVCGACTVLVNGRAVRSCLMLAIQADGTEVNTIEGLASEEGWHPLQEEFSKCHALQCGFCTPGILMSAVEFLETNRNPTEEEIKEMLSGHICRCTGYHGIVKAIRQAADRIKNTVNKVN

SEQ ID NO: 4232 - protein, 366 aa, Parvularcula bermudensis HTCC2503
MKRVLHLIPSFELGGVQRRLVQCVRGLTGWEHIIISLSPHLEAERLLPERTNVMSLCLAPSKGLGMGNVLSLRKQMRAIAPHLYCTYNWGSMEAVAAIRSLGHGPYHLHHEDGFGAEEAVKRSPVRNALRRGLLGFGPAQMIVPSQTLQTIAVQEWGLPRDRCHFVANGIDIDHFAPPPDEASRAGVGIVAALRPEKNIGRFLRLAAAFPDTAFDIVGAGPLKTDLEKAAPANVRFHGAVANPAAHYRRWRCFVLTSSTEQMPLTVLEAMASGLPVVATAVGDIAQMVAPQNRPFIVPCEDEEGLDTKLREILTDGKAADALGNANRQHTVERYSLDNMLATYQALYDRFGRAESHIEFSRNPERL

SEQ ID NO: 4233 - protein, 469 aa, Clitoria ternatea
MARFSSSLGARVILLLPLLFSSLISFQLASCGTTVDFLPGFDGPLPFVLETGYVGVGEGEDVQAYYYFVESENNPNEDPLMLWLTGGPGCSSFSGLVLEIGPLIFKREEYNGSLPNLILRPHSWTKVSSIIFLDLPVSTGFTYARTEVAAQKSDLKLVHQAHEFLRKWLIDHPKFLSNEVYIGGDSYSGITVPAIVQEISQGNEKGIQPSINLQGYILGNAFTTRKEENYAIPFAHGMALISDELYESLQKNCKGEYIDVDTKNALCSRVMESYNEVISGISFSHILEPNCDWVDTETSLRRSLIQRHHGKKFLNTRLPALSCRTYANFQSSFWANDDNVRSALHIRKGSIGKWRRCTRNLPYTEDIPSSFEYHVNLSGKGYYRSLVYSGDHDLMVPFLGTQAWIRSLNYSIVDDWRQWNTNGQVAGYTRTYSNRMTFATVKGGGHTAPEFKPEECFAMYSRWISKRPL

SEQ ID NO: 4234 - protein, 291 aa, Geobacillus kaustophilus HTA426
MKPPLFDYYKPETVDQALELLQEYGINGKIIAGGQSMMPILNMRLSTPELLIDISGLQELSYIRVEDGFLKIGALTRQRDVELSPLVREACPLLSEAIPYIGHMQTRNRGTFGGSLAHADPTAEIPMTLLALDAQAVIRSASDQRLVKMEDFFLTYLTTDLMPEEMLTEVQIPLNEMPKGYAFTEFSRRHGDFALVAAACLLDVDKDGHITSGRLVLGGVDSVPLAVHEAVEAMIGSVLTEELLEHSVEEAIRFLEPESDLHASSEFRKHLAKVFAMKAIRTAYQRAQNRE

SEQ ID NO: 4235 - protein, 481 aa, Gentiana triflora
MAVPAVPSEGHEEQHKSTSSFGIGSIKFQCSLFAVLLFALLYSSSSQSIVKTLPGFHGSLPFTLESGYVGVGENEELQLFYYFIESERDPANDPLVIWLTGGPGCSAFSGLIFEIGPLTFDFESYQGGVPTLNYNPHSWTKEASIIFVDSPVGTGYSYSNTFEGYHSTDHKASDDLYAFLRKWLLKHPKFLKNPVYVGGDSYGGKFVALVTWRISQGIDAGHEPRINLQGYIVGNPVADGFIDGNAPLPFAHRMGLISDDIHKMAEENCNGNYIKADQSNGLCLEAIKQYEECTADICFDNILEPNCQEKMTSHDISLLKLPSELKEEPWCRKDSYFLTHVWANDPSVQKALHIREGTIKEWVRCNYSISYSEKLDTVLEYHHLLSKRGYKTLAYSGDHDLYIPYTATLEWIHTLNLPVADEWRPWKVDNQVAGYTKRFIHNETGKYVTFATVKAAGHTAPEYKRRECLAMVARFFSDSPL

SEQ ID NO: 4236 - protein, 810 aa, Geobacillus kaustophilus HTA426
MVDHGIGKPMYRLEDVRLLQGQGQFMDDLNPLPNIHHVAILRSPYPHARIKAIRTDKAALVPGVKGVITGSMVASLSRPFPVGVTAPVKYYSLAVDKVRFVGEPVAVVVAKNRYIAEDALEKIEVEYEPLPAVVDIERAMEEDAPLLHEEVGSNIANQRTFHYGDVEKAFQEADYTISHKFLFPKYSATPMETYGVIANYEKSTNSYTVWANFHGPFTLHSVMAAALQVPGNKLRIITPKDNGGSYGIKAGIYPYVVLMAIASRVAGVPVKWIEDRQEHLAASSSGTDRVTYIEAAFNKDGTVTALKMKMIDNVGGYIRAPEPACLYRNHSNAVGPYRIRNLYMEAYAVMTNKCPTGLIRGYGGQEHYFPIERTMQMIAEKLGMDPAEVIRKNLIRADEFPYKTPSGGIYDSGDYHKAFELLLQVGKYHELREYQKKAKADGKLFGIGLACIVEPSGSNMGYITMALTPEERAKSLPKSGCAEAATVMIDPSGSISVRISTTPSGQGHETVAAQIVGEVLGVNPRDVQVVAELDTLTSPWSVASGSYSSRFAPIGSSAIYQAAQKVRQKLLKIASGILSTSEEDLDLSQGKVVVKGNPEKSVSIKRLAGLSHWHPQGLSEGVEPGIFETAYYTVHTANPPDKNEFVNSSVTYGFVADLVAVEVDPDTGEVKILDYYTVHDAGKLLNPLIVDGQIYGGLVHGLGGALYEELSYDKNGQFLAGTFMDYLCPTATEIPPIHIHHIETPSPFTPLGAKGLGEGNCMSTPAAIANAVADATDCIIDNLPLSPNRVWNLLQKKRQEQEKVYIRGDH

SEQ ID NO: 4237 - protein, 315 aa, Bacteroides fragilis NCTC 9343
MGKIAKKLTDLVGNTPLLELSNYNASNGLKARVVAKLEYFNPAGSVKDRISLAMVEDAEAKGTLKSGATIIEPTSGNTGVGLAFVAAAKGYKLILTMPDTMSMERRNLLKALGAELVLTPGANGMKGAIAKAEELRAATPGSVILQQFENPANPAVHVRTTGQEIWRDTDGKVDIFVAGVGTGGTVSGVGAALKEHNPAVRIVAVEPVDSPVLSGGAPGPHKIQGIGAGFIPKTYHAAVVDEIRQVGNDDAIRTSRELAAKEGLLVGISSGAAVYAATELAKLPENEGKLIVVLLPDTGERYLSTILYAFEEYPL

SEQ ID NO: 4238 - protein, 174 aa, Caulobacter crescentus CB15
MTLDINGKPVSVQAAPETPLLWVLRDELGMTGTKFGCGLAQCGACTVHMDGQPIRSCVTPIEAVGAAKVTTIEGLGGQHPVQQAWVRHDVPQCGYCQSGQIMSACALLAQKPKPSDQDIDEAMAGNICRCGAYQRIRAAIKDAADFGPPTGEAHADIDEAIVAASGATHRGAGR

SEQ ID NO: 4239 - protein, 494 aa, Gentiana triflora
  misc_feature (158)..(158): Xaa can be any naturally occurring amino acid
MADTNGTAKTTSRVKWYLYLYCNVITGLLYLQHSLLQVEAADSTTVKFLPGFKGPLPFELETGYIGVDKGENVQLFYYFVKSYSDYQIDPLVLWMTGGPGCSALTAFAYEIGPIAFEEVFSNGDVPRLVLNPYSWTQEASIVFVDAPVGTGFSYPRSXEAFRSTGLQTCNQIYQFLKKFLVHHPEFLSNPLYVGGDSYAGLFVPVVAELIAHGNENGIEPSINLKIFPSECFFDLGYVLGNPLTTPYDVDYRVPFSHGMGIISDELYESLKLNCNGVYHDVDPTNTKCLNDIDTFKQVFHGIRRSHILEPYCVSVLPEQQMLSTERQRSLHENNLRIPDVLNMHHTFRCRTDGYIPAYYWANDDRVREALHIHKGSIKNWVRCNRSLPFEDSIRNVVPYHANLSKKGYRSLIYSGDHDAMVPFMATQAWIRSLNYSIVDEWRQWIVEGQVAGYTRTYANQMTFATVKGGGHTAPEYKPKECKAMFKRWITHKPL

SEQ ID NO: 4240 - protein, 319 aa, Azospirillum brasilense
MPGSEFRGKIYDSILDTVGATPLVRVNRLAEDAGAKAQIVGKLEFFNPLASVKDRIGFAMIDAAERAGTIEPGRTTLVEPTSGNTGIALAFVAAAKGYRLILTMPESMSVERRKMLKLLGAELVLTPAAEGMKGAIRRADEIVATDPNAYMLQQFKNAANPEIHRNTTAEEIWKDTDGKADFLISGVGTGGTLTGVSEVLKARKPGFRTIAVEPEDSPVLSGGMPGPHKIQGIGAGFVPDVLKKDLIDEVVRISNQRAFETARKVAKLEGIPVGISSGAALAAALEIGSRPENEGKLIVVILPSFAERYLSTALFEGLE

SEQ ID NO: 4241 - protein, 1368 aa, Gibberella zeae PH-1
MAPSAVSPTRESNPEPLATLTSKFDDTLRFYLNGTKVVLDEIDPEVTVLEYLRGIGLTGTKLGCGEGGCGACTIVVSQYNPTTKQIYHASVNACLAPLVSLDGKHVVTVEGIGNSQKPHPTQERIAKSNGSQCGFCTPGIVMSLYALLRNNDSPSKDDIEEAFDGNLCRCTGYRSILDAAQTFSVDKPGSKFKKAGGSGCCMENGNGPPSGGCCMDKANLDDTPIKRFTPPGFIEYQPDTELIFPPALKRHELRPLAFGNKRRRWYRPVTTEQLLQIKSAHPQAKIIGGSTETQIETKFKALEYPVSVYVGDIAELRQYSFKDDHLEVGGNVVLTDLESICEHAIPHYGRERAQVFEAMLKQLKFFAGRQIRNVGTPAGNLVTASPISDLNPVLWAANAVLVAKSSTKEIEIPVSQFFTGYRKTALAQDAIIASIRIPVAQGKGEFFRAYKQAKRKDDDIAIVTGALRVRLDDEGIVQEANLIYGGMAAMTVAAKTAGEYLVGRRFADLETLEGTMSALGRDFDLQFSVPGGMASYRKSLAFGFFYRFYHDVLTITDGSSEQVDKEAIDEIERDISNGEVDHHAAAAYEKEVTGKSNPHLAALKQTTGEAQYTDDMPALKNELHACYVLSKRAHAKLLSVDYSAALDIPGVVDVVDKDDMPSPEANKFGAPHFDEVFFAEGEVLTVGQPIALVLATSPQRAQEAARAVKVEYEDLPSVLSIEDAIAADSYHNFYREIKKGDAEKAFQECDHVFTGTVRMGGQEHFYLETNACLVVPKPEDGEIEIFASTQNANETQVFASRVCDVQSNKVVVRVKRLGGGFGGKESRSVVLSSALALAAKKTKRPVRYMLTREEDMVISGQRHPFLGRYKVGVNKDGKLQALDCDVFNNAGWTFDLSAAVCERAMTHIDGCYDIPNVHIRGRLCKTNTMSNTAFRGFGGPQGMFIAESYMEEVADRLGMPVETLRQINLYESDGVTHIGQGLGDWHVPLMYKQVQDEAMYTARRHFITQFNETNKWRKRGLALIPTKFGISFTALFLNQAGALVHIYHDGSVLVAHGGTEMGQGLYTKLTQIAAQALGVPLDNVFISETSTNTVANASATAASASSDLNGYAIFNACEMLNERLAPYRKKLGPDATMKDLAHAAYFDRVNLSAQGFYKTPEIGYDWTTGKGKMFFYFTQGVAAAEVEVDLLTGTWTCIRADIKMDVGQSINPAIDYGQIQGAFIQGLGLFTMEESLWLRNGPMAGHLFTRGPGAYKIPGFRDIPQTFNVSLLKDVEWKELRTIQRSRGVGEPPFFMGSSVFFAIRDALKAARAQSGVKAKVGENDSEGLLRLESPATPERIRLACEDEIMRKARVVPKEGEKSFFVAI

SEQ ID NO: 4242 - protein, 147 aa, Geobacter metallireducens GS-15
MAIVKYTPFGDLRNLQEQMNRLLDMAWSRESGEELREGVWQPPVDIFEDENGVVIKAELPGIDQKDIEVKIEDNTLTIRGERKHDQEVKKENYHRVERYYGSFMRSFSLPTTIDRDTVKAVCDKGILTITLPRREETKPKQINVEVK

SEQ ID NO: 4243 - protein, 484 aa, Gentiana triflora
  misc_feature (158)..(158): Xaa can be any naturally occurring amino acid
MADTNGTAKTTSRVKWYLYLYCNVITGLLYLQHSLLQVEAADSTTVKFLPGFKGPLPFELETGYIGVDKGENVQLFYYFVKSYSDYQIDPLVLWMTGGPGCSALTAFAYEIGPIAFEEVFSNGDVPRLVLNPYSWTQEASIVFVDAPVGTGFSYPRSXEAFRSTGLQTCNQIYQFLKKFLVHHPEFLSNPLYVGGDSYAGLFVPVVAELIAHGNENGIEPSINLKGYVLGNPLTTPYDVDYRVPFSHGMGIISDELYESLKLNCNGVYHDVDPTNTKCLNDIDTFKQVFHGIRRSHILEPYCVSVLPEQQMLSTERQRSLHENNLRIPDVLNMHHTFRCRTDGYIPAYYWANDDRVREALHIHKGSIKNWVRCNRSLPFEDSIRNVVPYHANLSKKGYRSLIYSGDHDAMVPFMATQAWIRSLNYSIVDEWRQWIVEGQVAGYTRTYANQMTFATVKGGGHTAPEYKPKECKAMFKRWITHKPL

SEQ ID NO: 4244 - protein, 399 aa, Bradyrhizobium japonicum USDA 110
MNTIALHVNRRAVELSAEPRTSLADFVRDKLDLTGTHLGCEHGVCGACTVLLDGVPARSCITYAVACEGADITTIEGLDEDEVTTELRAAFTREHALQCGYCTPGMLVSARDLVLRLPDADERRIRVGLSGNLCRCTGYVGIVRAVQSVIEARRARNIAPQAGGGRTSLGPAGSGRAASGQIEPRPARQALVAASDSVVPGTIPDFTPATVLDQRFSLPYPPAKVFAMFDDIAGIAACLPGVSLAAPPRPECVEGVIRVRLGPIAASFEGAARVERDPATLSGRIVGIGTDQRNHSATQGEIRYRLIPLDGGAATSVDLSIGYTLTGMLAQVGRPGLVRDLARRLVAEFAGNLDRHMSGAPSGQAAPAELSFWSLASDVLRARLARMFGRVFTGKGGAE

SEQ ID NO: 4245 - protein, 212 aa, Pseudomonas syringae pv. syringae B728a
MTLRLGDIAPDFEQESSEGRIRFHEWLGDSWGVLFSHPADFTPVCTTELGFTAKLKDEFAKRGVKAIALSVDPVDSHIKWIDDINTTQNTLVNFPILADADRKVSDLYDLIHPNANDTLTVRSLFVIDPNKKVRLTITYPASTGRNFHEILRVIDSLQLTDNYKVATPANWVDGDDVVIVPSIKDEAEIKQRFPKGYKAVTPYLRLTPQPNR

SEQ ID NO: 4246 - protein, 519 aa, Vitis vinifera
MSTSLSINPPSFSIITTTPSSPSSFSSSSFSTSSSSYTSVSPRLLSLYPSTAKPITLVCRQARFSPSEGASRLRRRTLAAKGDMTITEMGEEDEEEESPPPSLESEATSRPRRIALFVEPSPFAYVSGYKNRFQNFIRYLREMGDEVMVVTTHEGVPQEFYGAKLIGSRSFPCPWYRKVPLSLALSPRIISEVARFKPDIIHASSPGIMVFGALFIAKLLCVPIVMSYHTHVPVYIPRYTFSWLVKPMWLIIKFLHRAADLTLVPSAAIARDLQAARVTAANRIRLWNKGVDSESFHPRYYSHEMRLRLSNGEPEKPLVIHVGRLGVEKSLDFLKRVMDRLPEARIAFIGDGPYREELEKMFSGMPAVFTGMLQGEELSQAYASGDVFVMPSESETLGLVVLEAMSSGVPVVGARAGGIPDIIPRDDEGKTGFLYNPGDIEDCLSKLEPLLHSHELRETIGKAAREEMEKYDWRAATRKIRNEQYNAAIWFWRKKRAQLLRPLQWLTRLFFRTPEINYR

SEQ ID NO: 4247 - protein, 405 aa, Dehalococcoides sp. CBDB1
MAKKKLNIALVSLHSCPLGQPGGRDTGGMNVYICELARSLGNSGYQVDIYTRAHDPRDDVWEFLAPNVRLIHIQAGPVEDMGKLAQYEHLESFVCGLEAFRKAEGIKYDLIHSHYWLSARAGLALSKLWEVPHLVMFHTLGKVKNRLMQAQVDPQLRLDAEQNIVHETDLIIAATQNEKNDLISLYQAEPDKIRVIPCGVNTRLFSITDRAEAEAELGLSAAPKALFVGRLEKLKGLDNLLKAVSLIEADMELLVVGGDEYSQGERNRLEKVAEELAISDKVKFYGSVKQDVLAKYYNAAKVCIIPSYYESFGMVILEAMACGTPVISGRVGVAPDIIRPGINGCLIPGNQPEQLAVCLKEWLYQKIANHKAIRKIAEEYTWQSVSAQIESVYYGILDPETAGVA

SEQ ID NO: 4248 - protein, 481 aa, Lobelia erinus
  misc_feature (422)..(422): Xaa can be any naturally occurring amino acid
MAFGMPFSWDWKLGWVLQIILLLAVSTIVAPRSIIDTLPGFKGILPFKLETGYISVGESDEIQLFYYFFPSEGSPEKDPLMIWFTGGPGCSGLSAFMENKGPLIFSDESPFDGNLPPLTTNPHTLTKVASIIFIDSPVKAGFSYATTYEGYNMSDTKTAKEATTFLKKWLLEHPEFDKNPLYIAGDSYAGLIVPMVVFHVSNAIEAGQMPNTNLEGYVLGNPFTDTPNDVGSRIPYANRMALISDQYYEWAKTSCQGDYSRQDPSNTKCLLHLQLIDKCIEDIYIDYILGPKCKNGMNLQSGDKFMLGKQSSQDMILLPSLREEHSEQCEEELKTHLCEIWANEPVVQQALHVRKGTLTSEWMRCNKSSSTYINDMPTSIEYHQILSKKTYRALIYSGDHDMTVPYVGTLAWIHKLNLSIEXYWRPWLVDNQAAGFTEKYQGKNGFSLTFGTVKGAGHVAARYKPKGTSTIIGRWLTRSLL

SEQ ID NO: 4249 - protein, 204 aa, Chromobacterium violaceum ATCC 12472
MAVLVGKQAPFFAGEKTFSAVLGNGEIVDNYSFKQATAGKYAVVFFYPLDFTFVCPSELIAFDHRLAEFKAKNVEVIGVSIDSQFTHAAWRNTPVEKGGIGQVGYTLVADIQHDLCKAYDVEADGGVAFRGSFLIDKSGVVQHQVVNNLPLGRNVDEMLRMVDALQFTEEHGEVCPAGWNKGKKGMKPSAEGVASYLAENAKDL

SEQ ID NO: 4250 - protein, 383 aa, Borrelia burgdorferi B31
MKVAIFTDTYIPEKNGVATSIKQIKEGFEKNGYEVYIFCPKSKKSLNEKNVYRCSSIQINKKLDAVIAFPNKRKISKIIQSYKPDIIHTHSEFSMGKIGKQIALKHNIPIVHTSHTMWDYYLHYLGIFKYFIKPDKMMRKHYNKIKHFIYPSSKAKERYFQLSNNSSNYKIIPNGVDRKLFIKTLSKEKKDEILKKHNIKQTDKIIIFVGRINKEKNINLLVTHLKDLLMQNNNYKLILIGKGSEEKEIKNFSIKHGLEKQILLIGTIPWEEIYYYYKISDIFASLSKSEVYPMTVIEALTAGIPAILINDYIYKDVIKEGINGFLIKKYENLSRYIDKVIKDDEILKKFKENAKKHSTKFSSYFFTKKIKNYYSEIIARKNH

SEQ ID NO: 4251 - protein, 200 aa, Pseudomonas putida GB-1
MSVLVGKKAPDFTVPAVLGNGEIVDSFNLASAIKGKYGLVFFYPLDFTFVCPSELIALDNRIPDFQARNVEVIGVSIDSHFTHNAWRNTPVNNGGIGQVKYTLAADMTHEICKAYDVESEGGVAFRGAFLIDTNGVVRSQIINDLPLGRNMDELLRLVDALQFHEEHGEVCPANWKKGDKGMNASPEGVAAYLSENAGKL

SEQ ID NO: 4252 - protein, 163 aa, Helianthus annuus
MSIIPNFFGRRRTNCFDPFSLDVWDPFEGFPFNNNNFGSLSDQVRSSSETSSFVNANVDWRETNDAHVFKADVPGLKKEEVKVEVEDDRVLQISGERNKESEEKGDTWHRVERSSGKFVRRFRLPENAKVDQVKAAMENGVLTVTVPKVEVKKPDVKSIQISG

SEQ ID NO: 4253 - protein, 177 aa, Prochlorococcus marinus str. MIT 9215
MRNLVLGIIIPIILLFNYNSALSFDFAPEVGDQAPNFHLEGFNKNIKSKSIWELSDFQGKWLVMYFYPKDFTAGCTLEAKGFSELKKDFKKYNAEIVGISADNQDSHESFCSEKSINYTLLSDPEGVISDKYGSWIPPFSDRNTFLISPEGNISYRWISVLPINHAKEVLNVLKKKI

SEQ ID NO: 4254 - protein, 425 aa, Yarrowia lipolytica CLIB122
MKIALVTEVSPLYVNGVSRTIVRLLDHLTEQGHEVVVFGPDSGHYKNVRLVGTFGVPLFFYPELKFNFATPSMVYQLRQYQPEIIHFVDPNLLGPQMLVWCKMFLPHVPRIASYHTNIALYATMFGFSYLYEPIWWTMRMYHGACRKTLCPSHSTKAALVANGIPAEKVGIWTRGVEMAMFNPERRNMQLREKWLCAGKPTLQSNSSTSSLLRRASNEDEGVSFGLQDPEDKLIILYVGRISWEKNIQVLVEAYKGMNHEQVHLVIVGDGPAKASIQGQLRSADVTFTGYLRGEELAEAYASADIFAFPSKSETFGQVVLEAQASALPCVIMDAEGVSEIVEGEVSGIITPLPANMDQADSVEVQEAFRANIERLVDNPVLREKMSRNAVARAQKFSWYEAMQACVDAYADTIVDAQMETNTSIV

SEQ ID NO: 4255 - protein, 401 aa, Rhodococcus sp. RHA1
MVGGLGRHVHHLATELAAAGHEVVVLSRRPSGTDASTHPTVTHIEDGVLVVAVAEDPAHFVFGEDMLAWTLAMGHAMVRAGVALHKPGVGEGWQPDVVHAHDWLVAHPAIALAEFYDVPLVSTLHATEAGRHSGWVSGRINRQVHSVEWWLANESDALITCSASMQDEVTTLYGPQLPPITVIRNGIDLTTWSFRERAPRSGPPKLLFVGRLEYEKGVQDAIAALPRIRRSHPGTTLSIAGEGTQFTWLYQQARTHRVARAVNFLGNLDHIELLGWLHGADAIVLPSRYEPFGIIALEAAASGTPLVASTAGGLGEAVVDGETGMSFQPGDVTGLTSAVREVLDDPAGAQQRAVAARDRLTADFDWHKVAEDTVHVYAGAKRRVRHPLARPEIPERPLPGR

SEQ ID NO: 4256 - protein, 156 aa, Helianthus annuus
MSIIPSFFTGNGSNIFDPFSSEIWDPFQGLSSVINNLPESSRETTAIANTRIDWKETPEAHVFKADLPGLKKEEVKVEVEEGRVLQISGERSRENVEKNDKWHRMERSSGKFLRRFRLPENAKMDQVKAAMENGVLTVTVPKAEVKKPEVKAIDIS

SEQ ID NO: 4257 - protein, 407 aa, Azoarcus sp. BH72
MNILMVSDVYFPRVNGVSTSIETFRRSLHQQGVRSTLIAPAYPGGGADDDGVLRIPSRFVPLDPEDRMMRSGHIAARADELAGEGFDLIHIHTPFVAHYAGLALARKLRLPCVATYHTFFEEYLFHYVPTLPRSWLRALARRFSRTQCNALHAVIVPSRAMAAALLDYGVERPLEILPTGIPPDQFQGGDGRFFRSRYEIPADARLLLFVGRVAHEKNIGFLIEMIDHLRHTEPRALLLITGEGPALATLRNAVAQRGLERHVRFLGYLDRHSELHDCYRAADLFVFASRTETQGLVLLEAMALGTPVVALAQMGTCDILEGETGCRIGPDDPAAFAALVASLLSRPELLERLAEEARQRARHWHADDIAARLVRLYARWIDASGSPRRVPELTAGSAGRRRLTSRS

SEQ ID NO: 4258 - protein, 190 aa, Nostoc punctiforme PCC 73102
MPLIRWEPFKEAEIMQRQINRLFDQMLSSQESDRLQGGVAHRGDIIAFTPPAEIHETSDAFKLRIELPGLKPDDLDVKVSPEAVEISGERRFETTTEEKGIRRSEFRYGSFGRIIPLSTRIQNDKVQAEFKDGVLCLTLPKAQSEQNRVVKVNLSDSTNGQSQQLGNGHSQPTNEKESLQAEETVASNPQ

SEQ ID NO: 4259 - protein, 1699 aa, Aspergillus nidulans FGSC A4
MGVPKFFRWLSERYPAISMLIAENRIPEFDNLYLDMNGIIHNCTHKDSDSPTFRMTEDKMFIAIFNYIEHLYGKIKPKKLFFMAVDGVAPRAKMNQQRARRFRTALDAEQAKEKAIAQGIEMPKEDPFDSNCITPGTEFMAKLTEQLKYFISKKISEDKDWQGVEIVLSGHEVPGEGEHKIMEYIRHAKAQPGYDPNVRHCLYGLDADLIMLGLLSHDPHFCLLREEVTFGRQVQKKPKELEHQNFYLLHLCMVREYLQLEFQELEEEGIIDFPYEFERVIDDFILMAFFVGNDFLPNLPNLHINEGALSLMFKVYKEVLPKMGGYINEQGTINLQRLGVLLDALSHVEYRFFEAEYSDATWMRAKQSADNGADVDAKPKTFTVTPDQKNILKTVKKYVLNRPGKAADSKPLDFPPTLPARDRKFVEQLADDLRLPWSTVSNDDGDRFIRIQFPSNENDDSEEEEDEEASMAVRRVIRKYENAKVQELSAEEALAAAQKKYEEKFQDWKDKYYMEKFGWGLDNHEEMRKLTENYVQGLQWVLFYYYRGIASWPWFFNSHYAPMISDVKKGLNADMNFRLGRPFRPYDQLMGVLPDRSKKIVPKAYHDLMSSPDSPIIDFYPRDFELDMNGKKMEWEAVVKIPFIDERRLLDALATREHLLTPEEKARNGFGVSLKFTYSPDTEYIYPSSLPGVFPDIPNCRCIQNVFDLPTMDGLEPYVGLVEGVHLGASALAGFPSLKTLPHAGQLGFHGVCVFQQESRNESMVITVLDPGSRSSSELAKKKLGQRVFVGYPFLQEALVTRVSDELFDYTLPAGEEHPLATPHSDAQIEQWKKKADKIEGIYSRRFGTIIGPVEAMVHVQLLKGLIKTDSGATVKEFADIPGQETDYALQLVVDEVINPDERFIEREALPVEKEFPEGSRAFFLGEFNYGRPVHITGHDDGKVNGLIAVIKGREPEFGRERARNAEALSPYMPAFAVARILQLNPLTLAKITSSFSVDVDGQRVNLGLNLKFEARKQKVLGYSRRSESGWEFSAKAIGLVEQYMLKFPQFIAGIQRNPRNDRYQPTDFYPPDIALDKINEIKAWLKEIESKNFERVPLEAEQLDSDVVKLIEQDADQLVKTQPPMEAKKIRDIPRSALLRPADVEHRLGNQTFKLGDRVVYAQDSGKVPIATRGTVVGLTRTPRAILLDVVFDVAFMSGTTLGDRCSPFRGQTVLASSVLNLSYRQLVASTRAAVNQKQQNQPSPLTVKGYGAPLGPGGQGQLKEAPAPPPLRGSFRGALSGARGGRGDANGTATLPFRPHPETNGSARGSRGRGRGGGVARGRGGYVSVDNSDPNAGVVQNNPNFRPKNYSQVPPPSGLEYRGRGRGRGARGGDRGNGYRGRGSHRGRGAAATAGHKMAPLPSIPTFDNLTLDPNGPPGNAWGLFGPNNELGMLNLLTPEVVKRAASEEIREGVRISLDLPLNRLSHPSFNRKPFIQELVNKAPRIVNDDILTFNTQSSTQWDGFRHYAWSNSGGIVGRGILIDYATWAQRNSIALTPFQTSTIPLSSIQQIIHETSLTPRPGDILFIRTGFTEAYNKLTPDEEAAIAARPTPNFAGVENGKNTLRWLWENQFAAIASDSPAFEPAPLFRPEQGVGHEVTLHQWCLSAWGMPIGEYFDLEELAKYCREKGRWSFFLSSIPLKVPGGVASPPNAVAIL

SEQ ID NO: 4260 - protein, 175 aa, Prototheca wickerhamii
MHLCALEFCMPRVCPATPRRVGHGDTGASLPASMAPSCSASSRSMTMLASTSGKQLVLGARGVTRRGGAVYSARYRARATAPAQASSTGGLPLAPRRVCFLVEPSPFTYVSGYMNRYRNTIRYLVELGCEVLIVTPGKGVAPGMEGQAQPREYCGAKVVEALSFPLPWYRKLPLS

SEQ ID NO: 4261 - protein, 873 aa, Arabidopsis thaliana
MDLEANCKEKLSYFRIKELKDVLTQLGLSKQGKKQELVDRILTLLSDEQAARLLSKKNTVAKEAVAKLVDDTYRKMQVSGASDLASKGQVSSDTSNLKVKGEPEDPFQPEIKVRCVCGNSLETDSMIQCEDPRCHVWQHVGCVILPDKPMDGNPPLPESFYCEICRLTRADPFWVTVAHPLSPVRLTATTIPNDGASTMQSVERTFQITRADKDLLAKPEYDVQAWCMLLNDKVLFRMQWPQYADLQVNGVPVRAINRPGGQLLGVNGRDDGPIITSCIRDGVNRISLSGGDVRIFCFGVRLVKRRTLQQVLNLIPEEGKGETFEDALARVRRCIGGGGGDDNADSDSDIEVVADFFGVNLRCPMSGSRIKVAGRFLPCVHMGCFDLDVFVELNQRSRKWQCPICLKNYSVEHVIVDPYFNRITSKMKHCDEEVTEIEVKPDGSWRVKFKRESERRELGELSQWHAPDGSLCPSAVDIKRKMEMLPVKQEGYSDGPAPLKLGIRKNRNGIWEVSKPNTNGLSSSNRQEKVGYQEKNIIPMSSSATGSGRDGDDASVNQDAIGTFDFVANGMELDSISMNVDSGYNFPDRNQSGEGGNNEVIVLSDSDDENDLVITPGPAYSGCQTDGGLTFPLNPPGIINSYNEDPHSIAGGSSGLGLFNDDDEFDTPLWSFPSETPEAPGFQLFRSDADVSGGLVGLHHHSPLNCSPEINGGYTMAPETSMASVPVVPGSTGRSEANDGLVDNPLAFGRDDPSLQIFLPTKPDASAQSGFKNQADMSNGLRSEDWISLRLGDSASGNHGDPATTNGINSSHQMSTREGSMDTTTETASLLLGMNDSRQDKAKKQRSDNPFSFPRQKRSVRPRMYLSIDSDSE

SEQ ID NO: 4262 - protein, 330 aa, Gemmata obscuriglobus UQM 2246
MATDTTFRGHVYDDITQTFGNTPCIRLRKVVGDAKATVIGKLENFNPLWSVKDRIGVAMIDAAEKAGKIGPNTLIVEPTSGNTGIGLAFTCAARGYKLAVAMPESMSLERQRLLKALGATLVLTPRELGMKGAVSKAMEMFQEAGGEPKAFIPQQFKNPANPDVHRRTTAEEIWRATGGTIDILVSGVGTGGTITGCGEVLKSRKPSVKCIAVEPTQSPVLTQHIVQGVPKDQVKPLGPHKIQGIGAGFVPDVLNTAIIDEVVQVTDDEAFEMGRRLAKEEGMLCGISCGAAAHAAVKIAHRPENAGKVIVVVLPDLGERYLSTALYPQD

SEQ ID NO: 4263 - protein, 309 aa, Desulfovibrio desulfuricans subsp. desulfuricans str. G20
MNIAENMAALVGNTPLVRLNRLARGCHAEVVAKLEFYNPCASVKDRIARSMIESALESGEINADSLLVEPTSGNTGVGLAFICAVHGLRLTLTMPESMSDERKKLLRSFGTTLVLTPAAQGMRGAIAEAERIVRETPGAVMLQQFANPANPAAHYATTAEEIWRDTDGRVDAFVAGVGTGGTITGTGRRLRELNAGVRIIAVEPEASPVLSGGAPAPHPIQGIGAGFVPEVLDTGIYDEVFKVSGDDAMNTARDLLRQEGILCGISSGANAFAALEAARRPEMKGKRIVFIVCDTGERYLSTPLFSGQS

SEQ ID NO: 4264 - protein, 122 aa, marine gamma proteobacterium HTCC2143
MLKHKGFNLSVEAARYLQSSHPDIHFCLLGDGPEREALETQAAVLSNVSFVGKVHNMGDWFSSANLLIHPSFSEGLGSVILEALGFHLPVIGSNVGGIPDIIEHGVSGLLCEKGNAKDIVDL

SEQ ID NO: 4265 - protein, 663 aa, Glycine max
MASAAPGATNDALYKELWHACAGPLVTLPREGERVYYFPQGHMEQASMNQGLEQQMPSFNLPSKILCKVVNVHLRAEPETDEVYAQITLLPEADQSEVTSPDDPLPESPRCTVHSFCKTLTASDTSTHGGFSVLRRHADDCLPPLDMTQQPPWQELVATDLHGNEWHFRHIFRGQPRRHLLTTGWSVFVSSKKLVAGDAFIFLRGENGELRVGVRRLMRQQSNMPSSVISSHSMHLGVLATASHAIATGTLFSVFYKPRTSRSEFIVSVNKYLEARSHKLSVGMRFKMRFEGDEVPERRFSGTIVGVGDNKSSVWADSEWRSLKVQWDEPSSILRPDRVSPWELEPLVSTPPTNPQPSQRNKRSRPPILPSTMPDSSLQGVWKSPVESAPFSYCDHQHGRDVYPSTNFNSTATGFLGFGGNCYASNKSIYWSSRMENSTESFSPVALKEFGEKRQGTANGCRLFRIQLHDNSNSNEESLPMVTLSGRMGDDGPLPSLDAESDQHSEPSNVNRSDIPSVSCDAEKSCLRSPQESQSRQIRSCTKVHMQGMAVGRAVDLTRFDGYEDLLRKLEEMFDITGELCGSTKKWQVVYTDNEDDMMMVGDDPWLEFCSIVRKIFIYTAEEVRKLSPKIGLPISEEVKPSKMDSEAVANPEDQSSIVGPGC

SEQ ID NO: 4266 - protein, 396 aa, Methylococcus capsulatus str. Bath
MSSRVPAGKPRLLVILPADVIGGAETVVFNLLAGLRGFDCVLLTQSAIADFYRGCDIRLYLFDDWRCGQPYRLSVGNGLRYAWAIRSVVRRERPNLVLSIMHNGTFFASLAKRLFFSRIPLAGTILGSLTGYFTRVGRKPTLLERWVIHCCLTLPDRVIVPSYGVFEDLVDTFGAQPGRLKVIYNGIDVCGVRRKAEQPIELTKDRSWIVSASRFSSQKDFPTLLAAFKDVLARRPARLVLVGDGELRQDIERIASDLGIREHVVMVGFRENPFPYMAQADIFVLSSFFEGFGNVIVEAMALGVPVVASDCPSGPAEIISDGENGFLVPVGDARALADRCVTLLSDDERRSAMVRSGLDRADYFSVGAMLTAFDGCLNEMLTGAVFDESRGSNPDG

SEQ ID NO: 4267 - protein, 307 aa, Geobacter metallireducens GS-15
MPVFDSDKVIEQIGNTPLQRLAKLEAPGSAAVYGKAEFFNPGGSVKDRICLAMIEAAEKDGSLKPGMTVVEPTSGNTGIGLSMICAIKGYKLVLTMPDTMTVERRRLLAAYGAELVLTPGAQGMRGAVQKAEELAAQPGHIMMQQFKNGANPEAHRRTTGPEIVRALSGQSIDAFVAGVGTGGTITGVGEVLKEHNAAVRIVAVEPDASPILSGGQPGPHKIQGIGAGFVPDVLNTKVYDEVIRVTNEDAYETVRRLAQEEGVLVGISSGANVFAALQVAKRLGPGKNVVTILCDTGERYLSTGVFD

SEQ ID NO: 4268 - protein, 227 aa, Vitis vinifera
MASLKAFPFSSSPLATHKPSLSKGVAGAPCSAFFPSSRHGGRSRLALVRAEATGENKDASLDVQVHQGNKGATAVERQPRRLALDISPFGLLDPFSPMRTMRQMMDAMDRMFEETVAFPGSAEVRSPWDIVDDENEIKMRFDMPGLSKEDVKVSVEDDLLVIKGEQKKEEGEKDSWSGSGFSSYSTRLQLPDNCEKDKIKAELKNGVLSISIPKTKVERKVIDVQIQ

SEQ ID NO: 4269 - protein, 322 aa, Vibrio campbellii AND4
MSKIYEDNTLTIGNTPLVRLNKVSKGKVLAKIEARNPSFSVKCRIGANMIWEAEKAGTLKPGVELVEPTSGNTGVALAFVAAARGYKLTLTMPESMSLERRKLLKALGANLELTEAAKGMKGAIAKAEEIAAGNPDKYLLLQQFNNPANPEIHEKTTGPEIWEATDGEIDVFVAGVGTGGTITGTSRYIKGEKGKAITSVAVEPSESPVIAQALAGEEIQPAPHKIQGIGAGFIPGNLDLELLDRVEQVTSEEAIEMARRLMEEEGILAGISSGAAVVAANRIAELPEFAGKTIVTVLPSSGERYLSSALFAGIFTDKENQQ

SEQ ID NO: 4270 - protein, 378 aa, Coccidioides immitis RS
MFRTGIRRFSSTALRGSESLVAQAEAKNQYGIGVSRAQGVVKGLTGAIGNTPLIRLNRLSEETGCNILGKAEFQNPGGSVKDRAALFVVKDAEERGLLRPGGTVVEGTAGNTGIGLAHVCRSKGYKLVIYMPNTQSQGKIDLLRLLGAEVYPVPAVAFENPENYNHQARRHAESLDNAVWTNQFDNTANRRAHIETTGPEIWAQTKGKVDAFTCATGTGGTLAGVTRYLKEVSNGRVKCFLADPPGSVLYKYVSSGGKLIERGGSSITEGIGQGRVTDNLKPDIELMDGALQIADEKSIEMVYRCLDEEGLYIGASSALNVVAAKEVAEKLGKGHTIVTMICDGAYRYADRLFSDKWLRTKNLRDAIPKHLEKYIVLP

SEQ ID NO: 4271 - protein, 456 aa, Klebsiella pneumoniae
MSLFHSVSDLIGHTPLLQLHKLDTGPCSLFLKLENQNPGGSIKDRVALSMINEAERQGKLAPGGTIIEATAGNTGLGLALIAAQKNYRLILVVPDKMSREKIFHLRALGATVLLTRSDVNKGHPAYYQDYARRLADETPGAFYIDQFNNDANPLAHATSTAPELYQQLEGDIDAIVVGVGSGGTLGGLQAWFAEHSPKTEFILADPAGSILADQVDTGRYGETGSWLVEGIGEDFIPPLARLEGVHTAYRVSDREAFQTARQLLQVEGVLAGSSTGTLLSAALRYCRTQSRPKRVVTFACDSGNKYLSKMFNDDWMRQQGLIARPEQGDLSDFIALRHDEGATVTAAPDDTLAAVFTRMRLYDISQLPVLEDGRVVGIVDEWDLIRHVQGDRQRFSLPVSEAMSRHVETLDKRAPESELQAILDRGLVAVIADNTRFLGLVTRSDVLTAWRNRVAQ

SEQ ID NO: 4272 - protein, 329 aa, Cyanobium sp. PCC 7001
MQGFVGAVGHTPLIRLAALSALTGCEIFGKAEFMNPGGSVKDRAALGILLEAEQEGALQPGGTVVEGTAGNTGIGLTHLCNARGYRALIVIPDTQSAEKIGLLRSLGAEVRTVPAVPYRDPNNYVKLSGRIAAEIPGAVWANQFDNLANRRAHYATTGPEIWEQTGGKVDAWVAATGTGGTYAGVALFLKERNPRVRCVLADPYGSALYSWARTGELSSEGNSITEGIGNSRITANLEGAPVDDAVRIDDQAALDTIYRLLWQEGLFLGGSVGINVAAAVETARRLGPGHTIVTVLCDSGDRYRSRLYDRDWLAAKGLRQPERALAAAG

SEQ ID NO: 4273 - protein, 128 aa, Magnetospirillum magnetotacticum MS-1
MFFYPLYFNFVCPSEILAHDHRVKAFAERNTNVIAVSVDSHFTHLAWKNTPVDKGGLGNVQFPMVADLTKDIAKSYGVLLPGGVALRGTFVIDKNGVVQSAHVNNLPLGRNVDEALRLIDALQFHEEH

SEQ ID NO: 4274 - protein, 284 aa, Bacillus sp. SG-1
MGIPEGVRLFAKLEYFNPGGSIKDRLGVKLIASAEQSGALQAGGTIIEPTAGNTGIGIALAAVGKGYKVIFVVPEKFSVEKQTLMRALGAEVVNTPTELGMKGAIQKAKELSQEIEGSYCPQQFDNPSNPETYFETLGPEIYSALNGKVDVFVAGGGTGGTFMGTARYLKEKNPSVKTVIVEPEGSILNGGESGPHKTEGIGMEFLPSYMDTNYFDEIYTIRDADAFRALKELALKEGLLVASSSGAAFVAALEEAKKAEKGTNIVTIFPDSSERYLSQGIYEE

SEQ ID NO: 4275 - protein, 418 aa, Streptomyces kanamyceticus
MTEPAKGVLALTPFFLYSEYQDHWDPKFDPMGGMHLLVRALVEEMAGRGVPHRVLTMSPPKVPKDIRIGQRIKVHARRLPVLPIPSDLEGYFGLVGAWAKGSLLWVLRNRKRLRREIGAVHAHCDGSGAAAFYPYLMSRILGVPLVVQIHSSRYLSQHPTTLFERVTDPIAKWAERHAVRKAAAVLMLTDRARDEMRRKAQLPAERVHRLAYLASDQFKDADTEARRAELRERYGLDDRPIVLYVGRIAAEKGVEYYIEAAAELTRRGRDCQFVIAGDGPARPDLEKLIGARGLRDRVTITGFMSHEFIPSMISLGELVVLPSRYEELGIVILECMTMRRPLVAHDVNGVNKLIEDGTTGIVVPPFRTPEMADAVERLLDDPELRERMAENAAPLPAAKYSLSAAGDQLAGIYREIGL

SEQ ID NO: 4276 - protein, 177 aa, Prochlorococcus marinus str. MIT 9312
MRTLVVSILISFFLLINCNSTLAFDFAPEVGDSAPNFQLEGFNKNIKSKKIWELSDFQGKWLVIYFYPKDFTAGCTLEAKGFSELKKDFSKYNAEIIGISADKKDSHESFCSEKSITYTLLSDPEGIISDKYGSWIPPYSDRNTFLISPEGTISYRWISVLPINHAKEVLNVLKKKI

SEQ ID NO: 4277 - protein, 301 aa, uncultured marine bacterium 561
MNPAENSYPTIESVVGETPLVRLQRLTQNSSNHVLCKLEGNNPAGSVKDRPALSMIVEAEARGDIRPGDTLIEATSGNTGIALAMAAAIRGYHMRLIMPAHMSSERKLAMAAYGAELIQVTREEGMEGARDLAEAMQARGEGTVLNQFGNFDNPLAHYRGTGPEIWRQTGGQVTHFISSMGTTGTIMGVSAFLKEQNPDIEIIGLQPQDGSQIPGIRRWSEAYRPTIFQSAKVDRTIDISQAESEVMMRRLASEEGIFAGVSSGGSISAALQVSQEVEGATIVAIVCDRGDRYLSTGVYGI

SEQ ID NO: 4278 - protein, 420 aa, Nocardia farcinica IFM 10152
MKILMVSWEYPPVVVGGLGRHVHHLAVELAAAGHEVVVLSRRPTGTDPTTHPTHSFIEDGVLVVAVAEDPPCFDFGEDMLAWTLAMGHAMVRAGVGLGKPGIGEGWTPDVVHAHDWLVAHPAIALAEYYDVPLVSTIHATEAGRHSGWVAGRVNKQVHSVEWWLANESDALITCSSSMQDEVERLYGPERVPITVIRNGIDVGAWTFRPRAPRTGPPRLLYVGRLEYEKGVQDAIAALPRIRRAHPGTTLTVAGVGTQFEWLRERARVHRVARAVTFTGQLGHAELLGWLHGADAIVLPSRYEPFGIVALEAAAAGTPLVTSTAGGLGEAVIDGVTGASFEPADVDGLVEAVRATLDDPAAAQQRAYAARERLTADFAWDVVAAETAQVYSSAKRRVRNPLGRPVIVERPLPERDPNNPV

SEQ ID NO: 4279 - protein, 170 aa, Pseudomonas fluorescens PfO-1
MARPHNLQEYAGVPMITLKLNGQDHPLDVTEDMPLLWAIRDVAGYNGTKFGCGMGLCGACTIHIDGAPARSCITPIGSVVGQNVTTIDNLHADPVGQIVQQAWLDTAVAQCGYCQGGQIMSATALLKTNPNPSDEQIEEAMVGNICRCGTYNRIKTAIRQASTHLKEAKA

SEQ ID NO: 4280 - protein, 860 aa, Oryza sativa Indica Group; identical to SEQ ID NO: 1797

SEQ ID NO: 4281 - protein, 414 aa, Streptomyces kanamyceticus
MRVLRLTPFYHHDCVDSWPAEFDAVGGMQVQILRMSRALAELGVRQQVLTVGFPGLPRVRRDSENLVVRITRAPLPRLRSRITGLVGLNQAWLAAALTECVKLRRRWPADLIQVHLDGQLWALLAGPVAARLVGVPYTVTVHCSRLAVYQPMSTVDRIQHPLVTAVERWALRRAAGITTLTERTATVLAAELGAAQRVIDVVPDAVDPDRAEAAPAEVERLKKRFGLPQEGGPVIGFVGRIAHEKGWRHAVQAVAELADAGRDFTFLVVGDGPQRADMEAAVAEAGLTDRFVFTGFLPNDEIPAVMTALDVLLMPSVHEELGGSAVEAMLAGTPVAAYGVGGLCDTVGKVTPSLLAAPGQVAELARTVKRVLDDPAPVLAELRAGREWLADEFGVHHAAGLALAHYERVLGKER

SEQ ID NO: 4282 - protein, 385 aa, Candidatus Kuenenia stuttgartiensis
MKIALVVYQFIKEKGGVERYVYNLAEQLVSKKYEVHIFTHCLPEKEDNRFIFHYVPAISFWSPLKYWTFAFNAPWAVKKTGIRFDIVHGFTQTLYQDIYRVGGGCHWDYMLHTYPSMQTVFGRALLCLNPRHMSLLLLEKIIFKGKRYKQVTCISRMCKEELVSHYKISSEDIVIIYNGVDTTLFSPDNSQKYRDSIRSMYDVAPDDILLVFVGSGFKRKGLIHVIHALAMADMPKNVKLLVVGRGYEEKFRAIAKEKGIYERVIFAGTSKEIHKIYAAGDIFVFPSEYDAFGTACLEAMASGLPVIVSKASGASEIIEDGKDGIVIEHPINAKEIADALQMLYDKEKRKQMGLAARNKSEKYSLEVNINKTLSVYRRLVCDSNF

SEQ ID NO: 4283 - protein, 404 aa, Ustilago maydis 521
MRPQAILPDALSAVGETPLIQLNRIPQSEGIKCNVMVKCEFFNAGGSVKDRIARRMLLQAEQDGTLIPGKSVVIEPTSGNTGIGLALACAIRGYRCIIVLPEKMSAEKVNTLRALGAEVIRTPTEAAHDDPRSNIMVARRLAKSMPNAVILDQYNNPNNPTAHWATAEEIIQAIKAGPAPPSSTSLLHGMDSLSLTNDKEPLDSANARPLTPDSNRGADELNGSTQTFSNKVDVFVAGVGTGGTISGIASRLKRADHNPDCFVLGVDPIGSDLALPVSLNALPEGSDGSYKVEGIGYDFDPNTLNKKVIDEWYKTEDEQSFVYARRLIKDEGILAGGSSGAAVNAAINWLKPGGAGWDKFGSKAGLNAVVVLPDSIRNYITKPWLVSEAKAERRQDEIDFDHFQ

SEQ ID NO: 4284 - protein, 199 aa, Wigglesworthia glossinidia endosymbiont of Glossina brevipalpis
MLVANKFIDFTAPAILSNGEIVQNFNLSNYIKNKVSVLFFWPMNFTFVCPSELIAFDKRFFEFKNRNVKLVGVSLDTVYSHQAWRSTSTKLGGIGEVRYPMVSDIKRNIMKSYNVEHPEIGVALRASFLIDKAGIVRHQIINDLPIGRDINEMIRVIDALLFHEKHGEVCPAQWKKNREGIVPSREGISQYLSENLNDL

SEQ ID NO: 4285 - protein, 185 aa, Chlamydomonas reinhardtii
PMFVSAAVVDGEITKISLSDYKGKYVCLFFYPKDFTFVCPTEIIAFSDRAKEFAAANCQLIAASTDTEETHLAWIRTPRNRGGLGYMQIPILADTTKDISARYGVLIEKLGVALRGLFIINPQGVVQHVTINDLPIGRSVDEALRTLQAIQYHAEHGEVCPANWKPGSKTMVADAEKSLEYFSEV

SEQ ID NO: 4286 - protein, 533 aa, Shewanella sp. MR-7
MAIIDPIVTGLNSGWLHTDASQLQENQQFEADVVIVGTGAGGGVAAEILSQAGLSVIMIEAGPLKSSSDFNMEERVAYPNLYQQAAAMKTADKAIGIFQGRAVGGSTTINWTTSIRTPKEALAFWAQHKSVAGLDPDALAPWFEQMEQRLNIHEWNYEPNRNNGALKQGCINLGWDYTVIKRNVAGCWNTGYCGMGCPVNAKQSMLVTTIPTALEKGAQLFSRAKVVKIEHHNGQVFALKAQALDVNLRPTSVELLFKAKHYILSAGAIHTPTLMMSSEVPDPYQLLGKRTFLHPTVLSGGIFADAINAHSGAPQSIYSDEFVWKNGADGELGYKLEVPPVHPILIASKTLGYGASHAELMAQFNQLQVTIALIRDGYHPDSQGGQVHLTSTGFALDYPLTEAFWRAARRAYASMAELQFSAGALKVLPISDGMPYLSSWKEAKESIAQMDLAPLRTIVASAHVMGGCPFGEDEKLSMVNSYGQSHYLDNLSVMDGSIFPTSLGANPQLSIYGITARNATALAQKLTDGREPQ

SEQ ID NO: 4287 - protein, 427 aa, uncultured bacterium
GGFGKKVGAYPGYICAAVASIVTGKPVKWVEDRIENLTATSFARDYHMTTEIAATRDGKVTGLRVHVLADHGAFDACADPSKWPAGFFNIVTGSYDFPVAHLVVDGVYSNKAPGGVAYRCSFRVTEAAYCIERAMDILAQKLGMDPAELRLKNFVKQEQFPYHSALGWEYDSGDYHTAMKKMMESTDYAALRKEQAEKRAAFKRGETREIMGLGVSFFTEIVGAGPSKNCDILGIAMFDSCEIRMHPTGAGIARMGSKSQGQGHETTWAQIIATEIGIPADNIQVEEGNTDTAPYGLGTYGSRSTPVAGAAIAMAARKIKAKAQMIAAYKLEVHEDDLEWDIDGFRVKGLPEKTMSMKDICWAAYNSVPPGMEPGLEAVSYYDPPNMTYPFGAYLCVMDIDVDTGVYKVRRFYALDDCGTRINPMIV

SEQ ID NO: 4288 - protein, 151 aa, Pseudomonas fluorescens PfO-1
MLTLNINGKDQELDVPADMPLLWVLRDVAHLTGTKFGCGMAQCGACTVHVDGAPLRSCITPATAVAHGQKILTIEGLSSDGSHPVQQAWAELDVVQCGYCQSGQIMSAAALLAKIPKPTDSDIDQALSGNICRCGTYPRIRAAVKRAADIG

SEQ ID NO: 4289 - protein, 179 aa, Legionella pneumophila str. Lens
MITVGNKFPEFQLKATVANDVSNAFQMISNETYQGKWLVVFFWPKDFTFVCPTEIAEFGRLNSEFADRDAQILGGSTDSEFVHLAWRNQHPDLNNLPFPMLADVKRELTANLGILDDEEGVAQRATFIVDPQGITRFVMVTDLNVGRNPAEVLRVLDALQTDELCPCNWKKGEETIHIK

SEQ ID NO: 4290 - protein, 344 aa, Silicibacter pomeroyi DSS-3
MRIARDLAEAVGHTPLIRLRRVSEETGCEIYGKAEFMNPGQSVKDRAALYIIRDAIARGELQPGGTIVEGTAGNTGIGLALVGASMGFKTVIVIPETQSEEKKDMLRLAGAELVQVPAAPYRNPNNFVRYSERLARELAKTEPNGAIWANQFDNTANRQAHVETTGPEIWEQTGGKVDGFVAAVGSGGTLAGVAEALQPKGVKIGLADPMGAALFSYYTTGELAMEGGSIAEGIGQVRITRNLEGFKPDFAYQVPDAEALPYIFDLLRQEGLVMGGSTAINIAGAVRMAREMGPGHTIVTVLCDYGTRYQSKLFNPDFLREKDLPVPEWMSRAPSSIPGVFEDV

SEQ ID NO: 4291 - protein, 163 aa, Rhodopseudomonas palustris CGA009
MDETMLRRRKRLLGLNVNGRWREDAVTDDMLLVDYLRDIAGLTGVKTGCDGGECGACTVLIDGEAAPSCLVLAVRCEGRYIETVEGLAANGRLHRLQQTFHERLGAQCGFCTPGMIMAAEGLLRRNPSPTDEEIRTALSGNLCRCTGYAKIVESVQAAAEIAP

SEQ ID NO: 4292 - protein, 771 aa, Desulfococcus oleovorans Hxd3
MDHTLLNKIGNTPLVEIRRLSPNPRVKIFAKLEYMNPGGSIKDRAAVAMIEDGEASGRLTKEKIVLEATSGNTGIGLAMVCAIKGYRLLLAMSERASEERKKILRARGAEILLTPGHLGTDGAIEEVYRLARENPETYFCTDQFNNEANWKAHYTGTAQEIWDQTEGKVDVVVATLGTSGTAMGLSRRLKELKPDIRIVGVEPFLGHKIQGLKNMKESYRPEIFEQKRLDAKPNIEDEAAYEMTRRLAREEGLLVGMSSGAAMHVAAEEARAMEAGIIVVILPDSGERYLSTTLFVEPEKSGVVLFNTLTREKEAFAPLAQGKASIYSCGPTVHARMDLGQCRRMVFADLLCRYLVYRGFEVRHIVNITDFDDRTIEGAQKAGMDLAAFTGTYIDLFKADLKTLRVHPADAYPLASQEAPEMVALVEKLVDRGVAYEKLRSVYFDIASAEGYGGLSNIDTNKIRLGATVDLDEYEKENPRDFTLLKRAKMSELKQGWYLKTRWGNVRPSLHIQCAAISRKYLGDRFDIHTGSRDLVFPHHENEIAIARAATGREPARYWVHCDSVLESDDSVHWKTARTTLEQALDMGFTGRQLRYWLISGHYRKALSFSADRIAAAASALARLDGCVRSLADLAANPSAESARQMEGAEQDVDQLLYDIRQGFVDAMDDDLNVSAALANIFKNVKTVNVMLDQSRLDGPAAEKIQDAFAGIDSVLQVFDFDQTPADDLLPEVKQLMEQREAARKAKDWELADRLRETLRDMGVSVTDEKL

SEQ ID NO: 4293 - protein, 777 aa, Rhodopseudomonas palustris CGA009
MSGPAFQGGLDRAGVPLVDGIDKVTGRARYTADLDHTGALVARILRSPISHGDIVRLDVSKALALDGVAAIVTGEDCAITYGVLPIAMNEYPMARDRVRYRGEPVAAVAAVDAETARQALDLIELELRELPAYYESEAARAPDAWLLHDNKPGNIEREVHNEFGDLAAGFEAADLIRTHTHHCAEVNHAQIEPHACLMDYDPVTGRLTAQSVSQVGYYLHLMLARCLEIDPSRVRVIKPFVGGGFGARVEVLNFEVIAALLARKASGRVLMRLSREETFITHRARPQTDITLTIGTRRDGRFTACSCEVVQRGGAYAGYGIVTILYAGALLQGLYDIPAVKYDGYRVYTNLPPCGAMRGHGSVDVRHAFENLVDRMARELGLDPFAVRRANLLAAPTRTLNDLMVNSYGLAECLDKVERASGWHERIGRLPPGKGLGMACSHYVSGSAKPIHFTGEPHAVVALRLDFDGGITALTGAADIGQGSSTVVAITVAETLGVALNRVRVISGDSAITPKDNGAYSSRITFMVGNAAIDAATKLKQILIAAAARKLEAVPEQIECAGESFFIGSGAQAALGFAEVVKAALVDEGAITVKGIFTCPPESQGGQHRGGAVGSTMGFSYAAQVVEVSVDDATGLITVDKVWAALDCGRAINPLAVVGQVQGAVWMGMGQAMCEETRYLDGLPAHASFLEYRMPTMIESPPIEVAIVESVDPFGPFGAKEASEGALAGFPPAMVNAVANAIGIDLDDLPATPDRVVEALARRRREAKRAVAVRAAS

SEQ ID NO: 4294 - protein, 371 aa, Pseudomonas aeruginosa UCBPP-PA14
MHIADMTMFYAPASGGVRTYLEAKHRHLWHYPGIRHSVLVPGAGYRQANGIHEVPAPPLPFGNGYRFPLRRGPWRKVLRNLQPDLIEVGDPYLTAWAALDARRRLDVPVIGFYHSDLPLLVSNRMGAWLGTNADNYVSKLYGHFDRVLAPSRVMAEKLMRLGVADVHVQPLGVDLVTFHPSNRDPGLRQELGLDEETRLLVFAGRGSREKNLPVLLDAIQRLGDGYHLLLVGSNMPTRVPRNTSVVDHFCDSREVARLLASSDALLHAGDQETFGLVALEAMASGIPVVAVRAGALAEIVPERCGVLCAPNNGDAMACAVRELFSHDVELRGQRARRHVERQHAWDAVVAGLLLHYHAVLGDSEARFPRYG

SEQ ID NO: 4295 - protein, 308 aa, Propionibacterium freudenreichii subsp. shermanii
MIYHDVTEVVGRTPLVRLNHVNDTDAVVLAKLEFYNPANSVKDRIGVSIVDAAEKSGALGAGGTIVEATSGNTGIALAMVGAARGYHVVITMPASMSRERRAVLHALGAELVLTPAVEGMRGAVTAAERIAAERGGVLASQFANAANPAAHHATTGPEIWNDTDGEVAALVSGVGTGGTVSGAGRYLKEQDPRVDVYAVEPDESPLLSRGRAAAHGIQGIGANFVPDTYDAAVVDEVLSVTTDQALAMARRLAAEEGILAGISSGAAVAAALEVGARPQYRGRTIVAIIPDFGERYLSTPLFAGLMDS

SEQ ID NO: 4296 - protein, 342 aa, Coxiella burnetii RSA 493
MNLVKNWLNQGKKICVITFFNEKADFFELPIAVSRKSINFTGESKNLVVAIWNNLRRVKSLRSMIKAYQPKLVLSFLGTTNVLTILATFFMQIPVIVSERSDPTRDSLGNIWDKLRHLLYRYADIVTANSHGAIVALEKFVDAGKLKYVPNPVCIEEPFRPLTYSFPAILAVGRLSYEKGHDILLSAFSKFIHQFPQWRLVIVGDGELRNKLKQFAVNLNIDKYIIWGGMQLDIFSYYNAATIFVMPSRYEGTPNALLEAMGCGLPVIVSNASSGILQFVKNEETGLVVPVEDVETLYLAFCRLANDELLRKRLGEKARQKIKMETQCAYELWDEVLNINRY

SEQ ID NO: 4297 - protein, 322 aa, Propionibacterium freudenreichii subsp. shermanii
MSAIHDSITELIFNTPLVRAPHYLKAAGAPDADIVLKLEYFNPAGSVKDRIALAMITDAEKRGVLKPGGTIIEPSSGNTGIGLAAVGTARGYKVKVVLPASLSVERRALIQAYGGEVILTPGPLAIKGSIAYAKQLHDADPSSVILGQFDNPANPEIHYKTTGPEIWKDTDGTVDVFIAGIGTGGTLSGAGKYLEEQKPDLKVIGIEPAKSPILEGGKPGPHGIQGIGTGFVPNTLDRSVYDEVVGITDEDSIAQARLLGTAEGIFVGISSGAALTAALQIAARDEYKGKRIVALLPDSGDRYLSTALGQFPELTVHEDVEL

SEQ ID NO: 4298 - protein, 907 aa, Desulfovibrio gigas
MIQKVITVNGIEQNLFVDAEALLSDVLRQQLGLTGVKVGCEQGQCGACSVILDGKVVRACVTKMKRVADGAQITTIEGVGQPENLHPLQKAWVLHGGAQCGFCSPGFIVSAKGLLDTNADPSREDVRDWFQKHRNACRCTGYKPLVDAVMDAAAVINGKKPETDLEFKMPADGRIWGSKYPRPTAVAKVTGTLDYGADLGLKMPAGTLHLAMVQAKVSHANIKGIDTSEALTMPGVHSVITHKDVKGKNRITGLITFPTNKGDGWDRPILCDEKVFQYGDCIALVCADSEANARAAAEKVKVDLEELPAYMSGPAAAAEDAIEIHPGTPNVYFEQPIVKGEDTGPIFASADVTVEGDFYVGRQPHMPIEPDVAFAYMGDDGKCYIHSKSIGVHLHLYMIAPGVGLEPDQLVLVANPMGGTFGYKFSPTSEALVAVAAMATGRPVHLRYNYQQQQQYTGKRSPWEMNVKFAAKKDGTLLAMESDWLVDHGPYSEFGDLLTLRGAQFIGAGYNIPNIRGLGRTVATNHVWGSAFRGYGAPQSMFASECLMDMLAEKLGMDPLELRYKNAYRPGDTNPTGQEPEVFSLPDMIDQLRPKYQAALEKAQKESTATHKKGVGISIGVYGSGLDGPDASEAWAELNADGTITVHTAWEDHGQGADIGCVGTAHEALRPMGVAPEKIKFTWPNTATTPNSGPSGGSRQQVMTGNAIRVACENLLKACEKPGGGYYTYDELKAADKPTKITGNWTASGATHCDAVTGLGKPFVVYMYGVFMAEVTVDVATGQTTVDGMTLMADLGSLCNQLATDGQIYGGLAQGIGLALSEDFEDIKKHATLVGAGFPFIKQIPDKLDIVYVNHPRPDGPFGASGVGELPLTSPHAAIINAIKSATGVRIYRLPAYPEKVLEALKA

SEQ ID NO: 4299 - protein, 212 aa, Gloeobacter violaceus PCC 7421
MALRLGDKVPDFTQESTEGPIQFYDWAGDSWVVLFSHPKDFTPVCTTELGEVAKLKPEFAKRNVKVIALSVDDVDSHKGWAQDIEETQGAALNFPVLADADRKVSDLYDMIHPSANDTLTVRSVFVIDPNQKLRLTLTYPASTGRNFDELLRVIDSLQLTDNYSVATPANWQDGEDCVIVPSLKDEAVLKEKFPKGYTVVKPYLRMTPQPNK

SEQ ID NO: 4300 - protein, 430 aa, Coxiella burnetii RSA 493
MMNMFLRKLKRDLCIVVAINALDVGGAEKHLLRVLPSLKKRGYNIILYLTNHRGVMFDEMLAAGIPIITPPLCEFLNKLGPLGKPFIYSLSIIRLSFLILKRNPSILHFFLPGTYVLGGISGLLARARCMVMSRRVTNEYQKTHPIVAKIEPLLHKYMKVVLATSLRVGTELLEEGVPPNKLGLIYNGVEVEKYNIHYNKPAIKRSFCLGDDTFIIVILANLYKRKGHKDLFYALSSIKEKISKNWKLLCIGRDGGEKNALESLRDNLGLREYVTFLGQQHDIPQLLSIADMGVLSSHEEGFSNALLECMAAGLPMVVTDVGGNAEAIVDKQCGFVVPPKQPQQLAEALLMLALDKETRDKYGNAAKERVKKYFSLEACVLRYDQFYEAMLASEWERAISVVKPPSWQDDDNKNTAEGKACSNFPLSGNN

SEQ ID NO: 4301 - protein, 153 aa, Burkholderia pseudomallei K96243
MSTSFVLNGKNLTLDADPAMPLLWAIREDAGLHGTKFGCGAAQCGACTVHLEGQAVRSCVLPLAAVAGKRVTTIEGLASRPAKAVQAAWVKLQVPQCGYCQSGQIMSATALLEQNPAPTDADIDAAMNGNICRCATYTRIRAAIHEAAATLKA

SEQ ID NO: 4302 - protein, 387 aa, Cyanothece sp. ATCC 51142
MMVILEFENPMRIALFTETFLPKIDGIVTRLRHTVDHLQRNGDQVLVFSPDGGLREHKGAKIHGIKGIPLPLYPELKLAIPTPKVGKALEKFKPDLIHVVNPAVLGVGGIYYAKTMNIPLVASYHTHLPQYLQHYGLGSLEGVLWELLKLGHNQARLNLCTSTAMVEALESHDIERVDLWQRGVDTEMFQPHLASKPMRLRLSGGNPDKPLLLYVGRVSAEKQIDQIKPILEAIPEAHLAIVGDGPHREALEAHFAGTQTHFIGYLQGLELASAFASADAFVFPSTTETLGLVLLEAMAAGCPVVAANSGGIPDIVTDGVNGYLFEPTDPDGAILATKRLLAATEEREQLRSNARLEAEKWGWAAATHQLKRYYETVLADNTLPLAA

SEQ ID NO: 4303 - protein, 703 aa, Verrucomicrobium spinosum DSM 4136
MREFFALWTGVPPMPDDSSQPSVPPIDPQPAAPPARKRLAYLYSRYPYFSQTFCDTEMLALQARGWDLVVGSIYPPEDSFRHQRLDGLAAPVLYAPPPPALAALEKAARADGRWPEAMVARHEKAYGASYQPKVRARNALYFAEQFKRFGVEHVHVHFANRATHTALFLKELTGLPFSFTTHGQDFMVDLGSDALLKEMCDAAAFIVSVCDYSRDLLAQKCPEAASKMVRIYNGMEPGDFPGARPPVMNRPPGPTRLLSIGRLIEFKGFHRLIEAVGMAKQKGADLSLRIVGEGPWRDQLQGQIDSLGLNHAITLVGRRSLEEVAGEFAEAEAFALACVVDSKGASDLLPTVITEAMLNALPVISTTVAGVPEMIEHGRTGYIVAPNDVEAFAAALVRISSYPAHALAMGDSGRRLASDRFAVANTIAQLTAKFSEAGTTQPAPAAQVVNPVVWGFYDLALPDRLKWLEREQAPLSELDGRVVAAGGRADEKALQTLGKTVWDLEWLPDGIVLESEWRMRAPWRAQLEALRTDLATSVDGEVFLRAARRAVWLAVRISRSQEPPRLLYGPGGEEALTVWLASRLTGVPCAAAFEEGTRWSTQILRRMAGEAQSVSDASGKVEGSRDVIGHALESQNADAKPANGKSSNDNEKTSGRTFINWLQRIRVTPKATSDLAAQGTPPAPVPAAKTALETDSDSVSTDA

SEQ ID NO: 4304 - protein, 697 aa, Streptomyces coelicolor A3(2)
MKISFLINNIYGIGGTNRTVINLAEALSVQHDVEIVSVFRRANATKFEISPRITVRALVDLRPGSSDRGAAGSDEPSAVVPRQEEFFAQYSRFTDERIIRDLRRTDADVVVGTRPSLNLFVAAHTREGALRVAQEHMTHLAIPPAVRAEMARVYPRLDAITTVTEADAGSFMENTPIPGITVVGIPNSVPRPSVQPSDCTRKIVVSAGRMHHVKRYDLLIRAFGSLADEFPDWQLRIYGDGGEAGKLRTLVTELGLSGRALLMGGFSPIDSEWAKGSIAAVTSSAESFGMTLVEAMRCGLPVVSTDCPVGPREILSDGEDGFLVPNGQVSGIAWGLRRLMADEVLRRDMGEAALRNAARYDPAAVADRYVRLFEDAARRRAAAVRGYRAPAGSRRTGAPATVPPVGIGAATVDVVADGAGWLRFSTEGPGDGRHRWQFVLRHQPSDGNRRPDVPVRTSRTNLDNGGTRYTAALGPSALDELGDGRWQVTMRSARSKTVHMKAGIRDTRALIDARADLVGRPPTGPVTWNLPYAQPNGRLMLRTVLREEHVECATVELGDGAITLRGVLCGGRRIEPGALFVVSRRGPHGKNFTVPVEVLGRHAFRAHVPVRRVVDHRLERWEDWDWWLQPDPHDRRKVRVCHLLEDFPDVKGAYAYPSLPLTGDGISDLAVIHPARPVWVRPYCSASGAMAMNVVDR

SEQ ID NO: 4305 - protein, 528 aa, Bradyrhizobium japonicum USDA 110
MLELRKDIFADERDDNLKEIGKGTQRQDMLGHVTGTSSYFNDHKLQGMLHLKVVRSTEAHARIRRIDTTEAERSAGVRRIIRGTDVPVNLNTLLSLINFGKDDEPSLAVDKVRYKGEPIVAIVADSEREAFEAIAKVKVDYEVLPAVFDVEDALKPGAPVVNETYPKNTFTYHEVYDHQRLRFGDADAALATADHVLEQRYQMSPIEHAPTETNGAIAAPDTNGRYVVYTSTQALFFSVDTCAKILDVPSNTFHFIGGTVGGGFGGKVDTLTEPLAILGAMLTGRPVRYVFGREEEMQYGPPRGAELIYIKDGVMRDGRIVARKIRAYFDSGAYTRLSSYAAVKCAAHLPGPYTIPNVYGDVYCVFTNRTPATAMRGFGVTAMDFAIECQMDKLANLVGMDPMEFRILNAYRDGDMKAHRREAKNTALIECVQVAAEKAKWPIRDEFKRASSRKDGGGSRAVIPPTPTDSHPRPAVAAQQRTTYDRLPPTVTREPPREPPPPAPPPPRPAAPSHGATRFSSVFGTRRR

SEQ ID NO: 4306 - protein, 158 aa, Bradyrhizobium japonicum USDA 110
MSKIPPQFRHNGRDVAIFVDGGTNLLVALRELIGDMTPKFGCGQGGCGTCSVLIDGELHLSCLTLAETVAGRAVETLDGMKQGPNLHPLQRAFADHFAAQCGYCTPGMLMAAKALLDRNPAPSRAEVVEAISGNICRCTGYEPIIDAILAASGSRASA

SEQ ID NO: 4307 - protein, 732 aa, Escherichia coli O157:H7 EDL933
MKFDKPAGENPIDQLKVVGRPHDRIDGPLKTTGTARYAYEWHEESPNAAYGYIVGSAIAKGRLTALDTDAAQKAPGVLPVITASNAGALSKGDKNTARLLGGPTIEHYHQAIALVVAETFEQARAAASLVQAHYRRNKGAYSLADEKQAVSQPPEDTPDKNVGDFDGAFSSAAVKIDATYTTPDQSHMAMEPHASMAVWDGNKLTLWTSNQMIDWCRTDLAKTLKVPVENVRIISPYIGGGFGGKLFLRSDALLAALAARAVKRPVKVMLPRPSIPNNTTHRPATLQHLRIGADQSGKITAISHESWSGNLPGGTPETAVQQSELLYAGANRHTGLRLATLDLPEGNAMRAPGEAPGLMALEIAIDELAEKAGIDPVEFRILNDTQIDPADPTRRFSRRQLIECLRTGADKFGWKQRNATPGQVRDGEWLVGHGVAAGFRNNLLEKSGARVHLEPNGTVTVETDMTDIGTGSYTILAQTAAEMLGVPLEQVAVHLGDSSFPVSAGSGGQWGANTSTSGVYAACVKLREMIASAVGFDPEQSQFADGKITNGTRSAILHEATAGGRLTAEESIEFGTLSKEYQQSTFAGHFVEVGVHSATGEVRVRRMLAVCAAGRILNPKTARSQVIGAMTMGMGAALMEELAVDDRLGYFVNHDMAGYEVPVHADIPKQEVIFLDDTDPISSPMKAKGVGELGLCGVSAAIANAVYNATGIRVRDYPITLDKLLDKLPDVV

SEQ ID NO: 4308 - protein, 219 aa, Picea sitchensis
MALRSVSVAKPSFSVNAISNAYCKPGTMDSPPVKIVSVGDSRLFGTKISTPTIRPMPARTFQTRRMIAVAKVSKGSVPPSFNLKDQDGRLVSLSKFKGKPVVLYFYPADESPGCTKEACAFRDSYEKFKKAGAEVIGISGDSPESHKDFAKKYRLPFTLLSDDGNKLRKEWGVPGDFFGSLPGRETYVIDKKGVVQLVYNNQFQPEKHIDETLNVLQSL

SEQ ID NO: 4309 - protein, 198 aa, Campylobacter jejuni subsp. jejuni NCTC 11168
MIVTKKALDFTAPAVLGNNEIVQDFNLYKNIGPKGAVVFFYPKDFTFVCPSEIIAFDKRYQEFKNRGIEVIGISGDNEFSHFAWKNTPVNQGGIGQVKFPLVADLTKQIARNFDVLYAEAVALRGSFLLDADGTVRHAVVNDLPLGRNIDEMLRMVDTMLFTNEHGEVCPAGWNKGDEGMKANPKGVAEYLGKNEAKL

SEQ ID NO: 4310 - protein, 520 aa, Polaromonas sp. JS666
MKKSIPVKLAKQGLKVTQAGDITQEKLHLKADAVIIGSGAGGAIAAYELARAGKTVIVLEAGPYIPSEKFTEMLAVSMGTLYQDHGGQSNMHGDIAILQGACVGGSTVVNAALCFRTPDYYLKLWAKEFGLSNLTKAVMTPYFEKIERNLHIRTVASHETSPGAELIGIGMRKLGYPPGKARRNIKDCALTGACFSGCTSDRKQSMLVTYLPWAVAHGATIFADTRVTQVLAEGGKASGVLAEVIDPATGKKKADVRVDAPIVVLAAGPIQTPLLLLKSGLANSSAQVGKNFACHPTLSVTAEFPHEVNDFHGATHSLYMDQHTLPEKGGYLLLNAIQEPVEAGFQAEPGTGKPYVAYMTGYKNTIRLISLIHDKNVGEVRWENGQKQIHYTVDNDDFDAMKKGLVATARILFASGASKLYLPSSNKAVVESADQVESVIGALKNEPARYKYTSFHPQGTCRMGRNPKTTVVNPYGETHDVKNLYVADASLLPTSIGYNPSETVYALASYISDRIVKAHA

SEQ ID NO: 4311 - protein, 184 aa, Bradyrhizobium japonicum USDA 110
MLGIGSQLPPFDITGVKPGFQAQEEEGQSAFETLTEMSFPEKWKIIFFYPKDFTFVCPTEIAEFARLSKEFADRDAVVLGGSTDNEFCKLAWRRSHVDLHNLPIWQFADTKGTLVDGLGVRSPEGVAYRYTFIVDPQNTIQHVYATNLSVGRSPKDTLRVLDALQTDELCPCNREIGGETLKVA

SEQ ID NO: 4312 - protein, 185 aa, Photobacterium sp. SKA34
MINTEIKPFSATAYKEGKFVEITEQDVLGKWAVFFFYPADFTFVCPTELGDLADHYAELQERGVEVFSVSTDTHFTHKAWHDSSDTIGKINYYMVGDQTGNITNNFNVMREGQGLADRATFLIDPQGVIQAMEITAEGIGREADDLMRKVKAAQYVAAHPGEVCPAKWKEGEATLTPSLDLVGKI

SEQ ID NO: 4313 - protein, 198 aa, Prochlorococcus marinus str. NATL2A
MTTNECLRVGMQAPDFATTAVVDQEFKDITLSQYRGKYVVLFFYPLDFTFVCPTEITAFSDRYSDFSSKNTEVLGVSVDSKFTHLAWIQTPRNEGGIGDINYPLVSDLKREICQSYNVLNEDGEADRGLFIINPSGIIMHSTINKAPVGRNIDETLRVLQAYQYVESHPDEVCPAGWTPGDKTMKEDPKGSKEYFSAL

SEQ ID NO: 4314 - protein, 292 aa, Shewanella sp. ANA-3
MSDFPTIEACIGQTPLVRLQRLDCGSSTVLLKLEGNNPAGSVKDRAALNMIIQAELRQEIAPGDTLIEATSGNTGIALAMAAAIKGYKMILIMPSNSTQERKDAMQAYGAELLLVDNMEAARDLALDLQAQGKGKVLDQFNNQDNANAHFQTTGPEIWQQSQGKITHFVSSMGTTGTIMGVSKYLKSRNPDITIVGLQPADGSSIPGIRRWPQEYLPGIFDAARVDAVMDIEEQDAKAMARTLAREEGICAGVSSGGAVFAALEIARQNPGSVVVAIVCDRGDRYLSSGLFS

SEQ ID NO: 4315 - protein, 1351 aa, Coccidioides immitis RS
MALAGQLSEQELAREARAALAAVTEKYDDTLRFYLNGTKVTLDSVDPEATLLEYLRGIGLTGTKLGCAEGGCGACTVVVSYRNPTTKRIYHASVNACLAPLVSVDGKHVITVEGIGDVKNPHPVQQRIAVGNGSQCGFCTPGIVMSLYALLRNNPSPSEHDVEEAFDGNLCRCTGYRSILDAAQSFSAPKCCQSSGGGGCCMERGSKGCSKPEKDDSTLSTVKQTFKAPEFIPYSPGTQLIFPPALHNHKLLPLAFGNKKKRWYRPVTLRQLLEIKNIYPDAKIIGGSTETQIEIKFKAMEYADSVYVGDIPELKQYSFKDNCLELGGNVSLTDLEDICDEAVKKFGPLRGQPFTAIKKQIRYFAGRQIRNVASPAGNIATASPISDLNPVFVATRTTLIAESLDEKSEIPMCNFFKGYRSTALDSNAVVTGLRIPASQAKGEFLRAYKQAKRKDDDIAIVNAALRVSLDDSNVVTSANLIYGGMGPLTMPAPKAEKFLVGKQWTDPATLEGVIDCLERDFTLPSSVPGGMPTYRKSLAFGFFYRFYHDILSNLQHPQAFSDADSVPEIERAISMGQKDHGAAAAYEQGILGKETPHVSALKHATGTAQYTDDIPTQKNELFGCLVLSGKARAKILNIDFDRALDIPGVVEYVDHRDLPNPGANWWGQPPADEVFFAVDEVLTAGQPIGMILATSPRAAEAGSRAVRIEYEELPAILSIEQAIEKDSFYDYKPYIRNGDPEGAFAKADHVFSGTSRMGGQEHFYLETQACVAIPKPEDGEMEIWSSTQNPTETQKDVANVTGVAANKIVSRVKRLGGGFGGKESRSVQLACICAVAAKKSKRPVRCMLNRDEDMITTGQRHPFLCHWKVGVTKEGKLLALDADVYANVGYSRDLSTAVVERALSHIDGVYNISNVHVRGYLCRTNTMSNTAFRGFGGPQGMFFAESFISEIADHLDIPAEEIRQINMYKPNEKTHFNQELRDWHVPLMYQQVLDESDYAARRKAVTEYNKAHKWSKRGLAIIPTKFGISFTVTFLNQAGALVHIYRDGSVLVAHGGTEMGQGLHTKIVMIAAEALKVPQSDVHISETATNTVANTSPTAASASSDLNGYAVFNACQQLNDRLQPYREKMPNASMTELADAAYHDRVNLSANGFYKTPDIGYKWGENTGQMFYYFTQGVTAAEVQIDTLTGDWTPLRADIKMDVGHSINPAIDYGQIEGAFIQGQGLFTTEESLWHRASGHLFTRGPGAYKIPGFRDIPQIFNVSLLKDVEWKTLRTIQRSRGVGEPPLFMGSAVFFAIRDALRAARKQWGVDDVLSLWSPATPERIRISCCDPLVERGRVEDRGDGFFVVI

SEQ ID NO: 4316 - protein, 105 aa, Triticum aestivum
  misc_feature (26)..(26): Xaa can be any naturally occurring amino acid
  misc_feature (34)..(34): Xaa can be any naturally occurring amino acid
  misc_feature (38)..(38): Xaa can be any naturally occurring amino acid
  misc_feature (74)..(75): Xaa can be any naturally occurring amino acid
  misc_feature (79)..(81): Xaa can be any naturally occurring amino acid
  misc_feature (89)..(90): Xaa can be any naturally occurring amino acid
  misc_feature (98)..(98): Xaa can be any naturally occurring amino acid
  misc_feature (100)..(100): Xaa can be any naturally occurring amino acid
MADLASTCKDKLAYFRIKELKDILHXVRAYQSKXKKQXDLIDRVLALLSDEQGQRHHGWGRKNSFTKGAVAKIXXGIYXXXMQIQFAPXXNTKSTLGXIXFPAKN

SEQ ID NO: 4317 - protein, 198 aa, Wolinella succinogenes DSM 1740
MLVTNKAPNFVATAVLGNNEIVSDFELYKNFGKSGTVVFFYPLDFTFVCPSEIIAFDKRLEEFQARGINVIGVSVDSQFSHFAWKNTAVKEGGIGQVRFPLVADLTKQIARDFDVLFNESVALRGSFLIDKDGTVRHAVINDLPLGRNIDEMIRMVDTMLFVNEHGEVCPAGWQKGDEGMKADTKGVAEYLAKNSEKL

SEQ ID NO: 4318 - protein, 373 aa, Gemmata obscuriglobus UQM 2246
MSPVRVAFVVHVMQVAGAEVLVRETIRRLGGRIRPTVFCLDAVGRIGEELLAEGVDLVCFHRKPGRDWRVSQRIAAAIRERGVEVVHAHQYTPFFYSALAKPLCGFRPKLILTEHGRHYPDRVSPLRRAVNRLALDHLADAVTACCAFSARGLCRTDGFAGARIAVIENGIEVDRYGPPADKDVAKEEVGLEPERRYLIHVARHHPVKDQKTLIRGFAAAVPDLPGVDLLMVGDGPLRNELEALAVELRVPDRVRFLGIRTDIPDLMRAADAFALTSLSEAASLTLLEAMASALPAVVTAVGGNPEIVRHEQEGLLFPRGDAAGCADAIRRLFRAPDFAARLGANGRARAVERYQLARTVDEYYKLYARLATS

SEQ ID NO: 4319 - protein, 312 aa, Glycine max
IQLYVGVAAAVLSSAGYKVVVLEKGNYFSTQDYSSLEGPSMNQLYETGGILASVDSRVLVLAGSTVGGGSAVNWSACIKTPHKVLNEWSENHKLPFFSSQEYLSAMETVCERIGVTENCTQEGFQNQVLRKGCQNLGLKVDYVPRNSSGNHYCGSCGYGCPKGEKQGTQATWLVDAVERDAVIITGCKAERFLLESNRSGNGRKKKCLGVMAKALNSRVTMKLQIEAKVTISAGGALLTPPLLISSGLKNKNIGKNLHLHPVLMTWGYFPESNDSEFKGKVYEGGIITSVHKVPSPDSNSDSRAIIETPLLG

SEQ ID NO: 4320 - protein, 175 aa, Novosphingobium aromaticivorans DSM 12444
MTKLRVNGAEREVKSGSDTPLLYVLRNELGVMTPKFGCGMAQCGACSVLVDGEETRACVTPVAAIEGKEVTTVDGLPARWAAQRGLSAEQAAGKLHPVQEAWIAEQVPQCGICQFGMMIKITELLEANPKPTDGDIKEALTTSGPSPHLCRCGSYAAILEGAHRAARLMAEGGAK

SEQ ID NO: 4321 - protein, 1370 aa, Magnaporthe grisea 70-15
MGVPKFFRWLSERYPAISQLIAENRIPEFDCLYLDMNGIIHNCTHKDTHDTSFRLSEDEMFIRIFNYIEHLFGKIKPKQLFFMAIDGVAPRAKMNQQRARRFRTALDAEVARDKAVREGQELPKEEPFDSNCITPGTEFMAKLSEQLKYFVNKKVSEDTEWQGCEIVLSGHEVPGEGEHKIMEYIRNAKAQPDYNHNVRHCLYGLDADLIMLGLLSHDPHFCLLREEVTFGRQSKSQSKELEHQNFYLLHLCIVREYLELEFQDLKKDGRMTFPFDMERVIDDFILMAFFVGNDFLPNLPHLHINEGALALMFRLYKEILPKCDGYINEGGRVNLQRLGLLLEGLGEAERRFFEVDMQNEHWFRSKQQMENSEAAPVKSRPKGQLQVTTSQKNLWKHKIKPFITKRSQTPLNLGTGLNAADRKFAQEIADSFRLTYETLVDDEGNRAIVLSFPKLPDASGNDDDDDGFEEEGDAAAHREMLKYDRAAVVDTSPEEAKAAMEVLYQQKFQEWKDKYYSEKFEWTAETKEQGLRELAENYVQGLQWVLYYYYRGIRSWPWFYKFHYSPMISDVMKGLNADMNFTLGQPFKPYEQLMGVLPDRSKKIVPTVYWELMTDPNSPIIDFYPRDFELDMNGKKQEWEAVVKIPFIDEKRLLDGMATKNHLLSDVEKSRNGFGVALKFTHDPNLDFQYPSSLPGIFPDIPHCRCVMNIFELPPTEGLEYLHGLTDGALLNVSALAGFPSLATLPYTASLGFHGVNVFQQESHNESMVVTLSNTKMKTKSSSAVMKLGQRCHVGYPFLTEAKVVRVSDELFNYTLDANGKVVQTPHQHKEMEQFHTKSRRIEEFYSKRLGILIGDVESLVHVEMLKGLIKTEEGATIKEYGEVPGMETDYAPQVIVDEVVNEDERFIERAALPIEEEFPLGCHAFFLGDYAYGRPLEVVGHKGNKVDVRVSVLKKPEPDFAKNIIFQAERNNRYVPSYAVAKSLDLHPLALSRITASFFVYTMKGSLKVNLGLNLKFESKKQKVLGISRISSPGSSDFRSGNEIKDTDIWQDEKVAQARVKEIGAWLKTIETSKFERVPLDAEQLDSEVVMALAASTDQLNLAAPEFEAKGLNAVPRSALLKPEDAEVRLGNQNFALGDRVVYVAASGKVPIAVRGTVIGISRTPTAKLLDIVFDITFMSGGSLGERCPAFRGQTVASSTVLNLTNRQVVTGSKATLARKPLAPSVTTLSGGVNGANGFKQMRDSPTPPPLRGSWRGPHQEQMVSGQQQQRGGRGGGRGRGGLGYDNAAGQANGYSGHPNGSGAGASPMPAQSYNNVPPPASLDAPSGRGRGRGRGRGARGGPNMGGRGGQSGRGRGGGGSGPPRGASS

SEQ ID NO: 4322 - protein, 362 aa, Mesorhizobium loti MAFF303099
MRIAFHAPLKSPNHPVASGDRQMARMLVKALEHGGHSVELASELRFYLRQPEPKSFDALKIEAREEAARLAGLWDRDGKPDLWFSYHPYYKAPDLIGPQLASAFAVPYVTAEASYSRRRNAGLWGDTQALVARAVEQAALNICFTQRDRQGLADAIPDAAFGMLSPFIDTSVFRETPARGCPTRLVTVAMMRPGDKVESYRMLAQALGSIVHLPWTMSVVGDGPARDEVKAQFAGLAADRIEWLGAIEPAAVPDVLYSGGIYIWPGCGEAYGVAYLEAQAAGLPVVAQDIAGVPEVVRDGQTGFLTPPGDVAAFASAVERLLASNDERAIMAAEARRFVLEERSLVVAAARLAELLAKIPVS

SEQ ID NO: 4323 - protein, 215 aa, Sulfolobus solfataricus P2
MSEERIPLIGERFPEMEVITTQGRIKLPDDYKGRWFVLFSHPGDFTPVCTTEFYSFAKKYEEFKKLNTELIGLSVDSNISHIEWIMWIEKNLKVEIPFPIIADPMGNVAKRLGMIHAQSSTATVRAVFVVDDKGVVRLILYYPMEIGRNIDEILRAIRALQLVDKAGVVTPANWPNNELIGDKVINPAPRTIKDAKMRLGQPFDWWFTYKEVKTT

SEQ ID NO: 4324 - protein, 170 aa, Cupriavidus taiwanensis
MRKIIELVINGEPRELAVEPHSTLLDALRNDACLTGTKKGCDVGECGSCTVIIDGKTMNSCLVLAPEAHGCHITTIEGVQPAPDTVHPLQEQFMRCGAAQCGFCTPGFVVMAKALLDENPHPTRDEIRFAIAGNICRCTGYTKIIEAIEQTAAGMDPDGYEHRTRASEEA

SEQ ID NO: 4325 - protein, 163 aa, Acidobacteria bacterium Ellin345
MTVITRWNPAFRELATLQGRLNRLLHETAGGEETSLTTSGAFVPPVDVYEDEQGLRLKLEVPGIDEKDLDVSIENNTLTVRGERKFEKEEKEENFRRVERRYGSFVRSFTLPTTVDAEKVTAAYKNGVLELALGKKAEAKPKQIKVNVGSEPSTEMKKSASAA

SEQ ID NO: 4326 - protein, 199 aa, Buchnera aphidicola str. Bp (Baizongia pistaciae)
MVLVTYPAPDFTASAISCNGDIINNFNFKEFTNNQTSILFFWPMDFTFVCPSEIIAFNQELSKFKKRNVKLIGVSIDSVYVHHAWRNTLSHNGQIDKINFTMVSDLKREIQRSYGIEHPQLGVALRATFLIDKNRIIRHQTINDLPFGRNISETLRMIDALHFYEKYGEVCPANWKKGDTGIKTTQEGIHKYLEKISKK

SEQ ID NO: 4327 - protein, 271 aa, Arabidopsis thaliana
MASIASSSSTTLLSSSRVLLPSKSSLLSPTVSFPRIIPSSSASSSSLCSGFSSLGSLTTNRSASRRNFAVKAQADDLPLVGNKAPDFEAEAVFDQEFIKVKLSEYIGKKYVILFFYPLDFTFVCPTEITAFSDRYEEFEKLNTEVLGVSVDSVFSHLAWVQTDRKSGGLGDLNYPLVSDITKSISKSFGVLIPDQGIALRGLFIIDKEGVIQHSTINNLGIGRSVDETMRTLQALQYVQENPDEVCPAGWKPGEKSMKPDPKLSKEYFSAI

SEQ ID NO: 4328 - protein, 307 aa, Zymomonas mobilis subsp. mobilis ZM4
MAKINTILEAIGNTPHLRLNKLFPDHEVWIKVEKSNPGGSIKDRIALAMIEDAEKSGKLKKGGVIIEPTSGNTGIGLAMVAAVKGYKLILVMPESMSIERRRLMLAYGAEFDLTPKEKGMAGAIERARQLAEETEGAWIPQQFENPANINIHATTTGQEILKDFADTPIDALVSGVGTGGHLTGIGESLRKKWPDIQIFAVEPATSPVLAGGKPGAHAIQGIGAGFVPKNLHRNILNGIVEIENDEAKKWALRAAKEEGLLVGISTGATLAAIAKKIKELPENSRILGVNYDTGERYLSVPDFLPEA

SEQ ID NO: 4329 - protein, 302 aa, Staphylococcus epidermidis ATCC 12228
MIAYDLIGQTPLVLLESFSDENVKIYAKLEQFNPGGSIKDRLGKYLIEKAIDEGRLKEGDTIVEATAGNTGIGLAIASNRHKVKCIIFAPEGFAEEKISIMKALGADVRRTPKAEGMTGAQQEALAYATRYGYLYMNQFETKDNPGAYTQTLAKQLTDELSHIDYFVAGVGSGGTFTGVAQHLKTYDVKNYIVEPEGSVLNGGVSHPHATEGIGSEKWPSFLEKELVDGIFTVADKDAFNNVKLVANKEGLLVGSSSGAALQGALELKKSIQNGVIVTIFPDGSDRYMSKQIFNYKESFNNE

SEQ ID NO: 4330 - protein, 134 aa, Brassica napus
MVSWLMTLKAVLISSGVASVGVLLKVYVPMAVDFSVSQAPVLWSSLLSWLKPPYLYVLTNGIIITIVASSKYYRNSSHHGQEGDESASPRMLEVKDLNPDAQFSFVAAYPPSPKLEPEAFMAVVYDDHEEETEE

SEQ ID NO: 4331 - protein, 366 aa, Aquifex aeolicus VF5
MKIALFTDSFRKDLGGGTQVARQLAFGLSKKGYEVLVITGSTAEEETPFKVLKLPSIKYPFYHNVEIALPNVELLKELKNFNPDVIHYHDPFLAGTMALLMGKILKIPTVGTIHIHPKQLTYHGIKIDNGVIAKKLVSFFGNFTDCVVFVSKYQKKLYEELDSFCVKVIYNGIPDYFFVSEKRKLRNPRNRILTVSRLDKDKNPEFALKCVAEISKEVPVEYTIVGEGNEKEKLEKLARKLGIKANFLGFVPREELPELYLSHDVLLNTSKTETFGLSFAEAMATGMPVIALKEGSAPEIVGDGGILCEEKVECVKKAFLKLYQNPELYFKLSQKAPERAHVFRCERFLKDYESLYEEVIRTSVPR

SEQ ID NO: 4332 - protein, 253 aa, Desulfovibrio vulgaris subsp. vulgaris str. Hildenborough
MLPRTAATGHTLHECLPDSRRLLPANSPCPPRRQGVHHMTTGVLWVVLFACLAACAPARNGQATSSVTAATATRQTTVQGGAQAALQNAPVIRPGDEAPDFDLPAVDGTRLRLASFRGHKAVVLSFVPAAFTPVCSSQWAGYGMLKPRFEALGAIVVGIAADNVPSLAAWTREMGTDAAGHPSPLWFPVVSDFWPHGAVTMRYGLLRPEGIAERALVLIDKAGVVRLVEVSDIDKRPPLDNLFKALERLAAGN

SEQ ID NO: 4333 - protein, 222 aa, Nanoarchaeum equitans Kin4-M
MVVLGQKFPEVEVQTTHGRMRLPDHYRGKWFVLFSHPADFTPVCTTEFVEFARNYDKFKAMNTELIGLSIDQVFSHIKWIEWIKEKFNVEIPFPVIADDQGELARMLGMISPYKGTNTVRAVFIVDPEGYIRAMLYYPQETGRNIPEILRLVEALQTADKYGVATPANWHVDRYEFKPSSIVGNDVIIPPASSLEEKKDREERAKKGEIECFDWWFCHKKLE

SEQ ID NO: 4334 - protein, 868 aa, Magnetospirillum magnetotacticum MS-1
  misc_feature (745)..(745): Xaa can be any naturally occurring amino acid
  misc_feature (755)..(755): Xaa can be any naturally occurring amino acid
  misc_feature (769)..(769): Xaa can be any naturally occurring amino acid
  misc_feature (792)..(792): Xaa can be any naturally occurring amino acid
  misc_feature (857)..(857): Xaa can be any naturally occurring amino acid
MSMGSGHEGVARPGMSGPSLRVLRPHDSGEALAALLRHGAAARLAAGATALQLDWAAGASRPDLLVDLSALPELRGIDAAGGSLRIGAATPLAEIEASPAVARAAPLLCRAVQTVAAPAVRMLASLGGNVAGRAGCCLPALLALDASLDLLSEAGRRRVALADWLSRAPDPASLILAITVPAQPEGAPATLRKVGLRAAFSPSVVGVAGLLHLDRGVIAAARLAAGGGPVRPQRLLRSEAILAGLPPEAVDWVGLHAALLAEIEAPDDGLRSAGYRRRVAANALVAGLGGAGLLPGGRSPARHRPVGGCAPAGERTVSRAADPAGWHRRPDIADKVFGRLAYLTDARMPGLLVGRILRAGRPHARILAIDTAEAEALPGVAAVVTHRDVPGLNAFGIMVQDQPALCGERVRYVGDAVAAVAAVDEATAEAALALIRVAYAPLPVLDTPEAALAPGAAQLHPDGNLRREVRVTRGDAAAAFATCAHVVEDTYVTPRQMHGFLETEGGWARVEADGSLTIHAGGQHGARDRHQIARLLGWPEARIRVVTSPTGGAFGGKDELTVQPVLALLAVKTGRPVRLHLGRAESVAAGVKRNPMRIRMRTGCDAEGRLLAVSVELTADGGAYASLSPAVIETALEHCCGPYIVPHVEGVARLVATNNGTCGAFRGFGANEMTFAIECQMGRLAQAVGCDPVALRRRNLRAPGSPGFFGQAVGPSERLAAMLDAAAASPLWSAWTREPVARGDXVPPLGPGEKXFPPGGGGAPPRGGXFFPPGGGLGGARSHHSHTAIILXPRGGCGNTTRGGGRMSTTTTQNDYFFSSPAPPAGRKKKTIGKKKKNKKEKTTVRRKRERSISFSXRKKKKRTNKQR

SEQ ID NO: 4335 - protein, 812 aa, Planobispora rosea
MSDDGRDSGRDSGRDSGRDGGRYVGVRVPRREDARLVRGRARFAGDVRLPGMVHAVVVRSPIAHGRLVRCDTKAALTAGGVLDVLTPADVTPADVIPADAAPAKAATAEAAGPRLPCGEIAPGQQAVDYPVLAETVRYAGQPVALVTARGEAAARDAADLIDLDFEELPPVIGVEAALAEGAPLLYPAWGGNLVTDFPLGDPAEDCAAAVAEAEHVVELTTRLGRVTPYPMEPRGIVASFEDGTLTVWTSTQAPHHVRDHLAGALGLSHGRVRVLACDVGGGFGGKEHLYPDEVLVCLAAVRLGRPVRWVESRAEHLTATLPARDAVHRARLAFDGDGRFRALYCDVLGDLGAHPSNVGISPIAVTALTLPGPYRFDRAGARIRAAVTTTTPTGSYRGFGQPEATWTRERLIDEAARVLGMDPVEIRLRNLVGPGELPYTSRTWLPYDSGDYPAALRALRERVRPPGPPGRSDDGRRRGIGFSCHVEATGMGPSEEMRRAGTQSGGYETAVLRMEQDASVVVSSGVAAIGQGIETTLAQLAADHVGVPLERVRVLLGDTAATPYSPLGSIASRALAVGGGALVRAAARLREKITLIAAHQLEASPADLEIAGDVVRVKGDPLAARTLAEIAVSAWRAWDLPEGTGPGLEERVTYDPPAYTCAFGAHAAAVAVDPATGAVEVEGYWAVNDCGVVVNPAIVEGQLRGGIVQGIGMALTEELACTPGGQPVMDYLPPGAPDVPDIEVELVQTPSPVTPGGMKGVGEAGVIGPPAAIGNAVAAAVPAIAGRITGTPLTPQAVWSALSAETGARDIR

SEQ ID NO: 4336 - protein, 518 aa, Leptospira interrogans serovar Copenhageni str. Fiocruz L1-130
MSGRVYEWKNLGDSRTVKADVVIVGTGCGGATLAYELSKNGKKVIMIEEGGYYHTGTFDNHELNMAGKVSAERNMATDATGTINLVYGKNVGGASVHYWADSYRTPDDRLNLWKKTYGVQGHSPEDLNPYWKELDETLNVHPAKEEYYNKMNQLVRKACKSLSWEGNPVPQARKNCQKSGHCMQGCMYGAKQSQLVTHIPKAMSLGTDIYADCKAVRLELKGDKVEFLEAVMIDRPSGKESNIVLKFEAPIFAISAGGFGSSTFLLKNGWKKKLPALGEYLAINPSPFIHAFYEEPIIQWRNIPSAFGVEEFRLARFKEDGSYIEGGFLIMANQLQPGSLAALIPGFGVEHREIMKQLPHIGGTIGWIDDVPSELGNISVSASGKRTITYNFGKLTKEFLKDCIRKQAQLNFSAGAKWILLPDLKRTKIFSEKEIDKINLLELNPASMMMAAPHPAGGCRMGQDPFTSVVDWRHRVHGLKNLYVSDSSVFPTGVSVDPSYTIMAFSKQAAKFILEDSE

SEQ ID NO: 4337 - protein, 358 aa, Rhodobacter sphaeroides 2.4.1
MDAQKIRTTEGRGRLYDSVLDTVGNTPVIRINNLSPEGVTIYVKAEFFNPAASVKDRLALNIIEAAERSGKLKPGMTVVEATSGNTGIGLAMVCAQKGYPLVITMSEAFSVERRRLMRLLGAKVVLTPRGGKGFGMYRKAQELAEANGWFLASQFETDANADIHEATTAREIVADFAGERLDWFVTGYGTGGTVTGVARVLRRERPEVKIVLSEPANAQLVASGVPQDRNADGTAASGHPAFEAHPIQGWTPDFIPKVLQEGLDAGAYDELIPVAGEDGMKWARELAAKEGILTGVSGGSTFAVARQVAERAPKGSVILAMLPDTGERYMSTPLFQAIGEDMNEEEKALSASTPSFQL

SEQ ID NO: 4338 - protein, 229 aa, Escherichia coli O157:H7 EDL933
MSNQGEYPEDNRVGKHEPHDLSLTRRDLIKVSAATAAAAVVYPHSTLAASVPAATPAPEIMPLTLKVNGKTEQLEVDTRTTLLDALRENLHLIGTKKGCDHGQCGACTVLVNGRRLNACLTLAVMHQGAEITTIEGLGSPDNLHPMQAAFIKHDGFQCGYCTSGQICSSVAVLKEIQDGIPSHVTVDLVSPPERTADEIRERMSGNICRCGAYANILAAIEDAAGEIKS

SEQ ID NO: 4339 - protein, 480 aa, Nostoc punctiforme PCC 73102
MNTLASLNLVKSLENSASETPNSQPVYALISVHGDPTAEIGKEGAGGQNVYVRELGLALAKRGCQVDMFTRREYPDQEEIVELAPGCRTIRLNAGPAKFITRNDLFEYLPEFVEAWLNFQQRTGRSYTLIHTNYWLSAWVGLELKSRLGLPQVHTYHSIGAVKYRNMENPPQISAIRNCVERAILEQADYVISTSPQEAEDLRQLISQHGRIKVIPCGINTEHFGSVSKEVARQQLGIASDSQIILYVGRFDPRKGVETLVRACANLPSAFQLYLVGGCREDGADFKEQQRIESLVNDLGLEAVTVFTGRISQALLPTYYAAGDICVVPSYYEPFGLVAIEAMAARTPVIASNVGGLQHTVVHGETGFLVPPRDSKALAIAIHSLLQNPTLKESYGNAAQNWVQSRFSTQGVAARVHELYQSLTLDTFIQEIIKTKKLTPDLERQIQNLLKSKVLKSNEIKALEKLIDSFSNDIVQWATS

SEQ ID NO: 4340 - protein, 906 aa, Nocardia farcinica IFM 10152
MRFEVDGRSVEARPRPGQCLRSLLREHGARAVKKGCDAGDCGACSVLLDGLAVHSCLVPAHRAADARVVTAAGLGTPADPHPIQRRFLAESAFQCGFCTPGMVVTAAGLTGAATLPEADLPELFKGNLCRCTGYRPILAAVSPAPAGAAERPAPVGAPAGPRIVAGLEPFTLDFEPGDDERTPPAAPLHLAVLPSPHPHARIVAIDTAAAEALPGVRAVLTYADAPARAFSTARHELRTDDPDDTYVLDRTVRFAGQRVAAVVADTLDIARAGCRLLRVTYAELPAVFDPALALAEGAPALHGDKPAEARIADPARNLVAEIHGEVGSVAAGLADAAHVVRGVWHSPRVQHVHLETHGGVGWLDRAGRLVIRCSTQVPFLVRDELCEVFGLARDRVRVFAARVGGGFGAKQEMLVEDLIALAVLRTGRPVQYEYTRTDEFTAATSRHPARVEVTAAADAAGVLTALAVDVLLDAGAYGNHSPGVLFHGVGESVQLYRCPNKRVDGRAAYTNNVPSGAFRGYGLGQLVFGIESALDELARALGIDPFEFRARNAVRPGDPFVGAEAEPGDLRFGSYGLDQCLDLARAALRRGDGVAAPGPRWRVGEGMAAAMIATIPPRGHHAETVAVLRADGRYEIRVGTAEFGNGTTTAHLTLAAAALGVAADRIDIRQSDTDLVGHDTGAFGSTGIVVAGKATHLAATALRERIRTRAAELTGLPADACVPGPDGVRCGDRLVTAAELCAAGELRARGTHAGSPRSVSFNVQAFRVAVHPDTGRVRILHSVQTADAGTVLHPAQCRGQVEGGAAQAIGTALYEDMRAERGVVTTRTLRHYHIPQAADLPVTEVAFADTTDELGPLGAKSMSESPYNPVAPALANAIRDAVGVRMYRLPMTADRIWRALQEGESR

SEQ ID NO: 4341 - protein, 210 aa, Bacteroides fragilis YCH46
MRSLIGKQAPKFDATAVINGHEIVQNFSLDQYKGKKYVVFFFYPMDFTFVCPTELHAFQEKLEEFEKRDVAVVGCSVDSEYSHFSWLQMPKNEGGIQGVKYPIVSDFSKSISESYGVLAGSYAPDENGNWVCEGTPVAFRGLFLIDKEGVVRHCVINDLPLGRNVDEVLRMVDALQHFEEYGEVCPANWSKGKDAMKATEDGVANYLSKH

SEQ ID NO: 4342 - protein, 520 aa, Oryza sativa
  misc_feature (455)..(455): Xaa can be any naturally occurring amino acid
MEYPPQFPTPQLHTPISSSSSSSSSPRLYTRRVELLLLLFLAPPQHRRLEAHANAGSEEKDCFFFFFCVCAVFLGFLAMVIGAEIKDEMEEAPPLLLDEAARPRRVALFVEPSPFAYISGYKNRFQNFIKHLREMGDEVIVVTNHEGVPQEFHGAKVIGSWSFPCPMYGKVPLSLALSPRIISEVAKFKPDIIHASSPGIMVFGALAIAKLLGVPLVMSYHTHVPVYIPRYTFSWLVEPMWQVIRFLHRAADLTLVPSVAISKDFETAHVISANRIRLWNKGVDSASFHPKFRSHEMRVRLSDGEPEKPLIIHVGRFGREKNLDFLKTVMDRLPGVRIAFIGDGPYRSELEKMFEGMPAVFTGMMQGEELSQAYASGDVFVMPSESETLGQVVLESMSSGVPVVAARAGGVPDIIPEDQEGKTSFLFTPGDLEDCLGKIQLLLTDKEFRDNMGDXPCFKLGNGLEMEKCDWRAASKKIRNEFYNAAIWYWRKKRAELIKPLQWLAQMFLPAPEVNRITQH

SEQ ID NO: 4343 - protein, 350 aa, Ipomoea trifida
ERLAGSGIERIPKRYIRPEKERPSIGDIFAEEKMAGGPQVPTVDLKGINSEDLEVREKCREELRKAAVDWGVMHLVNHGIPEELTARVKAAGEGFFGQPIEEKEKYANDQAAGNVQGYGSKLANNASGQLEWEDYFFHCVFPEDKADLSIWPKTPSDYIAATREYAKQLRALTTTVYAVLSQGLGLEEERLEKKWRDGRASSTNEDNYYPKCPQPELALGVEAHTDVSALTFILHNMVPGLQLFYEGKWVTAKCVPNSIIMHVGDTVEILSNGKYKSILHRGVVNREKVRVSWAVFCEPPKEKIILQPLPETVCRADPPRFPPRTFAQHIKHKLFRLTDQEGADTPKPDE

SEQ ID NO: 4344 - protein, 791 aa, Polaromonas sp. JS666
MGASDFINLPTIGTSVRRKEDYRFLTGGGQYTDDITLANQSYAVFVRSPHAHARINSISTAQAKAAPGVLGVFVGEDVAADKINGLPCGWLITSTSGTPMKEPPHPILAQGKVRYVGDHVAMVVAETLEQAKNAAELVEVDYDVLSAVVKVTDAAKATALHDAAPDNHCYKWAIGDKAQVDAAFAGAAHVTKLDLTNNRLVPNAMEPRAVIGSYSRATDEYTLYVANQNPHVERLLLTAFVMGLPEHKVRVIAPDVGGGFGSKIYLYAEDVCLTWASKKLNRNIKWTADRSEAFVSDAHGRDHSSHAEMALDKDGKFLALRVHTDANMGAYLSTFAPAIPTILYATLLAGQYTTPQIYVEVDAWFTNTAPVDAYRGAGRPEATYLLERLVTRAGWELGLAQDEIRRRNMVTQFPYQTPVALQYDVGDFRALLERANELADVAGFARRKTATEAKGKLRGMGYSSYIEACGLAPSNIAGALGARAGLFECGEVRVHPTGSVTVFTGSHSHGQGHETTFSQVVAARLGISVEQVDVVHGDTGRVPFGMGTYGSRSLAVGGTAIMKALDKIEAKAKKIAAHLMEASDADVEFANGEFTIKGTDKKVTFGQVALTAYVPHNYPLDKLEPGLNETAFYDPTNFTFPAGTYICEVEVDPATGEVRVDRFTAVDDFGNIINPMIVEGQVHGGLVQGIGQALMENCVYDEESGQLLTGSLMDYAMPRADDMPNFTLATLCTPCSHNPLGAKGCGEAGAIGSPPAVINAVLDALKPLGVTDFDMPASPGRVWEAIQAAKH

SEQ ID NO: 4345 - protein, 369 aa, Lilium speciosum
MAPVATTFLPTISDEKTLRASFVRDEDERPKVAYNNFSDDIPIISLAGMDEDGPIRSEICGKIVAACEDWGIFQVVDHGVDAGLVTEMNRLAREFFALPPEDKLRFDMTGGKKGGFIVSSHLQGEAVQDWREIVTYFSYPIRVRDYSRWPDKPEGWRAVVEAYSEQLMGLACKLLGVLSEAMGLDKEALTKACVDMDQKIVVNFYPKCPQPDLTLGLKRHTDPGTITLLLQDQVGGLQATKDGGNTWITVKPIEGAFVVNLGDHGHFLSNGRFKNADHQAVVNSNSSRLSIATFQNPAPEATVYPLAIRDGEKPVLDAPMTFSEMYRKKMSKDIELAKLKKLANTEAQEVAKKPTEVAVQPGKLDQILA

SEQ ID NO: 4346 - protein, 155 aa, Polaromonas sp. JS666
MQVQLTVNGKSSSIEAPPNTLLVQVLREHLKLTGTHVGCDTAQCGACTVIMNGRAVKSCNILAAQAAGAEITTIEGLAKADGTMHPMQAAFKECHGLQCGFCTTGMVMNAVDLCTHHPQATEAEIRELLEGNICRCTGYQNIVKAVQQGAVAMAT

SEQ ID NO: 4347 - protein, 249 aa, Kluyveromyces lactis NRRL Y-1140
MMFQRALLQTKSSVLRQQPLRTSVRFIRTFKQEDQPRLRINSVAPNFTADTTAGKVNFHEYIGNSWAVLFSHPADFTPVCTTELGAFAKLKPEFDQRNVKLIGLSAEGIESHQKWIKDIEEVSQLDKFTFPIIADVDREVSFLYDMVDEEGFKNLNNGIVATIRSVYIIDPSKKIRLIITYPASVGRNSSEVLRVIDALQKGDSKGVVTPIDWQPGQDVIIPPTVSDADASKKFGDFKTIKPYLRFTKA

SEQ ID NO: 4348 - protein, 385 aa, Mycobacterium tuberculosis CDC1551
MSRVLLVTNDFPPRRGGIQSYLGEFVGRLVGSRAHAMTVYAPQWKGADAFDDAARAAGYRVVRHPSTVMLPGPTVDVRMRRLIAEHDIETVWFGAAAPLALLAPRARLAGASRVLASTHGHEVGWSMLPVARSVLRRIGDGTDVVTFVSSYTRSRFASAFGPAASLEYLPPGVDTDRFRPDPAARAELRKRYRLGERPTVVCLSRLVPRKGQDTLVTALPSIRRRVDGAALVIVGGGPYLETLRKLAHDCGVADHVTFTGGVATDELPAHHALADVFAMPCRTRGAGMDVEGLGIVFLEASAAGVPVIAGNSGGAPETVQHNKTGLVVDGRSVDRVADAVAELLIDRDRAVAMGAAGREWVTAQWRWDTLAAKLADFLRGDDAAR

SEQ ID NO: 4349 - protein, 326 aa, Triticum aestivum
MVVLASTPAVDHIPLLRSPDPGDYFSGMPVVDLSSPGAPRAIADACERFGFFKLVNHGVPADTMDRLESEAVRFFSLPQADKDRSGPAYPFGYGSKRIGLNGDMGWLEYLLLAVDSASLSGACAVPSCALFRAALNEYIAAVRKVAVRVMEAMAEGLGIAAVDALSGMVTAEGSDQVFRVNHYPPCHALQGLGCSATGFGEHTDPQLISVLRSNGTSGLQIALQNGQWVSVPSDRDAFFVNVGDSLQVLTNGRFKSVKHRVVANSLKSRVSMIYFGGPAMTQRIAPLPQLLGAGEQSLYKDFTWGEYKKAAYNSRLGDNRLAQFHR

SEQ ID NO: 4350 - protein, 163 aa, Oceanobacter sp. RED65
MSTTFTLNGQKTTLDVTDDTPLLWGIRDEAGMTGTKFGCGIGLCGACTVLVNGRATRSCITPVSQVKDAEITTIEGLGENGPHPLQKAWVETQTPQCGYCQSGQIMQAAAMLKDFPDPTDEQINQVMSGNLCRCMAYVRIREAIKIAAAEMRSVNVQEDATNE

SEQ ID NO: 4351 - protein, 154 aa, Legionella pneumophila str. Paris
MKIGEMVPDFAFNATNNVQGHLNDYKGQIIVLYFYPKDATPGCTTEGQDFRDAYSQFKDLNTVIFGISRDSLKSHEQFKSKQNFPFELISDDNETLCQTFDVIKMKSMYGKQVRGIERSTFIIDTQGVLTHEWRKVNVKGHVEEVLKAVRALAG

SEQ ID NO: 4352 - protein, 198 aa, Magnetococcus sp. MC-1
MSVLVTKQAPDFNATAVMADNSFQEISMSDYKGQYVVLFFYPLDFTFVCPSELIAFDHRLGEFEKRNVQVLGCSIDSHFSHLAWKNTEINNGGIGQVKYPLIADLNKQIARDYDVLFNDAIALRGSFLIDKEGKVRHQVVNDLPLGRNIDEMLRMIDALQFTEAHGEVCPAGWKSGDAGMQGSTEGVAKYLAANADKL

SEQ ID NO: 4353 - protein, 763 aa, Cupriavidus taiwanensis
MMTHAVIGHSVKRTDLLDKVTGNAKYVADMPFPGLLYGKIKRSNVAHARIRRIDTSRALALPGVRAVLTHENVPRVLHAGSPHPRSASVTCDQYILDYKVRYWGEGVAAVAAVSEEIAERALELIEVEYETLPAVFTTEDAERSDAPRIHDREPGGNLVLPPVIVQRGDVEAGFAEADFILEGVYEGGRPTPAYMEPNVLTCSWDGNGNLTVWISTQTAFMVRGIMAEVLGLPLHKVRVLVDHMGGGFGAKQDLFQHEFLCALLARETRRPVRMEYTREETFLGGRTRHPARIWLKQGFRNDGTITARQARVVFNSGAYGSHGPGVTNVGTAALVSLYRCDNVLLEGRCVYTNSPIAGAFRGYGVVQTYYALDVQMDEAAAHLGMDPAELKLRNAVREGDIAPSNHPLIGHGLEACIEKGMALLDWPALRRRPRDTTGPVRTGWGLGCEMHGSSAYPGIKEQGNAIIKMNEDGTVVLLTGAAGLGTGAHTALAQIIAEELTLPFEAVSVVHGDTDVVPWDIGAFASHTTYMVGKAAQMAAGEIRRQLFERAAKLMECEPEALTLANGIIAVRDRDGPTLTVREAVMPRKGIPAAQLVGTATYHPTKSYSFAAHFVEVAVDTETGFITVRQVVPVHDVGKVIHPVAAAGQIEGGIQQGIGHTLYEDYQIDMRTGRSLNANFVDYKMPLAMDMPEIRTVILEAAPDPGGPFGAKGVGEDPIVAIGPAIANAVFDAIGVRFRHYPIKPEQVLQALAEKAAREGRQP

SEQ ID NO: 4354 - protein, 155 aa, Anabaena variabilis ATCC 29413
MAITRWEPFREIERLEPFREIDTLQRQINRLFDRLMPTNGGEKVGFAFVPAAELEEKDDAIHLKLEVPGLEANDIHVEATPESISITGERKSETKMEENGITRSEFRYGKFQRVIPLPSLIQNDKVQAEYKNGILRLTVPKAESERNKVVKVNIG

SEQ ID NO: 4355 - protein, 266 aa, Arabidopsis thaliana
MASVASSTTLISSPSSRVFPAKSSLSSPSVSFLRTLSSPSASASLRSGFARRSSLSSTSRRSFAVKAQADDLPLVGNKAPDFEAEAVFDQEFIKVKLSDYIGKKYVILFFYPLDFTFVCPTEITAFSDRHSEFEKLNTEVLGVSVDSVFSHLAWVQTDRKSGGLGDLNYPLISDVTKSISKSFGVLIHDQGIALRGLFIIDKEGVIQHSTINNLGIGRSVDETMRTLQALQYIQENPDEVCPAGWKPGEKSMKPDPKLSKEYFSAI

SEQ ID NO: 4356 - protein, 191 aa, Rhizobium leguminosarum bv. viciae 3841
MDCSMCASPPVNDGILERRRMTMADSPTKLSVETEAKPAAPVDRWRPLDSLRSEIDRVLNDFGSPSIFDRAFGRMPAAFSRGMLAVDLVESEKAFELSAELPGVDAKDLDVTLADGVLTIKGEKNETKEEKEKDYYLSERRYGSFHRSLELPRGVDSEKIEANFSNGVLKVSLPKTPERQQNGKKITVKAA

SEQ ID NO: 4357 - protein, 755 aa, Bradyrhizobium sp. BTAi1
MTPELNLSRDPAHLRHGSTIGQPLSRIDGLAKVTGRARYAADNNPSGMLYAVLAVSSIARGRVVSLDVDAAKAHPGVVAVMTSANRPPLQADPDGKPNPFAFRFEALQNDRVRYANQPIAVVIAESLEAATEGAALLAPRYQAEPARIGLDTGEAYVPPVVGMGFPAESHHGDAAAALAGSDKRITATYETPAHYHNAMEPHAIVAEWQGDRLIIDTPTQGLVMMRARLAELFGIAPENILIRSPYLGGGFGGKGLMAGAQVLGILAAKLVDRPVKLVARREQLYGPFGHRSPTRQTLKLGANAAGQLSAIHHHARIATSSFEDFYEAAAHVTHTLYAAPAISTTYDAVRMDTGTPLFVRAPGIAPGSIALESAVDEMAEACGLDPLAFRVKNYAEVEPATGKPFSSKALRDCYTQGAERFGWWERPLKPRTMRDKDGFLVGWGMGTATFHALMFAGQARAVIRRNGSGVVESGAHDMGQGAWTAFAQIAADALALDLDQVTFKAGTSDLPDAGIAGGSAHTATVGTAIHNAGAAVITKLAELATSDQRSPLFGAGNAGVIARNGRLLRRDDEGRGESYAEILARAGLDEVEGSGAGMPDPAANEHYAMHSHGAVFAEVKVDPDLGQVRVTRMIGAFAAGRIINPKLVRSQLIGGMIWGVSLALHEEAIIDHRSGRIMNANLGEYHVPVNADIPAIETFTVNEHDPFVNPLGIKGVGEIGITGSAGAVANAVAHATGIRVRRFPVRISDLVPPVS

SEQ ID NO: 4358 - protein, 163 aa, Bradyrhizobium japonicum USDA 110
MLMAKISLIVNGNPVTANVDPRTLLVQFLRENLRLTGTHVGCDTSQCGACVVHLDGKAVKSCTTLAVMADGHEVKTIEGLAADGAPLHPMQEAFREHHGLQCGFCTPGMIMTAIDIVHRKGHEVDDHTIREELEGNLCRCTGYQNIVASISAGAKAMAKSDLA

SEQ ID NO: 4359 - protein, 793 aa, Streptomyces avermitilis MA-4680
MGTTGTPTKITQGTKSKGGIGESTLRPDGTLKVTGEFAYSSDMWHEDMLWGQILRSTVAHAEIVSIDTSEALAQPGVYAVMTYDDLPTDVKNYGLEIQDTPVLAHGKVRHHGEPVAIVAADHPETARRAAAKIKVEYRELPVITDEASATAPDAILVHEGRTDHHIGHVSHPNIVHRQPIVRGNAEEAAKKADFIVRGEYTFGMQDQAFLGPESGLAVPAEDGGVDLYVATQWLHSDLRQIAPVLGLPEDKVRMTLSGVGGAFGGREDLSMQIHACLLALRTGKPVKIVYNRFESFFGHVHRHPAKLSYEHGATRDGKLTHLKARIVLDGGAYASASPAVVGNASSLGAGPYVIDDVDIEAIALYTNNPPCGAMRGFGAVQACFAYEAQMDKLADKVGMDRVEFRQLNAMEQGTLLPTGQPVDSPAPVAELLRRVKAMPLPPERQWESSEGADVRQLPGGLSNTTHGEGVVRGVGYAVGIKNVGFSEGFDDYSTAKVRMEVVGGEPVATVHTAMAEVGQGGVTVHAQIARTELGVTQVTIQPADTQVGSAGSTSASRQTYVTGGAVKNSCELVREKVLELGRRKFGTYHPAWATAELLLEGGKVVTDAGEVLAGLVDVLGDESVEVEAEWRHRPTEAFDLRTGQGFGHVQYSFAAHRAVVEVDTELGLVKVIELACAQDVGKALNPLSVIGQIQGGTTQGLGMAVMEEIIVDPKTAKVRNPSFTDYLIPTILDTPTIPVDVLELADDHAPYGLRGIGEAPTLSSTPAVLAAIRNATGLELNRTPVRPEHLTGK

SEQ ID NO: 4360 - protein, 164 aa, Bradyrhizobium sp. BTAi1
MNWTVRLTVNGEPRTLALDDPRVTLLDLLRERLHLTGTKKGCDRGQCGACTVLVDGRRINSCLTLAVSLDGAAITTIEGLAQGDQLHPVQEAFIAHDALQCGFCTPGQIMSAVGLISEGHAGDDPERVREGMSGNLCRCSAYVGIVEAVLDAQDKLTGKTERAA

SEQ ID NO: 4361 - protein, 366 aa, Solibacter usitatus Ellin6076
MRVVVDATPLLVRSAGVKNYLYHWIMHMRRAAGPAVIGTFPPLPHVRPLTHEASVAGPLRTFGGLAALGLSNHTPLPVLELMTRDADIFHASVLVRHPPRRARLTATVHDLTGFLMPELHPRANLVAESSFARLARRADRLIAVSECTRQDAIRVLGIAPEKITTIHSGIADAYFDPPVESVDAVRLRYGLVRPFVLFVGTIEPRKNLDLLLDAFESLPLALREHYQLVIAGPVGWNAEHTLKRLSMVRYLGYIPEPDLAPLTAAAEVFVYPSLYEGFGFPVAQAMAAGVPVITSNVSSLPEIAGAAALLVDPRSQSELHTALARLLTSPDLRISLAAAGRDRARAFRWQACAAKSLDFFRAVLGK

SEQ ID NO: 4362 - protein, 177 aa, Prochlorococcus marinus str. MIT 9515
MKSLFSIFIIIISFFFNFKSVIAFDYAPEVGDIAPSFHLEGINKNIKSKKIWDSNELKGKWVVLYFYPKDFSAGCTLEAKGFSKLKKDFSKYNAEIIGISADKEETHESFCSEQSINYTLLSDPNGTISEKYGSWIPPYSDRNTFLISPKGEIVFRWISVLPINHAKEVLNVLKKNI

SEQ ID NO: 4363 - protein, 196 aa, Candida albicans SC5314
MAPVVQQPAPSFKKTAVVDGVFEEVTLEQYKGKWVLLAFIPLAFTFVCPSEIIAYSEAVKKFAEKDAQVLFASTDSEYTWLAWTNVARKDGGIGKVDFPVLADTNHSLSRDYGVLIEEEGVALRGIFLIDPKGVLRQITINDLPVGRSVEESLRLLEAFQFTEKYGEVCPANWHPGDETIKPSPEASKEYFNKVNK

SEQ ID NO: 4364 - protein, 345 aa, Edwardsiella ictaluri
MKKIFFVITKSEIGGAQKWIVELSNILKEQYEIFIITSGDGWLTSKFDSSHVILYPGLLNLKSIFCFFKLANIFRKYKADIVISSSANAGVYARLSKFLYSHKSIYVSHGWSCLYNGGRLKKIQCLVERFLSLISDKILCVSENDMNNAIKFIGIKEKKLFVIRNGVSPLKKKNVINVRKKVLFVGRMIHPKRPDLFVAVADSFPDVDFYLVGDGPLKQRLETSCQHNNVYFLGEINGFDSFQCYDIFVLCSDSEGLPMSALEAASSGVPILLSDVGGCSELITLMNNGCSNGELFSNDISSLRCKLGAVLLEYDKYFSSAQVVSGCFDINNLAEKYIELIEGDK

SEQ ID NO: 4365 - protein, 345 aa, Herminiimonas arsenicoxydans
MRIAIVTDAWTPQVNGVVNTLKATRKQLRASGHAVLMVTPEHIRSYSCPTYPEIRLAYKPYGKVASALDDFDADCIHIATEGPMGLAARRYCLNRGLDFTTAYHTRFPEYLRARFHLPLAVTYRWLKWFHGPAKAVMVPTPRMQDALEQSGFRNVVQWSRGVDTAYFKPGPREEASLQRPLYLYVGRIAVEKNIEAFLQMDLPGAKWVIGDGPMRDELEKKYPDVRFLGAKPHEALPAYYNCADVFVFPSRTDTFGLVLVEAMACGVPVAAYPVEGPIDVVAHGKAGVLDTDLTRACFEALKLKRSVVREHALCYSWDAATQQFLQHLHPVRKSNGLAVVRSSLA

SEQ ID NO: 4366 - protein, 313 aa, Gemmata obscuriglobus UQM 2246
MATELPGCHRYLNRIAPTPLVPVQLDAGRPAVWCKLEFLNPSGSTKDRIARFILEKAWRRGLVTCGGRVVEASSGSTSIALALACAQMGLKFLAVMPEGVSNERVFIIRAYGGDVTFTPAALGIRGAIAEVERLGAEPGVFLPKQFANLDNAEAHRLGTAREVLDQIPGGRVDAVVSGVGTGGTLVGLFEGLRENGCRVVPVLARPVNLVSAPEVECCSFSARIPGVADSISEIFRPERVPGLLTVEVRDEDAIATTRELIRLGFPVGPSSGLNYCAALEALRQLNDPHAQVVTVFPDRMERYFTTELFKPFV

SEQ ID NO: 4367 - protein, 885 aa, Arabidopsis thaliana
MDLEANCKEKLSYFRIKELKDVLTQLGLSKQGKKQELVDRILTLLSDEQAARLLSKKNTVAKEAVAKLVDDTYRKMQVSGASDLASKGQVSSDTSNLKVKGEPEDPFQPEIKVRCVCGNSLETDSMIQCEDPRCHVWQHVGCVILPDKPMDGNPPLPESFYCEICRLTRADPFWVTVAHPLSPVRLTATTIPNDGASTMQSVERTFQITRADKDLLAKPEYDVQAWCMLLNDKVLFRMQWPQYADLQVNGVPVRAINRPGGQLLGVNGRDDGPIITSCIRDGVNRISLSGGDVRIFCFGVRLVKRRTLQQVLNLIPEEGKGETFEDALARVRRCSGGGGGDDNADSDSDIEVVADFFGVNLRCPMSGSRIKVAGRFLPCVHMGCFDLDVFVELNQRSRKWQCPICLKNYSVEHVIVDPYFNRITSKMKHCDEEVTEIEVKPDGSWRVKFKRESERRELGELSQWHAPDGSLCPSAVDIKRKMEMLPVKQEGYSDGPAPLKLGIRKNRNGIWEVSKPNTNGLSSSNRQEKVGYQEKNIIPMSSSATGSGRDGDDASVNQDAIGTFDFVANGMELDSISMNVDSGYNFPDRNQSGEGGNNEVIVLSDSDDENDLVITPGPAYSGCQTDGGLTFPLNPPGIINSYNEDPHSIAGGSSGLGLFNDDDEFDTPLWSFPSETPEAPGFQLFRSDADVSGGLVGLHHHSPLNCSPEINGGYTMAPETSMASVPVVPGSTGRSEANDGLVDNPLAFGRDDPSLQIFLPTKPDASAQSGFKNQADMSNGLRSEDWISLRLGDSASGNHGDPATTNGINSSHQMSTREGSMDTTTETASLLLGMNDSRQDKAKKQRSDNPFSFPRQKRSVRPRMYLSIDSDSETMNRIIRQDTGV

SEQ ID NO: 4368 - protein, 168 aa, Mycobacterium smegmatis str. MC2 155
MHTVEMSGATSGQGVEVSVIVNGRLVERTVPARLTLADFLRDELQLTGTHLGCEHGVCGACSVFVDGRGVRACLMLAVQADGTRVTTVEGLDEFEETQRLRQAFSARGGLQCGFCTPGFLVSAVELLRDPDTEKPLTEDSVREALSGNICRCTGYQGIVQAVLDAADG

SEQ ID NO: 4369 - protein, 212 aa, Pseudomonas fluorescens Pf-5
MSLRLGDIAPDFEQDSSAGKIRFHEWLGDSWGVLFSHPADFTPVCTTELGFTAKLKDEFAQRGVKAIALSVDPVDSHHKWIEDINETQNTRVNFPILADADRKVSDLYDLIHPNANDTLTVRSLFVIDPNKKIRLTITYPASTGRNFHEILRVIDSLQLTDNYKVATPANWQDGDEVVIVPSLKDEEEIKRRFPKGYRAVKPYLRLTPQPNR

SEQ ID NO: 4370 - protein, 153 aa, Mycobacterium tuberculosis H37Rv
MLNVGATAPDFTLRDQNQQLVTLRGYRGAKNVLLVFFPLAFTGICQGELDQLRDHLPEFENDDSAALAISVGPPPTHKIWATQSGFTFPLLSDFWPHGAVSQAYGVFNEQAGIANRGTFVVDRSGIIRFAEMKQPGEVRDQRLWTDALAALTA

SEQ ID NO: 4371 - protein, 200 aa, Haemophilus somnus 129PT
MVLVTRQAPDFTAAAVLGNGEIVEKFNLKQHIAGKAAVVFFYPMDFTFVCPSELIAFDHRYKEFQDRNVEIIGVSIDSEFTHNAWRNTPVDNGGIGQVQYALVADIKHEIAKAYGIEHPEAGVALRASFLIDKEGVVRHQVVNDLPLGRNIDEMLRMVDALQFHEEHGEVCPAQWEKGKEGMTGSPEGVAKYLKQNADKL

SEQ ID NO: 4372 - protein, 299 aa, Campylobacter coli RM2228
MRVYKKVNELIGNTPIIQLEKFGANLFAKCEFLNPSHSIKDRAAFAMIQSALNEGKIDSKTVIVEATSGNTGIALAMICADLGLQFVATMPESMSIERRKMITLFGAQLELTPASLGMKGAVDKANEILKNTPNSFMPSQFDNLANKNAHRKTTALEILKDLDNDLDIFVAGFGTGGTISGVGEILKEKLGKIHVVAVEPLASPLLSKGEAGSHKIQGIGANFIPAILNKDVIDEIITVSNEDAINTAKELAKNGLMVGISSGANVFAASVLAKKFPDKKILTMLNDTAERYLSTDLFA

SEQ ID NO: 4373 - protein, 706 aa, Sulfolobus tokodaii str. 7
MYIGKPIKRIEDLRLITGKGAYVDDIELPGTLFVAFVRSKYPHARIKVKKEEGIFTGEDINPGKDFPIATKETTYVGQPIAIVIAKDRYEAYDLIESVEVEYEELDYVLDPEKALEDKVKVHSGLSSNIYYHERWKGGDVEKAFKEADLTISDTLINQRVIASPLETRGALAYFDGNKLTFYSSTQSAHYLRRNLVDFLGFENIRVIQPDVGGAFGSKIIAHPEEYALAKLALMLRKPLKWVPTRTEEFISAGHGRDKKLKFEVAVKKDGTILGIRGTLIANLGAPYPDANDDESGNVKSTVRMLPGIYKIIGADIDAYAVHTNITPTQSYRGAGRPEGIYFIERIVNIVADELGIDQYEIRLKNAIDTLPYTNIFGVTYDSGNVKKLLEIGKKYYDELKKEDGCVGVSSYIEITAFGPWEVARISVKYDGKITLVTGTGPHGQGDATAFAQIAADVLELPIEKIEVRWGDTEIIEDGIGTWGSRTVTIGGSAVLLASQKLKDKLIEIGAKILNADKEEVEYKEGNVTHKKNGNKVTFNEIVKNAFKMGESLDTTAIYNVKQPPTTPYGVHLALVKVDGTGKVFVKKYVAVDDVGTVINPLLAEGQAIGGIVQGMAQALLEGAFFDENGQLLTTNFQDYPIPTAVEIPEKIDWYYEILGKSPHPTGSKGIGEAGAIAATPTIINAVEQCIKKRITKMPVKFEELVS

SEQ ID NO: 4374 - protein, 226 aa, Debaryomyces hansenii CBS767
MASQEHTTLRLGSTAPNFEAETSNGKISFHDFIGDSWAVLFSHPDDFTPVCTTELGAFAKLEPEFTKRNVKLIGLSANGTESHKAWIKDIDEVTGSKLTFPIIADSERKVAHLYDMIDYQDATNVDDKGLQFTIRSVFVIDPAKKIRLILAYPASTGRNTAEVLRVVDSLQTGDKYKVTTPINWVPGDDVIVHPTISNEDAKTLFPKFRIIKPYLRLTPLDVKEEK

SEQ ID NO: 4375 - protein, 386 aa, Marinobacter sp. ELB17
MADNHSPTRIPTRILHVTFNMGFGGTEQVIRQLVINLDPQRFRCEIACIDGEVGAIGKAMEADNGITIHSRKRGPGLDWKTIRWLRRLIKSGRFDFVHCHQYSPYTYGWFAHWGTGAKVVFTEHGRFHPDQHRKKARLINPIIALSSHRLVAISAATREALIEYEYLPASKIAVIYNGITPLTVKEDRKQELITELGIKSGDVVIGTVARLDAVKNQPMMLQATRALINQGYKVRLLLVGDGPERENLEAITRQLELNSAVIFTGFQSQPADYLSLMDIFLLPSFTEGTSMTLLEAMSLGIPTVATRVGGTAEIVEDKETGFLIESDDQEAFTRAIKNLLNQPGQRKKMGSAAKARFKDKFSVEQMVDQYQRCYGAKFGSLNHLFF

SEQ ID NO: 4376 - protein, 446 aa, Physcomitrella patens subsp. patens
MLISACLLAHLQQQQQQYPSHRVLRLPGQPPVRFKHYAGYVSVNEGKGRAIFYWFFEADHRKAGTLPVSFWFNGGPGCSSIGAGAMYELGPFFNANEAGKSGLVRNKHSWNKASNIVFVDSPVGVGYSYSNTSADYNYLDDELTAIDAMAFLVGWFTKFPQYQSNDVYLLGESYAGHYAPNLAKKILIHNEIPGKLRIKLKGFLIGNPWTDSYYDNKGAVDFWYHHSLISDETYNEIQKSCDYRQEPAVGFSSSAACRNAASHASNLEMAEIDAYNIYAGNCNSISVNDSAKNTKDSNFCGPDTTTPYLNLPEVKAALHARPGINWTECSLQINSQYSVTSVVESMLPVYRYLLTRGLKMWIYSGDIDGVVPTTGTRYWLRELDLEVQVPWYPWNHSTQVGGWTQVYKGLTFVTVRDAGHMVPADKPSQALHVFRRFLAGKPLPGF

SEQ ID NO: 4377 - protein, 319 aa, Xanthomonas oryzae pv. oryzae KACC10331
MALYDNILDTIGHTPVVKLQRLAPDNVRLYVKVESFNPGGSVKDRLALAIILDAEQRGLLKPGDTIVEATSGNTGVALAMVAAARGYKFVATMVETFSIERRKLMRAYGAKVILTPAAERGSGMVRKAKELAEQHGWFLASQFANPANTAYHRNTTAAEILRDFAGHRLDHFVTGWGTGGTLTGVGEILRVARPEVRITASEPAGAALLQGQDWKPHKIQGWTPDFVPEVLNRDVAHEVLSVEDTDAITVARRLAAEEGIFTGISGGATVATALQVAEGATPGAVILAMLPDTGERYFSTPLFADVNEGSDDDWLAGLP

SEQ ID NO: 4378 - protein, 299 aa, Neptuniibacter caesariensis
MSTYFPTIEDYVGKTPLVRLQRIGQANGNIILCKLEGNNPAGSVKDRPALSMIQRAEDRGQIKPGDTLIEATSGNTGIALAMAAAIKGYKMKLIMPDNSSEERKASMTAYGAELIPVTKEEGMEGARDLALAMQERGEGIVLDQFSNMDNPEAHYCGTGPEIWEQTQGKVTHFVSSMGTTGTIMGTSRFLKEQNPDVQIVGLQPSEGAQIPGIRRWPQEYLPKIFDENRVDRILDINQDDAENTMRALAQEEGIFCGVSSGGSVAGALRLAEEVENAVIVCIICDRGDRYLSTGVFNQN

SEQ ID NO: 4379 - protein, 158 aa, Bradyrhizobium japonicum USDA 110
MDWTNQGTAMANLTINGKSLTLDVEPDTPLLWAIRENAGLTGTKYGCGIAQCGACTVHIDGIATRACGVSVAEAEGKKITTIEGLASGSTLHKVQEAWIAKDVPQCGYCQSGMIMAVAALLNEKPKPTDADIDEAITNICRCGTFQQVREAIHTIASA

SEQ ID NO: 4380 - protein, 117 aa, Oryza sativa
MSTETLRLGSTAPNFKAETTQGPIDFHEFIGDNWVILFSHPEDYTPVCTTELGAFAKLEPEFTKRGAKLIGLSANTIDSHEGWIKDIDEISGSQLKFPIIGDKERKVALAYDMIDHQ

SEQ ID NO: 4381 - protein, 791 aa, Bradyrhizobium sp. BTAi1
MQDHTSPASLENAIALQKFGVGQPVRRKEDDTLVRGHGKYTDDFNLPGQAYAWIVRSSHAHGIIKGIDTTAAKGMPGVLGVWTGADLAAAAYGPFTCGLPLKSRDGSPLLQTNRPALATDKVRFVGDPIAFVVAETAAQARDAAEAVGLDIEPLPAVTNAEEATRPGAPQLYDHIPNNVALDYHYGDTAKIEEAFAKAAHVTRLDIVNTRVAVVSMEPRVALAAFDGKTERFTLQVPTQGVSGNKATLAKILNVAPDKVRILTTNVGGSFGMKNVSYPEYVCILHAARELGRPVKWRDERTTAFLSDSQGRDQIIHGELALDADGKFLAVRLSGYGNLGAYIMGVAPLPLSLNTGKNLASVYKTPLLGVDIKTVLTNVTLMGAYRGAGRPEANYFMERLIDTAAREMGIDRLTIRKRNFIKPSQMPFPAASGVTYDSGDFAAVFEKALAVSDYAGFAKRKRESRKNGKLRGIAVGSYLEVTAPPSGELGKITFDADGGVTLTTGTLDYGQGHATPFAQVLSAQLGVPFEKIRLEQSDSDLVRFGNGTGGSRSITATGQAIVESSQLVIAKGKQAAAHLLEASEADIEFAGGQFTIAGTDRSIDIMELARRMREGKMPEGVPASLDVDHNSTATESTFPNGCHVCEVEIDPDTGVAQIVAYTAINDFGTVINPMIVAGQLHGGVAQGIGQAMMEHLRYDESGQPITGSLMDYALPRASDVPMMTVDNHPVPAKSNPLGTKGCGEAGCAGSMASVINAVIDALSDYGVKHLDMPLTTEKIWRAIQDGKAKSAA

SEQ ID NO: 4382 - protein, 401 aa, Novosphingobium aromaticivorans DSM 12444
MSSAKTAPAVPSFPTEVAGLRVALFSGNYNYVRDGANQALNRLVGYLLRQGADVRVYAPKVEEPAFPATGTLVGVPSFAIPGRAEYRFPLALSPRVRRDLAAFDPHVVHVSSPDVVAHRAVSWARRRGLPILASVHTRFETYFRYYNMAWLEPVIEALMRRFYRRCDALVAPSESMAQVLRDQRMNYDIDIWSRGVDRDIFHPGARSLEWRRELGIADDEVVVGFLGRLVMEKGLDVFSDSIDQLARRGVRHRVLVVGEGPAHDWFAARLPQAVFAGFQGGADLGRAVASMDVLFNPSVTETFGNVTLEAMACRVPVVAAAATGSQSLVDDNVSGRLIAPGAVRQFAEALRCYVEDADLRGRHGAAGEERSLDFSWDRINQAVADTYLRLVRQKAIRSRRR

SEQ ID NO: 4383 - protein, 419 aa, Clavibacter michiganensis subsp. sepedonicus
MPNTSGQTPREPMTSGRPLRILIGADTFPPDVNGAARFAERLAGGLVRRGHEVHIVAPAASRKHGTWTEIHDGQEMTAHRLRSYRWYPHDWLRFAQPWSVNRDSARILDAVQPDVVHFQSHILTGRGLSIEAEKRGIRIIGTNHFMPENMLQHTLLPVAWQDKAISMAWKAARRTFGRAEAVTTPTRRAAQFLEKYTGLQGVIAISCGIDAGNYTPDFSPRTRNRIVFVGRVTGEKHIDVLLRAFAILPASLDAELEIVGGGDQKTALEKLAVDLRIADRTTFAGYVTDEELRRAYTRATVLAMPSIAELQSIVTMEAMASALPVVAADAMALPHLVHDGENGYLFRPGDVDDLATKLQRVLELPEEELQRMKRESLAVVATHDIERTISTFESLYRGESVDAPVTDEARGHADGSGSV

SEQ ID NO: 4384 - protein, 407 aa, Vitis vinifera
  misc_feature (6)..(6): Xaa can be any naturally occurring amino acid
  misc_feature (63)..(63): Xaa can be any naturally occurring amino acid
  misc_feature (126)..(126): Xaa can be any naturally occurring amino acid
  misc_feature (210)..(210): Xaa can be any naturally occurring amino acid
  misc_feature (224)..(224): Xaa can be any naturally occurring amino acid
  misc_feature (388)..(388): Xaa can be any naturally occurring amino acid
MTYLGXGIPDLDSDTTYKTSGATKFSKRPTKSQIQRPILHRQKPRPPPRPLYIFILYTLSESXHLKDCLDSPVHRRRMAFVSRSSSTWLLSLKVALISIGVVSMAVILRQSIPVISEFAVSGVPVXWSSFRSWLKPPYLYVIINGIIITIAASSKFHRMNHQDRPETAAKDPEDERTEFTYEMKNPPEFVGLETPIVYEQREVTISEVKXVADSPVVEDEEELXISRSTTPPLPPSPLLRRESSEIPLECLLSTEKPLVSSRFGHRKPIKASPEASGGKVLRVSKPKRHETLENTWKMITDGRHMPLTRHLKKSDTWENHGRHIVVREDSSPQRVNKSETFKDRTNNPPPSLTSPLDSVKLRKDPSLSQDELNRRVEAFIKKFNEEMXLQRQESLNQYKEMISRGAQ

SEQ ID NO: 4385 - protein, 402 aa, Caulobacter crescentus CB15
MTDTRPAQSLGPGLQPETRSLGDEPVRLVDTTMLYAPRSGGVRRYLSSKRAWLASHRPDVRHTLVVPGARDFHDGRGQVSIYAAPLPFGAGYRWPVVKQTWMERLIRQQPDLIEAGDPYTPGLAALRAGDALGVPVVGFCHTDLGKLAALHIGDWAEKPVQKRWAAIYRQFDQAVAPSRFIAGRLIEAGVRDAIGLPLGVDTAIFHPERGDRDGLRRRLGLSPKDRLLVFAGRPAREKKLDVLVAAVERLGDPYKLLFVGAGGGAPVSDRTLCIDYVRDPVELASILASCDAFVHANDNEPFGLIVLEAMACGLPVVGVSAGGVAESVDAAVGQLAVASEATAFADAIEALFERDVTVVGEAARRRAVERHGWDAVFTELCLIYDRLTGRRAFSSASAHAGH

SEQ ID NO: 4386 - protein, 441 aa, Zea mays
WQCPICLNNYSLENLMIDPYFNRITSLLHNCSEDVNELDVKPDGSWRVMGDAATRDLSQWHMPDGTLCDSKEDTNPGVVSVNEFKREGASDGHRTLKLGIKKTPNGLWQVSSKPDDKKPVVRNHIQNNTGYSIPNIVPMISSPTGSCRDGEDVSVNQEGGGIQFDISLNQEFDSFAHNFGQTYNTEDRQQEPQHNAADVIVLSDSDEENDPIVRLPAVYANTPTNGDSFPFVTDAAVSGYPEGYQEDAGVGTSGLGLLSNNTGDFEINNWQMHSYPQPEQGFQFFGTDTDVGNPFVGPHNSFSITPEDYSLDCNVGIEDPSAASRVAPAATPAAVARNAGHAPATASQAVAVSARNVAAARDAARAQAVSVASVVSSPSSAPTCLGAAPASSASSASPRAARGRRPAANASRRAVRVKTAAAAAGGHAALFRSQLALGVRA

SEQ ID NO: 4387 - protein, 249 aa, Aeropyrum pernix
  misc_feature (49)..(49): Xaa can be any naturally occurring amino acid
PGSIPLIGERFPEMEVTTDHGVIKLPDHYVSQGKWFVLFSHPADFTPVXTTEFVSFARRYEDFQRLGVDLIGLSVDSVFSHIKWKEWIERHIGVRIPFPIIADPQGTVARRLGLLHAESATHTVRGVFIVDARGVIRTMLYYPMELGRLVDEILRIVKALKLGDSLKRAVPADWPNNEIIGEGLIVPPPTTEDQARARMESGQYRSLDWWFCWDTPASRDDVEEARRYLRRAAEKPAKLLYEEARTHLH

SEQ ID NO: 4388 - protein, 322 aa, Shewanella oneidensis MR-1
MSKIFEDNSYTIGNTPLVRLNRVSQGKVLAKVESRNPSFSVKCRIGANMIWDAEKKGLLTKDHELIEPTSGNTGIALAYVAAARGYKLTLTMPNTMSLERRKLLKALGANLVLTEGAKGMKGAIDKAEEIRQSAPEKYILLQQFNNPANPEIHEKTTGPEIWNDTDGAVDVFVAGVGTGGTITGVSRYLKKVAGKAITSVAVEPADSPVITQTLAGLPVQPGPHKIQGIGAGFIPGNLDIELIDRVETVTNDEAIEMARRLMQEEGILVGISSGAAVVAANRIAALPEFADKTIVVVLPSAAERYLSSVLFQGQFGDEENIQ

SEQ ID NO: 4389 - protein, 461 aa, Rhodococcus sp. RHA1
MRIAEHVVDLIGNTPLVKLSSVIGENHGTVAAKIEYLNPGGSSKDRIAVKMIDAAEASGELKPGGTIVEPTSGNTGIGLALVAQKRGYKCVFVCPDKVSEDKRNVLKAYGAEVVVCPTAVAPEHPDSYYSVSDRLARELPGGWKPNQYSNPGGPQSHYETTGPEIWADTDGKITHFVAGVGTGGTITGTGRYLKEVSGGKVKVIGADPEGSVYSGGTGRPYLVEGVGEDFWPSAYDPSIPDEIIAVSDADSFEMTRRLAREEGLLVGGSCGMAVVAALEVAKREGPDAVIVVLLPDGGRGYLSKIFNDKWMASYGFLRTPLDGKPDEKTVGDVLRGKSGELPDLVHTHPSETLRDAIEILREYGVSQMPVVGAEPPVMAGEVAGSVTERDLLSAVFEGRAHLADPVEKHMSKPFPLIGSGEPVSAATKALGDTDALMVVDDGKPAGVITRHDLLGFLSAGS

SEQ ID NO: 4390 - protein, 799 aa, Pseudomonas aeruginosa PAO1
MSNHRKPHKSQEELADLFRAELTTGVGRSVKHESAPKHVSGEAIYIDDRLEFPNQLHVYARLSERAHARITRLDVTPCYQFPGVAIALTAADVPGQLDIGPVVAGDPLLADGKVEYVGQMVLAVAADSLETARKAAMAAIVEYEDLEPVLDVVEALRKRHFVLDSHQHRIGDSAAALAGAPHRLQGTLHIGGQEHFYLETQISSVMPSEDGGMIVYCSTQNPTEVQKLVAEVLGVSFNRIVIDMRRMGGGFGGKETQAAAPACLCAVVAYHTGRPAKMRLPRMEDMQITGKRHPFYVEYDVGFDDDGRLHGIQIDLAGNCGYSPDLSGSIVDRAMFHSDNAYFLGNATINGHRCKTNTASNTAYRGFGGPQGMVAIEEIMDAVARSLGKDPLEVRKLNYYGKDERNVTHYHQTVEHNLLAEMTAELEASSEYARRREEIRAFNAASPVLKKGLALTPVKFGISFTATFLNQAGALIHIYTDGSIHLNHGGTEMGQGLNTKVAQVVAEVFQVDVERIQITATNTDKVPNTSPTAASSGTDLNGKAAQNAAETIKRRLVEFAARHWKVSEEDIEFRNNQVRIRELILPFEELIQQAYFGQVSLSSTGFYRTPKIFYDREQARGRPFYYFAYGAACSEVIVDTLTGEYRMLRTDILHDVGDSLNPAIDIGQVEGGFVQGMGWLTMEELVWNAKGKLMTSGPASYKIPAVADMPLDLRVKLLENRKNPEQTVFHSKAVGEPPFMLGISVWCAIKDAVASLADYRAQPAIDAPATPERVLWGVEQMRRLKAAQAQAADAAVEPA

SEQ ID NO: 4391 - protein, 484 aa, Pseudomonas aeruginosa PAO1
MIRFLLNREIRVEERLDPNLTVLDYLRRHLGKTGTKEGCASGDCGACTVVVGELVTGEDGAERIRYRSLNSCLTFVSALHGKQLITVEDLKHQDRLHDVQQAMVDCHGSQCGFCTPGFVMSLFALQKNSAGADPAKAHEALAGNLCRCTGYRPILDAAEQACCHKRADQFDAREAATIEQLRAIAPRETAELNSGDRRCLLPLTVADLADLYGANPQARLLAGGTDLALEVTQFHRELPVMIYVGHIREMKRIEVGANCLEIGAATPLTDCYQALAADYPDFGELLQRFASLQIRNQGTLGGNIGNASPIGDAPPLLIALGAKIVLRRGERRRELPLEEYFLDYKVTAREEGEFIEKILVPRARPSQAFKAYKVSKRIDDDISAVCAAISLDLEDGRIARARVAFGGMAAIPKRAAACEAALQGARLEAASFERAAAALANDFTPLSDFRASKEYRLLTAQNLLRKCFLELHAPAVETRVTAYV

SEQ ID NO: 4392 - protein, 215 aa, Thermoanaerobacter tengcongensis
MKLLGEKFPSMEVMTTHGVKRLPEDYAGKWFVLFSHPADFTPVCTTEFVEFARKAEEFKQLNTELIGLSVDQVFSHIKWVEWIKDNTGVQIPFPVIADELGRVSNQLGMIHPGKGTNTVRAVFIVDDKGVIRLIMYYPQEVGRNVDEILRALKALQTADQYGVALPEKWPNNYLIKDHVIVPPSTDEASANERKEKIKAKEIEAFDWWFVHKPLK

SEQ ID NO: 4393 - protein, 762 aa, Oryza sativa
MALDPADDPLLADCKYKLNHFRIKELKDVLHQLGLPKQGRKQELVDKIIAVLSDQQEQDSRLNGLPNKKMVGKETVAKIVDDTFAKMNGSTNAVPASRNQTDSGHIVKPKRKSDDSAQLDVKVRCPCGYSMANDSMIKCEGPQCNTQQHVGCVIISEKPADSVPPELPPHFYCDMCRITRADPFWVTVNHPVLPVSITPCKVASDGSYAVQYFEKTFPLSRANWEMLQKDEYDLQVWCILFNDSVPFRMQWPLHSDIQINGIPIRVVNRQPTQQLGVNGRDDGPVLTAYVREGSNKIVLSRSDSRTFCLGVRIAKRRSVEQLVGYGQNSVDSLSIYNTSWYLGGTWQLLRFRNPVLFIKGPLNFHSIQVLSLVPKEQDGENFDNALARVRRCVGGGTEADNADSDSDIEVVADSVSVNLRCPMTGSRIKIAGRFKPCVHMGCFDLEAFVELNQRSRKWQCPICLKNYSLDNIIIDPYFNRITALVQSCGDDVSEIDVKPDGSWRVKGGAELKGLAQWHLPDGTLCMPTDTRSKPNIRIVKQEIKEEPLSEETGGRLKLGIRRNNNGQWEINKRLDSNNGQNGYIEDENCVVSASNTDDENSKNGIYNPEPGQFDQLTSNIYDLDSSPMDAHFPPAPTEQDVIVLSDSDDDNVMVLSPGDVNFSSAHDNGNAFPPNPPEASGICGEQPRGAGPDVTSFLDGFDDLELPFWESSSSQDAAGTQVTDNQCEMQNFIVNHQFLHEPILGVNLGGTAASNTLECEHD

SEQ ID NO: 4394 - protein, 374 aa, Mycobacterium marinum M
MRIGMVCPYSFDVAGGVQSHVLQLAEVMRARGHEVSVLAPASPHAALPDYVVSGGKAVPIPYNGSVARLRFGPATHRKVKKWLSEGDFDVLHLHEPNAPSLSMLALNIAEGPIVATFHTSTTKSLTLTVFQSILRPMHEKIVGRIAVSDLARRWQMEALGSDAVEIPNGVDVGSFASSSCLDGYPRPGKTVLFLGRYDEPRKGMSVLLEALPKLVERFSDVQLLIVGRGDEDELRDEAGELAEHMRFLGQVDDAGKASAMRSADVYCAPNTGGESFGIVLVEAMAAGTPVVASDLDAFRRVLRDGEIGRLVPVDDSDALAAALIEVLDSQELRERYVAAGTEAVRRYDWSVVASQIMRVYETVAGAGVKVQVAS

SEQ ID NO: 4395 - protein, 437 aa, Cyanothece sp. PCC 8801
MKIVIISELSYGTGASIAAFRLAKALSDLKHDVYYIVGQNSSKIEKDSSSITTYLLTQQHQKTLREIIFDKIQHLTEQIIISLTQKNSKSREILYQFKNYKQKTRFKFKLENNENELRQILETIQPDIINLHNISTIISYRGVLSLGTKFPLVWTLHDCFPVTGYHYKFINPNQQEIITLGIAPQLINIKKSINSLINASCNLIFVAPSEWLASLASNQLQGKKLVQVIPNGLSSIDFFPEDQKQSRLNLGLNPEKFYLLVFASNLKYERKNNQLILENLKRINELSIEVIACGQVDQDFSEQYPSIHLFEPIFNLQKIRQLYAAADIFLIPSLIDNLPNTVLESLFCGTPVLGANVGGIPEMVIEGQTGWLFDPYSGDNLITILNHIYQQRQQLPQIRQQCFNWVQEHYSIEQQVQAYLQLFQTMITSSVKSIQSK

SEQ ID NO: 4396 - protein, 443 aa, Burkholderia mallei ATCC 23344
MQKIALISEHASPLGVIGGVDAGGQNIYVANVAKQLARLGVDVDVFTRCDNPHLPDVAHIGAGIRVIHVPAGPPSNVPKEALLPYMKAFSAFLIDWFRREPTPYDAMHANFFMSGDAALRVKARLGVPLVMTFHALGRVRRRHQGAADGFPDARFPIEDALAKRADRVIAECPQDAADLRALYRADPGRIEIVPCGFDEEEFRPVLRRAARARLGWRDDEFAVLQLGRLVPRKGIDNVIEALARVPRDAGARPARLYVVGGSDYEPAPSRCAELARLAGIAREAGVADRVTFVGRRDRDALHLYYGAADVFVTTPWYEPFGITPVEAMACATPVIGSDVGGIRTTVEHGVTGYLVAPRDPGALAARLDELRRDPERAQQLGWAGYRRAHRHYTWRGVAERLAAIYRDVAACARRGARAGTAAHVRRSPVAPSATVANQKENGS

SEQ ID NO: 4397 - protein, 390 aa, Erythrobacter sp. SD-21
MEAKDLRIALFSGNYNYTRDGCNQALNRLADYILRQGAALRVYAPVVENPDFPPTGDLVDVPNMRMPVKNRGEYRLTLGLGRDAKKDLEAFKPNLVHVSAPDPTGHAAVKWARENDIPILASVHTRFETYPRYYGLGFLEPAVEALLRRFYHRTDALVAPSQSQIDELKAQGMHEDISIWSRGVDREVFDPSRRDMEWRRANGLADGDVAIVFLGRLVMEKGLDVFADTVVELRKRQVPHKVLVIGDGPARDWFKKALPGGTFVGFQTGKDLGRALASGDIFFNPSITETFGNVTLEAMACGLPVVAAGATGAASLVHDGETGRLIPPSKTESFSKACAEALAAYCTDDDLRLAHGAAGEMAARAYSWDAINQAVVDTYLRLHDQRAAAS

SEQ ID NO: 4398 - protein, 354 aa, Zea mays
MDGEEVGRRGIPTLLKPSSSSSDGSAGEQEHIASDVTQLIGWTPLVELKRIASEAGIDARIVGKMEAYQPLCSIKDRSALRMIEDAEERGLISPGVTTLVEPTSGNMGLGLVLFAIQRGYRLIAVMPAKYSLDKQILLRFMGAELYLTDPALGFPGMFDKVEQLRKQLPNVHVLNQVTNKANSEAHFRLTGPEIWKDTAGKVDVFVAGSGTGGTVSGVGKYLKMQKPGVKIICVEPAESPVISGGAPGKHKIQGVGPGFLPEVLDTSVIDETVTVSTEEAMANARRLAREEGLLVGISSGANLAACLKLPWLKVASRQENKGKMIVTVFPSGGERYINSDLFADVREECIAMTF

SEQ ID NO: 4399 - protein, 288 aa, Shewanella oneidensis MR-1
MTIEACIGQTPLVRLQRLDCGSSTVLLKLEGNNPAGSVKDRAALNMINQAELRQEIAPGDTLIEATSGNTGIALAMAAAIKGYKMILIMPSNSTQERKDAMQAYGAELLLVDNMEAARDLALALQAEGKGKVLDQFNNQDNANAHFLTTGPEIWQQSQGKITHFVSSMGTTGTIMGVSKYLKSRNPDITIVGLQPADGSSIPGIRRWPQEYLPGIFDAARVDLMMDIEEQDAKAMARALAREEGICAGVSSGGAVYAALELARQYPGSVVVAIVCDRGDRYLSSGLFS

SEQ ID NO: 4400 - protein, 772 aa, Sinorhizobium meliloti 1021
MNTYERIDRDLSDRDFTVVGKSVKRSDTLEKVTGTARYAGDVALPGMLHAKMKRSNIAHARIRSIDTSKALALKGVKAVLTHEDVPRVLHAGSPHPRSASVTKDQYILDDRVRYWGEGVAAVAAVSEEIAERAVALIEVEYEPLPGLFTIEAASVPGAPPIHENGLDRNQVLPPVFVTRGDVDRGFAEADLILEREYDLGRPTPAYMEPNVCVSQWDGNGKLTMWTSTQSAFMVRGTLAEVLGVPLNKVRVIVDHMGGGFGAKQDLFQNEFLCALLARQTGRPVKMEFSRKETFLGGRSRHPGKIWLKQGFTKDGRIVAREARVTFNSGAYGSHGPGVTNVGTAALTSLYRCENVRLEGRCIYTNSPIAGAFRGYGVVQTYYALDLMMDEAAEKLGFDPAEFKLMNAVREGDIAPSGHPIVGHGLGDCIRRVMEETNWHELRRREKPETVKRRGIGIGCEMHGSSAYPGIKEQGNAIVKMNEDGTVTLITGTAGLGTGAHTALSQIVAEELGVPFEAVSVVQGDTDIVPWDIGAFASHTTYLGGRAAQLAAADVRRQVLEHAAPMLKAEPENLAIRDGFVVVTNGSNRSIRLSEAVGPQRGMPAVQLVGVGTYMPTKSYSFAAHFAEVEVDTETGEVAVLQVVPVHEIGRVIHPIAAAGQIEGGIQQGIGHTLSEDYVIDLTDGRSLNPSFVDYKMPLSMDMPSIRTIILETAPDPGGPYGAKGVGEDPIIAIGPAIANAIYDAIGVRFHHYPITPEQVLNALKSKANETRQ

SEQ ID NO: 4401 - protein, 270 aa, Brassica napus
MASLASTTTLISSSSVLLPSKPSPFSPAASFLRTLPSTSVSTSSSLRSCFSSISPLTCIRSSSRPSFAVKAQADDLPLVGNKAPDFEAEAVFDQEFIKVKLSEYIGKKYVILFLYPLDFTFVCPTEITAFSDRYEEFEKLNTEVLGVSVDSVFSHLAWVQTERKSGGLGDLNYPLVSDITKSISKSFGVLIPDQGIALRGLFIIDKKGVIQHSTINNLGIGRSVDETMRTLQALQYVQENPDEVCPAGWKPGEKSMKPDPKLSKEYFSAI

SEQ ID NO: 4402 - protein, 380 aa, Bacillus cereus ATCC 10987
MRVAIFTDTFTPQVNGVAKTLERLTRYFQKEKIAYSVFAPQHTAEDNFVANVNKMRSIPLTILYPECRFSFPTPRIKRELLSFKPDMIHIATPFNMGLCGLYYAKKLNIPVVGSYHTDFDAYLRYYKIEFLSNMLWNYLKWFHSHMQKNFVPSPETLHQLKHKGFQALSIWGRGVDCNLFHPAYNTDLFRKKYNITAKYVLSYIGRIAPEKDIDTLQNLIVKSTHTRNDIHWLIAGDGPLATSLREDVSKTNVTFTGYLQGVDLAEAYACSNLMVFPSTTETFGNVVLESLACGTPVIGANSGGVKNIITDGKTGVLCPPKNEDAFLSSIYSLLQSEEKLEQMGIAASSYAKSKSWDEIFRGLLNQYEEVLQHNESELLA

SEQ ID NO: 4403 - protein, 324 aa, Dechloromonas aromatica RCB
MSKWFADNSQSIGRTPLIKLNRVIDGAKATVLAKIEGRNPAYSVKCRIGAALINDAEKRGLLGPGKELVEPTSGNTGIALAFVAAAKGIPLTLTMPETMSIERRKLLTAFGAKLVLTEGAKGMSGAIAKAEEIAASDAKYVLLQQFKNPANPAIHELTTGPEIWDDTDGAIDILVSGVGTGGTITGVSRYIKNTKGKAIQSVAVEPTASPVLTQARAGEPIKPGPHKIQGIGAGFVPAVLDLSLLDAVEQVSNEDAVLYARRLAKEEGIISGISSGAAVAAAARLARIPENAGKTIVAILPDSGERYLSSILFEGLFNEAGLAA

SEQ ID NO: 4404 - protein, 217 aa, Parvularcula bermudensis HTCC2503
MGGMPRVIDDLNIAEGTGARIDEAAPLFEAQSTAGLVRLADYRGQWVMLFAHPADFTPVCTSEFVALARAQASFDRLGCALIGLSIDSVYAHLAWVERIEADFGVRPTFPLIEDPSLAIARAYGMIHPGASSTTVVRSVFVIDPAGIVRASSTYPMSVGRSVSELLRLVEALQVTDGGGGVAPEGWESGEPLLDPAPRTSDDLSGLNNSLWYAGGTK

SEQ ID NO: 4405 - protein, 152 aa, Ralstonia metallidurans CH34
MTSLTINGKTVEVDADPSTPLLWALRDNLGMTGTKFGCGMASCGACTVHINGTATRSCVMPISGTAGSKITTIEAMGDDKVGRAVLAAWLKHDVAQCGYCQNGQVMSAVGLLRSKPRPTDADIDQAMAGNVCRCGTYQRIRAAIKDAAHAIA

SEQ ID NO: 4406 - protein, 381 aa, Marinobacter sp. ELB17
MKIAIVRTDCSSQDITSYNSQELGLALGLAKLGNTVDIFLGSKERSGSSVISDRDPGVRIRYVGFCTIPIFDEPCYNQFLKPIFKEENYDLVQINEEGNFSSYLITRLCVSLGLPFVIYQGMYKILSGRKWHLYESIHDRFLRPSMKRGALTAFCKTTVSKRFLETRGYPRCTVLPVGLNFDVFDGCIETDWRAELGIGDTERVILYVGALENRRNPEFLVRLAERAPEGYVFVIVGDGPERVAVERASVDCGLKNIYILGKLPQTELPSIYRQSDVFVLPSNYEIYGMVVIEALFFGVPVVSTPTAGPADILTEYRLGTVIQDLNPDDWLDSIVGYCEQGNAESDRSWRAEKALQQFDWAAIACRYASEVDAALQEVPRP

SEQ ID NO: 4407 - protein, 197 aa, Solanum tuberosum
MRVISKLTLLIISIGCIFQVSSLGADASSLLPLILDQMIGSNPANTFLDPFKVLEQIPFGLENREETTLPLSIARVDWKETAEGHVISIDVPGLKKDDIKIEIEENRVLRVSGERKKEEEKNDEQNHWHCVERSYGKFWRQFRLPENADIDTMKAKLENGVLTISFAKLSADRIKGPKVVSIESKQEGKESSVREEL

SEQ ID NO: 4408 - protein, 377 aa, Synechococcus elongatus PCC 6301
MRIALFTETFLPKVDGIVTRLRHTVDHLQRLGHTVMVFCPDGGLREHKGARVYGVKGFPLPLYPELKLAFPLPKVGKALERFRPDLIHVVNPAVLGLGGIYYAKALNVPLVASYHTHLPKYLEHYGLGVLEGVLWELLKLAHNQAAINLCTSTAMVQELTDHGIEHCCLWQRGVDTETFRPDLATAAMRDRLSGGKPTAPLLLYVGRLSAEKQIDRLRPILDANPEACLALVGDGPHRAELEQLFAGTQTQFIGYLHGEQLGAAYASADAFVFPSRTETLGLVLLEAMAAGCPVVAANSGGIPDIVSDGINGFLFDPEDEQGAIAAIQRLLANPAEREILRQAARQEAERWSWNAATRQLQDYYCEVLADGCLPLAA

SEQ ID NO: 4409 - protein, 314 aa, Candidatus Kuenenia stuttgartiensis
MQVGILKDNDMPRKVRCNSILERIGNTPLIRINKITKELQKRNVEIYVKAEWFNPGGSVKDRPALRIVEDAEKSGKLGGDKILIDSTSGNTGIAYAFIGAVKGYEVNLVMPLNVSEERKRIVSAFGTKTIYTDPLLGSDGAMNEAKRLVNETPAKYFYGNQYNNPSNWMSHYETTGVEIWKQTEGNLTHFIACLGTSGTLMGTGKRLKKFNSNIQVISVEPDTSIHGLEGMKHMETSITPGIYNEDFPDRKMYVETEDAYKLVKRLAAEEGFFVGYSSGAALAASLKVADEIKNGMIVTIFPDRGDRYLSTSFW

SEQ ID NO: 4410 - protein, 1366 aa, Arabidopsis thaliana
MEQNEFMEAIMYVNGVRRVLPDGLAHMTLLEYLRDLGLTGTKLGCGEGGCGSCTVMVSSYDRESKTCVPSYTVHTGNFYCRHYAVNACLAPLYSVEGMHVISIEGVGHRKLGLHPLQESLASSHGSQCGFCTPGFVMSMYALLRSSKNSPSEEEIEECLAGNLCRCTGYRPIIDAFRVFAKSDDALYSGLSSLSLQDGSNICPSTGKPCSCGSKTTSEAATCNEDRFQSISYSDIDGAKYTDKELIFPPELLLRKLAPLKLGGNEGITWYRPVSLQNLLELKANFPDAKLLVGNTEVGIEMRLKRLQYPVLISAAQVPELNALNVNDNGIEVGSALRLSELLRLFRKVVKERPAHETSACKAFIEQLKWFAGTQIRNVACIGGNICTASPISDLNPLWMASRAEFRIINCNGDVRSIPAKDFFLGYRKVDMGSNEILLSVFLPWTRPLEYVKEFKQAHRRDDDIAIVNGGMRVFLEEKGQQLFVSDASIVYGGVAPLSLRARNTEELLIGKNWNKCLLQDALKVIQSDVLIKEGAPGGMVEFRKSLTLSFFFKFFLWVTHHVNNVNPTIETFPPSHMSAVQLVPRFSRIGKQDYETVKQGTSVGLPEVHLSARMQVTGEAEYTDDTPLPPCTLHAALVLSKVPHARILSVDDSAAKSSSGFVGLFLAKDVPGNNMIGPIVADEELFATDVVTCVGQVIGVLVADTHENAKTAARKVDVRYQELPAILSIKEAINAKSFHPNTERRLRKGDVELCFQSGQCDRIIEGEVQMGGQEHFYLEPNGSLVWTIDGGNEVHMISSTQAPQQHQKYVSHVLGLPMSKVVCKTKRLGGGFGGKETRSAFIAAAASVPSYLLNRPVKLILDRDVDMMITGHRHSFVGKYKVGFTNEGKILALDLEIYNNGGNSMDLSLSNLERAMFHSDNVYEIPHVRIVGNVCFTNFPSNTAFRGFGGPQGMLITENWIQRIAAELDKIPEEIKEMNFQVEGSITHYFQSLQHCTLHQLWKELKVSSNFLKTRREADEFNSHNRWKKRGVAMVPTKFGISFTTKFMNQAGALVHVYTDGTVLVTHGGVEMGQGLHTKVAQVAATAFNILLSSVFVSETSTDKVPNASPTAASASSDMYGAAVLDACEQIIARMEPVASKHNFNTFSELASACYFQRIDLSAHGFHIVPELEFDWVSGKGNAYRYYTYGAAFAEVEIDTLTGDFHTRKADIMLDLGYSLNPTIDIGQIEGAFVQGLGWVALEELKWGDAAHKWIKPGSLLTCGPGSYKIPSINDMPFQLNVSLLKGNPNAKAIHSSKAVGEPPFFLAASAFFAIKEAIKAARSEVGLTNWFPLETPATPERIRMACFDEFSAPFANSDFCPKLSV

SEQ ID NO: 4411 - protein, 452 aa, Physcomitrella patens subsp. patens
MSKKNAFSLWLSCVTIFLVLEQASVESADATQRVQRLPGQPPVRFEQYAGYVIVNEEKGRAIFYWFIEADHKKAATMPVSFWFNGGPGCSSIGAGAMSELGPFYNKNEPGESGLVRNKHAWNKASNIVFVDSPAGVGYSYSNTSADYNYLDDELTAVDALAFLVGWFAKFPEYQNNEVYLLGESYAGHYAPNLASKILIHNENLGKLDINLKGFLIGNPWTDSYYDNKGAVDFWYHHSLISDETYNEIQRSCDYRLEPAVGFSSSAACRNAANHASNLEMAEIDAYNIYAGNCNSASVNDSALVKRDSNFCGPDTTTPYLNLPEVKAALHARPGIKWTECSQYSVASVVESMLPVYRYLLTKGLKIWIYSGDIDGVVPTTGTRYWLRQLDLIVEVPWYPWNHSTQVGGWTQVYKGLTFVTVRDAGHMVPADKPSQALQVFRRFLIGKPLPSF

SEQ ID NO: 4412 - protein, 456 aa, Klebsiella pneumoniae subsp. pneumoniae MGH 78578
MSLFHSVSDLIGHTPLLQLHKLDTGPCSLFLKLENQNPGGSIKDRVALSMINEAERQGKLAPGGTIIEATAGNTGLGLALIAAQKNYRLILVVPDKMSREKIFHLRALGATVLLTRSDVNKGHPAYYQDYARRLADETPGAFYIDQFNNDANPLAHATSTAPELYQQLEGDIDAIVVGVGSGGTLGGLQAWFAEHSPKTEFILADPAGSILADQVDTGRYGETGSWLVEGIGEDFIPPLARLEGVHTAYRVSDREAFHTARQLLQVEGVLAGSSTGTLLSAALRYCRAQSRPKRVVTFACDSGNKYLSKMFNDDWMRQQGLIARPEQGDLSDFIALRHDEGATVTAAPDDTLAAVFTRMRLYDISQLPVLEDGRVVGIVDEWDLIRHVQGDRQRFSLPVSEAMSRHVETLDKHAPESELQAILDRGLVAVIADNARFLGLVTRSDVLTAWRNRVAQ

SEQ ID NO: 4413 - protein, 318 aa, Prosthecobacter debontii
MPVFSFASLPWRSYKLPPHVLGGAVVFQNSVLNPHSCTAMGNIYNNIVETVGKTPLVKLNKVTEGLDATIALKCEFFNPLGSVKDRIGMAMIEDAEARGILNKDTVIVEPTSGNTGIALAFVAAAKGYKLVLTMPETMSLERRTLLALLGADLVLTPGPQGMKGAIAKAEEILKETPNAWMPQQFENPANPAIHMKTTAEEIWADTDGQVDIFVAAVGTGGTLTGTCEVIKPRKPSFQAIAVEPEASPVINQTLAGEPVQPGPHKIQGTGAGFVPKNLHLKDKRPYPADHRVHQDQQCRRFRHGSPPSLKKKGFLVGI

SEQ ID NO: 4414 - protein, 149 aa, Prochlorococcus marinus str. MIT 9215
MQIGDKIPEFSLLDQNGVKRSNKGLKNPLVLFFYPKDDTPGCTIEVCGFRDKYDLFKVLGAQVWGVSNGSTSSHLAFANKNKLQYPLLCDTNDSLRKTFKVPKVLGFMDGRVTYVIDRKGTVRHIFRDLLNGPEHIKEAIRVLKEIQNQ

SEQ ID NO: 4415 - protein, 281 aa, Staphylococcus aureus subsp. aureus NCTC 8325
MKDRPAKYIIEHGIKHGLITENTHLIESTSGNLGIALAMIAKIKGLKLTCVVDPKISPTNLKIIKSYGANVEMVEEPDAHGGYLMTRIAKVQELLATIDDAYWINQYANELNWQSHYHGAGTEIVETIKQPIDYFVAPVSTTGSIMGMSRKIKEVHPNAQIVAVDAKGSVIFGDKPINRELPGIGASRVPEILNRSEINQVIHVDDYQSALGCRKLIDYEGIFAGGSTGSIIAAIEQLITSIEEGATIVTILPDRGDRYLDLVYSDTWLEKMKSRQGVKSE

SEQ ID NO: 4416 - protein, 192 aa, Zea mays
  misc_feature (89)..(89): Xaa can be any naturally occurring amino acid
QKLSSLKTNREFCSKSECNIQVWCILLSDKVPFRMHWPLHSDMQVNGIYVRVVNRQPTQKLGANGRDDGPLLTDYLKEGPNKISLYKKXDTRTILYWVSRIAKRRSIEQVLNLVPKEQDGENFDDTLARVRRCVGGGAEANNADSDSDIEVAADFVSGNLRCPMTASRIHIAGRFKSCAHMGCFDLEALIEI

SEQ ID NO: 4417 - protein, 171 aa, Zea mays
MASPDDPVLSACKKNLSHFRIKELKDVLHQLGLSKQGKKQDLVDRVMAVLLSQQDQGINEILANYRLLLPVSRKMQDPTNTVAVSRSHELGDSVTCKKKPDDSAQAVKVRCPCGDSKPNDSMIKCIDPQCNIWQHVGCVVIPDTEKSADNISPELPSCFYCEVCRLSRADP

SEQ ID NO: 4418 - protein, 341 aa, Lolium temulentum
MVVLAKPAALEQISLLRTPEPWETFSGVPAVDLSGPDAAGDVVRACEQFGFFSVVNHGVPAGVVDRLEAEAVRFFGSSPAVKDASAPAGADPFGYGSKRIGRNGDMGWLEYLLLAIDRDALSEKASRAATSTALRDAINEYVVAMRGLARTVLEMVADGLGVSPRGALADMVTGDASDQVFRLNHYPPCPLLQGLPPSCSVTGFGEHTDPQLVSILHSNGTAGLQVALHDGRWVSVPPNRDAFFVNVGDSLQVLTNGRLKSVRHRVVAGSGLKSRVSMIYFGGPPLAQRIAPLPQLLAGLPLYREFTWGEYKKAAYRSRLGDNRLAPFEEPPVAAGHHHWS

SEQ ID NO: 4419 - protein, 406 aa, Xanthobacter autotrophicus Py2
MRIAILSSGYLPVLDGVTVSVDARVQRLAARGHDVLLLAPRPADDLRRPAGLPDGVVFVGLPGTPFGAAAGDINPGPAAHAVIEQALAAFHPDLIHVDEPERLAWGIRRLPGLGFARRHGIPAVAFFHTNFVDYWGQGSRLAPLLDPFKAVGWRLVTVLYNRFDATLVPSAQTHRRLTGFGLRNGVCGRFNGADTARFSPALRAPGYWGRNWGLPGLDDRPVMLIAGRLTPDKGWSSWDKALPKLARRLGDNLGLVIAGDGALRPRVERLAATLPQAHVLGAVPHADLGALLANSDAYATFSRCENASLAICEALAGGVPVIAPRAGGIPGQVRHGENGLLFAPGDVVDFVNQMARLVEDKALAARLRGTLAAERGMLDWEPAFEAWLDAVSRIADAAGRGRRPPA

SEQ ID NO: 4420 - protein, 856 aa, Brachyspira hyodysenteriae
MGESAKIIINGKEMSFDSDRKLMDVLRNDCKCKSVKDGCSEGACGTCTVLIDGKPTKACIQTIGRLQGKSVQTIEGFTQREKDVYAHAFAVAGAVQCGFCIPGMVICAKGLIDQNPNPTRLEIVAAIKNNICRCTGYKKIIDAIELAAKMIRENIDVKEYKGKVKLGDRNIARVDAKEKALGIGEYCDDIELEGMLYGVAVRTKYPRAKILKIDISEAKALKGVVDVITAKDLPGAKKIGHIFHDWDVLIGEGETTRFIADGLALIVAEDEATAKKARDLVKIEYEELPLVRNPQEAMKEGAPLVHEERESNLLTHERLVKGNADEVIAKSKYKVTKHYELPWTEHAFMEAEVAVAMPFNGDGIFIYSSDQSVYDTKREVSMALGIEPDKVVVENKYVGGGFGGKEDMSVQHYAAIMAYRTKRPVKFKLTRQESINWHPKRHPMSIDMTTACDENGILTAMKATLITDAGAYASLSGPVLQRACTHAAGPYNYQVIDIEGKSFYTNNPPTGPFRGFGVPQSCFATEMNINLLAEMCGLDPWEIRYRNAIRPGQVLPNYQIADEATGLVETLEAVKDIYYNNKNVGIACSLKNSGVGVGLPDTGRVRLVVKDGKVNVYSAASCIGQGIATVLYQIVGETLDLNDDEIIINQPNTATSPDSGTTSGSRQTLITGEACKRACEDLKKDLAGKTLKDLEGKEYYGEWLTITDKMGVDKPHPVSHVAYSYATQVCILNDDGTINKIVAAHDIGKAINPIALEGQIEGGVVMSLGYALTEKFPLEDCIPKVKFGTLGLFRADKTPDVESIIIEKPGVPYGYGATGIGEISSIPTAPAVALAYYKFNGEFQTELPLKNTPYSR

SEQ ID NO: 4421 - protein, 194 aa, Prochlorococcus marinus str. MIT 9215
MSLRVGQEAPDFSATAVYDQEFKEITLSGLRGKWVVLFFYPLDFTFVCPTEITAFSDRYNDFSALNTEILGVSVDSKHCHLAWIQTPRNEGGIGDINYPLVSDLKREICQAYNVLNDDGEADRGLFLINPQGVVMHMTVNKAPVGRNVDETLRILQGYQYVAANPDEVCPANWTPGEKTMLEDPKGSKEYFSAL

SEQ ID NO: 4422 - protein, 373 aa, Methanococcoides burtonii DSM 6242
MKPIKLVYVADWNPLTGGAFTVLDNLINTILKYKYPIEIHVVSFGNKNETKHQKGYTIHLVKNCIFPTSQYWYSPKLLEKKIVEINPDLIHLHFTYPPYSFICRLPIPTVVTTHGLVSLRIKGAHSKRSQLSPFFILGPYFEKKALKKVGKVIAVSTYMKNEVEKLIGPNQKTVYIPNGINYEEYTNPDVINDITHPSIFCAGRFIKMKGIDVLIKALPIIKLSIPDIHLYIAGDGDQYKYLQSLTFKLDLQKNITFLNFIAKSKMIQMFASTDLVVVPSRYESFGMVALEALSSGSPVVASSVGGIPEMLDNGRYGMLVKPNDPKELAQQIIYIFNNSNIRKKMSYAGKQRSQDYLWDDIAKRTIEVYLSLL

SEQ ID NO: 4423 - protein, 322 aa, Shewanella sp. MR-7
MSKIFEDNSYTIGNTPLVRLNRVSQGKVLAKVEARNPSFSVKCRIGANMIWDAEKKGLLTKDHELIEPTSGNTGIALAYVAAARGYKLTLTMPNTMSLERRKLLKALGANLVLTEGAKGMKGAIDKAEEIRQSAPEKYIMLQQFNNPANPEIHEKTTGPEIWNDTDGAVDVFVAGVGTGGTITGVSRYLKKVAGKAITSVAVEPADSPVITQTLTGLPVQPGPHKIQGIGAGFIPGNLDLELIDRVETVTNDEAIDMARRLMQEEGILVGISSGAAVVAANRIAALPEFADKNIVVILPSAAERYLSSVLFQGQFGDEENIQ

SEQ ID NO: 4424 - protein, 952 aa, Oryza sativa Japonica Group
MEPVTNVGDIQENRTKLVCSLCKVMHGACIRCSHGACRACFHPICARESKHQMEIWGKTGNTNVEMRAFCLKHSTVQETISIQNDRICAEEDTSQIELDDASLATQKIQQLRLTRNNKDKFTSSMIASSCSSSLKQTTELATSPSTARSVESQETQITDMAVDRPIGDRCLVSNSGDVSTALRKLIDQGMVNVGDIESELGVSSESLEAALVPETSTFSPGLKLKIIKLLQNTIRVPSVQEKCSKEGSLALQGTVFTGESKSLTDTQICSELEEGISSFDHCCPEGDNTNKDWADSVENGFHNCGEDCISGKCFLNQDGSRCYVHPFIERKLRILWDHIFKQNKHPIHCHEQSTCDPHDRIAGSSSTKLEQLADIAVADQVSKAKSSGILEHSPHDEIEGELLHLQSRLLDDVGGAKQRYEDLVLKIVQSLSHDLDSFNKRKWDHIIANQFLRDLREAKKRGNTERRHKEAQAIMAAAARCILPTSRNAPVRKVAECDVLSAKQESVPVAVPAKQEVHSPKQESIPKFNTGSSRVSQLISVQQANDSSPNSKVSADANIGSFDLAKFSKKNALPCDICMRSETVLNRIFVCSSCKAAVHLDCYRSVTNPTGPWKCELCQEMPSDVVAGSQSDCDGSKPCLLQCDLCHGTSGAFRKTIKGRCIHAFCAEWLLESTFTRGQYNAVDGMESLPKDKDTCAICHRNVGSCLKCSTVDCQITFHPTCARDAGFYMDTKTIGSTLEHKAYCGKHGIEQRKADLLQLHGPEEVKNMKQMRVDLEVLRLICERVVKREKLKKDLVVCGHDTLAARRNSIAYSTRTSYCGSGPGASSESATTSVNNSYSGLMQRTDDVAVDSIISRKPTVRFSLNNSDADRNTADSSTSSISYKQKLDDRESLADKNLPKKPATAMQISEEGETKSSDKKNQRPPKSIVYTRRSALSKKRQLSQNVEGPGG

SEQ ID NO: 4425 - protein, 729 aa, Sulfolobus solfataricus P2
MYVGQRVKRKEDLKLITGSGRYIDDIEYPGTLYLYIVRSNVAHAKIKYIDVRDALKVNGVVGVITGLTIPFENRPNNWPMAKDEILYVGHPIAAILATDKYVAADAADLIQVDYEELPAVINPEKALKDDVKAIEGRSNIAYKKTYSSGDPEKALSNSDIVLEEKFEISRVYPSPMETRGLLSVYQEDSLLVYASTQSAHYMRRYLLSAFGNKVKDIRVIQADVGGAFGAKLFPYSEDFITVYASLQYRRPVKWVALRSEDIRGMYHGRGQIHKVKFGAKRDGTLTAIIDDAIIDLGAASHGTYLVDIAATMLPGPYKVRDLRVNAYGVYTNKTPLDQYRGAGRPEAAFVYERIMDIIADELKLDPIYVRKRNLITELPYVNPFGLKYDSGNYLKLLENAEKVYREFEKRANELRKQGRRVSAGLSFYLEQNNFGPWESASVRIKADGKVQVIIGASPHGQGAETGIAQIVADELGISVDDVEVIWGDTALIGEGFGTYGSRSLTLAGNAALLAARRVKDKVLRLAAQFMKSDVQELQYKDGKVINPKTGKTMSLKEVASRNMASLGGIWEYKEEPGLEATGYFGFDNLTYPYGSHVVLAEVDNSGKVKILDYYAIDDIGTVVNPMLAEAQVIGGVIQGFGESVLEEIVYDENGNLLTGNLFDYAIPTAVEAFNIKWEYMEEGKSNAPLPAKGIGEGATIGTPPALIRAIEKAIGKRLTRLPSRLEDLL

SEQ ID NO: 4426 - protein, 167 aa, Cyanothece sp. PCC 8801
MSNFPKIGEPAPNFAAKNQKGETVSLSDFNAQWLVLYFYPKDNTPGCTTEAIDFTHHQAEFDALGATIIGVSPDSEKSHCKFIEKHHLSLQLISDEDHQVAEAYGVWGLKKFMGKEYMGIIRSTFLIDPDGKVAETWTKVKVKNHVEGVLNKLQELKGNSQQTLGYP

SEQ ID NO: 4427 - protein, 153 aa, Anabaena variabilis ATCC 29413
MPVKVGDSAPDFTLPAQNGSSVSLSDFRGKKAVVLYFYPKDDTPGCTAESCAFRDRYEVFQTAGAEIIGVSGDSNESHQKFASKYNLPFTLLSDKGDQVRKLYGATAAFGLFPGRVTYVIDQQGVIKYVFDSMFNFQGHVEEALKTLQQLANK

SEQ ID NO: 4428 - protein, 324 aa, Crocosphaera watsonii WH 8501
MDIKEGFVGTVGNTPLIRLKSFSEETGCNILGKAEFLNPGGSVKDRAALYIIKNAEEKGLLKPGGTVVEGTAGNTGIGLAHICNAKGYKCLIIIPETQSQEKIDLLRTLGAEVRTVPAVPYKDPNNYVKVSGRLAEELDNAIWANQFDNLANRQAHYETTGPEIWQQTNGKVDGWVSATGTGGTYAGGALFFKEKNPNIKCIVADPMGSGLYSYVKTGEIKPEGSSITEGIGNSRITANMQDVPIDDAIQIDDHEALRIVYQLLSQDGLFMGGSVGINVGAAVALAKEMGPGHNIVTILCDGGARYQSRLYNQEWLASKGLSLG

SEQ ID NO: 4429 - protein, 87 aa, Cryptococcus bacillisporus
VCPTEILAFNKALDQFAAIGAEVICVSTDSEFTHLAWSQTQRSEGGLGPDLRLTLLADRNHAAAKAYGVLLPEEGVALRGTFFIDPK

SEQ ID NO: 4430 - protein, 219 aa, Sinorhizobium meliloti 1021
MSLRINDTAPDFTAETTQGTINFHEWIGDGWAVLFSHPKNFTPVCTTELGAMAGIEPEFRKRGVKIIGISVDPVESHSKWKNDIKVATGFEVDYPLIGDRDLKVAKLYDMLPAGAGETSEGRTPADNATVRSVYVIGPDKKIKLILTYPMTTGRNFNEILRAIDSIQLTAKHQVATPANWQQGEDVIITAAVSNEDAVQRFGSFDTVLPYLRKTKQPTA

SEQ ID NO: 4431 - protein, 374 aa, Coprinopsis cinerea okayama7#130
MTAAILDNALGAVGHTPLIRLDKIAKAYDLKCNLLGKVEYMSAGGSVKDRIAKAMVEAAEREGKLIPGKSVVIEPTSGNTDKGYSVIITLPNKMSLEKEALLRALGAEVIRTPTEAAWDAPESHIGVAQRLQREIPHAIILDQYKNVNNPLAHEYTTGPEIVAAVEATPSTSAHPSSGKVDVIVAGAGTGGTVTGLSRAIKKKHNKECIVVAADPKGSVLALPNNLNDEDAGAMYVVEGIGYDFVPDVLTRDPTEIDYWLKTGDEESFDAVQQLMRKEGLLVGGSSGSALSGALRWLKSDAGRPIAETEGKNVVVLLPDGIRNYMSKPWFLKIAMEAEPSPLAGTIAQILKKPEASKTPSAPTIAQSPSSQTSH

SEQ ID NO: 4432 - protein, 158 aa, Methanosarcina barkeri str. Fusaro
MSGIKIGDKIQDFRLRDHKQKEVHLYDFAGKKVLLSFHPLAWTSVCAEQMKSLEENYEMFTRLNTVAFGISVDPIPSKRAWAKELGITHIKLLSDFWPHGEVARSYGIFREKEGVSQRANIIIDEEQKVIFFEEYPMHELPDITKIAKILKQGSKVQL

SEQ ID NO: 4433 - protein, 178 aa, Crocosphaera watsonii WH 8501
MLRRQILAIFLAIAVILFGTQTPALALGGPQPPLNEPAPNFTLPTNTGDGEISLSDYRGQWVVLYFYPKDFTPGCTLEARRFQQDLPKYEAINTQILGVSVDDVDSHREFCDAEGLKFPLLADTTGEVSKTYGSLLTGISLRHTYLINPDGILKERFLGVRPAIHSQEILAYLDEVKS

SEQ ID NO: 4434 - protein, 189 aa, Staphylococcus epidermidis ATCC 12228
MSLINKEILPFTAQAYDPKKDEFKEVTQEDFKGSWNVVCFYPADFSFVCPTELEDLQNQYAKLQELGVNVYSVSTDTHFVHKAWHDHSDAISKLEYSMIGDPSQTITRNFDVLDEESGLAQRGTFIIDPDGVVQAAEINADGIGRDASTLVNKIKAAQYVRQHPGEVCPAKWEEGSESLQPGLDLVGKI

SEQ ID NO: 4435 - protein, 229 aa, Magnetospirillum magnetotacticum MS-1
MSQDKRDVLRAYGARVVVTPTAVAPDHPDSYYSVSDRLVREIPGAWKPNQYANPNGPASHYESTGPEVWADTDGRVTHFVAGVGTGGTITGTGRYLKEVSADRADSDGGRVRVVGADPAGSVYSGGDGRPYLVEGVGEDFWPAAYDPAVPDEVIPVSDADSFAMTRRLAREEGLLVGGSCGMAVEATLRLARRLEEEDPEAAARAVIVVLLPDSGRGYLSKIFNDDVDV

SEQ ID NO: 4436 - protein, 644 aa, Magnetospirillum magnetotacticum MS-1
DVFHVGQPVAMVVAVDRYTAEDAATLVWVEYDPLPVELDLERAVADGAPLVHAGHPNNVAADFRQICGDPATAFVQAEHVTRIRVQVDRSTAAPMECRAVAAVHDPVTGELTVWDGTQAPISVRGALASILGIDEDKVRVIAPDVGGGFGQKVYQFYPDELLVPMAARQLGRPVKYIEDRRENFIGSSQERTQIHEIELFARKDGTILGLRDVFLHDTGAFIPYGIAIPQVASTSIAGPYRIPNIDVAFRCVYTPTVPVTPYRGCGRPQANFAIERAIDQLADELGLDRFEVRRRNLVADHEFPVLREGLLFADGLPVSLDSGQYHRALAMLEDRLGVAAFRAEQERARAQGRYLGLGLAFYVEGTGLGPYEGGHVRIQPITGKVYVNTGLTSQGQGHDTVFAQIVADQLGVAVEDVIVVEGDTKAYDWGVATFASRAAVVSGNAIHQSAAIVRAKTIEAAANMLEVDREDIDLRDGAAWARGTNRSVSLAAIATATNPLRYAFNEAAKAATQFAPASRHDGPALRPGEHPGLEATDYYSPPCATWAYGVHGGLFEVDPETCAVKVLRYVCVHDCGTMINPTIVEGQVMGGIAQGFGGALYERIEFDAEGNPVNANFVDFLVPYATECRRWRSCISNPLTPHRY

SEQ ID NO: 4437 - protein, 391 aa, Pediococcus pentosaceus ATCC 25745
MNIGLFTDTYFPQVSGVATSIKTLRDQLEKQGHQVYIFTTTDPKVDTNVYERNIFRFTSVPFVSFTDRRIAVSGFIRAAQLAKELNLDIVHTQTEFSLGWMGKFVAKSLKIPLIHTYHTMYEDYLHYVANGKLLKPYHVKQMTRAFCYHIDGIVAPSERVLDTIEGYGINVPIRVIPTGVNLEQYQKPNKRKQWREKLGYDESSPILLSLSRLAYEKNIQEVIDSFPAILKEVPNAQLLIVGDGPARTSLENQVHDLHLEDSVQFTGEINNDHVYGFYQLADLFVSASDTESQGLTYIEALASNLKVVAKSGPYTDELLDDISLGKVFNTEDQLVAAIKDYIEHPDAYNDPAPREKKLYEISADYFGKQVVDYYSSAISTHTDLELDEDSE

SEQ ID NO: 4438 - protein, 835 aa, Nocardioides sp. JS614
MSTTQERPADAVEREIGRDRRRKEDQRLITGRTRWTDNMTLPGMVHLAMVRSPFAHARIVAIDTAAAKQSPNVVDVLTGADLGESLGVNINAWPITPDQVTPTHSPMPSDRVAFAGEIVAVVVARSAAEARDAAELVDVEYDELPAALDLKEAAAASSEQGVLAHPDLGTNKSAYWVFDSGEAGTGGSVEDAIAKARTDGIVIEREYRQQRLIPAFMEPRSTVVDPTGEQLTMWTATQIPHILRFALAATTGVPESKIRVIAPDVGGGFGGKLQTTPEEWITWAVARRLGKPAKYTETRSESLMSGHHGRDQWQKLTLAAEKDGTVTGFKVDLLADLGAYVSLVGGGVPVLGAFMFNSIYKFPAYRFAVQTVLTNKTWTDAYRGAGRPEATYAIERMMNELAAEVGVDPLEIREKNWIKHEEFPFTTVAGLEYDSGNYEAATARAKEMLGYDELRAEQRRRREAGDPVQLGIGVSTFTEMCGLAPSRVLGQLDYGAGGWEHASVRMLATGKVEVVTGTSAHGQGHETAFSQIVADRLGVAFEDVEVLHGDTQVAPKGLDTYGSRSLVVGGEAIVRAADKVIEKAKPIAAHLLEASVDDVEFSGGRFSVRGTDQGMGIGEVALATFAAHNLPDGVEASLDSDATYDPVAFNFPHGTHLCAVEVDTETGALKLRKYVCCDDIGTIINPLIVSGQVHGGLVQGIAQALWEEAVYDDAGTLVSGSFVDYLLPTAADTISFEIDHTTSPSTTNSLGTKGVGEAGTIASTPAVVNAVVDAVRHLGINDIQMPCTPERVWKAITGAGAGGSTEGAAMPHFESGGASGNQEQPGTSSTEGAGA

SEQ ID NO: 4439 - protein, 390 aa, Micromonospora inyonensis
MGGMHVLGHAIVTEMGRRGFPQRVLTMAPPGVPKDLQIAPNVTVHARRLPVLPIPSKLEGYFGLVGAWAKASLLYVVRNKEQLKREIGIVHAHCDGSGSAPAYAYAAAQVLDVPIVSHIYSCRSLTQHPTTVFERVADPVAKSAEKYVIQHSGAVLTLSDKVRERIRDELHVPDDRVHRLAHLVTDNFVGHDTPERREELRQRFGLTDDKPTVLYVGRISSEKGVDWFVKAAAEIAKRRDCRFLIAGDGPQRGDIEALARQLGVADKLVITGFLLPEYIPSIISLSTLAVLPSQYEELGVVVLEYMMMKRPVVAHDVSGVHKLVEHMKTGVLVPPFDPPKLADAIEMVLDDPDLARRLADAAEPIPQREYSLASAGERLEAIYLSLMEES

SEQ ID NO: 4440 - protein, 156 aa, Nocardioides sp. JS614
MTRISLTVDGARVSDDVEPRMLLVQYLRERLGKTGTVIGCDTSNCGACTVHLDGISVKSCNVLAVQADGTEVTTIEGLATDGQLHPVQEAFRECHGLQCGFCTPGMIMQSVDLLNNNPKPTEEEIRLGLEGNLCRCTGYHNIVRAVQQASGQGAPA

SEQ ID NO: 4441 - protein, 373 aa, Gloeobacter violaceus PCC 7421
MKNVGICRMVFPCVSETFIVEQASHLRRYHPTFVVARLLREVPFDNVKLTAASLWGWQERLFWLTRQAGGRARHEALRRLPLLHAHFGRDGVYALALAEAIDIPLVVTYHGFDATASPLALWCSRGLMNYQFLLHEAALQRRAAAIIAVSDFIRERLLAKGCPPEKIIRHYIGIDTAKFTPAERPADERYILCVGRHAKRKGIDVLIEAFARIAARHPEVALVQIGAGALTGELQALARRLGVAGRVRFLGAQPHARVIEWMRGAEIFSLPSRTSRSGDSEALGIVFNEASACAVPVVSTRHGGIPEAILDGETGLLAPEGDAVALAEKLDILLADRGLGRRLGLRGREFVCEQFDIDTQTAKLEAVYDRFAA

SEQ ID NO: 4442 - protein, 331 aa, Synechocystis sp. PCC 6803
MGFFVVRCRQISLLGGPLPMKIASNITELIGRTPLVRLNRIPLLEGCGAKIVVKLEGMNPAASVKDRIGINMINRAEQEGLIEPGKTLLIEPTSGNTGIALAMVAAAKGYQLILTMPETMSQERRAMLKAYGAKLELTPGSEGMGGCIRRAQELAESLPNAYMLQQFDNPANPQIHQQTTALEIWQDTDGAIDFLVAGVGTGGTITGVASVLKEKKPSFQAIAVEPQNSPVLSGGKPGPHKIQGIGAGFIPEVLDVNLIDEVIAVTDEEAIAYGRRLAREEGILSGISTGAALAAAIKVAKRPANKDKLIVMIQPSFGERYLSTPLFQDLE

SEQ ID NO: 4443 - protein, 370 aa, Treponema denticola ATCC 35405
MKIGVDAFGCDHGRSGIGSYILSIVKNLPKNDYEFELFGPELDKYTYTSDIDYVSFTGIDISDTKFSEKIWHFKNLNSFIKKQRYDAVIYPAGVELLPPIFTVPSILVIQSLLSADLGTIAKMGLRRTLKNASGLISPTKYIQNDLSQFGVNASDIKVIYNGIDCSLFKPITNDEDRVLIQPFAIQRPYIIYASRITHEQKCHVELIKAFALFKKQTGSPHRLVIAGSDGNNSEAVHNAVIQSGFSSDILLTGYFPHESLPQLYSSADLCVFPSMIEGVGLPVIEAMACGVPVACARAGALPEVAGDSALFFNSKKPEEIAEAISSLVDCDKNTAKRKEIIEKGLDWVKKYNWETTAHQTIEYIDSLLKK

SEQ ID NO: 4444 - protein, 238 aa, Thermoplasma acidophilum DSM 1728
MSGENMPDENKFPLIGEKFPEMTVETTHGSMKLPDQYKGRWFMLFSHPGDFTPVCTTEFYSFARRFEDFQKINTDLIGLSVDSTISHIEWVNWIRDNLKIEVPFPIIGDSMGRVATRLGMIQAESSTSTVRAVFIVDPNSTVRLIMYYPLEIGRNVDELLRAIKALQMSDKYRGAMPANWPYNELIGEKMLNPAPKNVKDATGRLKEFKGYAWWLTYKDVPDNEVQETKKIVKMREEK

SEQ ID NO: 4445 - protein, 388 aa, Bradyrhizobium japonicum USDA 110
MGPLTNKTPGRHFCDVTRLKYPWLMVQSRESSNSRDFPMRVLIATDAWHPQVNGVVRTLTSLAGAAKALDVEIDFLTPEGFPSWPLPTYPGLRIALPSAKEIARRIEKAAPEALHIATEGPIGWAARAYCRRNRLAFTTSYTTRFPEYVSVRTGIPASVGYAVLRHFHDAAAMTMVATPSLRQELSERGFKRLGFWTRGVNTELFHPDAPAKLDLPRPIFMTMGRVAVEKNLEAFLALDLPGTKVVVGDGPQKAALEKKYPDAVFLGEKKGADLTAHLAAADVFVFPSLTDTFGVVQLEALACGTPVAAFPVTGPKDVIADHPIGAIDHDLRTACLRALTMSRKTCRNFALERSWENSARQFVGNLTSLQPSRALRASPVMARRPVRG

SEQ ID NO: 4446 - protein, 170 aa, Solibacter usitatus Ellin6076
MHTGLLRTLILSVALGARIAAAAEAPQVGQAAPGFSLPSQEGSTVSLKQFQGKWVVLYFYPKDMTQGCTIEAHNFQQDLAKYDKANAVIVGVSVDSTDSHKEFCTKESLTFKLLSDTDKKVVDQYGSLSPRGVASRNTFLIDPSGKISKVWIGVSPAKHSEEVLAALGSK

SEQ ID NO: 4447 - protein, 162 aa, Bradyrhizobium sp. BTAi1
MQISFTLNGRPTTVDVAPATLVSDLLREQLSLTGTHVGCDTSQCGACVVHLDGAPVKSCTLLAPSLDGATLLTIEGLGATAGSNGLHPMQEAFREHHGLQCGFCTPGMVMTATALAAANPAPTEAEVRRGLEGNICRCTGYQNIVIAVMAGAAAMHATSAGE

SEQ ID NO: 4448 - protein, 296 aa, Azoarcus sp. EbN1
MDYKTLEDYVGHTPLVRLKRIGAGRNNVILAKLEGNNPAGSVKDRPALSMIVQAEARGEIRPGDTLIEATSGNTGIALAMAAAMRGYQMILVMPENQSVERRQTMRAFGAELVLTPRDGGMEMARDVAERMRDEGRGIILDQFANPDNPLSHYEATGPEIWEQTDGRITHFVSSMGTTGTIMGCSRFLKERNPAVRIIGCQPDEGSQIPGIRKWPEAYLPKIYEKPRVDALENVSQADAEEMTRRLAREEGIFAGISSGGAMHVAVRIAAELENAVIVSIICDRGDRYLSTGVFPG

SEQ ID NO: 4449 - protein, 795 aa, Bradyrhizobium sp. BTAi1
MGQVIGIGAAPKRKEDQRFLTGRGNYVSDIKRPGMTAGVFIRSPHAHAVLRGIDKSAALAAPGVVAVLTGEDVAADGLGSLPCGWGISDAKGVPMKEPPFPMLAQGKVRFVGDMVAFVIAETLEQAKSAAELVNVNYEVLPSVVGVLDAVRPDAPQLFDDVPNNVCCDWELGDKAAVEAAFRKAAHVAKLSLVNNRLIGNPMEPRAAIAEYDPGKGHHTLWTTSQFPHVVRFLMSALVLKLPEHKVRVVAPDVGGGFGVKQFHYGEEAVVTWAAKRVLRPVKWVADRSEGYLSDRHGRDHVTEAELALDENGKFLALRVKTLANMGGYLSTFGPNIPTNLYAPLLGGVYTTPAIYCNVKVVFTNTVPVDAYRGAGRPEATFVVERIVDVAAAEMGIDRVELRRRNMIPKEAYPYQTPVLVQYDSGDPMGCLDGALVAADVKNFGVRKAESARNGKFRGLGFSTYVEACGLAPSRFAGRLGARGGLYESATVRVHPAGQVTVMIGTHNHGQGHETTFAQIVCEKLGVPFENVDIVFGDTDRVQFGMGTYGSRSLVVGGAALSKAADKVIVKGKKIAAHLLEASEQDIHFEAGKFSVAGTDRVKTIEEIAGAAYVPHNYPLEILEPGLEEQAYYDPVNFTYPGGCHIAEVEIDPETGIVTLVNYTAVDDVGTVINPMIVEGQLHGGIVQGVGQALYENAVYDESSGQLVSGSLMDYCVPRADHLPMMKVATHSTLCTHTPMGVKGCGEVGTIGSPAAVINAVVDALAHLGVTHVDMPATPNRIWRLLQNASLPVAAE

SEQ ID NO: 4450 - protein, 711 aa, Brachyspira hyodysenteriae
METLIKELKNSVSRVDALDKITGKTKYLNDIDFGKEVLHAKIVHSTKARAKILKINIPELPEGYSVIDYKDVPGKNAATMIISDWRPFADDNVRYIGETILLIVGPDKNVVYDIAEKVTIEYEDLEPVLNIEDSKKLLGGPIYGDDNIFISFKAGYGDVDEAFKKAKTIIEETYHTPYQEHLYMEVNGTVGVWENDGVTLYSSTQCPYYVQKAVAPVLGVEDSKVRVISPTIGGGFGGKEHYPDILSAAVAVAVHKLKKTVKLILDRQFDLAYSVKRQPAQITTKIALDENNNIIALDVVSDMDAGAYESSSRVIMQRCTYTAANVYHFPNVRVLGRLYCTNNVPSCAFRGFGGPQAIFAIERTMDNIANKINVDPIELKRKYFVKQNDPTITGGIFHDNIILPKMLDLALKESDYENKVKKYKDDMYRGIGISCFLHGCAFTGSGERDIIKAKLKLKKKRNKVTILTSNTEIGQGLHTTFRKIAAYNLQIPLEDVDISVYDTNIIPNTGPTVASRSVMIVGYLIQEACKKLKDKWNESEEIEIIEEYKHPSHLVDWDSTNLRGDAYPTYGLGINVVEVEIDKFTLEVKIVGVWAVFDCGYPIDEKIVEGQIKGGVSQALGWGALENIVNKDGRFLQVKMSDYMIPTSLDLPEIKTYIMGEPYQYGPSGAKGIGEITFDGAASAYASAMENALKHHFTKIPILPENIAEVI

SEQ ID NO: 4451 - protein, 186 aa, Sedum lineare
QTLQTSSQSQFHGLKFSHASSFKSPSAPLRKNSIFAKVTKGSTPPPFTLKDQEGRPVSLSKFKGKPVVVYFYPADETPGCTKQACAFRDSYEKFKKAGAEVVGISGDSSESHKAFAKKYKLPFTLLSDEGNKVRKEWGVPSDLFGTLPGRETYVLDKNGVVQLVYNNQFQPEKHIDETLKLLQSLK

SEQ ID NO: 4452 - protein, 196 aa, Hyacinthus orientalis
ELPLVGNSAPGFEAEAVFDQEFIKVKLSEYIGKKYVILFFYPLDFTFVCPTEITAFSDRYSEFEKVNTEVLGVSVDSVFSHLAWVQTDRKSGGLGDLNYPLVSDVTKSISKSYGVLIPDQGIALRGLFIIDKEGVIQHSTINNLGIGRSVDETMRTLQALQYVQENPDEVCPAGWKPGEKSMKPDPKRSKEYFASI

SEQ ID NO: 4453 - protein, 180 aa, Clavibacter michiganensis subsp. sepedonicus
MPGVVWLLVPDRGHLSARKDPHPMALANDTQAPDFELANQFGERVRLSEYRGHRAVALVFFPLAFSGTCTGEMCQLEENLGLFADSRVELIGISVDSKHTLRAWAEQQGIDFQLLADFWPHGQVAKEYGVFLEGKGFANRATFLIDTRGIIRGSFITAPGEARELEAYRTAIRDLALVPA

SEQ ID NO: 4454 - protein, 162 aa, Brachyspira hyodysenteriae
MPIKFKVNGNEINTKLDPLTRLIDFIRDELKLTGTKEGCGEGECGACAVLMNGKVVNSCLIPIILCDGKEIITIEGYTETERGKIVTKAFMDEGAVQCGFCTPGMIMSSEAILNSTKGKPTEYEVRKGLSGNLCRCTGYDHIVSAVLRASDMAFKEGKNLWQ

SEQ ID NO: 4455 - protein, 357 aa, Rhodospirillum rubrum ATCC 11170
MRILVVTDAWFPQVNGVVRTLDTLKARLEERGHDLIYVTPQSFRTIPCPTYSEIRLAVLPGRTMARAIETFQPCVIHIATEGPLGLSARRYCLKRGVPFTTAFHTKFPEYLHARFRVPVSWGYKGMRWFHGPSKTIMVATQGIEDELLRWGFSHIRRWTRGVDTELFRPRPKDSLDGVITGPRPWFVYVGRVAVEKNIGAFLDLDLPGTKIVVGGGPQLESLRARHPKVHFAGERLGEELATYFSVGDAFVFPSRTDTFGLVLLEALASGLPVAAYPVPGPLDVIGDAPVGALDEDLKAAALRALTIDPAACRAFAQARSWETSVDQFLANVHPFPPADFFPSDTAPLETAMERGAP

SEQ ID NO: 4456 - protein, 395 aa, Anabaena variabilis ATCC 29413
MNRIYYQKSPLKVLMLGASLDVQGGITSVEKLIIENVRPELQITHVATFAPGSGRHNIFVFLQSIKILIQNLIQRKTDLVHIHFAERGSTFRKLILVLIILSFRQPFILHAHGATYQEFFADLPKILQKIISNLFRRCSQFIALSESWKSYYLETFNLDKNQISVLHNPVKMPTFIPVRRQKQSVKFVFLGRIGKRGGALDVAKSVMKFPQQDKGAFDLIKAFAALPEESKKSAELVLAGNGDLDKAQQLIQELGLEAQVKISAWLNPEQRDALIASADVFVLPSYNEGLPMSMLEAMSWGLPVIVTPVGGIPEVINHNQNGILVQPGNQQQLVQAMQQLINDEDMRIALGNAARHSVEYFDVKHYINSLSETYFSAVQCSNYLVNSTTEMESKY

SEQ ID NO: 4457 - protein, 300 aa, Pseudomonas syringae pv. tomato str. DC3000
MTLQYQTIADCVGNTPLVRLQRMMGTTSNTILLKLEGNNPAGSVKDRPALSMITRAELRGQIVPGDTLIEATSGNTGIALAMAAAIKGYRMILIMPDNSSAERKAAMTAYGAELILVSKDEGMEGARDLADRMQAEGRGKVLDQFANGDNPEAHYTSTGPEIWQQTAGTVTHFVSSMGTTGTIMGTSRYLKEQNPDVQIVGLQPMEGASIPGIRRWPYEYLPKIYQSDRVDRIIDMGQTEAEETMRRLAREEGIFCGVSSGGSVAGALRIAREVENATIVAIICDRGDRYLSTGIYDMPN

SEQ ID NO: 4458 - protein, 288 aa, Azoarcus sp. EbN1
MTPIEQYLAPATLDEAVGILQQGEVTILAGGTDVMPQSKAGRLAIKRTLMNIRRIPELKGIALDNDAIRIGALTTITEILNDPLVKEYLPVLAEACDHFASDQIRNAGTLGGNIGNASPAGDTLVPLIVLDAEVELASKPNGSVTTRRMPLAEFFTGPGKTKRAANELLTAVRIPLPKPGHVARFFKFGTRPALDISAISIGIAGVIDNGVISQARVAFGAVAPTPIRAARTEEALEGRRLDEATIEAVASAARDEVNPIDDVRATAWYRKELIHNMTKRMLDHVAQA

SEQ ID NO: 4459 - protein, 215 aa, Zea mays
  misc_feature (182)..(182): Xaa can be any naturally occurring amino acid
GYKNRFQNFIKYLREMGDEVIVVTTHEGVPQEFHGAKLIGSWRVSFPCPWYQKVPLSLALSPRIIAEVARFKPDIIHASSPGIMVFGALIIAKLLCVPLVMSYHTHVPIYIPRYTFSWLVKPMWLIIKFLHRAADLTLVPSVAIGRDLQAARVTAANKIRLWNKGVDSESFHPRFRNMEMRXRLTNGEPEKPLVFYVGRLGVEKSLDFLKRVMDR

SEQ ID NO: 4460 - protein, 876 aa, Zea mays; identical to SEQ ID NO: 1856

SEQ ID NO: 4461 - protein, 157 aa, Azoarcus sp. EbN1
MSLKHDIGFTLNGVKKRVTVDVGMTALDMLRDVVGLTGTKYGCGEGECGACTIQVDGLSMNSCLMFAVDCDGRSLVTIEGLAADPRADALREAFVEHGAVQCGFCTPGMVVQAAHILATHPDADAETIKRGIEGNLCRCTGYKKIVDAIESACCGGK

SEQ ID NO: 4462 - protein, 182 aa, Ralstonia metallidurans CH34
MKTVGDKLEAFHVVGVKPGFNNHEENGQSAFEDITEKSFEGKWKVIYFYPKDFTFVCPTEIVAFAKLNGDFADRDAIVLGGSTDNEFVKLAWRREHKDLNKLNQWQFADVTGSLVDQLGVRDQAAGVALRATFIVDPDNTIQHVSVNNLNVGRNPEEVLRILDGLQTDELCPCNRAVGGATL

SEQ ID NO: 4463 - protein, 380 aa, Exiguobacterium sibiricum 255-15
MKKAIGILCYPSVGGSGVVATELGMKLADRGHDVHFITSSIPFRLTEYRPNITVHLVEVNQYSVFKYPPYDITLASKVAEVIDLFDLDIIHAHYAVPHAVCAELGRNMAKKKGVGVVTTLHGTDITVIGQDLEMQPAIRYGIESSDAVTAVSESLALETNITLNGQYAIEVIPNSIDESMYYPMRDERLKRHYGIEPDEIVVIHISNFRPVKRIDDTIAAFAIASKDRAMRLLLVGDGPEMGQTRRRAKELGIYDKIIFAGKQEHVAQLLAISDIHLLLSEKEAFGLVVLEAMAVGVPSVVSSAGGLPEVIQDGKTGFIVPTYDVKTAADRIGKLADDAALREELAEEGIRDTRRRFDSNQVVRAYELLYERVCAQYENA

SEQ ID NO: 4464 - protein, 803 aa, Azoarcus sp. EbN1
MNVAEKTHFIEADTLIGKRIQKKDAPEKAAGKTRYIQDMVLPGQLHAKILRSARVHARIVSIDTSAAKALPGVHVVLTAADVPDQQPIGVARDHLPLKGERVRSLRDEIAAVAADSEEIAEAALKLIRVEYEDLPIISDPQDALKPGAPLIHPEPHGPDGKHLHLKPNAPIAFAGKPDNIAMQFDYTHGDIAQAEAESDVVFEDTFKLHYVTHCCMGVSGIIAEFDASGNLLMYSNTQVPFLHKREFAEYLHMDPSRIRIIQPPIGGGFGSKLDIYPFEVICIFLARAAQRPVKMVFSREEEFLASPTRQPVLLTLRSGCKKDGTLTFRQVHTLHDNGAYTSWGATTPFVMMQTFSSLYRVPACDYHTTAVYTNNPYAGSFRGYGNLQATFAIEQHMDMLAEAIQMDPLEFRLKNAQDAGEVTGQGMVFKSCGFKECLTTAAERSDYQAKHRDNIAHRGDAGPIKRGIGIASMLHVGGGAKIYPSDGCGTILKLDDFANVTLITGASEIGQGSETVLSQLVCEELGLPISAVTVVNNDTAITPWDVGVHASRTTFIAGNSAIGAAKKAKAKILAAAAKKHGCDETSLDLRGGFVIHADTGEPVVELARLMRNLHFSDKAELVMTTFYYEPPSVHQDKGFKGDVSAAYAWATQVVEVEVDTDTGIVKMTKVTGAHDVGRVLNRLGIEGQIEGGVVMGQGYALTENLIVDNGVTRNPNFRDYKLVTAPEIPEMDISFIESMDGEGPQGAKGVGEAPSICIAAAAANAIYNATGVRIFALPFTPEAVYRALRGKTPKPHWQAWRPA

SEQ ID NO: 4465 - protein, 261 aa, Aspergillus nidulans FGSC A4
MASFFSRTTFRTLNTLFKATPCSKTPITAPLAQPLARRFIGTLPREQPRLRLGSTAPNFEALTTQGKIDFHQWMDGCWTILFSHPADFTPVCTTELGAFAKLKGEFAKRGVKMIGLSANDLGSHGDWIKDINEVTGSDVQFPIIADADRKVAWLYDMIDESELANLAEKGIAFTIRSVFIIDPAKKIRLVMSYPASTGRNTAEVLRVIDSLQTADKKGIATPIDWQVGDDVIVPPSVSTEDAKKKFGEVRELKPYLRYTKY

SEQ ID NO: 4466 - protein, 341 aa, Arabidopsis thaliana
MVVLPQPVTLDNHISLIPTYKPVPVLTSHSIPVVNLADPEAKTRIVKACEEFGFFKVVNHGVRPELMTRLEQEAIGFFGLPQSLKNRAGPPEPYGYGNKRIGPNGDVGWIEYLLLNANPQLSSPKTSAVFRQTPQIFRESVEEYMKEIKEVSYKVLEMVAEELGIEPRDTLSKMLRDEKSDSCLRLNHYPAAEEEAEKMVKVGFGEHTDPQIISVLRSNNTAGLQICVKDGSWVAVPPDHSSFFINVGDALQVMTNGRFKSVKHRVLADTRRSRISMIYFGGPPLSQKIAPLPCLVPEQDDWLYKEFTWSQYKSSAYKSKLGDYRLGLFEKQPLLNHKTLV

SEQ ID NO: 4467 - protein, 374 aa, Thermoanaerobacter tengcongensis MB4
MVFMDKRRVLYIVRKSEGGMKRHLLSLLRFLDKEKYCLGVVCSFEKDTIDYLKNQGIEVFELEIGDGFNVKEDLSIIKKIRNIVKEFKADIVHMHGFKASFVGRIACFNLPVKTIVTFHNFPGYNNMSEMKRRALLFLIKFLNKRTDQFIAVSEALKKEMMASERIEEDRIEVIYNCIDETLYKMGELDLRKEFNLPEDSFIVGSIARLIPSKGVQDLIEAAHLIKEADVFFFVAGDGPYRKSLEEKIKEKGLESRFFLLGFRDDIPSFLRNLDVFVLPSHEEGFGISVIEAMNEGVPVVATAVGGIPEIIQEGVNGILVEKGNIESLSKAIKSLLKDAHLKETLSLKGKEAAKKFSCEEMVKRVEELYERIKG

SEQ ID NO: 4468 - protein, 176 aa, Ralstonia eutropha JMP134
MRDVQNRPLPPMNAPRPLTLHVNHAEHTLCVAPDTPLLYILRNDLACNGPKYGCGLGQCGACTVLVDGTAARSCVLPVKAVVGHAVTTLEGLGTAAQADPVQQAFIDEQAAQCGYCLNGMIMTAKALLADNPDPSEAEILEALRFNLCRCGTHVEIVRAVQRAAVLQREHAQGAQR

SEQ ID NO: 4469 - protein, 180 aa, Zymomonas mobilis subsp. mobilis ZM4
MLTVGDKFPALKLPVQQGVSALPNGETIDLGETNGKWKVVFFWPMDFTFVCPTEIVGYNDIKEDLSLRDAVLIGGSCDTAFVHYAWRKSDERLENADFPWIADNSKKLASALGIVNEEAGVAYRATFIVDPNNVIQHVTVNSLNVGRNPAEALRVLDALQTDDLCPCNWHKGEEVLDPKA

SEQ ID NO: 4470 - protein, 241 aa, Oryza sativa
  misc_feature (35)..(35): Xaa can be any naturally occurring amino acid
  misc_feature (197)..(197): Xaa can be any naturally occurring amino acid
MACAFSVSSAAAPLASPKVPVSAPSQPSLPLPRSXSAGKSLRLSAAAASRSARARSFVARAGGEGDLPLVGNKAPDFEAEAMFDQGFIKVRSSCLSTLGKKYVVLFFYPLDFTFVCPTDALTLSCSVMEMPFFFFSFFSFLKSKCMFVSSAEITAFSDRYEEFEKINTEVLGVSIDSVFSHLAWIQTDRKSGGLGDXKYQLISDVTKSTIIVARADCAASIIIFFSLIIAYMFSQCIIKIY

SEQ ID NO: 4471 - protein, 222 aa, Methanocaldococcus jannaschii DSM 2661
MCEGKMPVIGEKFPEVEVKTTHGAIKLPDYYVEKGKWFVLFSHPADFTPVCTTEFVGFQKRYDEFRKLNTELIGLSIDQVFSHLKWVEWIKEKLNVEIEFPIIADDRGELAEKLGMISPYKGNNTVRAVFVVDNKGIIRAIIYYPQEVGRNLDEIVRLVKALQVSDEKGVAMPANWPENDLIGDKVIIPPASSVEEIKQRKEACEKGEIECLDWWFCYKKLD

SEQ ID NO: 4472 - protein, 489 aa, Phytophthora infestans
MSSPASLESSLPPAALEVLPDIMAAIGQTPMVCINSIGKKAHLQCELLAKCEFFNAGGSVKDRIGKRMVEDAEAAGRIKPGDTLIEPTSGNTGIGLALASAIKGYRCIITLPEKMSLEKVNVLKALGAEIIRTPTEAAWDSPESHIGIARRLQAELPNAHILDQYANPSNPLAHYDGTAEEILEQCDGKVDMVVMGVGTGGTISGIAKKLKEKCPSVIVVGVDPEGSILALPDSLNDKNRLQSYKVEGIGYDFIPDVLDRSLVDQWEKTNDQESFIMSRRLIREEGLLCGGSSGSAMAAAVRAASVLKPGQRCVVVLPDSTRNYMSKFLNDAWMYENKYVENTVHTRENYSKYRKETATWWSQQRVSVLELPHPSTVSPQLSCAAAIETMERHGYDQLPVVKEDGTVQGVVTIGNLLSRLSSGRVMRTDPVATVTFGNFSRVTHESSLAELAAIFDKDYFAVVTSTDGKIAGLATRIDLLNYITSAREE

SEQ ID NO: 4473 - protein, 391 aa, Micromonospora inyonensis
MGGMQVQILALSRSLARAGVDQLVLTLGFPGLPPTKQIEPGLTVRIARMSLPQIRSEITGLVGLGQAWLIGTIRECLRLRRGDWRPDLVHVHADGQIWPLVAGRIAARILGVPYVLTLHCSRLSVYQPMSTVDAMAHRLVTQAERQALRSATRVTTLTARTADVVSAATGLDRSAIVVNPDAVDITLATEAETTAFAQRYGLTGRRPLIGYIGRVAHEKGWPDLLRLAELLDDLSPTFLVVGDGPQRERMEKEIAEIGRAHQFVVTGFLPHDQVPAALALVDTLVMPSIHEELGGSAIEAIMAGTPVAAYAVGGLRSTIGSACPDLLTEPGDVRGLAEVVRRVLADRDAVVAQIHAAQTTTASTFDVAATRDRMLDCYRAALTGAGAASGK

SEQ ID NO: 4474 - protein, 208 aa, Phytophthora infestans
MVLTIRKPAPEFTADAVVNGEFIKISLSDYKGQYVVLFFYPMDFTFVCPTEICAFSDRADEFKKLNTQVIGCSIDSKFTHLAWINTPRKKGGLGDMNIPLVADVKKDLCSKYEVLVSEGDDEGVAFRGLFIIDKEGVLRQITINDLPIGRNVDEVLRLIEAFQFHEEHGDVCPANWKKGAKGMTANPKDSLKYFETVEEPSKKRKLTK

SEQ ID NO: 4475 - protein, 202 aa, Haemophilus influenzae R2866
MTMVLVTRQAPDFTSSAVLSNGEIVDNFNFKKHIAGKAAVIFFYPLDFTFVCPSELIAFDHRYEEFKKRGVEVVGVSIDSQFTHNAWRNTPTENGGIGQVKYALAADVKHEIAQAYGIEHPEAGVALRASFLIDKNGVVRHQVVNDLPLGRNIDEMLRMVDALQFHEDHGEVCPAQWEKGKEGMKDNPEGVAKYLKQNADKL

SEQ ID NO: 4476 - protein, 361 aa, Archaeoglobus fulgidus DSM 4304
MEIVFVYDAVYPWTKGGVERRLHEVGRRLSNEHNVKWLCVGWWGKEKRIQEGVELIPVCKAQQLYSRGRRTIREAMIFAASLLKKSRIKADVIDCQVFPYLSVFPFATRKELVLTWHEFWGDYWYEYLGKAGFFGKAVERIVAKLKARTIAVSETTRKALESLGIRATVIPNGVDFPRISEIPASSEEWDVIFVGRLIREKNLELLFDAMKLLPELNCLVVGDGPERERLSKIAPANVDFGGSLGYEEVISMMKSSKVFAIPSRREGFGISALEANACGLPVVTIRHQMNAVVEIAEKTGFVAEPHARDFAEKIRLALEMRREMREKCINFAKNFDWEVIARRLEEFYEGVHSPPNEGRAE

SEQ ID NO: 4477 - protein, 91 aa, Fragaria x ananassa
LKTYDLPGTRSRSGGEIRAPWDIKDDENEIKMRFDMPGLSKEDVKVSIEDDVLVIKGEQNKEETTMMHGLARASVPTTHAFSSRITVTRAK

SEQ ID NO: 4478 - protein, 92 aa, Oryza sativa
  misc_feature (35)..(35): Xaa can be any naturally occurring amino acid
MACAFSVSSAAAPLASPKVPVSAPSQPSLPLPRSXSAGKSLRLSAAAASRSARARSFVARAGGEGDLPLVGNKAPDFEAEAMFDQGFIKVWR

SEQ ID NO: 4479 - protein, 176 aa, Candidatus Carsonella ruddii
MLNTRIKPFKNISYYKKKFYEIKEIDLKSNWNVFFFYPYSYSFICPLELKNISNKIKEFKNLNTKIYAISNDSHFVQKNWIENELKFINFPFISDFNHKISNNFNILNKKDGNCLRSTIIIDKNLIIKYINIVDDSIGRSIDEILKNIKMLQFINTNENKLCPYSWNNDSKSIEIN

SEQ ID NO: 4480 - protein, 332 aa, Brassica oleracea var. italica
LSQPVALDNHISVIPTYTPVPVFTSQPIPVVDLTDPEAKTLIVKACEEFGFFKVVNHGVRADLMTRLEQEAIRFFALPQSLKNQAGPPEPYGYGSKRIGPNGDVGWIEYILLNANPQLSTPKTSDVFGQTPQIFREAVDEYMHELKEVSCKVLGMVTEGLGIEPRDTLSKMVRDEKSDSCLRLNHYPTAEEEAENMVKVGFGEHTDPQIISVLRSNDTAGLQICMKDGSCWVAVPPDHSSFFIIVGDALQVMTNGRFKSVKHRVLADTRRSRVSMIYFGGPPLSEKIAPLSCLVPNQEDWLYKEFTWSQYKSSAYKSKLGDYRLGLFEKQPL

SEQ ID NO: 4481 - protein, 464 aa, Mycobacterium sp. MCS
MRIAQHVSELIGNTPLVQLNSVVPEGAGTVAAKIEYLNPGGSSKDRIAVKMIDAAEASGELKPGGTLVEPTSGNTGVGLALVAQQRGYKCIFVCPDKVSEDKRNVLRAYGADVVVCPTAVAPDDPDSYYSVSNRLVTEIEGAWKPDQYSNPMGPESHYETTGPEIWRDTDGKVTHFVAGVGTGGTITGAGRYLKEVSGGKVRVIGADPEGSVYSGGTGRPYLVEGVGEDFWPSAYDPAVPDEIIAVSDADSFDMTRRLAREEGLLVGGSCGMAVVAAIEVAQKAGPDALVVVLLPDGGRGYLSKIFNDSWMSSYGFLRNRLDGSIEQPTVGDVLRGKSGELPDLVHTHPSETVRDAIGILREYGVSQMPVVGAEPPVMAGEVAGSVSERELLSAVFEGRAKLADAVAEHMSPPMPLIGAGELVSTAAKTLRECDALMVVEEGKPVGVVTRHDLLGFLSDGSTRR

SEQ ID NO: 4482 - protein, 733 aa, Pseudomonas syringae pv. syringae B728a
MNQPFSPMGKPVDRVDGRLKVTGGARYAGEYPEEGLLYGSVVSSTIANGRVASIDTSEAMKVPGVVAVIDHTNRPWLASYDENYEDADSADGSPFRPFYNDNVMYSGQPLALVVADTLELARHAGSLVRIEYEQQEHQTDLQAMLDTAYDAPAELPPPRGNFEGELASSALSVDVTYSTPSEYHNPMEPHASTVLYQADGSLQIHDKTQGTQNCQDYLHKVFGLEKDKIRVLAAFVGGAFGSGLRPQYQLPLAVMAALHLKRSVRLTLTRQQMFTFGYRPRTIQRLRLGAAANGRLLAVGHEAIGQTSRFEDFSEHVVEWSGMLYHCDNVQLTYKLVPLDVFTPLDMRAPGAALGMIGLECAMDELAYALAIDPVRLRLTNYAERNGNEDKPYSSKELRECYAQGAERFGWSSRNPEPRSMRQGRQLVGWGMAGGVWEAMQMKASAKARLQADGTLVVSSATTDIGTGTYTVMTQIAAESSGIEVDNVSFLLGDSSLPTAPLQGGSFTVSSVGTAVQQACQALQRQVLEVAKGLHPQFASVTPDEVRFEAGKLYVGDQALSMAELAASQPHGVIEVQVDAEPDKKREAYAAATHSAVFVEVLVDEDLGTIKVNRVVSAVAAGRVVNPKMARSQILGGVVWGMGMALQEEAMLDHDLGRPMNHSLAEYHIPVNADIGDIDVLFVEEHDDIVNALGSKGVGEIGIVGVPAAIANAIYHATGKRIREFPITLDKLL

SEQ ID NO: 4483 - protein, 516 aa, Chromobacterium violaceum ATCC 12472
MDGAKQDKDLSLAADVVIVGSGAGGGIAAEVLSRAGLDVLLLEEGGLYSSSDFRLLEAKAYPELYQESASRQTLDKGITILQGRAVGGGTTVNWTSSFRTPADTLLWWQENHGLAGLSAETMRPWFEKAEQRLGIGPWQAEPNGNNLVLERGCQALGLRHARIARNVRGCWNLGYCGMGCPTNAKQSMLVTCIPEALSHGARLLSRARVERLLADSGGASIASVQGSLLGADGNTPTGLRFSVRARQVVLAAGAIGTPAIMLRSGLPDAGGQTGKRTFLHPVALSAALMPEMVEPYNGAPQTVYSDHYMHTQSLDGPLGFKLEVPPMHPLLASVTFPGFGIEQSQLLQQLPHLHATLALLRDGFHPDSQGGAVKLRGDGSPALDYPLNDVVWDGVRRSWLAMAELQFAAGASLVMPLHERAQPMSSWKQTREMIAALPLQALQARLVSAHVMGGMAMGDDPARSVLDGWGRHWTWRNLTVVDGSAFPTSIGANPQLSIYAFAWRAAERLAEEMAKA

SEQ ID NO: 4484 - protein, 305 aa, Streptococcus pneumoniae TIGR4
MSIYNNITELIGQTPIVKLNNIVPEGAADVYIKLEAFNPGSSVKDRIALSMIEKAEQDGILKPGSTIVEATSGNTGIGLSWVGAAKGYKVVIVMPETMSVERRKIIQAYGAELVLTPGSEGMKGAIAKAQEIAAERDGFLPLQFDNPANPEVHERTTGAEILAAFGKDGLDAFVAGVGTGGTISGVSHALKSENSNIQVFAVEADESAILSGEKPGPHKIQGISAGFIPDTLDTKAYDGIVRVTSDDALALGREIGGKEGFLVGISSAAAIYGAIEVAKKLGTGKKVLALAPDNGERYLSTALYE

SEQ ID NO: 4485 - protein, 176 aa, Pseudomonas syringae pv. syringae B728a
MSATTPNPQDFATHAISLTLNGQLRQLDVLPWTTLLDLLRDQLDLVGTKKGCDHGQCGACTVLRDGTRINACLTLAIMCDGAELTTIEGLADGDQLHPMQQAFIKNDAFQCGYCTPGQICSAVGLANEGRASTRAEIQELMSGNLCRCGAYSNILAAVEEALPQFHNAAPKPEVNA

SEQ ID NO: 4486 - protein, 173 aa, Acidobacteria bacterium Ellin345
MKFRKALLIGALALVPLALSAKVEVGQPAPDFTLTSQDGNQVSLSQFKGHWVVLYFYPKDFTSGCTVEAHKFQDDQDKYKALDAAIVGVSVDTADSHKQFCTKEGLTFKLLADPTAKVPAEYDSIMEYQGTKLAARHTFLIDPSGKVVKSYMEVNPKNHSEQVLADLASLQKK

SEQ ID NO: 4487 - protein, 339 aa, Rhodospirillum rubrum ATCC 11170
MELEKAMTVIAPSAASESVGTSATDIEFRGKVYDSIVDTIGATPLVRLARFSKAHGVVADLLGKCEFFNPLASVKDRIGFAMIDAAERDGRIKPGATLVEPTSGNTGIALAFVCAARGYRLILTMPESMSIERRKMLTHLGAEIDLTPAAKGMKGAVARAQELVESIPGAVLLQQFDNPANPEIHRQTTAQEIWNDTNGAVDIVVSGVGTGGTATGIASVLKKLKPSVKLVVVEPEDSPVISGGAPGPHKIQGIGAGFIPGNLDVSLIDEVVKVANETAFATARAVARQEGVPVGISSGAALAAAVEVGQRPENKDKTLVVILPSFAERYLSTPLFEQP

SEQ ID NO: 4488 - protein, 153 aa, Synechococcus sp. RS9916
MALSVGDRAPSLQLEDHDGKRCAVGERNGTPLVMFFYPKDDTPGCTAEACGFRDSHSELQNLGAEVWGVSGDDAVSHRRFATRHQLPFPLLSDGDQALRRAFGVPKTLGLLPSRVTYVIDGNGVIRHVFNNLLDGPAHVREALQVLRSLRTQA

SEQ ID NO: 4489 - protein, 316 aa, Durio zibethinus
MATFPVIYMDKLNGEERAATMEKIKDASENWGFFELLNHGIPHDFLDTVERLTKEHYKKCMEQRFKELVASKALEGPQAEVTDMDWESTFFLRHLPESNMAEIPDLTDEYRKVMKEFVLKLEKLAEELLDLLCENLGLEKGYLKKAFYGARGPTFGSKVSNYPPCPTPDKIKGLRAHTDAGGIILLLQDPKVSGLQLLKDGEWIDVPPMRHSIVINLGDQLEVITNGKYKSVEHRVLAQTDGARMSIASFYNPGRDALIYPAPALVEKEAEEKKQLYPKFVFEDYMKLYAGLKFQAKEPRFEAMKARETTFPIATA

SEQ ID NO: 4490 - protein, 155 aa, Alkaliphilus metalliredigens QYMF
MKINVKINDENTSFEISPDEYLVETLRKNGYIGVRQGCDTGTCGVCTIHVDGKAVLSCVLLSAKVDGSEITTIEGVQEKAKVIGKHLVDEGVDQCGYCSSGTIMSILYLEKCIENPTDEEILHYLNGNLCRCTGYVGQLRAIKKYFGGRLHENRK

SEQ ID NO: 4491 - protein, 326 aa, Arabidopsis thaliana; identical to SEQ ID NO: 3892

SEQ ID NO: 4492 - protein, 764 aa, Alkaliphilus metalliredigens QYMF
MKIVNSSIPKIDGMSLVTGKPAYTDDLAPKDALVVKVLRSPHAFAKITDINTAIAEKVPGVACIFTYKNVIRKAFTRAGQCYPELAPYDKFLLDEYVRHVGDDVAIIAAKDEKTATKAMKLIKVKYDVLQPILNLEKAEESAPVHPEEDIYTNLEVGFDREKNTVAKVAFELGDLENALEESDVIIERTYRTQAQAQGMMESQASYSYLDNYNRLVVVSSTQIPFHVRRILAQALDIPASKIRVVKPRIGGGFGSKQTAQSEFYPALVTLKTGKPAKIVYSRREVFRGTNSRHAMTFTIKIGASQSGKIKAIDMNGLWDTGAYGEHALTTLGSAGKKVLTLYNKVDACRFSGKAFYTNHVPGGAFRGFGVTQGIFVLESAVNELAHELKMDPVKLREINMIKKGETTRLYNMVTKGAGDAPMYMDSCLLEECVTRGKQLIDWDHKYPRTERSATKVRGVGMAISQQGSGLPNIDMAAATLKLNDDGFFTLFLGASDIGTGSDTILTQIAAEALGVDMDKIVTYTSDTDLTPFDSGAYASSTTYTTGNAIIDAAEKMIQLIIATGAKYFETQEENILFDGTKITCQDSGEEITLASFSQKITYSMIHEQLSVTGSYVPKKAAPPYMAGFAEVEVDLETGKVEVIDFVGVVDCGTPINPNLARIQVEGGIVQGIGFALYEEVNYTKEGRLMNDTFMEYKMPTRRDIQNIQVELVAGYDETGPYGAKSIGEVVINTVAPAITDAIYNACGVRIKELPATPEKVLMQL

SEQ ID NO: 4493 - protein, 183 aa, Trichodesmium erythraeum IMS101
MRSRRHFQTIFLVICLALITWLNFIPNAWALGGKLPELDQPAPEFTLPTNIGDREISLSDYRGQWVVLYFYPKDFTSGCTIEARRFQQDLPKYRERNTQILGVSADDINSHQEFCDSEGLKFPLLADTDGTVSKAYGSWLNFFSMRHTFIINPGGILQEIFLGVKPTIHSQEVLSSLDNLQQT

SEQ ID NO: 4494 - protein, 2401 aa, Geobacter sulfurreducens PCA
MSITPMNTTPVILVCYNRPHHTAEMLKALEVHNIQNLIIFADAPKSDKDVEGVRATRKLLEGIRWTHPEIVFQTENQGLAKSIVSSANYAFSLHDRLVLLEDDCVPQRHFFDFMSNCLDRYEENEKIFGISGYTVPIPSRLQEQHPYDLYFYPRIGSWGWGTWKRAWQHYDTDLVKLCRKALESNIDLTQGGVDIPVNIEGLLRGTLKDVWTLNWVLTVYLNKGYYIYPTKSHINNIGFDGTGVHCGKSDLFQTILADSPAIRFPSDVVLNYDLISHYNMYFGGPVVTPPPREPAGLNAVPEAASRKAPLNVALLSTMDFGGAGKATHRLLRGLQAYGSDALMAVLCKSTEDPSIKLLSNSAGGLTTVSAEGAGRWEELFRKWRGQLAGYTNRPEGLEIFTDSRSRFSLEDIPELQRADILNFHWMAGLLNYPTSSSALKGKKIVWTLHDMNPFTGGCHYAGECTGYLRSCGTCPQLGSSDKEDLSRKIWEDKRAAYADLDLTIVTPSRWLAECARNSSLLSRFPVHVIPNGLPTDIFRPHPKDELRRSFNIPEHARVILFGADYDTRRKGFHYLVDALRALPDKRNLVLASFGPLPETKFSSEFLTMNFGSISNETRLAQIYSLADLFVLPSMEDNLPNTVIESMACGIPVVGFKIGGMPDMIEHKVNGYLAQPGDVTGLTEGIRWCLANASALKLGERCREKVELEYSQRVQAESYTNLYENILLGKSAVKSLAAPACSADSILIAANLVPFRDAGQRQRQDTGIASITALVAKGIIPLNICYPDELLEPADWQTATMLERSANVELKIDGKRKPFVIDLFDIAAQWATAHGITWFAITNSDIVLTDALIAELRRLQADGIETVAISRNEVERVEGDGRLVPGYLEVNGYDIFLCRSSWWQSNRHRFQPYIYGERAWDDAYAAIMACHSRFAMLYQDGLCFHFKHPTSWISGPYSDYNMGLYTGIDKPYSDRYEAFIKEVLALTKAQLTPAKTAELVAKHFSPPPPVPVNSSQGFVNIGMITYNRLDFTKLCLEAFERTVDYPHRLTVIDNNSQDGTVEFLRKLQAQGVIHNLILLNENVGVAKASNLAWAMEPDAPYYMKLDNDIVFQKMGWLSRLVEVIERVPQIGAAGYNFEPVSYPLYELNGCQVRIKEPGNLGGACILIPKRTERLLGNWCEDYGLYGEEDADYGFRIRCAGLLNAYMEDEEIGFHLPAGKAATIDSATLVALDGQEEDLHADYRKWKDELRRKNVHGPFKRNLERYAHDPTSLFQQSRFATEWLRTHRPDIDVSPLKTTGGKLTITLLSLDLPSHACMQLRITGPASAFSDEVELLQAVTNDGTKYLINSDSIDRADLIIVQRFFPRPETERHLQKALASGKPIIYEFDDLLTDHSPDNPHRELSTLCAPFVSALLAKADGVTVSTDLLASALLPRKGTVHVLPNLLDEKLWAAPPASRPTGAPVIIGYAGTPGHEADLAPIEEALERIARMYGHRVAFRFFGCATERIRKLPGYTFIPFTGNYSEYAATLQNSGIDIGLVPLEDNRFNRCKSNIKWLEYSACGIAGIYADLPPYRSCVKEGETGLLIAGYDVDAWVAAIESLIDNPARRHAMALAARTEVLANYTLKSRGHLFLDTWRRIAGRADTTAKEQQMPISPQPFAPVAAATGSDAPKVSIIVPLYNKAEYTKQCLEALALNTEQALNYEVILVDNASSDGTAEYLRTLSGDVTIVTNLKNLGFAKACNQGGRIARGRYLVFLNNDTIPHPGWLDGLIKGAEQDGADIVGARLLYPNGRVQHAGVAFNEQSIGYHIFNGFPADSPAVNRKRFMQCVTAACMLVKQELFAELGGFDEGYVNGFEDVDFCLRAGERGRRILYTPESVLIHFEETSEGRKDHDTPNIRRFLARWEGKVRCDHQDIYRSEGYRAERQADGRLRIYQADVAPVSSAPTAPQQVTPTPGTGAAAATPSVSGREKALALKAEGRYVEAIEHLVKIVTAGDNSVLVDLGDCLASLEKYDDALALYEESLALCPTNGRALVGVGVVRYMTRRIAEAADAFSRALETDPADPKALCGLGMARCAQGRNAEGFELYGRALEAEPENLTAVHESVRLAYELGRFSEAAKRLESYLRHHPGDIDILFASAGLLHMAGRNAEARDALERLLVFSPDYSGAMELLAKLEEQDQEPGERATEAEARRLKEDGKYEEALTAFSRVAEAGDSSALADMGDCLAQLGRLDEAAARYLEALDADGANLKALVGLGVVSLVQGKQVKAVTWFNRALKADPANAKALCGLGMVRNMQNKHDEAFSLLARAVDADPEGLTALHELIRLSYATGRFDEAGERLDRYLMHHPADLDMVFAQAGIRFKAGRYAEALSSIETVLLFASDYEGGLELREAITQAM

SEQ ID NO: 4495 - protein, 219 aa, Bradyrhizobium sp. ORS278
MALQIGSTAPDFEAETTEGKIKFHDWIGDSWALLFSHPKDFTPVCTTELGALARLKPEFDKRGVKLLGLSVDPVDKHAQWSEDIRETQGAAPNYPMIGDTDYNVSKLYDMLPAAVSGDPAKRTAADNLTVRNVFIIGPDKKIKLILVYPMTTGRNFQEILRVIDSLQLTAKHRVATPADWKQGEDVIIAGSVSDDEAKTIYPDGWKAPKPYLRVVPQPK

SEQ ID NO: 4496 - protein, 428 aa, Rhodospirillum rubrum ATCC 11170
MIKVAVLVTLPWTADAGGHVKVWERFAEAAEPFADRASLTVYFLGPTDQTVVRNRAARFRLLPARLGTDRIPLLSQGAGHTDLSGFLPRLGGELTDYDVVMSTDVFSFGRTAERVCASAGIPLVHSVHTDVVHFTEIYGPRIVTRALGQRLGGWIVKHYHLGRRFAGGIERRLHQHWAACRHIIVSRPLDAERVHKVCPEMPVSFLRRGVDTKRFDPALRDRLWLERAHGVPPSRKLLVFAGRVDASKRAMVAVRAARTLIEAGHDVGLLLAGTGEDLEPARALLGPRLVAPGVVPQDDLARLMACGDLFVFPSVSETAGNVVLEALASGLPVVVSGRPGGCAGFVGADGANGRVVDDRGGNVVEAWRRALVEVLSGDGEAKRRAARASVEGTRHLWTDIYEHDLLDVWEAVAGGRRDVRVDRERVSA

SEQ ID NO: 4497 - protein, 328 aa, Prochlorococcus marinus str. MIT 9303
MSRIYEDNSQAIGNTPLVKLHAVSKNAKATVLAKIEGRNPAYSVKCRIGANMIWDAEKRGLLSKERTIIEPTSGNTGIALAFTAAARGYKLILTMPESMSLERRRVMAVLGAELILTEAAKGMPGAIAKAKEIAESDPQKYFMPGQFENPANPDIHSKTTGPEIWNDCDGAIDVLVAGVGTGGTITGVSRYIKQEKGKSIVSVAVEPTHSPVISQTLNGEDVKPGPHKIQGIGAGFIPKNLDLALVDRVEQVSNDESIAMALRLANEEGLLVGISSGAAVAAAIRLAEQPEFAGKTIVVVLPDMAERYLSSVMFESVPTGIIQDPVAA

SEQ ID NO: 4498 - protein, 160 aa, Hordeum vulgare subsp. vulgare
MTGRRAVAHVFKADLPGVKKEEVKVEVEDGNVLVVSGERTKEKEDKNDKWHRVERSSGKFVRPFRLPEDAKVEEVKAGLENGVLTVTVPKTEVKKPEVKAIEISGCVFESEPFWLMCVRVLQPKYSCDLFLSSLVEASLYRVSFLGRLCTCVIAMNKCST

SEQ ID NO: 4499 - protein, 429 aa, Nostoc punctiforme PCC 73102
MNKQPLRIAIFTALYAPFMSGVSMGVHQRVRWLLQQGHEVFLIHPGVNYLYPKEVRDRPMLRLEEVQSFSNFSSYAYPSKPMIFYKSLPEPLHYRYWSDTKLLLNFQPDIVVVEEAPGMIGYYSLFLQGYGRPIGTEYTKRTGTPIISIFHTDIVAYIRYYIGEWAFRFIRPIIPILIKQLSEAYDVNYFSSQEQLTKYKLLAAQRLEYLPYQGIDCEKFHPRNICYDPIPGDQRPTLLFVGRISAEKNVKQLLDAFVLIAAKIPDVHLVIVGSGPQDKEIRRRAKKFESGITVWGESHGTELLGWFARADVFVNASVTENFCTTTNEALASGTPVVAVLAPSTSEQISSSSGRNGFLAEPNNPKDFAMKVIAILENPALKEEMSRQARLYIQKFDWSACMEKFEEKLYQHVGASKKLEVKGAAQVVNR

SEQ ID NO: 4500 - protein, 183 aa, Prochlorococcus marinus subsp. marinus str. CCMP1375
MVINYIKNIIFILIFAITITSYPSIVFSNSVPNINEQAPGFELEGYNPERPDKTKWSSNDFKGSWLILYFYPEDATSGCTIEAKGFQRLNKEFLSHKANIVGISKDSKASHKLFCSDQKLDFTLLSDKDSQISKSFGSWQEGFSSRNTFLIDPNGIIKYRWLAVIPIKHAKEVLSVLNRIDQT

SEQ ID NO: 4501 - protein, 351 aa, Symbiobacterium thermophilum IAM 14863
MLHVCSDTNIGGAGRYVLTLLTQPRIAERFTVAAACPEGALAAALRRAGVTVFPYAGADRSLSWSGLRELVGLIRRWRPHVVHTHGALAGRIAGRLGGARVVYTKHGLAAAVEASVQVRSPGAWLRRLAVRRFADRIVAVSGAVRDALIAQGADPAAVRVIPGGVDLGPYEQAPPPVAGVVGALGRLEREKGFDVLLEAMARLRGEARLLLGGDGSQRQALAARVEAEGLPVELVGFVDDVPAFLGRTGVFVVPSRSEGLGLVAVEAMAAGRPVVASRTGGLPEVVVDGETGLLVAPEDPDGLARAIRMLLADPERSARMGAAGRERARALFSAERMAAETAALYEELIAP

SEQ ID NO: 4502 - protein, 132 aa, Desulfococcus oleovorans Hxd3
MSVDSVFVHKMWNDNELTKMVKGGIPFPMLSDGGGKVGTAYGVYDEDAGVENRGRFIIDPDGVIQAYEVLTPPVGRHVAETLRQIQAFQLVRKSKGSEATPSGWKPGKLTLKPSPDLVGKVWEVWETKMESE

SEQ ID NO: 4503 - protein, 462 aa, Solibacter usitatus Ellin6076
MASPLSDFSFHLNGEAVFVEHAPNSQTTLLDFLRSRGLTGAKEGCAEGECGACTVAFVRAHDHGSVYCPVNSCLIFLPMVAGQEIYTVEALAASGELNPVQQSIGERGGSQCGYCTPGFVMSLFAEHYRPGRDTACDPHAMDGNLCRCTGYRPLRDAALALAPAPGDTFRRRLDLPAPSIPAFTSPHFSRPATVDACLELLSRHPDARLVSGGTDLAVESNLLGRVFPHLVSLEALEELRVFRRTGDHIEIGAGHTLSEIAALWHDAPPAFFEWIELFASPLIRNRATLGGNLATASPIGDAAPLLLALDASVLIAAESGTRTVPLHEFYLDYRKTALAPGEILVSVLIPTPLPDELRFYKAAKRRLDDISTVAAAFSLTFDAASRIHTARLAYGGVAAVPLRCTEAEAALTGRSWNQSAVAAATSAIAATIHPLSDHRGSAAYRLALAQSLLAKFHHEVPA

SEQ ID NO: 4504 - protein, 747 aa, Solibacter usitatus Ellin6076
MKYVAQPVSHESARGHVTGDALYTADLESRFPNLLHAYPVLAPHAHAQLLGLDAAGATILTAADVPGEGNTGVNRHDEPLFPSTVMFHRQPVAWVLADTLADSRAGAAKVRADYQALPAIVHLEDAIAAQSFLCGPATLQRGDARAAIDGSAHRLDGELTMGGQEHFYLETHCAIAWLDESGGVSLHSSTQHPAETQAIVARVLGIPDHRVTVECLRMGGAFGGKEVQSNAFAAIAALGAWKTRRPVMVRLPRAVDMAITGKRHPFLARFEAGYDDTGRILGLLVNLFADGGWSLDLSEPIMGRALFHIDNAYLLPNVTATGFVCRTHKTSQTAFRGFGGPQGMLVIEDVLDRIARSLSLAPEIVRRRNFYREGDTTHYGMPVKDAARIERIWDELTATSDFAVRRTGIDRHNLTHPHTKRGLAITPVKFGISFTATWYNQAGALVLIYRDGSVQVNHGGTEMGQGLHTKIRQIAADALDIDIESVRIMPTRTDKVPNTSATAASASTDLNGAAVLDACRQLKERLAPIAAELGDAPFSQVVEAAYRRRTPLFAQGYYRTPEINWDAAAGRGRPFYYFAYGAAVSEVEVDGFTGAYTVLRTDILQDVGDSSSPLIDRGQVEGGFLQGLGWLTLEELLWNDEGRLTTAGASTYKLPSWSEVPADFRVDFLTRAAEAGVVCGSKAVGEPPLMLAISVREALRDAIAAFGSGGLVLLDSPATPERVFWAIQRARGAATEPVSSAVGAAQA

SEQ ID NO: 4505 - protein, 224 aa, Ralstonia eutropha JMP134
MPHHHPDGPDRPTRRRFLQSAALTASAAALPAAYAAEQPAASAPAQVPPPVPARPVRLHINGKEYALSLEPRVTLLDALREVVGLTGAKKGCDHGQCGACTVLSDGRRINACLTLAVMQEGRHITTIEGLADGETLHPMQAAFVARDALQCGFCTPGQICSAVGMLAEARAGAASTVQPPPAALPQSLSDAEIRERMSGNICRCGAYQNIVAAVRDATGAMRRS

SEQ ID NO: 4506 - protein, 190 aa, Cyanothece sp. ATCC 51142
MDVTLSINQKKYDLSIEPRVTLLDALRERLGLVGTKKGCDHGQCGACTVLVEGQRIYSCLALAVMQQGKEITTIEGLAQDSVLHPVQQAFIEHDGFQCGYCTPGQICATVALLEEVKQGTPSAVTSNLSSEVSMNELCEAEIKERLSGNLCRCSAYNGIVAAVQQVLGQTSPSPLAEIRVSQSGLKEIDE

SEQ ID NO: 4507 - protein, 328 aa, Prochlorococcus marinus str. AS9601
MAKIYEDNSFAIGNTPLVKLKSVTKNAKATVLAKIEGRNPAYSVKCRIGANMIWDAEKSGKLTKDKTIVEPTSGNTGIALAFTASARGYKLILTMPESMSIERRRVMAVLGAEIVLTEASKGMPGAIAKAKEIAESNPSQYFMPGQFDNPANPEIHFKTTGPEIWDDCDGEIDVLVAGVGTGGTITGVSRYIKQEKGKNITSVAVEPSHSPVITQTMNGEEVKSGPHKIQGIGAGFIPKNLDLSIVDKVEQVTNEESIEMALRLAKEEGLLVGISCGAAAAAAVRLAEQDEYAGKTIVVVLPDLAERYLSSIMFTEVPSGIIQEPVKA

SEQ ID NO: 4508 - protein, 737 aa, Ralstonia eutropha JMP134
MNVIGAPLDRTDGALKVTGRARYAADNPLPGLLHAVLVTSTVASGDIASMDTAVAERMPGVRKVMTPFNAPRLPQAGKAAAGKPPAGRVLNLLQETEVHYNNQPLAVVVADTLEQARDAAAHIVIRYRTKTPVLDFAAARASAYKPKEAKDEPADSSRGDMSATDGAAARLDATYSTPLETHNPMEPHATVAAWQGDMLTLYDATQYVSGVRKTVAQTLGVQPSNVRVVCPFVGGGFGCKGSTWSHVVLAAMAAREAGHPVKLVLDRPQMFGPVGGRPRTEQHVVLAARADGTLTSMRHEVTACTSFMEDWLEPCALLTRMLYAVPNQQTSHRLLKLNIGTPTFMRAPGEASGSFALECAMDELAYKLGMDPVALRLCNYADADPGKELPFSSKSLRECYRDAAARFGWAQRNPAPRSMRTEDGRLVGMGMATTTYPANRSAASALARILPDGTALVQSGSQDLGTGTFTVMTQVAADALGLPPDKVRFELGDTNFPEAPVSGGSQSVASVAPAVQAACMAARLALVKLAVADAASPLSGAPPEDVDVVDGWLQRRSEPSRREPVAAPIARRGGQPVEARMSARPGDERKKFSMHSFGAVFAEVHVDPDLGEIRMQRIVASYGVGRLLNRKTAHSQLMGGIVWGLSMALHEQSELDLVSGRIANGNLAEYHVPVNADVGAIDIAVLDEDDPHINALGTKGIGEIGIVGVAAALANAVYHATGKRIRDLPLTVDKLVA

SEQ ID NO: 4509 - protein, 344 aa, Burkholderia pseudomallei K96243
MKIMIVTDAWEPQVNGVVRTLKSTARELTALGHRVELVTPLEFRTVPCPTYPEIRLSILPYRRLRERLDAFEPHALHIATEGPLGLAARRYARARKLPFTTAYHTRFPEYVQARFGVPLAATYRFLRWFHGASLAVMAPTPVVKDDLERFGFDNVVLWTRGVDLDIFRPIESKVLNTARPIFLYVGRVAIEKNVEAFLKLDLPGSKWVAGEGPALAELKSRYPEANYLGVLTQAELAKVYAAADVFVFPSRTDTFGLVLLEALACGTPVAAYPVTGPVDVLGDGGAGAMNDDLREACLEALKIDRRHARAWAERFSWRAASEQFASHLKPLQKSACPHTEGAAV

SEQ ID NO: 4510 - protein, 303 aa, Lactobacillus plantarum WCFS1
MLIQHVQELIGHTPLMALPIEVPNHSHIYAKLEMFNPGGSIKDRLGAYLIEDGLQRGRVNAKTTIIEPTAGNTGIGLALATQAHHLRTILVVPEKFSMEKQVLMQALGAEIVHTPSEEGIKGAIRKAEALAATISNSYVPMQFKNPANPAAYYHTLAPEILADMPAPITAFVAGAGSGGTFAGVAAYLQAQDSATKAVVVEPEGSILNGGPAHAHRTEGIGVEFIPPFFDQVRIDQTLTIADNDAFAQVRHLARDHGLLIGSSSGAALAASLQLATNLPANSHIVTIFPDSSERYLSQKIYTK

SEQ ID NO: 4511 - protein, 178 aa, Bradyrhizobium sp. BTAi1
MSEHAITVVVNGVRHQGRVPSRKLLVHYLRDDLRLTSVHVGCDSTQCGACTVHVDGHAVKSCTVLAVQADGSTLGTVEGVATDGVLHPLQQAFQDCHALQCGFCTPGMIMSSLDLLERYPDPSDAQVRAWLKGNFCRCTGYQHIIEAIRSVGHGSGSVPNEHAGTREGSAQARVCHGC

SEQ ID NO: 4512 - protein, 716 aa, Cyanothece sp. ATCC 51142
MESFKLILIKTIMNRKDGTAKVTGTATYGAEHQIADLVHGYLITANIASGEIANINTEAALKSPGVIKIITHENRPTIVKPTNNFMASKIYEARLPLSDNQIHYGGQIIGLVVAETFEQARHAAHLVEVDYQSQIPTIDAEKALFTEAPPMFGEDMTFEKGDFQTGDLSDAMDQAAVNIIATYKTATELHASMEPHAIIAHWEGENSLTVYEPSQWVVGSQQTYAELFGLSKEQVRIITPFIGGGFGSKAFPWPHGILCVAVARELQRPLKVVLSRRQMTANAGHRSQTEQTISIGANNDGKLLAIDHVAKSVTSPVDVFTEPCTGITPAMYKADNLRTRQELAVMNVGTPTFMRAPGENPGLWALESAMDELAWALDMDPVELRLKNQTHEHQRKGLPFSAKAFAECLQVGAEQFGWFQEPRQVRSMSHDGKQIGWGMAASTFPALRGMATVTVRLLADGSAEVLTSANDMGTGCYTIVAGTASEILQLPVERIRVKIGDSLLPNGGMAGGSQMTATLVPVVMGACKAVLEKAQVTTATEALEYLKQSGQEAIEGTASSSPGEEGQQWAFQSWGAHFCEVSVDEEIARLRVNRWLSVMNVGRIMNPKTAASQVRGGVIMGIGHALMENCDFDPNFGLPTVYDLATYDYATHADIPRIEVIFVGEPDYNFNPAGVRGLGEIGITGVSAAIANAIYHAIGKRIRQLPITPDKLIINN

SEQ ID NO: 4513 - protein, 191 aa, Alcanivorax sp. DG881
  misc_feature (15)..(21): Xaa can be any naturally occurring amino acid
MGQGGSGGVPDSRRXXXXXXXQGEFVEISDADVKGKWAIFFFYPADFTFVCPTELGDVADKYEELQNMGVEVFSVSTDTHFTHKAWHDTSDTIGKINYYMVGDQTGTITNNFQVMREGQGLADRATFLIDPDGVIQAMEITAEGIGRDADDLLRKVKAAQYVRNNPGEVCPAKWKEGEATLAPSLDLVGKI

SEQ ID NO: 4514 - protein, 173 aa, Bordetella pertussis Tohama I
MPRRIEVCRIAMLAATRDFTLEVNASRHTVTADPDTPLLYILRNDLCLNGPKFGCGLGECGACAVLIDGVAARACTIPVRGAAGHAITTLEGLGTPQAPGPVQQAFIDEQAAQCGYCLNGMIIATQALLLRNAAPTDEEIRHELQYHLCRCGTHIEIMAAVRRAARLWAARQA

SEQ ID NO: 4515 - protein, 889 aa, Bradyrhizobium sp. BTAi1
MDMAQARSRTSMRAPAKVLHRHEYAMAADDVHAVTSLRARPDAAMPAGPDDAGQFGRPARRREDLHHLLGRGRFTDDIVASGEDALHLTILRSPHAHARIRRIDVARAKAMPGVIEVLTGADLTQNVGPLRANWIWPRMPLPEHRALSEKVARYVGEGVALVVATDRYIAADALEAIDIDYEVLAAVTDPYRAAQAGASVVHPELDGASIRGNVLQHVPVRAGNYAAARRKADVIVTQRLRNQNLVPGAMEPRSVHASYDMTTDVVTIHLSSQAPHIMKRMLAQVLNVDEHRLRVIAPDVGGGFGAKLHLYPEDVLVTAMAFRLKRAVKWTSTRTEDFLSTNHGRDHVQEVEICATRDGTITGLKATIWGNLGAYVSGMGPGIPAVNCGMILTGVYRIPNLHVDTNLMLTNTSRVDTYRGAGRPEATYLIETMVDRVARRLGLDPVEVRRRNFIPPSAFPYTIASHAFCYDSGDYPKNLDKALEIVGYASQRAKQERLRKRGRYLGIGLATYTEFTGIGNGNLLAMFGFDYGGWEYGRVLVHPTGTVEIHTGSADQGQGHATSYVQIVCDVLEIPAGQCSVVEGDTGRVEFGLGTFNSRSMAVGGAALHEAARRLLAKAKRMAAHALGVTADDIVYAKGIFSVRREMSPFAQGSRVLRRGTRDLVGKVYRHLLGVQPVQVGAGRDKISWEEVARLAHFLTTYPNGLEPGLDERVFHRPKDFVFPFGTYAAVVEVDVETGDVDVRRLVAVDDCGRIINPLLARGQVHGGAAQGLGQALLEQSLYTDDGRPRAANWMGYAFPRALHMPYIEAEHTVTPTDRNALGVKGIGESGSICTPPAIVNAVLDALSPLGVTHLDMPLLPEQVLSAISTARRERSRSVDAIGSGAVAT

SEQ ID NO: 4516 - protein, 799 aa, Pseudomonas aeruginosa UCBPP-PA14
MSNHRKPHKSQEELADLFRAELTTGVGRSVKHESAPKHVSGEAIYIDDRLEFPNQLHVYARLSERAHARITRLDVTPCYQFPGVAIALTAADVPGQLDIGPVVAGDPLLADGKVEYVGQMVLAVAADSLETARKAAMAAIVEYEDLEPVLDVVEALRKRHFVLDSHQHRIGDSAAALAGAPHRLQGTLHIGGQEHFYLETQISSVMPSEDGGMIVYCSTQNPTEVQKLVAEVLGVSFNRIVIDMRRMGGGFGGKETQAAAPACLCAVVAYHTGRPAKMRLPRMEDMQITGKRHPFYVEYDVGFDDDGRLHGIQIDLAGNCGYSPDLSGSIVDRAMFHSDNAYFLGNATINGHRCKTNTASNTAYRGFGGPQGMVAIEEIMDAVARSLGKDPLEVRKLNYYGKDERNVTHYHQTVEHNLLAEMTAELEASSEYARRREEIRAFNAASPVLKKGLALTPVKFGISFTATFLNQAGALIHIYTDGSIHLNHGGTEMGQGLNTKVAQVVAEVFQVDVERIQITATNTDKVPNTSPTAASSGTDLNGKAAQNAAETIKRRLVEFAARHWKVSEEDVEFRNNQVRIRELILPFEELVQQAYFGQVSLSSTGFYRTPKIFYDREQARGRPFYYFAYGAACSEVIVDTLTGEYRMLRTDILHDVGDSLNPAIDIGQVEGGFVQGMGWLTMEELVWNAKGKLMTSGPASYKIPAVADMPLDLRVKLLENRKNPEQTVFHSKAVGEPPFMLGISVWCAIKDAVASLADYRAQPAIDAPATPERVLWGVEQMRRLKAAQAQAADAAVEPA

SEQ ID NO: 4517 - protein, 484 aa, Pseudomonas aeruginosa UCBPP-PA14
MIRFLLNREIRVEERLDPNLTVLDYLRRHLGKTGTKEGCASGDCGACTVVVGELVTGEDGAERIRYRSLNSCLTFVSALHGKQLITVEDLKHQDRLHDVQQAMVDCHGSQCGFCTPGFVMSLFALQKNSAGADPAKAHEALAGNLCRCTGYRPILDAAEQACCHKRTDQFDAREAATIEQLRAIAPRETAELNSGDRRCLLPLTVADLADLYGANPQARLLAGGTDLALEVTQFHRELPVMIYVGHIREMKRIEVGANCLEIGAATPLTDCYQALAADYPDFGELLQRFASLQIRNQGTLGGNIGNASPIGDAPPLLIALGAKIVLRRGERRRELPLEEYFLDYKVTAREEGEFIEKILVPRARPSQAFKAYKVSKRIDDDISAVCAAISLDLEDGRIARARVAFGGMAAIPKRAAACEAALQGARLEAASFERAAAALANDFTPLSDFRASKEYRLLTAQNLLRKCFLELHAPAVETRVTAYV

SEQ ID NO: 4518 - protein, 938 aa, Oryza sativa Japonica Group; identical to SEQ ID NO: 1873

SEQ ID NO: 4519 - protein, 1213 aa, Archaeoglobus fulgidus DSM 4304
MKILIDLQPAQGESRFRGIGRYSLKIAEEIVKIKGDEVYILLNDAFPREAVKIKYSLGLPEGNYLVFSPLKTIAFINSPEKWRVEVSELIRDLAIARVEPDVVFVPSVFEGFVDNIPISIKKFRNVNTAVVLYDLIPLIYPHFYLADKKMKHWYYYRLNQFRAADAFVAISESSKREGIEYLNLKEGDFCVAYPAPSESFRVLDEPDERVLENYGISKRYLLYVPGGYDFRKNVEALILAFGKLPKEIKDKLQLVIASKIDEYNERRLKELARKVGANVVLAGYIRDEDLSTLYNLCELFVHPSLHEGFGLPVVEAMACGAPVIGSDSSSIAEIIKRSDALFNPKDINSISSKILEVLENDEFREELRRYGLKRAKDFSWRESAKNILKFFKEKFGYGKSVAYLFRKPRMAYLSPLPPAQSGISYYSSELLPELSKYYEVELIVNQNDVSDEYVRANFPIRTVEYFTKNFRKYERVLYHMGNSEFHAHMWELLESYPGVVVLHDFFLSNFLWWASQGRREVLERELFFSHGFKGLIDLKESLEKAVWEYPINLRILQNAIGIIVHSEHSIELAKEFYETEKEKFSIIPQMRKVEKIRDKKVAKKEFGYEDETFLICSFGIIVNTKMTELIVDAFLSSSLPEKGCVLVLVGKTFDDEYGIRVLAKAKNSGGKVKVTGWVDEETWKKYLEACDLAVQLRTLSRGEVSRAILDCLAFGIPTIANAHGFIKYLPNEVVYKLSENPSKEELREALERLHEDSSLRDRISKNARKYVEENLNPREIAKRFYEAIEKFYSRVNDSEIIEKISQIEIPRNERFFDEISKHLEKTFPASPKQRKILVDVSEIVKVDRHTGIQRVVKSLINELLSIAPKKIRVEPVYFDENIGIYRYARKWAGKILNLDYEFLDDELVDFRKGDILLLLDFYTYQNPHKKGIYWELKASGVKIVSVVYDILPLKRPKWFIDGMNEWFREYIETLAEISDKIICISESTANDLSEYLKKENLLRSNLKITSIHLGAEIEKFGTRGLPDNWGDLVKLLQSKPSFLMVGTIEPRKGHRQTLSAFEILWRDGYDVNLVIVGKEGWLTQDVIERIKNHPELNRRLFWINNASDEFLDKIYRACTALIMASEDEGFGLPIVEAAYRGLSIIARDIKVFREIARDGAYYFSGLRPEDLADAIKSWMELYRKGEHPKPEKVEVLSWREVAKKYLKEILEDS

SEQ ID NO: 4520 - protein, 484 aa, Musa acuminata
MRLFSISSASFLLVLLFSCSLVRGGRSRELDREALRQQEADRVVGLPGQPPVSFRQYAGYVTVNESHGRALFYWFFEATHDVEKKPLLLWLNGGPGCSSIGYGAAEELGPFLMQKGVPELRFNQHSWNKGKKPIPKANLLFLESPVGVGFSYTNTSSDLQSLGDKITAEDSYIFLVNWLKRFPQYKSHDFYIAGESYAGHYVPQLSEKIFDENKKASKETYINFKGFMIGNALMDDDTDQTGMIDYAWDHAVISDRVYHDVKSNCNFGIEPATEACNNALREYFAVYRIIDMYSLYAPVCTSITSTRKSFQIEGAAPKLFSRYSGWHQKPAGYDPCVSDYSEVYFNRPDVQEALHANTTKIGYNWTHCSEVVTKWNDSPATMLPVIRKLINGGLRVWVFSGDTDGRIPVTSTRYTLNKLGMKTIQEWKPWYDRKQVGGWTIVFEGLTFVTVRGAGHQVPTFAPRQAQQLIHHFLANQQLPPSAF

SEQ ID NO: 4521 - protein, 324 aa, Pseudomonas putida KT2440
MSRIFADNAHSIGNTPLVQINRIAPRGVTILAKIEGRNPGYSVKCRIGANMVWDAESSGKLKPGMTIVEPTSGNTGIGLAFVAAARGYKLMLTMPASMSLERRKVLKALGAELVLTDPAKGMKGAIEKANEIVASDPEQYFLPGQFENPANPAIHEKTTGPEIWNDTDGAIDVLVAGVGTGGTITGVSRYIKHTQGKAILSVAVEPVASPLISQTLAGEELKPSPHKIQGIGAGFVPKNLDLSIVDQVETVTDEESKAMAIRLMQEEGILCGISCGAAMAAAVRLAEKPEMQGKTIVVILPDSGERYLSSMLFSDMFSEQETQQ

SEQ ID NO: 4522 - protein, 389 aa, Dictyoglomus thermophilum H-6-12
MIVGLFNDSFPPVMDGVAIAVKNYAYYINKKYGKAYVVTPSFPGYKDEEEYEVIRYFSIPVVLRPPYRFGIPFLDLKAMRKIESIPFDIIHVHSPFSSGVLGLYIAKKRKIPIVASFHTKYYDDFKEATKSDFIARLGVKIIVEFYNRVDEVWTVNSATAETLRDYGFKKEVKIIPNGSDFIPPRNIEEYREKIERLHNLSKEEVVILFVGQMVKQKNVEMLLRSLKVLKDENISFKAILIGTGKDEDYFKKLAEELKIEDRVIFTGKVLDRELLKAYYARADLLAFPSLYDTSALVVKEAAALGCPSLLIKGSTVAEGEGVIDGLNGFLSEDDYINYAKKMKEILSQRELLKKVGENARVTLYKHWEEIVDIVVENYKRLLDKYKGKQ

SEQ ID NO: 4523 - protein, 138 aa, Frankia sp. EAN1pec
MEPRLTLADFLREHCHLTGTHLGCEHGVCGACTVLLDGAAVRACLVLAVQADGSEVTTIEGLGSPDDLSPVQVAFQENHGLQCGFCTPGFVVSVTALLRDNPDPTDEEIRAGLSGNICRCTGYQGIFKAVRAAAGKTP

SEQ ID NO: 4524 - protein, 184 aa, Gloeobacter violaceus PCC 7421
MTASVGLPAPSFTLKSTKGATSPKNLGEPIALTDYRGKWLIFFFYPLDFTFVCPTEILALSDRYEEFQDLDTEVLGCSCDSVFSHWAWISTPREKNGIAGLKFPLVADFTKDVAEAYGVLNEKEGYSQRGLFIIDPDGILKYATITDDNVGRSVEETIRVLQALQNGGLCPGDWKPGQKVLEVV

SEQ ID NO: 4525 - protein, 177 aa, Candidatus Carsonella ruddii
MLNTKIKPFNAISYFNKKFYNINLNDLKNKWNIFFFFPFSFTFVCPTELKDISNYNLKFKEKNCNIFAISTDSHYTHKKWIDEELTFVNFPLISDFNKLISKNFNIYNKKDGNCERSTFILDKNLNIKYIEILDTNIGRSILNIYQKLLMMQFTYKNINKLCPFSWNNDNKYIEINL

SEQ ID NO: 4526 - protein, 789 aa, Frankia sp. EAN1pec
MGNSTVTTAAATPTAARYAGTRVNRVEDPRLLTGQGTYVDDVKRPGMLHACFVRSPFARARIIGIDASSALELEGVHAVFVAEDLNPGVHEHWFGIIGRDVPDTPRPALAQDEVRFVGDPVALVIAEDRYIAEDAVELVEVDYDPLPPVASYISAQESTELVHEAYQNNRAGLLKGGDQGRVDEACAGAAFVVEETIYQQGYAPVPMETRGIVVEWSGGELTIWAASQAPHELRAFAARYLGLPENRVRVIMRDAGGGFGQKVNPMREDMCMLLAARKVPAALKWIEDRRENLMAANSARHEHGAARLAFDAEGRIVAAQIDHVQDVGSYPTPWPVGTAVAVCMMFPGPYRIPVAAWSSASVFSNTLGRGAYRGPWQYESVAREVLLDVAARRMGLDPVELRRRNFLARADLPYVNPCGMPYDHMSPREVFEKALEHFDYDAFRREQAEARANGRYIGIGTCSYVEPTTTGMSFYATEGATIRIEPSGTVNVYLAGGSTGNSLETTAVQIAADALGVDIRDVNTIQGDTAVTPFGGGTGGSRSGSMIAGAVGVTAGELRERIIAIAAHRLEAAAEDIELADGRANVRGTPSIGMSLAEIANVAYFDPAGLPPGVQPGLEVSGRYQAQAPMLWANATHICTCEVDTETGVVTFLRYLVSEDCGPRINPSIVEGQVDGGTVQGIGGALYEDLAYDEDGNPVATTFIDYLLPTIAEMPLIEHVHLETPGPGPGGYKGAGEGGAIGAPPAVINAVADALAPFGVSITHLPLTPATIVALLDEGKSGQEDQQPH

SEQ ID NO: 4527 - protein, 145 aa, Synechococcus elongatus PCC 6301
MALTVGTAAPDFTALDDAGQSIQLSQFRGKTIVLYFYPKDDTPGCTKEACSFRDSYSAYQGKDIIVLGVSTDDSSSHEQFKTKFSLPFPLVADPDRSITQAYDVDGGGYAKRVTYVIDGEGQIIRVYDSVKTDTHAGDILADLGL

SEQ ID NO: 4528 - protein, 458 aa, Frankia sp. EAN1pec
MFTRWTDDGPRLGVGRCHRARVRVAVVSESFLPQVDGVTNSVCRVLEHLRDTGHEALVVAPAPAPAARRTAPRSYAGAPVLWSPSAPMPGYPEFRFATPWPGLAAALREFRPDIVHLAAPAGLGAQAAYAARRLGVPSIAVYQTDIAAFATRYGLSAAERTIWRWLASVHRLATRTLAPSWDAVDTLLAEGVQRVARWSRGVDLERFHPDHRDERLRAALAPRGEVLVGYVGRLAREKRVELLAGIADLPGARLVVVGDGPCRPALTRALPGAAFLGFRTGADLSAAVASLDVFVHTGTHETFCQAAQEAKASGVAVVGPAAGGLLDVIEHERTGLHYTPGDPHALRREVTRLVEDGELRARLASAARASVAGCDWHAIGDELLGHYRDVLGTAQPAAGRRHRLPTRLTRARRGPGGMRIAGPAEATRPAWTAMTPTTAVPALAATTATTATTDGWPG

SEQ ID NO: 4529 - protein, 200 aa, Pseudomonas fluorescens PfO-1
MSVLVGKQAPDFTVPAVLGNGEIVDSFTLSSAIKGKYGLVFFYPLDFTFVCPSELIALDNRMADFKARNVEVVAVSIDSHFTHNAWRNTPVNNGGIGQVKYTMAADMKHEIAKAYDVESEGGVAFRGAFLIDDKGVVRSQIINDLPLGRNMEELIRLVDALQFHEEHGEVCPANWKKGDKGMNASPEGVAAYLTENAAAL

SEQ ID NO: 4530 - protein, 170 aa, Azoarcus sp. EbN1
MLQIGEMAPAFSLPDAEMEVFDLAAERGRHHVVLYFYPRDNTPGCTRQAADFSDHEEDFARHDCIVVGVSPDDCLTHAEFRDQHGLSVRLLSDVEREVCRLYHVWQPREVDGVKKMGVVRTTFVIDKEGVIRHMLHDVSPRGHVAGVFELVRKLQTENAHGNRQEQRGNA

SEQ ID NO: 4531 - protein, 394 aa, Rhizobium leguminosarum bv. viciae 3841
MLQRPANTYSGESWANAAAAGNLPERLVIVTDAWHPQVNGVVRSIENTNRELAKMGVEVSMVTPERFNSIPCPTYPEIRLSIANYRRIAREIEKHNPSYVHIATEGPLGLTARRWCLRNRMPFSTSYHTRFPEYVSARLPIPKSWLYSFVRWFHNGGAGCMVATPSLARELSEKGIRNLMPWSRGIDATQFRPMELEENPFGLARPIFMTVGRVALEKNLPAFLDLDLPGSKVVVGDGPARAELEKQYPDVFFAGVQFGEDLAKTYAQADVFVFPSLTDTFGNTILEALASGVPVAAYPVTGPLDIIGEDGEVGALDQNLQAACLAALSASRGKARDLAMQYSWEAATLQFINNIRAANGVITPKWKKAWQFATKSLPRSRKPGETAGPLPSAD

SEQ ID NO: 4532 - protein, 313 aa, Pseudomonas syringae pv. phaseolicola 1448A
MIGTPRSLDCEDAMTLQYQTIADCVGNTPLVRLQRMAGNTSNTLLLKLEGNNPAGSVKDRPALSMITRAELRGQIHPGDTLIEATSGNTGIALAMAAAIKGYRMILIMPDNSSAERKAAMTAYGAELISVSKDQGMEGARDLAERMQAEGRGKVLDQFANGDNPEAHYTSTGPEIWRQTGGTVTHFVSSMGTTGTIMGTSRYLKEQNPEVQIVGLQPMEGASIPGIRRWPHEYLPKIYQSDRVDRIIDMGQTEAEDTMRRLAREEGIFCGVSSGGSVAGALRISQEVENAVIVAIICDRGDRYLSTGVYDSPN

SEQ ID NO: 4533 - protein, 857 aa, Brachyspira pilosicoli
MGESAKIIINGKEMSFDSDRKLMDVLRNDCKCKSVKDGCSEGACGTCTVLIDGKPTKACIQTIGRLQGKSVQTIEGFTQREKDVYSHAFAVAGAVQCGFCIPGMVICAKGLIDKNNNPTRLEIVAAIKNNICRCTGYKKIIDAIELAAKMIRENIDVKEYKGKVKLGDKNIVRVDAKEKALGIGEYCDDVEIEGMLYGVAVRTKYPRAKILKIDISEAKALKGVVDIITAKDLPGAKKVGHIFHDWDVLIGEGETTRFIADSLALIVAEDEATAKKARDLVKIEYEELPLVRNPEEAMKENAPLVHEDRESNLLTHERLVKGNADEVIAKSKYKVTRHYELPWTEHAFMEAEVAVAMPFNGDGIFVYSSDQSVYDTKREVAMALGIDPEKVVVENKYVGGGFGGKEDMSVQHYAAIMAYRTKRPVKFKLTRQESINWHPKRHPMSIDMTTACDENGILTAMKATLITDAGAYASLSGPVLQRACTHAAGPYNYHVIDIEGKSFYTNNPPTGPFRGFGVPQSCFATEMNINLLAEMCGLDPWEIRYRNAIRPGQVLPNYQIADDSTGLVETLEAVKDIFYNNKYVGIACSLKNSGVGVGLPDTGRVRLLIKDSKVNVYSAASCIGQGIATVLYQIAGETLNLNDDEIIVHQPNTATSPDSGTTSGSRQTLITGEACKRACEELKKDLDSGKTLKDLEGKEYYGEWLTITDKMGVDKPNPVSHVAYSYATQVCILNEDGTIQKVVAAHDIGKAINPIALEGQIEGGVVMSLGYALTEKFPLENCVPKVKFGTLGLFRADKTPDVESIIIEKEGVPYGYGATGIGEISSIPTAPAVALAYYKFNGEFQTELPLKNTPYSR

SEQ ID NO: 4534 - protein, 328 aa, Vitis vinifera
MAFVSRSSSTWLLSLKVALISIGVVSMAVILRQSIPVISEFAVSGVPVMWSSFRSWLKPPYLYVIINGIIITIAASSKFHRMNHQDRPETAAKDPEDERTEFTYEMKNPPEFVGLETPIVYEQREVTISEVKTVADSPVVEDEEELMISRSTTPPLPPSPLLRRESSEIPLECLLSTEKPLVSSRFGHRKPIKASPEGGKVLRVSKPKRHETLENTWKMITDGRHMPLTRHLKKSDTWENHGRHIVVREDTSPQRANKSETFKDRTNNPPPSLTSPLDSVKLRKDPSLSQDELNRRVEAFIKKFNEEMMLQRQESLNQYKEMISRGAQ

SEQ ID NO: 4535 - protein, 227 aa, Arabidopsis thaliana
MASTLSFAASALCSPLAPSPSVSPKSATPFSVSFPRKIPSRIRAQDQRENSIDVVQQGQQKGNQGSSVEKRPQQRLTMDVSPFGLLDPLSPMRTMRQMLDTMDRMFEDTMPVSGRNRGGSGVSEIRAPWDIKEEEHEIKMRFDMPGLSKEDVKISVEDNVLVIKGEQKKEDSDDSWSGRSVSSYGTRLQLPDNCEKDKIKAELKNGVLFITIPKTKVERKVIDVQIQ

SEQ ID NO: 4536 - protein, 189 aa, Synechococcus sp. WH 7805
MNLDVKVKRRHLLQKGIVAAVAITLFPSRGWSLGGSSPDIGSSAPDFDLPGTNLLVPQHSRWSLADWKGRWLVLYFYPRDFTSGCTIEAHGFQDSLANFSSLNCDVAAISADSVEDHESFCSSEDLGFTLLSDHDGEVSRNYGSWMAPYSLRHTFLIDPSGLVQARWTGVRPVGHAKEVLETLQKLQST

SEQ ID NO: 4537 - protein, 198 aa, Rhodopirellula baltica SH 1
MSVLVTQKAPDFTATAVMPDGTFKDDFKLSDYKGKYVLLFFWPLDFTFVCPTEIIAFSDRAKDFEDLGVNIVGVSIDSHFTHLAWTNTPRNEGGIGKTAYPLVADLNKQISRDYDVLLDGGVALRGLFLIDQEGVVRHQVVNDLPLGRSVDEALRMVKALQYFETNGEVCPANWQEGSRTIKADVEGSKEFFGAEYKS

SEQ ID NO: 4538 - protein, 709 aa, Brachyspira pilosicoli
METFIKELKTSVPRVDALDKITGKTKYLNDIDFGNEVLYAKIVHSTKARAKILKINIPELPDGYFTVDYKDVPGKNAVTMIISDWKPFAEDTVRYIGETILLIVGPDKNIVYDIAEKVKIEYQDLEPVLNIEDSKKLLGGAIYGDNNIFISFNAGYGDVDEAFKKAKTIIEETYYTPYQEHLYMEVNGAVGVWENGKVSIYSSTQCPYYVQKAASPVLGVEDVRVVAPPIGGGFGGKEHYPDVLASVVAVAAHKAKKTVKLILDRQFDMAYSVKRQPAQIKTKIALDENNNITALDVVSDMDAGAYESSSRVIMQRCTYTAANVYHFPNVRVVGTLYATNNVPSCAFRGFGGPQAIFAIERTMDNIAKKINVDPIELKKKYFVKQNDPTITGGIFHDNIILPKMLDLALKESDYERKSKEYKNTMYKGIGISCFLHGCAFTGSGERDIIKAKLKLKKKGNKVTILTSNTEIGQGLHTTFRKIASYNLNIPLEDIDIAEYDTDIVPNTGPTVASRSVMIVGYLIQEASKKLKERWNESDEIEITEDYKHPTHLVDWDTNTLRGDAYPSYGLGINVVEVEIDKYTLEVKIVGVWAVFDCGYPIDEKIVEGQIKGGVAQALGWGALEKIVNKDGKFLQVKMSDYMIPTSLDLPEIKTYIMCEPYQYGPLGAKGIGEITFDGAASAYASAMENALKYHFTSIPILPENIAEVL

SEQ ID NO: 4539 - protein, 397 aa, Thermotoga maritima MSB8
MKVLIITNLFPLNNNSNSGIFVVQRLRHYKSFNVNLDTISLGHHNSKIASLLEKLLRGHSNKKTLEEVENVKFYPVSIEINLLRLIKYGLLRNYFTVLCKEYKKMIEEAFNLNEYDLIHAHGMYSVPAGLTAKILAEKYRKPFIVTLHGSDVNLFMPHRKEIYVSILESASATIFVSKALLEKAKSLGFSGKNAVVIPNGYDETIFKPMDKEAVRKELGIHREGYKYVGFVGNLIPIKRADKLGEIFHLIAKEIPETFFIIVGDGPLRKKIEKETKGLNIIFTGRLPQKDVAKYMNAMDVMVLPSRNEGWPCVILEAQACGTCVIGSSNRGIPEAIGFPEYVVEEGDQFEERFARRVVEVLNEGYDVNRILERAKGFTWRNIVEKEIDVHKRVVLKS

SEQ ID NO: 4540 - protein, 324 aa, Pseudomonas syringae pv. tomato str. DC3000
MSRIYADNAHSIGNTPLVQINRIAPRGVTILAKIEGRNPGYSVKCRIGANMIWDAEASGRLKPGMTIVEPTSGNTGIGLAFVAAARGYKLMLTMPASMSIERRKVLKALGAELVLTEPAKGMKGAIAKAEELLAGDPETFFMPAQFDNPANPAIHEKTTGPEIWADTDGTIDVLVAGVGTGGTITGISRYIKHTAGKPILSVAVEPDSSPIITQAMAGEEITPAPHKIQGIGAGFIPKNLDLSIVDRVERVTDDESKAMARRLMQEEGILCGISCGAAMAAAVRLAEKPEMQGKTIVVILPDSGERYLSSMLFSDLFTDQELSQ

SEQ ID NO: 4541 - protein, 167 aa, Brachyspira pilosicoli
MRRCCDMAISFTVNNKKINTELNPLTRLIDFLRDELKLTGTKEGCGEGECGACAVLMNGKVVNSCLIPIALCEGKEILTIEGYTETEKGKIVTKAFIDEGAVQCGFCTPGMVMSTEAILNDTKGNPTEEEVRRGLSGNLCRCTGYDHIVNAVLRASEMASKEGKKLW

SEQ ID NO: 4542 - protein, 203 aa, Photobacterium sp. SKA34
MVLVGRQAPDFTAAAVLGNGEIVDNFNFAEFTKGKKAVVFFYPLDFTFVCPSELIAFDKRFEDFQAKGVEVIGVSIDSQFSHNAWRNTAVEDGGIGQVKYPLIADVKHEICKAYDVEHPEAGVAFRGSFLIDEDGLVRHQVVNDLPLGRNIDEMLRMVDALNFHQKHGEVCPAQWEEGKAGMDASPKGVADYLSEHTADLGKK

SEQ ID NO: 4543 - protein, 309 aa, Bacillus sp. SG-1
MKVVQNIADLIGDTPLVKLNRLNPEGGADIYVKLEFYNPSKSVKDRAAFQMILEAEKAGLLKEGSTIIEPTSGNTGIGLAMNAAARGYRSILVMPDTMTQERINLLKAYGAEVVLTPGDEKMPGAIQKAKELTAEIENSFMPMQFENESNPNAHRKTTAVEIIEAMDELGKPLSAFVATAGTGGTITGTGEVLKEHYNDIEVHVVEPAGSPVLSGGQPGKHKLVGTSPGFIPEILNQDVYDEIHKIEDEDAYDIARRMASEEGILVGPSSGAACYAAIQVAKKLSPDDVVVCIACDTGERYLSSDLFRF

SEQ ID NO: 4544 - protein, 388 aa, Thermotoga maritima MSB8
MIKVLHIIPSLAVGGAEKLVSDMVEFADRSRFDVAVMRITGTDSFLVEKLTSKGYQVYTIVLDYEAIAPSKVIRRLLRAIKNMRRTYNLLREIRPDIIHSHLSALRIALIPALLCRIPVKVHTIHTVAEKDAKGITRFFNRIAFKFFGFVPVSISQEVAESVKKLYGRKISTPVIYNGIDVQKFSIDQPKRVDRDKTILINVARLSREKNHALLVRAFSKAVQSCPNLELWLVGDGELRRDIEELVKQLGLEEKVKFFGVRSDVPELLSQADIFVLSSDYEGFGLVVAEAMAAGLPVIATAIGGIPEILEGGRAGILVPPKDVDALAKAIVELARDEKKRAELSDYGRKLVAERFDIRRTVREYEKLYLELLEKKKGSKKFRIKGNVL

SEQ ID NO: 4545 - protein, 329 aa, Arabidopsis thaliana
MAVLSKPVAIPKSGFSLIPVIDMSDPESKHALVKACEDFGFFKVINHGVSAELVSVLEHETVDFFSLPKSEKTQVAGYPFGYGNSKIGRNGDVGWVEYLLMNANHDSGSGPLFPSLLKSPGTFRNALEEYTTSVRKMTFDVLEKITDGLGIKPRNTLSKLVSDQNTDSILRLNHYPPCPLSNKKTNGGKNVIGFGEHTDPQIISVLRSNNTSGLQINLNDGSWISVPPDHTSFFFNVGDSLQVMTNGRFKSVRHRVLANCKKSRVSMIYFAGPSLTQRIAPLTCLIDNEDERLYEEFTWSEYKNSTYNSRLSDNRLQQFERKTIKNLLN

SEQ ID NO: 4546 - protein, 385 aa, Rubrobacter xylanophilus DSM 9941
MRVCLVSPYSWSFPGGVLEHVDALACQLERRGHRVRVLAPNDPLDLRTRLLHPKLGRHHPPPERVVPVGRSLPFPANGSLANIAFSPRVWRSVRRAVKALRPDVIHVHEPLAPLVSLAALAAAEELEIPAVGTFHANYPEGSAYCRLFRAARRLLDPTDRIGRVLRERIAVSPAAAETAGRYFRADCWIVPNGVDVGRFAPPPGLRRRPGEVLFVGRPVPRKGLPVLLRAFERVLAEVPGARLVIVGGRPGDVRVPKRLLCGVEVRGVVDGDGLVAAMHSAEVLCAPSTGRESFGMVLVEGMAAGLPVVASDIPGYDRVITHGRDGLLCPPGDPKALAAALVGLLKSPSLRERLAAAGRRTAGRYDWPRVAGEVERVYRAALGGR

SEQ ID NO: 4547 - protein, 387 aa, Acidobacteria bacterium Ellin345
MTNKKPMKIGITCYPTYGGSGVVATELGIELAQRGHQVHFISYSQPIRLTEPHPNIHFHEVEVSRYPLFEYPPYDLALATRMAEVAEIYNLDLLHVHYAIPHSVSALLAREMTAFGPGRKRHLPFVTTLHGTDITLVGLDPSYLPITRFSIEKSDGVTSISNYLREKTLQAFGIKNEIRVIPNFVNCDIYHRDGKTQHYRKEWAPNGERVVVHLSNFRPVKRVPDVIEIFERIQQRVPAKLVMIGDGPDRSRAEWMVVEKKLQDRVLFLGKQDDVHEKLPAADLMLMPSTLESFGLAALEAMACEVVPVATKAGGVPEVIDHGVDGYLADVGDIDTMAMYSIDILSDDEKLHEMAKMARFKAQSTYCASKIIPMYEDFYREVLERAS

SEQ ID NO: 4548 - protein, 221 aa, Solanum lycopersicum
MAHCLSRFPISQPILFSNNPKYSNSSLPISSRKYQGNYKKLKVMVVDERHNLDHLQRQNKTPQPRKRTPQMAPVGLWDRFPTARTVQQMMDTMDRVIEDPLAFNGGPSTDDIGYRRGRTPWEIKENEGEYKMRFDMPGMTKEDVKVWLEEKMLVVKGEKMVKNNEKEEEWSAKSYGKYNTRIALPENIDFEKIKAEVKDGVLYITIPKASSNPKVFDINVQ

SEQ ID NO: 4549 - protein, 144 aa, Glycine max
  misc_feature (32)..(32): Xaa can be any naturally occurring amino acid
  misc_feature (49)..(49): Xaa can be any naturally occurring amino acid
  misc_feature (119)..(119): Xaa can be any naturally occurring amino acid
KSKLPLVGNTAPDFEAEAVFDLEFIKFSHLAXVQTDRKSGGLGHLKYPXVSDITKSTSKSYGVLIPDQGIALRGLFIIDKEGVIQHSTINNLAIGRSVDETKITLQALQYVQENPDEVXPAGWKPGEKSMKPDPKLSKDYFAAV

SEQ ID NO: 4550 - protein, 177 aa, Candidatus Carsonella ruddii
MLNTKIKPFNTISYFNKKFFNINLNDLKNKWNIFFFFPYSFTFICPTELKDISNYTFKFKEKNCNIFAISTDSHYTQKKWVETELNFVNFPLISDFNKNISKNFNIYNKKDGNCERSTFILDRNLNIKYIEILDINIGRSINDIYQKLSMIQFTNKNINKLCPFSWIKDGKHIDLNL

SEQ ID NO: 4551 - protein, 221 aa, Solanum lycopersicum
MAHCLSRFPISQPILFSNNPKYSNSSLPISSRKYQGNYKKLKVMVVDERHNLDHLQRQNKAPQPRKRTPQMAPVGLWDRFPTARTVQQMMDTMDRVIEDPLAFNGGASTDDIGYRRGRTPWEIKENEGEYKMRFDMPGMTKEDVKVWLEEKMLVVKGEKMVKNNEKEEEWSAKSYGKYNTRIALPENIDFEKIKAEVKDGVLYITIPKASSNPKVFDINVQ

SEQ ID NO: 4552 - protein, 400 aa, Cyanothece sp. ATCC 51142
MKIAYLINQYPKISHSFIRREILALEALGVPITRFSIRACQEPLIDKADKEELAKTNIILDVGIIGLLISFLKVAITRPKRWLEALQLTIKIGLNSDRGLILNLAYLAEACVLVERFSYLEISHFHAHFGTNSTTVLLLNNVLSGVSYSFTVHGPEEFDKVEAIALPEKIKRAAFVVAISSYGKSQLYRWCEFKDWDKIKIVHCGVDDAFLSFSYQPMPEKPCFVSLGRLSEQKGQYLLIEAASKLVGEGYDFKLILVGDGELRQPIEESINRFNLEDTVEITGWATQAQVQKYILQSQVMVLPSFAEGLPVVIMESLALGRPVISTYIAGIPELVIPGESGWLVPAGSVEALVSTMKTVLDTPISELKNMGKIGIKLVKENHNVTQEAQKLKLLFESIH

SEQ ID NO: 4553 - protein, 154 aa, Solanum peruvianum
MSLIPRIFGDRRSSSMFDPFSIDVFDPFRELGFPGTNSGETSAFANTRIDWKETPEAHVFKADLPGLKLEEVKVEVEEDRVLQISGERNMEKEDKNDKWQRVERSSGKFMRRFRLPENAKMDQVKASMENGVLTVTVPKEEMKKPDVKSIEISG

SEQ ID NO: 4554 - protein, 177 aa, Candidatus Carsonella ruddii
MLNTKIKPFNTISYFNKKFYNINLNDLKNKWNIFFFFPYSFTFICPTELKDISNYNLKFKEKNCNLFAISTDSHYTHKKWIESELTFINFPFISDFNKLISKNFNIYNKKDGNCERSTFILDKNLNIKYIEILDNNIGRSIHNIYQKLIMMQFTYKNINKLCPFSWNNDNKAIGINL

SEQ ID NO: 4555 - protein, 154 aa, Solanum peruvianum
MSLIPRIFGDRRSTSVFDPFSIDVFDPFKELGFTVSNSGETSAFANTRIDWKETPEAHVFKADLPGLKKEEVKVEVEEDRVLQISGERNVEKEDKNDTWHRVERSSGKFMRRFRLPENAKMDQVKASMENGVLTVTVPKEEVNNPDVKSIEISG

SEQ ID NO: 4556 - protein, 186 aa, Xylella fastidiosa Dixon
MSVLNTEILSFKAIAYKNGQFVEVSEAVLKGKWAVFVFYPADFTFVCPTELEDLADHYEEFQKYGVEIYSVSTDTHFSHKAWHDISPAIGKIKYAMIGDPTHEISRNFNVLRPSGLADRGTFIIDPQGVIQSVEITAEGIGRDAKELLRKVKAAIYVANHPGEVCPAKWEEGGKTLAPSLDLVGKI

SEQ ID NO: 4557 - protein, 756 aa, Oryza sativa
MASPPREEAMDQKAKEAAPAARGHPALRGPARRERYTHGLGAAQMGALRAMCGALIPALPAEEEDGARGGGDMDVERFYLATAAESTVPDEVAELTMTRCIWEAGVLVRIILWILATRVGTLALCGRRCVSGEFPYVRRFADMPVDENLENPSWKAIGYSVPAAEEEPQKEEPTEATPTPAPATAPPCRPLDNGVVETKQLDDNALLMSLAEKGLALKTGASSPSAHHHTVLCDAVVVGSGCGGGVAAAVLASAGYKVVVVEKGDYFAARDYSSLEGPTMERLYENGGVFSTANVTTTMFAGATVGGGSAVNWSACIRTPANVLQEWSNDHGLPLFGGQGYVQAMDAVCARLGVTGRCREEGFQNKAVRRGCEALGLRVEAVSRNSSEGHFCGSCNLGCPTGEKRGTDTTWLVDAVGRGAVILTGCKAERFILETNTGGGGGRRKKCVGVVAKCLGKGITKKLRIEAKVSVSACGALMTPPLLRNSGLKNRHIGRNLHLHPVSMAWGYFPDSTAELPGKSYEGGIITSMHRVTDRTIIETPALGPGAFAAVVPWESGRDMKERMRRYARTAHAVVLVRDRAAGTVGGEGRVRFTPSRGDAGELRAGLRRALRILVAAGAAEVGTNRSDGLRLRCKGARDEDVEAFLDEVSVEKGPMHPGSDKWALLASAHQMGSCRMGRSAKHGGVDGGGESWEAEGLYVCDGSLLPTAVGVNPMITIESVAYCVAKGIAESLASRAARSVENRDVSTNPPLACES

SEQ ID NO: 4558 - protein, 336 aa, Nicotiana tabacum
PRRAAEDCFPPLDYRQQRPSQELVAKDLHGIEWKFRHIYRGQPRRHLLTTGWSAFVNRKKLVSGDAVLFLRTADGELRLGVRRAAQAKTCSNYLAAYSQLLNVSGIVDVVKAISSTNAFSICYNPRASSSGFILPYHKFSKTLAHPFSAGMRFKMRVETEDAAEQRFTGLVVGVSDVDPVRWPGSKWRCLLVRWDDLDVSRHNRVSPWEIEPSGSAPVSSSLVMPSAKRTRVGFPITKADFPIPRDGIAVSDFGESSRFQKVLQGQEILGISSPFVGFDAHSPRTAGIRCFPGFPSSGASRLGNSIRTLLGDTDKSPESIGFSDSSRFNKVLQGQE

SEQ ID NO: 4559 - protein, 192 aa, Magnetospirillum magnetotacticum MS-1
MIDFLDALERLWEAGVPFDAVISGIGPDVEAARARADEIGFTSAQVRFTGYADYDTVPDLYREADVFVSPTYAEGFSNTILEAMASGLAVVSTHSVGVSDCLRDGENGLLVDPGDVRALTGALRRVVEDEELRTRLAESGLEECRRVYSWTAVGRQIMEVYAQVAGEPPHTDFAETLPADPTCRFRKEPHLL

SEQ ID NO: 4560 - protein, 336 aa, Nicotiana tabacum
PRRAAEDCFPPLDYRQQRPSQELVAKDLHGIEWKFRHIYRGQPRRHLLTTGWSAFVNKKKLVSGDAVLFLRTADGELRLGVRRAAQAKTCSNYLAAYSQLLNVSGIVDVVNAISSTNAFSICYNPRASSSGFIIPYHKFSKTLAHPFSAGMRFKMRVETEDAAEQRFTGLVVGVSDVDPVRWPGSKWRCLLVRWDDLDVSRHNRVSPWEIEPSGSAPVSSSLVMPSAKRTRVGFPITKADFPIPRDGIAVSDFGESSRFQKVLQGQEILGINSPYGGFDAHSPRTAGIRCFPGFPSSGASRLGNSIRTLLGDTDKSPESIGFSDSSRFNKVLQGQE

SEQ ID NO: 4561 - protein, 152 aa, Helicobacter hepaticus ATCC 51449
MKLQKGDKAPQFRLKNADEIEISLQDLLTKRVVVYFYPKDNTPGCTIEAEEFSTLLEKFEAKDTIIVGISPDSPKCHQNFINKKALKILLLSDTDKSIASAYGAYGTKMMYGKEVQGIIRSTFVIERNGIIKESFYNVRAKGHAQKVLESLD

SEQ ID NO: 4562 - protein, 313 aa, Helicobacter hepaticus ATCC 51449
MLYRSSLELIGHTPLLELTHLNIANNNRIFAKLEFYNPAGGIKDRVALYICQKLKEKGLLHKDSVIIEATAGNTGLGIAFVAQHFGCKAILIVPDKFSIEKQILMRALGAQVINTPKEKGMQGAMDRAQEMLSCTPYALSLNQFENLDNPQAHYLTTAKEIYDDMAKVQANSENGSDALIDYLVCGAGSGGSFSGIVGYLKKQDSRIKGVLCDPVGSIIGGGEEGCANIEGIGNNFIPHTMDISLIDSVQKITDEEAYEGVRMLAKNEGILAGISSGACLIACLKLANEVQNSLIVTLFADDLSRYFSRNLID

SEQ ID NO: 4563 - protein, 327 aa, Escherichia coli CFT073
  misc_feature (296)..(296): Xaa can be any naturally occurring amino acid
MSKIFEDNSLTIGHTPLVRLNRIGNGRILAKVESRNPSFSVKCRIGANMIWDAEKRGVLKPGVELVEPTSGNTGIALAYVAAARGYKLTLTMPETMSIERRKLLKALGANLVLTEGAKGMKGAIQKAEEIVASNPEKYLLLQQFSNPANPEIHEKTTGPEIWEDTDGQVDVFIAGVGTGGTLTGVSRYIKGTKGKTDLISVAVEPTDSPVIAQALAGEEIKPGPHKIQGIGAGFIPANLDLKLVDKVIGITNEEAISTARRLMEEEGILAGISSGAAVAAALKLQEDESFTNKNIXVILPSSGERYLSTALFADLFTEKELQQNASL

SEQ ID NO: 4564 - protein, 158 aa, Mesorhizobium loti MAFF303099
MAGIAVSTTINGDNIEYLCQPDETLLDVLRDRLGLTGAKEGCGTGDCGACSIILDDRLVCSCLVLGAEAEGRRIETVEGMAHGDQLHTLQQKFLEHAALQCGICTPGFLIAAKDLLAKNPDPTEEEIRFGLAGNLCRCTGYDKIVRAVQDAAIVMKGA

SEQ ID NO: 4565 - protein, 235 aa, Glycine max
LLKNENNSRPRRIALFVEPSPFAYVSGYKNRFQNFIRCLLEMGDEVMVVTTHEGVPQEFYGAKLIGSWSFPCPLYQKVPLSLALSPRIISEVARFKPDIIHASSPGIMVFGALIIAKLLCVPIVMSYHTHVPVYIPRYTFSWLVKPMWLIIKFLHRAADLTLVPSAAIAGDLLAARVTAANKICLWNKGVDSESFHPRFKSHEMRLRLSNGEPEKPLIVHVGRLGVEKSLDFLKR

SEQ ID NO: 4566 - protein, 195 aa, Cyanothece sp. PCC 8801
MVSIMSRRSLFKWLLALCLTLFSSSFLITPALALGGTQPPLNEPAPEFTLPTNSGEGEISLSDYRGQWVVLYFYPKDFTPGCTLEAKRFQQDLPKYQERNAQILGVSVDDVDSHAEFCDSEGLKFPLLADTTGKVSKTYGSFLTGMSLRHTYLIDPNGILRERFLGVIPAIHSAEVLEKLDELTISLLEVRRFIT

SEQ ID NO: 4567 - protein, 303 aa, Escherichia coli CFT073
MSTLEQTIGNTPLVKLQRMAPDNGSEVWLKLEGNNPAGSVKDRAALSMIVEAEKRGEIKPGDVLIEATSGNTGIALAMIAALKGYRMKLLMPDNMSQERRAAMRAYGAELILVTKEQGMEGARDLALEMANRGEGKLLDQFNNPDNPYAHYTTTGPEIWQQTGGRITHFVSSMGTTGTITGVSRFMREQSKPVTIVGLQPEEGSSIPGIRRWPAEYLPGIFNASLVDEVLDIHQRDAENTMRELAVREGIFCGVSSGGAVAGALRVAKANPGAVVVAIICDRGDRYLSTGVFGEEHFSQGAGI

SEQ ID NO: 4568 - protein, 374 aa, Nocardia farcinica IFM 10152
MKIGMVCPYSFDVPGGVQAHVVELARVFLERGHKVSVLAPASEGTPLPDFVVSAGRAVAIPYNGSVARLSFGPMAYTRIRRWIDGNDFDVLHIHEPNAPSLSMLALKIAEGPIVATFHTSTTRSLVLSTFQGVLRPYHEKISGRIAVSELARRWQVEALGSDAVEIPNGVDVPAFARAPMLPGYPRPGGTVLFLGRYDEPRKGMQVLLAALPELVARHPDVEILVVGRGDEQRLRREAGRHARHLRFLGQVSDAEKASAMRSADVYVAPNLGGESFGIILIEAMAAGTAVVASELDAFRRVLRDGTAGMLVPVGDDVALAGALDTLLTDTERREALVRRANQVVGEYDWPVVAEQILRVYETVTVGDTRVRAAG

SEQ ID NO: 4569 - protein, 433 aa, Arabidopsis thaliana; identical to SEQ ID NO: 3347

SEQ ID NO: 4570 - protein, 311 aa, Corynebacterium glutamicum ATCC 13032
MGNVYNNITETIGHTPLVKLNKLTEGLDATVLVKLESFNPANSVKDRIGLAIVEDAEKSGALKPGGTIVEATSGNTGIALAMVGAARGYNVVLTMPETMSNERRVLLRAYGAEIVLTPGAAGMQGAKDKADEIVAERENAVLARQFENEANPRVHRDTTAKEILEDTDGNVDIFVASFGTGGTVTGVGQVLKENNADVQVYTVEPEASPLLTAGKAGPHKIQGIGANFIPEVLDRKVLDDVLTVSNEDAIAFSRKLATEEGILGGISTGANIKAALDLAAKPENAGKTIVTVVTDFGERYVSTVLYEDIRD

SEQ ID NO: 4571 - protein, 392 aa, Prochlorococcus marinus str. MIT 9303
MAHIAWLGKKTPFCGNVTYGLNTTEALRQRGHQTSFIHFDNPGGLSNGESALLANDPEVSLPYLVKSQVYTIPFPGAQRELRESLERLQPDLVHASLTLSPLDFRLPELCEQIGVPLVATFHPPFDSGMRHLTAGTQQLTYQLYAPALARYDKVIVFSELQAEVLTKLGVQEQRLAVIPNGVDPECWAPTSPQCTNPMQQEVLGRLGNERIFLYMGRIAAEKNVEALLRAWRLVETKGCRLVIVGDGPLRSTLQNNSTPTKENDVLWWGYESDLNTKVALLQCAEVFLLPSLVEGLSLALLEAMATGTACVATDAGADGEVLDGGAGIVLSTQGVTSQLRTLLPVLRDQPVLTAELGRRARMRVLERYTITRNIDDLETLYRGLLGATKMAA

SEQ ID NO: 4572 - protein, 164 aa, Herminiimonas arsenicoxydans
MDQDIAVAERPSALNQNVPDFSAAMTGNQTFQLSDYKGKRIVLYFYPKDNTPGCTTEGIQFREMYSQFQAANAEIVGVSRDSIRSHEGFKEKLALPFELISDPDETLCTMFDVMKMKNMYGKKVRGIERSTFIIDESGKLVKEWRGVKVPGHIDEVLEFVKALT

SEQ ID NO: 4573 - protein, 748 aa, Arabidopsis thaliana; identical to SEQ ID NO: 3291

SEQ ID NO: 4574 - protein, 308 aa, Listeria monocytogenes str. 4b F2365
MTIANSITDLIGKTPIVKLNRLPEAGSADVYVKLEFQNPGGSVKDRIANAMIESAEKSGALKPGDTIIEPTSGNTGIGLAMVAAAKGYQAIFVMPETMSLERRKLLQAYGAKLVLTPGPDGMKGAIAKAEELAKENNYFVPQQFHNPANPAVHEETTGPEIVEAFGKDGLDAFIAGVGTGGTVTGVGHVLKKNYPDVKIYALEPEESPVLSGGSPSPHKIQGIGAGFVPDTLDTKVYDGILKVSSEDALETAREVAKKEGILVGISSGATVKAALDLAKELGAGKKVLAIVASNGERYLSTPLYNFED

SEQ ID NO: 4575 - protein, 177 aa, Candidatus Carsonella ruddii
MLNTKINSFKSIAYFKKKFFEITDKELKNFWNVLFFFSFSYTYICPTELLELSKNINLFKNLKCNIYAISTDSHYTHKNWIENEINFINFPFISDFNHKTSKNYKILNKNDGNCYRSTFIIDPNLIIKSIEIIDISISRSIQEILNKIKMLIFTFKNKNKLCPYNWLKDNNSIDINL

SEQ ID NO: 4576 - protein, 307 aa, Bacillus halodurans C-125
MRVANSITDLIGQTPLVKLNRLVSDKHADVYLKLEFFNPGSSVKDRIALAMIEAAEKSGALKPDDTIVEPTSGNTGIGLAMVAAAKGYKTKLVMPETMSLERRNLLRAYGAELVLTPGPEGMGGAIRKATELAQENGYFMPQQFENEANPEIHRETTGRELLEQVDGQLDGFVSGIGTGGTITGAGGLLKENFPNLHIAAVEPADSPVLSGGNPGPHKIQGIGAGFVPKILDTDIYDEVIKVSTEQAFEYARRAAKEEGILGGISSGAAIYAALQVAEKLGPGKKVVAVIPSNGERYLSTPLYQFED

SEQ ID NO: 4577 - protein, 151 aa, Triticum aestivum
MDEADDDDGRRPFVVPGATVPPTARRADDRRGRTPWEIKERAGDYLVRFDMPGMTREDVRVSVQDRTLVVVAEKAAKPGEADGEKDKDNEEDGEEEEAWPAASYGRYRTRVELPENLEVERIAAEVRDGVLYLNIPKVSPSGGKVVSIQVQ

SEQ ID NO: 4578 - protein, 155 aa, Triticum turgidum subsp. durum
LNKVTDGCVGRVAAKLESMEPCSSVKDRIGYSMITDAEEKRFIVPGKSVLIEPTSGNTGIGLAFMAAAKGYRLVLTMPASMSTERRIILKAFGAELILTDPLLGMKGAVQKAEELAAKTPNSYILQQFENAANPKIHYETTGPEIWKGTGGKIDG

SEQ ID NO: 4579 - protein, 336 aa, Sinorhizobium fredii
MLHTTVTQLIGQTPVMSIDVPGRNATLVLKIEKNNPGGSMKDRMARSMVIAALEDGRLAPGGTIVESSSGNTGTGLALAALEFGLRFIAVVDHHAAPDKIRMMRALGAEIRYVEGDFREDEVAVVERQRLAAQLGAQLPGALFMNQSDNPANPAGYTGLVDELVAQLPDGIDAFVGCVGTGGSMTGISQRVKRNNPAVRTIAVEPAGSIVFGKPGHPYYQSGTGTPAGDEVGKVLDYGCIDEGVQVTDTQAFETARYIARRKGLLVGGSTGGAIYKALEFIGAGKLTGTVVTTVADGGEKYLGTIFDEEWMAKRRLLDPAIAAQLDGWLFGKARAA

SEQ ID NO: 4580 - protein, 907 aa, Populus trichocarpa
MRLSSSSSSTGFNQQTPEGDKKCLNSELWHACAGPLVSLPHVGSRVVYFPQGHSEQVAASTNKEVDAHIPNYPSLPPQLICQLHNVTMHADVETDEVYAQMTLQPLSQDDQKDAYLLPAELGTASKQPTNYFCKTLTASDTSTHGGFSVPRRAAEKVFPTLDYSQTPPAQELIARDLHDNEWKFRHIFRGQPKRHLLTTGWSVFVSAKRLVAGDSVLFIWNEKNQLLLGIRRANRPQTFMPSSVLSSDSMHIGLLAAAAHAAATNSRFTIFYNPRASPSEFVIPLVKYIKAVYHTRVSVGMRFRMLFETEESSVRRYMGTITGISDLDPVRWPNSHWRSVKVGWDESTAGERQPRVSLWEIEPLTTFPMYPSAFPMRLKRPWPSGLPSFHGLQDGDLNINSPMMWLQGGVGDLGVQSLNFQSFGVAPWIQPRFDTSMPALQPEMYQTMAAAALQEMRTVESSKLASQSHLQFQQSQNVSNGPAALIQRQMLQQSNLQHALLQNFQENQASTQAQFLQQHLQHRNQYTGQQLQQHQPQLQQVQQPKQLNELSAPQQIPNVISALPHLTSVAPSQSPSLQPISSQCQQQAFSEPLGNSIAASDVSSMHSVIGSLSQDGGSHLLNSNGSNPVISPALLSKRAAIDPQLSSGAAHCALPQVEQLRTTQSTVSDLATLLAPFSGREYSTYQGANDPQNNLLFGVNIDSSTFMLQHGIPNLRNIGTENDPLSMPFAASTFTSATGSDIPLNSDMTASSCVDESGFLQSSENVDQVNPSTRTFVKVHKSGSYGRSLDISKFSSYDELRSELARLFCLEGLLEDPQRSGWQLVFGDRENDVLLLGDDPWQEFVNNVWYIKILSPLEVQQMGKEGLSPAASVPCQKLSNSNSDGHMNTQGFRNSSNGIASMGSLDY

SEQ ID NO: 4581 - protein, 207 aa, Anaplasma marginale str. St. Maries
MQRIFMSLVTKEAIDFAAKAVMSDGKVCDLNLSKHIAGKCAVLFFYPRDFTFVCPTEILSLHSRVPKFTARNVEVIGISTDSEFAHSHWRNTPVEQGGIGMVSFPLVADDSHTISESYGVLYGGKVALRATVIIDEDFIVRHHSVNDLPIGRNIDEVLRIIDAIAHHKKHGEVCPAGWTEGKVAMEATQHGVEHYLQSYADSLGPQE

SEQ ID NO: 4582 - protein, 341 aa, Arabidopsis thaliana; identical to SEQ ID NO: 4466

SEQ ID NO: 4583 - protein, 203 aa, Thermoplasma acidophilum DSM 1728
MPVTLGQKAPDFTVNTSKGPVTLSSYRGKWVLLFSHPGDFTPVCTTEFIAFTERYKDFQALGVELLGLSIDSVYSHIAWIRDIKEHFGIEIPFPIIADIDKEVARQYNLIDEKSGATVRGVFIIDPNQIVRWMIYYPAETGRNIDEIIRVIKALQFNWERKLATPANWQPGQEGIEGAPSTVDASLKRDGEPGVKTWYLKFVK

SEQ ID NO: 4584 - protein, 270 aa, Prunus persica
ERPKVAYNNFSNEIPIISLAGIDEVEGRRADICKKIVEACEDWGIFQIVDHGVDTKLISEMTGLAREFFALPSEEKLRFDMSGGKKGGFIVSSHLQGEAVQDWREIVTYFSYPIRHRDYSRWPDKPEGWREVTQKYSDELMGLACKLLGVLSEAMGLDTEALTKACVDMDQKVVVNFYPKCPQPDLTLGLKRHTDPGTITLLLQDQVGGLQATRDDGKTWITVQPVEGAFVVNLGDHGHFLSNGRFKNADHQAVVNSNSSRLSIATFQNP

SEQ ID NO: 4585 - protein, 167 aa, Novosphingobium aromaticivorans DSM 12444
MGVTLTINGRKRVVEAEADKPLLWVLREDLDMPGTKFGCGAGLCGACTVHLDGEAIRSCQTPIADAAGKAVTTIEGVGADPVGKRVQNAWIALDVPQCGYCQAGQIMSATALLRQTPKPSAEDIDGWMSGNICRCATYLRIRAAIRQAAGLPAEIADAGNAFGEASA

SEQ ID NO: 4586 - protein, 197 aa, Blastopirellula marina DSM 3645
MSVLVTKEAPDFTATAVTETGEFKDVSLSDYKGQYVLLFFYPLDFTFVCPTEIIAFSDRIEDFKALGVQVLGCSIDSHFSHLAWRNTPRGDGGIGDIQYPLIADLDKSIATKYDVLLPGGIALRGLFLIDTKGVVRHQVVNDLPLGRSVDEALRMVKALQFHEVNGEVCPANWKEGSRTIKPTPSDSKEFFGAEYAG

SEQ ID NO: 4587 - protein, 429 aa, Acinetobacter sp. ADP1
MDGCMPGISATTLLKQQNIPESFKFYFKRRFAPLVTDGPHLNELVRPRLKIAIVTETWPPEINGVAMSLLQLCKGLQEQGHKILLVRPQQKRECYEFSPHKECLVHAQRIPKYPELQFGWPQYLKVAKAFEDFTPDVVHVVTEGPLGLTALYAARAKQIPVSSGFHSPFQDFSRFFDLAFLLKPIQGYLRWFHNHTQITCVPSQDTEKALRAFGVTCPLSIVGRGVDPKFFSPDFRNEALRERWKAASDTVVMLYVGRLSPEKEIHILIQNYAAMRRVEPRNVKLVIVGSGPDRARLEALDETQEVIFMGSLSGKNLAEAYASADVFVFASQVETFGNVVLEAMASGLPVVAYDYACAHQYIQHGVTGWLSPLGQPATFIQAMRQLSGVKQLRQMGQRARQCVEHDGWQYPVQQMEQALYRVVKEPYMK

SEQ ID NO: 4588 - protein, 415 aa, Oryza sativa Indica Group
MGQQAAEAQPLLLQGDQVDAEWGCRPHRIVLFVEPSPFAYISGYKNRFQNFIKHLREMGDEVLVVTTHKGAPEEFHGAKVIGSWSFPCPLYQNVPLSLALSPRIFSAVAKFKPDIIHATSPGVMVFGARFIAKMLSVPMVMSYHTHLPAYIPRYNLNWLLGPTWSLIRCLHRSADLTLVPSVAIAEDFETAKVVSANRVRLWNKGVDSESFHPKFRKHEMRIKLSGGEPEKPLIIHVGRFGREKNLDFLKRVMERLPGVRIAFVGDGPYRAELERMFTGMPAVFTGMLQGEELSQAYASGDLFAMPSESETLGQVVLESMASGVPVVAARAGGIPDIIPKDKEGKTSFLFTPGDLDECVRKIEQLLSSKVLRESIGRAAREEMEKCDWRAASKTIRNEHYCTATLYWRKKMGRTN

SEQ ID NO: 4589 - protein, 404 aa, Clostridium tetani E88
MNYMKVLIISHMYPSTFNSMAGIFVHQQVKTLKERGLDVKVISPVPLAPFPLNLISEKWARYKKIPYKTNIQGVEVYYPRYLEFPKGIMFHKSGIFMSMGIKSLMKKVYKDFKFDVIHSHVAVPDGYAGMILNKEFKVAHVVTIHGQDFQNTINKNIKCKKALFNVLNHVDKIITVSNKLKNVVKNEKFYNKIEIVNNGIDKDYIDLNKIHENCSGQNRVNKNLIKILSVSNLKETKGIHINLKAVSKLKEIYPDISYDIIGDGEYKSKLEELVKELCLEDNVSFLGKLEHKEVINVMKQYDIFSLPSYKEGFGMVYIEAMSKGLPVIGVKGEGIEDAIENGINGFLVERKNVDELVKTIDFLIKNPKKRMNIGKCAIKTVSDKFTWNVNADKIISIYNKVILK

SEQ ID NO: 4590 - protein, 396 aa, Moorella thermoacetica ATCC 39073
MRVAMLHWAFPPIIGGVESHLALLCPYLVRQGHQVSLLTATAPGTPVEESWQGVVIKRSPLLDLNSLTPAVIEARAGEIKELLENFLLAVRPDVVHAHNFHYFSYVHAASLQEICRRHGWPLVLTAHNVWDDELWTRMNSLARGWDLVIAVSHYIRQELVVNGYPPERVTVVYHGTDTNTFRPPSPEDRQALYTSYPEWRGRRIIFHPARMSRAKGCDVSIRALDLIRREIPDVLLVLAGTTNTVDWGQKQPAEVASLQDLIASLGLEENVFIRFFPWQEMPAVYQGAEVCLYPSAFQEPFGLVMLEAMATARPIIVSRAGGMPEIIRPGYNGFLVSMGDHEELARYTTFLLRNPEVARTMGQDGRRLVEENFTTAVMARNTLEAYNQLLALPRAS

SEQ ID NO: 4591 - protein, 287 aa, Glycine max
MVLLSKATTEQYSYIKNYMPTAFSSTIPIVDLSKPDAKTLIVKACEEFGFFKVINHGVPIEAISQLESEAFKFFSMPLNEKEKAGPPKPFGCLLNSYMSSVRKMACEILELMAEGLKIQQKNVFSKLLMDKQSDSVFRVNHYPACPELAVNGQNLIGFGEHTDPQIISLLRSNNTSGLQIFLRDGNWISVPPDHKSFFINVGDSLQVMTNGRFRSVRHRVLANGFKSRLSMIYFGGPPLSEKIAPLPSLMKGKESLYKEFTWFEYKNSTYGSRLADNRLGHFERIVA

SEQ ID NO: 4592 - protein, 1361 aa, Arabidopsis thaliana; identical to SEQ ID NO: 149

SEQ ID NO: 4593 - protein, 313 aa, Streptococcus pyogenes MGAS10394
MTKIYKTITELVGQTPIIKLNRLIPNEAADVYVKLEAFNPGSSVKDRIALSMIEAAEAEGLISPGDVIIEPTSGNTGIGLAWVGAAKGYRVIIVMPETMSLERRQIIQAYGAELVLTPGAEGMKGAIAKTETLAIELGAWMPMQFNNPANPSIHEKTTAQEILEAFKEISLDAFVSGVGTGGTLSGVSHVLKKASPETVIYAVEAEESAVLSGQEPGPHKIQGISAGFIPNTLDTKAYDQIIRVKSKDALETARLTGAKEGFLVGISSGAALYAAIEVAKQLGKGKHVLTILPDNGERYLSTELYDVPVIKTK

SEQ ID NO: 4594 - protein, 381 aa, Rhodococcus sp. RHA1
MRVAIVAESFLPNMNGVTNSVLRVLDHLQRTGHQAMVVAPDTVGSLTSAPTEHDGVPVHRVPAVMVPKVSSLPVGLPQPGLTAALRAFDPDVVHLASPFLLGAGGLGAAHRLDVPTVAVYQTDVAGFAESYGLGITSRAAWAWTRRIHRGCTRTLAPSTSAVEALAEQRIPRVHRWARGVETARFAPSRRSTGLRDSWLDGSDRLVVGFVGRLAPEKHVERLAALAGDQRVRLVIVGDGPERARLQRLMPDAVFTGQLGGVELAEAYASLDVFVHPGEHETFCQAVQEALSSGVPVIGPDAGGPRDLVAHCRNGYLLPVDRFGELLLSAVEALCDRRMRARFGEAARQSVLHRTWPAICDELLGHYAAVVGGEGFRETRAA

SEQ ID NO: 4595 - protein, 173 aa, Brassica napus
GSLNCGPEINGDYTMAPETTSMASIPPPVVPDGRAEAVANDGLVDNPLAFGRDDPSLQIFLPTKPDGSAQSGFRNQGDVSNGMRSDDWISLRLGDSACGDHGEPDGLNSSQHMSTREGSLDDTTENDSLLLGMNEGRQDKAKKRRSDNPFTFPRQKRSVRPRMFLSIDSDSDE

SEQ ID NO: 4596 - protein, 167 aa, Oryza sativa Japonica Group
MACAFSVSSAAAPLASPKGDLPLVGNKAPDFEAEAMFDQGFIKSKCMFVSSAEITAFSDRYEEFEKINTEVLGVSIDSVISKSFGVLIPDQGIALRGLFIIDKEGVIQHSTINNLAIGRSVDETLRTLQALQYVQENPDEVCPAGWKPGEKSMKPDPKDSKEYFASI

SEQ ID NO: 4597 - protein, 153 aa, Methanosarcina acetivorans C2A
MTNEIKIGETIQDFRLRDQKRDEVHLYDFKGKKVLLSFHPLAWTKVCAEQMKSLEENHELFTELNTVAFGISVDSTPSKKAWAKELGIMHIRLLSDFWPHGEVARTHGIFKEKEGVSERANIIIDEDQKVIFFKKYPGHELPDIKEIIEVLKK

SEQ ID NO: 4598 - protein, 282 aa, Physcomitrella patens subsp. patens
MACAAAASGVTLPAGNIAHARPAAFSSSASGASSSLSVRKSFSGLSKSFAARLAATNAPTGKAASAAGVKIASQKRGVITASAQDSYEPLIGNVAPDFEAEAVFDQEFIKVKLSEYIGKKYVVLFFYPLDFTFVCPTEITAFSDRYSEFEKLSTEVIGVSTDSVFSHLAWIQTDRKAGGLGDLHYPIVSDITKKISRSFNVLIPEQGIALRGLFIIDKQGVIQHATVNNLGIGRSVDETLRTLQAVQYVQDNPDEVCPAGWKPGEKTMKPDSKLSKEYFEAI

SEQ ID NO: 4599 - protein, 462 aa, Rhodobacter capsulatus
MEIAFLLNGETRRVRIEDPTQSLLELLRAEGLTGTKEGCNEGDCGACTVMIRDAAGSRAVNACLMMLPQIAGKALRTIEGIAAPDGRLHPVQQAMIDHHGSQCGFCTPGFIVSMAAAHDRDRKDYDDLLAGNLCRCTGYAPILRAAEAAAGEPPADWLQADAAFTLAQLSSGVRGQTAPAFLPETSDALADWYLAHPEATLIAGGTDVSLWVTKALRDLPEVAFLSHCKDLAQIRETPDGYGIGAGVTIAALRAFAEGPHPALAGLLRRFASEQVRQVATIGGNIANGSPIGDGPPALIAMGASLTLRRGQERRRMPLEDFFLEYRKQDRRPGEFVESVTLPKSAPGLRCYKLSKRFDQDISAVCGCLNLTLKGSKIETARIAFGGMAGVPKRAAAFEAALIGQDFREDTIAAALPLLAQDFTPLSDMRASAAYRMNAAQAMALRYVRELSGEAVAVLEVMP

SEQ ID NO: 4600 - protein, 777 aa, Rhodobacter capsulatus
MSVGKPLPHDSARAHVTGQARYLDDLPCPANTLHLAFGLSTEASAAITGLDLEPVRESPGVIAVFTAADLPHDNDASPAPSPEPVLATGEVHFVGQPIFLVAATSHRAARIAARKARITYAPRPAILTLDQALAADSRFEGGPVIWARGDVETALAGAAHLAEGCFEIGGQEHFYLEGQAALALPAEGGVVIHCSSQHPSEIQHKVAHALGLAFHDVRVEMRRMGGGFGGKESQGNHLAIACAVAARATGRPCKMRYDRDDDMVITGKRHDFRIRYRIGADASGKLLGADFVHLARCGWSADLSLPVCDRAMLHADGSYFVPALRIESHRLRTNTQSNTAFRGFGGPQGALGMERAIEHLARGMGRDPAELRALNFYDPPERGGLSAPPSPPEPIATKKTQTTHYGQEVADCVLGELVTRLQKSANFTTRRAEIAAWNSTNRTLARGIALSPVKFGISFTLTHLNQAGALVQIYTDGSVALNHGGTEMGQGLHAKMVQVAAAVLGIDPVQVRITATDTSKVPNTSATAASSGADMNGMAVKDACETLRGRLAGFVAAREGCAARDVIFDAGQVQASGKSWRFAEIVAAAYMARISLSATGFYATPKLSWDRLRGQGRPFLYFAYGAAITEVVIDRLTGENRILRTDILHDAGASLNPALDIGQIEGAYVQGAGWLTTEELVWDHCGRLMTHAPSTYKIPAFSDRPRIFNVALWDQPNREETIFRSKAVGEPPFLLGISAFLALHDACAACGPHWPDLQAPATPEAVLAAVRRAEGRA

SEQ ID NO: 4601 - protein, 184 aa, Robiginitalea biformata HTCC2501
MNRENVTLRLLVNGEERTIQLENGQIPLLSVIRDYLGLKGTKFGCGKAACGACTIHIEGRGVRSCTYPAAMAEGKSITTIEGLGSREAPHPVQQAWIEEVVPQCGYCQPGFMMATAALLRENPAPTNDDIDKAITNICRCGTYFRMRRAIHRAATLVTEGKDSDPDRAAEKVPSRPDIKKTAQK

SEQ ID NO: 4602 - protein, 229 aa, Zea mays
  misc_feature (8)..(8): Xaa can be any naturally occurring amino acid
  misc_feature (33)..(33): Xaa can be any naturally occurring amino acid
  misc_feature (60)..(60): Xaa can be any naturally occurring amino acid
  misc_feature (83)..(83): Xaa can be any naturally occurring amino acid
  misc_feature (111)..(111): Xaa can be any naturally occurring amino acid
  misc_feature (116)..(116): Xaa can be any naturally occurring amino acid
  misc_feature (124)..(124): Xaa can be any naturally occurring amino acid
  misc_feature (146)..(146): Xaa can be any naturally occurring amino acid
MPGITIGXTVPNLELDSTHGKIRIHDYLGDGYXIIFSHPADFTPVCTTEMAAMAGYAKEXEKSGVKLLGISCDDMESHRQWTXDVEAYGAKRQLQQHTTTKVTFPILADPXRNAIXQLNMVDPXEKDAAGRSMTSRALHVVGPDRXVKLSFLYPATTARNMDEVLRPVDSLLTAAKHGGKVATPPNWKPGECAVIAPGVSDEEARKMFPQGFETADLPSKKGSLRFPKV

SEQ ID NO: 4603 - protein, 402 aa, Chlamydomonas reinhardtii
MIRYLVEAGCQVLVVTTGAGYTLPGVDASSFREQPETFAGARVVSALSFGCPWYLQVPLTFALSPRIWREVRDFQPDLIHCSSPGVMVFAAKLYAWLLKKPIVLSYHTHVPSYLPKYGISYLVPAMWGFLRMLHATAHLTLTVSPAMVDELVTNRAVNSAKQVQVWKKGVDSEVFHPRFRSAAMRERLTGGQPDRPTLVYVGRLGFEKNLFFLREVLQRNPGVGLAFVGDGPARQELQAAFKGTPTQFLGMLHGEDLSAAYASSDIFVMPSESETLGFVVLEAMASELPVVAVRAGGIPDIITPGDSGVTGFLYEPGDVDKAAELIQQLAADAQLRSRVGIRARQEVAKWDWRAATMHLLNVQYPIAMAAAAAQYGEALGRVAQDALAAQPPQTGGLTPRAA

SEQ ID NO: 4604 - protein, 422 aa, Crocosphaera watsonii WH 8501
MNTKKKKALLIIEQCNPDWSSVPLEGYNYYNGISQLCNVTLVTHIRNKEALQKRPEHQDIIYIEESQFSKVYHKIIATLTSIGRKNWPLYIALSYPIYEEFNRQVYQQFKDKVIGKEYDVVHMITPMMPRYPSKMVKVCQDTPFILGPVNGGVPFPPGFQKVARQEFAYFNFLRAVGRNLIPGYVETYKTANKILAGSTYTLNLIQDLFKIPEERLQLFYENGISKSFFQEKTINQNNSVTNLLFVGRLVPYKGADMVIDAVSNLSDDIKNKIKFTIVGDGSEKVNLESQVENLGLEKIVSFTGWIKQSETVNYYKEADIFCFPSIREFGGAVVLEAMACGLPCIVANNGGIGEYVTPETGFSIEPKSREYLVETLTEKITTLIENKALLEEMSAKCYERVQEFEWNIKAKKIVDIYEQSIM

SEQ ID NO: 4605 - protein, 204 aa, Solibacter usitatus Ellin6076
MSISRRQFVVVLAGGAAAVLPADPQTGGLPAGTVPCRIRVNGQAHDLVLDPRVTLLDLLREHLQLTGTKMGCDHGQCGACTVLIRGRRVNSCLSLAVSHDGDEITTIEGLARGDELHPMQAAFLENDGFQCGYCTPGQICSAVALLEEARRGMPSAVTPDIRKSGPVALTDDEIRERMSGNLCRCGAYVGIVAAVRAARGKGMA

SEQ ID NO: 4606 - protein, 380 aa, Musa balbisiana
MDSVSPVTLDLNKEEGHCSNSAVVFDTSFLRRQAKIPESFVWPRSERPHPLEELEVPVVDLRGLFEGDEASISRAAEASRAACVRHGFFQVINHKVDAKVSGDALDAAGDFFKLPLSTKLRARRQPGSAWGYVGAHADRFASKLPWKETLTFGYDYGERGDGVVDYFTSKLGEGFEPMGRVYRRYCEAMKELSLSIMELLGISLGVGREYYRQFFEDGSSIMRCNSYPPCQEPELALGTGPHCDPTALTILLQDQVGGLQVFTEGKWQAVRPVRSAVVINIGDTFMALSNGRYKSCLHRAVVNSERERLSLAFFVCPRGDRVVRPPRELLLLLEEEEEAVPRAFPDFTWTELLEFTQTHYRADTTTLQSFSRHRFLASSP

SEQ ID NO: 4607 - protein, 229 aa, Methanosarcina barkeri str. Fusaro
MEEVENEQIHMPLIGDDAPSFTAVTTQGQINFPDDYKGKWVILFSHPADFTPVCTTEFMTFASMQEEFREMNTELIGLSIDSVFSHIAWLKRIEEKIEYKGMKNLEIKFPVIEDLKMDVAKKYGMIQPKTSTTQAVRAVFIIDPEAKIRTILYYPQSTGRNMQEIKRVVAALQKNTAEKVATPANWQPGDDVIVPAPSSMEALKERTGKLEENMYCLDWFLCFKKDSKK

SEQ ID NO: 4608 - protein, 333 aa, Methylococcus capsulatus str. Bath
MKLALISDAWRPQVNGVVTTLSRICEGARQRGHQVETFTPDCYRNWPCPGYPEIRLALGCGSRLPSQLDAFAPDAIHIATEGPLGMAARRYCLQRRLPFTTSFHTRFAEYVNLRTRLPLRWGYAALRWFHRPSVRVMAPTPTQVSDLRARGFRNLVLWSRGVDTTLFAPRGKARIDDVRPVFMYVGRLAVEKGLDDFLRLDLPGVKYVVGDGPSRTELQKRYPDVRFLGYRCGLDLAETISAADVFVFPSRTDTFGLVMLEALAAGVPVAAYPVPGPQDVITDPSVGCLDHDLRAAALRALELRSEDCRKFAERFTWDRCTEQFLGYLAPISR

SEQ ID NO: 4609 - protein, 479 aa, Oryza sativa Japonica Group
MAAWNTSILLPPPPPLLSRAAVATPALNPYPLRLHRRHPQKPLCLPSESYPADTDADASSASLDSRPRRIALFVEPSPFAYVSGYKNRFLNFIKYLREMGDEVIVITTHEGVPQEFYGAKLIGSWSFPCPWYQKVPLSLALSPRIIGEVARFKPDIIHASSPGIMVFGALIIAKLLCVPLVMSYHTHVPIYIPRYTFSWLVKPMWLIIKFLHRAADLTLVPSVAIGKDLQAARVTAANKIRLWNKGVDSESFHPRFRNDEMRARLTNGEPEKPLILYVGRLGVEKSLDFLKRVMDRLPGSRIAFVGDGPFRAELQLMFTGMPAVFTGTLQGEELSQAYASGDVFVMPSESETLGFVVLEAMSSGVPVVAARAGGIPDIIPEDQEGKTSFLYTPGDVDDCVSKIERLLTCEELRETMRKAARKEMEKFDWRAATRKIRNEQYSAAIWFWRKKRAQLLRPIQWVSRRLFRPTPAPSTMNQS

SEQ ID NO: 4610 - protein, 300 aa, Ralstonia eutropha JMP134
MAYKTIEDTIGNTPLVRLQRIPGAANDARGNVILGKLEGNNPAGSVKDRPAVSMIARAEARGRIKPGDTLIEATSGNTGIALAMAAAIRGYKMVLIMPEDLSLERRQSMAAYGAEIILTPVKGGMEYARDLADSMERDGKGVILDQFGNPDNPLAHYETTGPEIWRDTEGRITHFVSAMGTTGTITGVSRYLKEQNPAIEIVGAQPAEGSRIPGIRKWPEAYLPKIYDAKYVDRTEPVSQADAEHMARRMASEEGIFSGISAAGALCVALRVAEEVENATIVFVVCDRGDRYLSTGVFPA

SEQ ID NO: 4611 - protein, 778 aa, Sinorhizobium meliloti 1021
MDKSTLESHATITGPMHAPLRHDSAHKHVAGTADYIDDMPEPAGTLHGALGLTDRAHAEILEMDLAAVAAVPGVVCVLTARDMPHSNDISPTHLHDEPVLADGRVEFHGQPAFAVIAETRDVARRAARLARMTYRDFLPAIDIIDAVATGGELVTPPLTLERGDAEGELERAPRRIQGHMRIGGQEHFYLEGHIALAIPGEDDEMTVWVSTQHPSEVQRMVAQVLGVPSNAVTVNVRRMGGGFGGKETQGNQFAALAAVAARKLRRAVKFRPDRDDDMTATGKRHDFLVNYDVGFDEEGRIRAVQANYAARCGFSADLSGPVTDRALFHADNAYFYPHVKLTSQPLKTNTVSNTAFRGFGGPQGMLGGERIIEEIAYALGKDPLEIRKLNFYGDAHSGRNVTPYHQKIEDNIISRIVDELEASADYQARRAAIIEFNRSSRVIRKGIALTPVKFGISFTLTHLNQAGALVHIYTDGSVHLNHGGTEMGQGVYTKVAQVLADSFQIDIDRVKITATTTGKVPNTSATAASSGSDLNGMAAFDAARQIKERLVAFAAERWQTTAENVTFVANHVRIGDELVPFAQFVQEAYGARVQLSAAGFYATPGIHWDRAAGRGTPFYYFAYGAAVSEVSIDTLTGEYLVDRVDVLHDVGRSLNAAIDLGQIEGGFVQGMGWLTTEELWWDEKGRLRTHAPSTYKIPLASDRPKIFNVRLAEWSENAEETIGRSKAVGEPPLMLPISVVEALSMAVASVAGYRECPRLDTPATPERVLMAVERLRAG

SEQ ID NO: 4612 - protein, 375 aa, Ralstonia eutropha JMP134
MKILIVTDAWEPQVNGVVRTLKSTRRELEAMGHTVDMITPLEFRTLPCPTYPEIRLSLMPASRVAKRIDDFAPDALHIATEGPLGMAARRYALRRRMPFTTAYHTRFPEYVHARFGIPLSWTYRFLRWFHGQAQAVMAPTPVVLDDLQRYGIGHCVLWTRGVDLDVFKTQRVNVLNTAHPIFLYVGRVAVEKNVEAFLALDLPGSKWVVGDGPALASLRARYPGANYLGVLSQPELARVYASADVFVFPSRTDTFGLVLLEALASGLPVAAYPVTGPIDVLGDSPAGVMHEDLHEACLEALRIDRATARAHAERFSWRAASEQFLAHLRPLSAGGSTGSAGEMPTQPASHNYVETHSAAAVRPAAAGTGTSSAKQ

SEQ ID NO: 4613 - protein, 354 aa, Magnetococcus sp. MC-1
MRILIVSDAWYPQRNGVIRVLESLIEALEKRGHVLGMITPNRFTTIPCPSYSEIPLALFPYRGVKRQIQAFAPQALHIATEGPLGSAARRWCLNHKVPFTTAYHTKFPEYIHERTKLPLNWLYAGIRRFHKPAHTVMAPSPSVYRELTARNFPHVQPWAHGVNVEVFTPQPKDFLQLPRPIHMFVGRIAVEKNIPAFLDLELPGSKVVVGRGPQKNTLQKHYPHVHFFDTNNDTELVQLFSSADVFVFPSLTDTFGLVMLEAMACGVPVAAYPVTGPLDVMQLDGPGENAMGCLDFDLTLAIQKALGKSPAACRAYAMNFSWERVADQFLAFLAPIETRDALPAPLTAEEVEGS

SEQ ID NO: 4614 - protein, 1350 aa, Aspergillus nidulans FGSC A4
MDALLPRSSPQLKFYLNGTPISLTSPHPRWTLLDFIRSQDGLKGTKLGCGEGGCGALSGKHVITIEGLGTVDHPHPLQERIAQLHGSQCGFCTPGIVMSLYAMIRNAYDPVTGKFQLSADDIESKGHLDGNLCRCTGYKPILNAARTFIEDDLGSVPSIVESELVGTEEETESDMGAHSGSGDTGSRSSGSCGRPGGCCKDSPGISSCSSRETDMTTPSLPDSPVLKQYDFIPYTPTTELIYPPGLAKFVPELLCYGDAEQAWVKPRSVQEALEILSQCPSATLVTGASEVQVDVRFKDFRPSVSVFVGDITEMTGISWSEDMKTLYIGGSASLSDIEAECLRCIPLLKAVNLGSESVLSAIARTLRYFAGRQIRNAACLAGNIATASPISDMNPLLLAVGATVHARTSAEETTIPMSEMFKGYRKTALPSGSLITKIAVPMPSKDQIEIVNAYKQAKRKDDDIAIVTAAFRVRIAPGPDYTVQEASLAFGGMAPTTVLAHKTASALEGKRWGDEAVLDIVLTSLGEEFNLPYSVPGGMATYRRTLTLSLFVRFWNYVNQKLGLEYDSDLIEEIHRGISTGTRDDDNPHAQRVVGQQIPHLSGLKHATGEAEYVDDMPPLHRELHGALVLSERAHAKILSVNWTPALERGAVGYVDHTSLPEEKNHWGPVVHDEPVFAKGEVHAHGQPIGLVYADDAMTAQIAAKAVIVTYEDLPAILTIDEAIEARSFFNYGKELRRGAPPEEIRKELDDCEYTLSGTTKIGGQEHFYLETNAAIAVPHTEDGSMDVWSSTQNTMETQDFLSQVTNVPRHKINARVRRMGGAFGGKESRSVPIACIVAVAAKKARRPVRIMLNRDEDMMTSGQRHPVQCRWKVGFNREGKLLVLDADTYNNAGYSVDMSAAVMDRCLTHIENCYYIPNVWLRGWVCKTNTHSNTAFRGFGAPQAMYITESIISAVAEKVGIDVDEIRRRNLYQVGQRTPFNQVLDEDWHVPLLLEQVREEADYDARKKEIERFNSEHRWRKRGIALIPTKFGISFATALHLNQASAAVRVYTDGSVLLNHGGTEMGQGLYTKMVQVAAQELRVPVDQVYTQDTSSYQTANASPTAASSGSDLNGMAIKHACDQINERLRPYREKYGEDADLGTIAKAAYRDRVNLSAAGYYKMPTIGYEWGNYSENVKPMYFYFTQRQGVACTEVELDLLTGTHTVLRADLKMDIGRSINPAIDYGQIEGAFVQGQGLFTMEESLWTRSGQLATRGPGTYKIPGFADIPQVFNSSKGIGEPPLFMGSSVLFALRDALSHARRERGVSEPLVLDSPATVERLRLAVGDDLVHRAQVQRKDGEQGFFVAVA

SEQ ID NO: 4615 - protein, 182 aa, Burkholderia xenovorans LB400
MKTVGDKVEAFTVTAAKPGFNHHEENGVSAFEEITEQSFPGKWKIIYFYPKDFTFVCPTEIVEFAKLAKDFEERDAVLMGGSVDNEFVKLAWRREHKDLDKLNHYAFGDVKGELIDQLGVRDKEAGVALRATFIVDPDNTIQHVSVNNLNVGRNPEEVLRILDGLQTDELCPCNRAVGGATL

SEQ ID NO: 4616 - protein, 148 aa, Gloeobacter violaceus PCC 7421
MAIEVGRPAPDFTLDGSQGPVTLSQYRGKNNVLLAFYPGDFTPVCTKELTCFVEDWSKFQGKDTVILGISSGSVDSKSKFAQSLGAQFPLLSDGEKRVAGLYDVSGFLGVARAYFIVDKQGVLRYKHVEALPFFKREDEELLGVLAEL

SEQ ID NO: 4617 - protein, 249 aa, Aeropyrum pernix
  misc_feature (14)..(14): Xaa can be any naturally occurring amino acid
  misc_feature (139)..(139): Xaa can be any naturally occurring amino acid
  misc_feature (144)..(144): Xaa can be any naturally occurring amino acid
  misc_feature (199)..(199): Xaa can be any naturally occurring amino acid
PGSIPLIGERFPEXEVTTDHGVIKLPDHYVSQGKWFVLFSHPADFTPVCTTEFVSFARRYEDFQRLGVDLIGLSVDSVFSHIKWKEWIERHIGVRIPFPIIADPQGTVARRLGLLHAESATHTVRGVFIVDARGVIRTXLYYPXELGRLVDEILRIVKALKLGDSLKRAVPADWPNNEIIGEGLIVPPPTTEDQARARXESGQYRSLDWWFCWDTPASRDDVEEARRYLRRAAEKPAKLLYEEARTHLH

SEQ ID NO: 4618 - protein, 375 aa, Mycobacterium sp. JLS
MSRVLLVTNDFPPRAGGIQNYLEAFVEHVVAAGVHEVTVYAPAWKNAADYDRAATFEVVRHPGTLMLPEPSVAGRMRGLIAAHDIDTVWFGAAAPLALLTPIARRAGAARVIASTHGHEVGWSMLPVARTALRRIGDDTDVVTFVSRYTRGRFASAFGPHAALEHLPPGVDTDRFAPDTLARAELRARYGLGERPVVVCLSRLVPRKGQDMLIRAMPAIRRRVPGATLVIVGGGPYRTALQRLAHEHGVAEHVRMTGGVPGDELPAHHAMGDVFAMPCRTRGAGLDVEGLGIVYLEASASGVPVVAGRSGGAPETVRDGETGLVVDGTDIGAVATAVGDLLADPDRAAAMGAAGRQWAVENWQWPTRAARLGELL

SEQ ID NO: 4619 - protein, 187 aa, Novosphingobium aromaticivorans DSM 12444
MSIVGTKLKPFQATAFHQGKFVDVSDADVVGKWGVFFFYPADFTFVCPTELEDLAGIYEELQGLGVEVYSVSTDTHFSHKAWHDSSPAIGKINYYMLGDQNHTISNNFGILREGVGLADRGTFVTDPDGTIQLVEITPEGVGRNAAELLRKIKAAKYWREHPGQVCPAKWEEGAETLAPSIDLVGKI

SEQ ID NO: 4620 - protein, 346 aa, Bordetella parapertussis 12822
MRIVLVTDAWHPQVNGVVRTWTTMQGLLQDWGHELIVVSPQGSRTVPAPSEPDLRLCLQPGRQLRRVLGDVVPDALHIATEGPLGLAARRMALRRGWRFTTSFHTMFPDYLQARMGIPAGLPWRYLRWFHRPSQRVLVPTPTVRDIVARRGLGNLQVWSRGVDARRFAPGPRDFLPELPRPLFLCVGRVAREKNLDAFLSLALPGSKVIVGGGPDEARLRRKFPAAHFAGPQADDRLVAYYNAADVFVFPSLTDTFGLVMLEAMACGTPVAAFRSEAPLAVVQQGATGFLDDDLAQACRAALALDRDEVRAHALTRTWDAVARDLLAAFTPLVEAPLALPPAAQRI

SEQ ID NO: 4621 - protein, 149 aa, Prochlorococcus marinus str. NATL2A
MKLKVGDQIPSFSLKDQKGNIRTSNNLKKSLVLFFYPKDDTPGCTIEACGFRDKYDLFKILGAEVWGISNGSTQSHLGFANKNKLQYPLLCDQNNILRNQFGVPKKLGFIEGRVTYIINSEGVIKHIFEDLLNGPAHIKEAIKALKKLQ

SEQ ID NO: 4622 - protein, 158 aa, Zea mays
  misc_feature (34)..(34): Xaa can be any naturally occurring amino acid
  misc_feature (54)..(54): Xaa can be any naturally occurring amino acid
  misc_feature (61)..(61): Xaa can be any naturally occurring amino acid
  misc_feature (101)..(101): Xaa can be any naturally occurring amino acid
  misc_feature (117)..(117): Xaa can be any naturally occurring amino acid
  misc_feature (133)..(133): Xaa can be any naturally occurring amino acid
SLSPPAYARTAAGCPTTAPVFDSAAVFNQEPIQXNLSDYIAEEIIILLFYHLDXHFVCPTXITAYSDIYYESEITDTEDIGDDIDKVNSHLVWVHTDRKSXTLDDLKSQLDSDVTKXITNAFGVLIPNQSIDXRGLLIIDQDVAIKGSTINNLDIGIN

SEQ ID NO: 4623 - protein, 185 aa, Erythrobacter sp. SD-21
MSRMTVNERPIEFLMDPETPLLWALRDAANLTGTKYGCGNGDCGACVVHIDGEPLRSCLVTIAEAEGRFIKTIEGLSGDRTHPVQQALVAEQAIQCGFCTPGIVMAAAALIDRNPGASEAEIKAAIPNICRCGVYPRLVRAIQRAGRVARRQERISAAPSPGISAKDAAAEVPALSAPPSAPERD

SEQ ID NO: 4624 - protein, 311 aa, Symbiobacterium thermophilum IAM 14863
MARIYDSIADTIGRTPLVRLNRVTEGAVATVLAKVEAFNPASSVKDRIGYAMIKDAEEKGILKPGMTIVEPTSGNTGIALAFVAAAKGYRCILTMPDTMSLERRKLLKAFGAELVLTPGAEGMKGAIAKAKEILENTPGAWMPQQFENPANPEIHRKTTAEEIWQDTDGQVDIVVGGVGTGGTLTGVGEVIKARKPDFKVVAVEPAESPVISGGKPGPHKIQGIGAGFIPKNLNTEVVDEVITVASEDAIATARRMAREEGLLVGISSGAAAFAALQVARRPENAGKTIVVVLPDTGERYLSSALWADIQV

SEQ ID NO: 4625 - protein, 735 aa, Solibacter usitatus Ellin6076
MQNSIGQPIQRVEGRAKVTGKATYSAEHKVPNLAYAVMVTSTIAKGRVISIDTAVAQRAPGVLAILTAQNAPKYPKKQKSRPTDRDVQYLQDNQVRYANQPVAVVVAETWEGARQAAQDVVVHYAVERHSVELEPNAAAAYKPEKGGAHNEPTDESRGDIASLATAEVKVDHVYTTQFQVHNPMEPHATIAVWESPDKLTLYDATQGPFSDRERVAELLGLAPDNIRVIDPFLGGGFGSKGPTWSHVVLAAMAAQRVNRPVKLVVERPQMFGPVGFRSHTRQTVAAGANKDGTLVALRHDTVAQTSSFDEFLESAGMAARMLYTSPANASRHRLVRTDIGTPSFTRAPGWAAGTNVLEVAIDEMAYALKMDPLEFRLKNYAEQDPEMQRPWSSKSLRECYRLGAERFGWSRRQWEPRSMREGNSLVGWGMASSAYPVHRTAAAARARVHPDGSILVESGTQDLGTGTYTVMTQVAADAIGVPASQVTFRLGDTQEAEAPVAAGSQTATSVGSAVNAAGSALREKLAQLAISDSSSPLHGAALQDVVLRGGALQVRGAESRTESLATLFARHGQSSLEAEAGAKPGSEQDQYSMYTFGAQFAEVRVDAALGQMRVSRMVGVFGAGRILNPRTARSQFMGGMVWGIGFALYENAVMDPRLGRFVNNNLAEYHIPVNADVPALEALWVDEKDTHVNPLGVKGIGEIGITGAAAAINNAVFHATGKRIRDYPITLDQVL

SEQ ID NO: 4626 - protein, 496 aa, Candida albicans SC5314
MTSTNKPPALKEDILELIGNTPLVKLNKIPQSLGIKAKVYAKVELFNAGGSIKDRIAKNMVLEAEKQGKIKPGYTLIEPTSGNTGIGLALVGAVRGYRTIITLPEKMSNEKVSVLKALGAEIIRTPTEAAWDSPESHIGVAKKLEKEIPNSIILDQYGNPANPDAHYYGTGYEIWEQTEGKITHLVAGAGTGGTITGISKYLKEKNSKIHVTGADPKGSILAEPESLNNSTEGYLVEGIGYDFIPDVLNRKYVDDWIKTDDAESFKLARRIIREEGILVGGSSGSALQAALQVAKDLTEDDTVVVVFPDSIRSYLSKFADDEWLISNGFEVEDSPGANKADEFLNGKTIKDLVAGKAPVVTVTLSDTVAKTFDLLQSNGFDQLPVLNNSGRLVGLITLSKILKSLSTKKIQTTNSISSIIIDFRKLADFEKSFTITKKSGFTKRSYEPIKLDTPLAALNKFFETNSNAIITDDELKPVQIVTKVDLLSYLTKNASF

SEQ ID NO: 4627 - protein, 302 aa, Clostridium difficile 630
MLYNNALELIGNTPVVRLNNLGCTNGCSNIYVKLEKVNPAGSIKDRAVYEMLEGLEQRGELKKGDVLVEATSGNTGIALSMIGKLKGYEVVIVMPETMSVERRDLMKAYGANLVLTDGKAGMAGSIEKANELLKENPNYKSLKQFENKDNPNAHYKTTAVEIMNDVKDLDIFVCGVGTGGTLIGTARYLKEQNPNIRVIALEPKKSPAISENKTGPHKIQGIGANFVPENYDSSVVDEVILVDDEDAFDTVKLLAAKEGILVGISSGANIFGAIEMAKKYPDKKIVTVAPDGVDKYMSMGIF

SEQ ID NO: 4628 - protein, 710 aa, Sulfolobus solfataricus P2
MYVGKPIKRIEDPKFLTGGSTYVDDIELPGTLFVAFLRSVKPHAKIKIKKNGNNVFTGYDINPGKDFPIPIEETTYVGQPLAIVVGRDRYEAYDLLESIEVEYEELPYVIDPQDALKNDVKVYSKKESNIYEYKKWEGGNIEQSLKEADVVINGELYNQRVIANPLETRGILAYFDGNRLNVWSSTQSAHYLRRNLMNFLGIDNIRVIQPDVGGAFGSKIIAHPEEYAIAKLALKMKRPLKWIPTRSEEMQSAGHGRDKRLKFKVAVKRDGTILGIDGTLIADLGAPYPDANDDEIGNVHSTVRMLLGPYRIQNVRIEEYAVNTNKAPTQSYRGAGRPEATYFIERIINIISLELGKDEFDIREKNLIRELPYKNALGITYDTGDYIGLLNKAREYYETLKKEASTDECIGSSMYVEITAFGPWETARVLAKSDGKIMIITGSGPHGQGDGTAFAQIVADVLEIPIENIEVRWGDTDIISDGIGTWGSRTVTIGGSAMYKAAEELRRRLIEVSAKMLNADVEEVEYKNGIFSHKKSSKSFTIKEVIQNAYSMGYSLDVTYVYNVTKPGYTVPYGVHLALVKVDKETGSIRVRKYIALDDVGRVINPLLAEGQIIGGALQGIGQAIYEGTIYSKEGYLLNSNLTDYGFPTAVEAPRIEWHYIEKGLSGHPTNSKGIGEAGAIASTPAVVNAVEKCIRKKIVNMPIRPEEVI

SEQ ID NO: 4629 - protein, 790 aa, Cyanobium sp. PCC 7001
MRQGSVAGRTSGLRPAQRRRLERLCHRRHPEDGIAEPLGLQRLAAESRELELPITLVVDGRGLCRLLWVGPLEQSGRLLEKLPGAPRRQGRGLRLLTCCGRSKQLAPSTQEGVVGLDLQPSLWLRFGDQPAAGGHWAAAIYRPGGSATTPWELALEGDLASLGPLDPGLGGVAGPATAREEVPRPMAGQAGERVLLLALTPGDRSAAQRLIAELEGLVRSAGGVPVGVVEQRRSQLAPQTVWGEGKLAEAALEARRLGATLVVTDRELTPVQARNLERLLDLPISDRSELILDIFAQRASSAAGRLQVELAQLRYRLPRLSGRGRSLSRQGGGIGTRGPGETQLEKDRRAIARRIDRLQRDVRQLEAHRERLRRGRRGQRRLALVGYTNAGKSSLLNALTGAQGQAAVLAENKLFATLDPTTRRLQLRWPGSGSGIRPMPLLLTDTVGFIRDLPPPLVEAFRSTLEETLDADGLLLVVDLSDPAWPEQRQTVHAILDALGATMPRRLVANQIDRCPAGEIARARALEPDALFVSATGALGLQHLREALLSWPPPLAGSPVAASAITGPGAPSVPATPIPMALQLGDTVPDFTQDSQLGPIHFYDYAGDSWVVLFSHPADYTPVCTTELGEVSRLRPEWEKRNVKTIALSVDSAESHKGWICDINETQNTAVDYPILADEDKKVSDLYGMIHPNALNNLTVRSVFIIDPNKKLRLQITYPASTGRNFDEILRVIDSLQLTDYHQVATPVNWKDGDDCVVVPSIPTDEARTKFPKGVTEVKPYLRMTPQPNK

SEQ ID NO: 4630 - protein, 305 aa, Bacillus thuringiensis serovar konkukian str. 97-27
MKLCENVTELIGDTPVVRLSKFIPEDAADVYVKLEMFNPSRSVKDRAAYNLLHVAEENGLIKPGDTIIEPTSGNTGIGLAMNAAAKGYKAILIMPDNMSKERINLLKAYGAEVVLTPAEQRMPGAIAKALELQKQIPNSFIPQQFENPANPNIHRYTTALEIYEQMDGELDAFVATAGTGGTITGTGETLKEKLPNLYIAVVEPKGSPVLSGGVPGPHKLVGTSPGFIPKNLNTEVYNEIIQIADEEALTTMRNLARQEGLLVGPSSGASVYAAIMIAKRLGTGKKVLCVAPDTGERYLSMGLFE

SEQ ID NO: 4631 - protein, 309 aa, Nocardioides sp. JS614
MNIYDDVTQLVGNTPLVRLNRVVGDAGATVLAKLEFYNPANSVKDRIGVAMIDAAEAAGVLAPGGTVVEATSGNTGIALAMVGAARGYRVVLTMPETMSRERRALLRAFGAELVLTPGSEGMTGAVRKAEEIAETTGAVPVRQFANAANPAIHRDTTAEEIWKDTDGEVDILVAGIGTGGTITGVGQLLKERKPDVQVIGVEPAESPILNGGAPGPHKIQGLGANFVPEILDTTVYDEVLDVPVEEAVTWARRAATEEGLLVGLSSGAAISAAVQVAQRPENAGRTIVVIVPSFGERYLSTLLFEGLVD

SEQ ID NO: 4632 - protein, 306 aa, Desulfotalea psychrophila LSv54
MTTTIGQSIGNTPLLKLGRLDRDCAATILVKQESRNPAGSVKCRVAVSMIETGLREGKISKGTTIVEPTSGNTGIGLAFVCAAKGLRLILTMPESMSIERRKLLAHLGAEIVLTPAAEGMTGAITKAEELLTGLADGFMPDQFNNPANPEIHRQTTGKEILRDTDGRVDIFVAGVGTGGTLTGVGSVLKAKNPRVQVIAVEPATSAVISGEAPGPHGIQGIGAGFIPGNLDISLIDETIKVNDEDALVAAQELATQEGILCGISSGAAFWASLEVAKRPENIGKTIVTILPDTGERYLSTNLFSTS

SEQ ID NO: 4633 - protein, 179 aa, Geobacter metallireducens GS-15
MVRTAPEMAKVGEPAPPFTLDAVVDKEFKKVSLGDYRGKWVVLFFYPADFTFVCPTEITGFNKAMDRFTELNAQLLGASVDSKYSHLAWIKRGDLGDLKYPLLADNKKEATARYGILDEKEGVALRGLFIIDPNGVLQYQVVNNLSVGRSVDETLRVLEALQTGELCPLGWKPGEKTIK

SEQ ID NO: 4634 - protein, 303 aa, Thermotoga maritima
MGSDKIHHHHHHMMERLIGSTPIVRLDSIDSRIFLKLEKNNPGGSVKDRPALFMILDAEKRGLLKNGIVEPTSGNMGIAIAMIGAKRGHRVILTMPETMSVERRKVLKMLGAELVLTPGELGMKGAVEKALEISRETGAHMLNQFENPYNVYSHQFTTGPEILKQMDYQIDAFVAGVGTGGTISGVGRVLKGFFGNGVKIVAVEPAKSPVLSGGQPGKHAIQGIGAGFVPKILDRSVIDEVITVEDEEAYEMARYLAKKEGLLVGISSGANVAAALKVAQKLGPDARVVTVAPDHAERYLSIL

SEQ ID NO: 4635 - protein, 324 aa, Cyanothece sp. ATCC 51142
MDIKEGFVGTVGNTPLIRLKSFSEETGCNILGKAEFLNPGGSVKDRAALYIIKDAEEKGLLKPGGTVVEGTAGNTGIGLAHICNAKGYKCLIIIPETQSQEKIDLLRTLGAEVRTVPAVPYKDPNNYVKVSGRVAEELDNAIWANQFDNLANRQAHYETTGPEIWQQTDGKVDAWVSATGTGGTYAGGALFFKEKNPNIKCIVADPMGSGLYSYVKTGEINPKGSSITEGIGNSRITANMEGVPIDDAIQIDDHEALRVIYQLLYQDGLFMGGSVGINVGAAVTLAKEMGPGHTIVTVLCDGGARYQSRIYDKEWLASKGLSVP

SEQ ID NO: 4636 - protein, 771 aa, Gluconobacter oxydans 621H
MSDLVPGAASTSMKHESALLHVTGRAAYIDDLPEPRGTLHLVPGLSTKAHARIVSMDLDAIRAAPGVVCVLTAADVPGENQISPVHREDEPLLATDHVHFWGQVMFAVVATSRQAARQAVRLAKIEYEEKPAILNIAQARENGSPMVWRSLTMQRGDVERGLKAAPRRLSGQIEIGGQEHFYLEGQAALAQPGEAGEMRVWSSTQHPSETQHLVAAVLGRPHHLVTTEVRRMGGAFGGKETQANAWACLAAIAADRTGQAVKARLDRDDDMMVTGKRHDFLIDYDVGFTDEGDILAVDMVLAARCGWAPDLSGPVTDRALFHADNAYFYPDVRLKSEPLRTNTQSNTAYRGFGGPQGIVAAERVIEEVAFATGLDPVTVRLRNVYGTGTRNLTPYHMTVEDSITAEIITKLVERCDYQARKAEIRAFNRNSRIIRRGIALTPVKFGISFTATHYNQAGALVHVYTDGSVQVNHGGTEMGQGLHTKMVQIVLREFGLTADRVRITATTTGKVPNTSATAASSGADLNGMAVLDAVRKIKNRMITFAAEKWSVVPEDIHFRPDGVHVGAEVMTFQQLAWQAYFARVSLSSNGFYKTPKISWNPETGCGRPFFYFAYGAACAEVSVDLLTGEHSIDRVDILHDAGQSLNPDIDIGQIEGGFVQGAGWLTTEELVWDPAGRLRTHAPSTYKIPACSDRPRIFNVELLENAPNREETIFRSKAVGEPPFVHGVAVLQAISDAIASLDDYRTCPKLDAPATPERVLKTLMALQERAD

SEQ ID NO: 4637 - protein, 486 aa, Gluconobacter oxydans 621H
MRQTIRFYLGEDLCTLRDMSPTLTLLDWLRERGRTGTKEGCNEGDCGACTVLVVRLEDGRLNWRAVNACIQFVSMLDGAQVYTIEDLGTPDAPHPVQSAMVEQHGSQCGFCTPGFVMSMAAYRKTKGATADDQAIDDALAGNLCRCTGYAPIVRAMKQAMTAGPDRFDAQVDTIVERLAGLQDGESVRLEGPEGTLSIPASADDLAKILLADPEATIVAGATDVGLWVTKGMRRLKHVLPIGRVPELRALTRTSAGLRIGAAVTYQDARSAIAELLPDAGEMIRRLGSTQVRNSATVCGNIANGSPIGDGPPMFIAANATLHLRRGTEHRSIALEDYFIAYGKQDRQPGEFVEALTIPTPAQNSQFRVYKISKRFDQDISAVLGAFVIEMDDQDRITTARLAYGGMAATPKRASGAEAALLGRVWDEKALEAARKAVLEDFTPLTDMRASAWYRQTVAANLLTRFFEETTGTEQARLARTGGLVHV

SEQ ID NO: 4638 - protein, 150 aa, Prochlorococcus marinus str. MIT 9211
MSLNIGDKLPDFSLFDQEGKIRTSKQCKGKKLVLFFYPKDDTPGCTAEACGFRDKYDLFKLFGAVVWGVSNDNQLSHQKFAEKNKLPFPLLCDENNSLRTLFGVPKVLGLLDGRVTYLVDSTGVIRHIFNDLLNSTKHVTTALEILEEIK

SEQ ID NO: 4639 - protein, 330 aa, Halobacterium sp. NRC-1
MPVVYPASDHEPAETEHPVASLAFPFYDGYRMAFPSPPDAVAGADVVHAHTPFGLGLAAVRLARRNDAPLVATYHTPTAEYAEYVGPDAVTGAVRRASERYERWFLSRADLVLTPSERTRREVRALGVDTPVEAMPNGVDTDRFQPTDPTAFLAAHDLPADEPLIGYTGRHGYEKRLGDLLAAAAGVDATVVFGGDGPARGDLEAEADARGVDARFLGFLDREEMPAFYSALDVFAFPSPIETEGLVALEANACGTPVAGVDAGALSETIIDGTTGYHYDAGDIPGFRRAIRRALDDRDTLAENCVARRPDISVGRAIDRLAARYRELLG

SEQ ID NO: 4640 - protein, 163 aa, Pseudomonas aeruginosa PAO1
MSDALALTVNGQSLRLDVAPDTPLLYVLRNDLQLNGPKFGCGLGECGACTVLMDGVATRSCITPVEAAVGRRVVTLEGLGDAAHPHPLQQAFIDEQAAQCGYCINGMVMTAKALLDRNPNPSDGEIRQELAYNLCRCGTHVEILKAVRRAAESLKEHQEEHPA

SEQ ID NO: 4641 - protein, 444 aa, Streptococcus pyogenes MGAS10394
MRVGLFTDTYFPQVSGVATSIRTLKEELEKEGHEVYIFTTTDRDVKRFEDPTIIRLPSVPFVSFTDRRVVYRGLISSYKIAKHYNLDIIHTQTEFSLGLLGKMIGKALRIPVVHTYHTQYEDYVSYIANGKIIRPSMVKPLLRGYLKDLDGVICPSRIVLNLLEGYKVTIPKRVIPTGIPLEKYIRDDITAEEVTNLKAELGIAGDETMLLSLSRISYEKNIQAIINQMPAILAENAKIKLIIVGDGPYLQDLKHLAMQLEVDKHVTFTGMVPHDKVALYYKACDFFISASTSETQGLTYIESLASGTPIIAHGNPYLDDVVTDKMFGTLYYAETDLTDAIIDAILKTPVMDKRLLAKKRYEISAQHFGKSIYTFYLDTLIARNSKEAQKLSLYLNHSGKSSSLKLVQGAIHLPKRAAKVTAITSVKVVKAPIKLVHAIKDFLD

SEQ ID NO: 4642 - protein, 1457 aa, Cryptococcus neoformans var. neoformans JEC21
MGIPKFFRWISERYPLTSQLITPNSIPTFDNLYLDMNGIIHNCSHPPSTENDPHFRITEEQMILAIFAYIDHLFTKIKPQKVFFMAIDGVAPRAKMNQQRSRRFRAGKDARDQREKAEKNGEKLPDEKAFDSNAITPGTPFMARLSQHLKYYVRKRISEDADWRSIRVILSGHDVPGEGEHKIQEFIRLNKAQPDYNPNTRHCLYGLDADLIMLGLLSHDPHFCLLREEVTFGRKSRQNTELANTNFFLLHLSLMREYLDLEFSSLQTQISFEYDLERIIDDFILMAIFVGNDFLPHLPDLHINEGALERIWGMYKDILPTIDGYINEHGTISLPRLQLLLDKLAEFEVKRFEDDLLDQVHFSGNHTRDTMVIEKARKKNRKVITKYQQKVLNQLRSFIEKQQNQPNPTHRLELINTQDKRDNAFVQELADELHLHTTWDEVDDYGQSLIVCTFNMEGVSQDGSADGKEEDGDWESDEMEDEGKLAVQRVFRNWSKAAVVDTYPEDVEKSMDEKLKEAMDDIKRQYYHDKLEINYNDPAQMQDLVHHYIEGLQWILNYYYKGVSSWGWFYKYHYSPRITDLKGVADMKFEFDYGKPFTPFQQLMGVLPVDSMDHVPLAYRDLMYEETSPIIDFYPRNFELDMNGKKQDWEAVVKIPFIDQNRLLKAMAARDVRLTPEERERNKSGVLSTQFVYDPEIDENYPSSFPGVFPELTRSHCRASPFNLPVLGGDVQLIFGLVEGVQLGVSALAGFPSLDTLPHNGTLDYHGVNVFQSDSKNPSMVITIIGKDELPKTSEIARNVLGQRTFHSWPYLQEGIVAAVSDDMFKYTLQQVGKSLRVVHMPHQDAVKWRRQADHVERHYSRRYGVIIGGVEVLLHIRPLKGLKHLDNGALVKDYETPEKEIVQAYQVAVSQVTFEDERFLERAPPDLKVDFPVGEKVLFLGDMHYGLAAQVSAVNEEAQTLSVILAYFEEETEETLRFMKAVAHRPAGKWWPSPILSRRLGISALALSRITSTLLVQLGDGSKTNIGLSLKFESRGLKVLGYSKRNDRGWEFSEKTAQVLEAYKKAFPEVFKHLENRGGDLVKSKELCPTAEDPDTVIKGMKKWLKDEGLNDLESVSLFADQLEAKTFQSIKKKRLDNVPRQTLLKPAQAIYRLQGQVFEPGHRVVMVQDPAAGGVPTGMRGVVVGLGMRTVDVIWDNGFMGGSTLQGKCSPYRGSTVPFSSCLNLTRPQFTVSERAGPKPVPQNVFRPQLGPRPAVPMQHYQPSVPGRQQTATTTHHILQKPKTVHSTQSTTVVGSNGHLKYSGVAKGVRPQPVQQQPVSHRDQLSNLLGGLRLGPGPVVNDNRDSSHVTHVQAQGNLPVVHSHASVHQAIPTNPPIRGKAQNMNNKSGIGAVRGRGAANGAPFAHRGTHNGVPASARGGAPNGGPRGRGGFRGGSRGFTRGRGVGSGGSAVVEE

SEQ ID NO: 4643 - protein, 360 aa, Nicotiana sylvestris
  misc_feature (194)..(194): Xaa can be any naturally occurring amino acid
MPSRISDDVHQKQLDLYTIKELPESHAWRSSLDHDYQCNDSLESIPVIDLNDEKFAIENIGHACKTWGAFQIINHNISQRLLDNMEEAGKRLFSLPMQQKLKAARSADGIAGYGVARISSFFSKLMWSEGFTIVGSPFDHARQLWPHDYKKFCDVIEEYEKEMEKLAGRLMWLMLGSLGISKDDMKWACCGPRXECSALQLNSYPACPDPDRAMGLAAHTDSTILTILHQNNTSGLQVFKEGNGWVTVPPLSGALVINVGDLLHILSNGLYPSVLHRAVVNRTRHRLSVAYLYGPPSGVKISPLSKLVDQGHPPLYRSVTWSEYLGTKAKHFDKALSSFQLCAPRIGFANPKDRNSVQVG

SEQ ID NO: 4644 - protein, 338 aa, Zea mays
MVVLTKGELEQIALPAVQRASPPPPAAVPEVDLAAGDAAAARAVAKACEDHGFFKVTGHGVPQHLLARLEAAAAAFFALPQREKDRAAGCPFGYASKRIGANGDLGWVEYLLLAVTAAGAAAAPVSACEGAEPPCFRAVLDEYVAAVRRMTCTVLQLMAQGLGLDDRDVFSRLVLDRDSDSMLRVNHYPPRPQPAAAAETRRLTGFGEHTDPQIISVLRSNDASGLEITLRDGTWVSVPSDTESFFVNVGDALQVLTNGRFRSVRHRVMVSSARPRVSVIFFGGPPPRERLAPLPGLVDREGGRRRYREFTWREYKNSAYRTKLADNRLCSFETMATS

SEQ ID NO: 4645 - protein, 370 aa, Nicotiana sylvestris
MPFRISDSFRTHSQKHLDLNSIKELPESHAWTSSNDYPSENSCNFESIPVIDLNNNNHNNINVLEHIGQACKKWGAFQIINHNISERLLQDIELAGKNLFSLPMQQKLKAARSPDGVTGYGVARISSFFSKLMWSEGFTIVGSPLEHARQIWPQDYKKFCDAIEEYEREMEKLAGRLMWLMLGSLGITKEDVNWAVGPKGESKGGSAALQLNSYPACPDPDRAMGLAAHTDSTILTILHQNNTSGLQVFKEGSGWVTVPPFLGALVVNVGDLLHILSNGSYPSVLHRAVVNRTRHRLSVAYLYGPPSGVKISPLAKLVDQRHPPLYRAITWSEYLGTKAKHFDKALSSVRLCAPLTGFADAKDHNGVQVG

SEQ ID NO: 4646 - protein, 185 aa, Nostoc punctiforme PCC 73102
MISRRTFLNILFASCISVISWLNFIPAADALGGKLPAINQPAPEFTLPTNTGDGKISLSDLRGKWLVLYFYPKDFTSGCTIEARRFQQDLPQYLAKNTQIIGVSADDIDSHAKFCDSEGLKFPLLADTDGSVSKAYGSWLGFLSMRHSFIIDPQGVLRETFVKVNPTVHSSEVLARLEKLQSTAS

SEQ ID NO: 4647 - protein, 349 aa, Agrobacterium tumefaciens str. C58
MTRITIVTDAWHPQVNGVVRSIENTNTELARLGVDVRMVTPQSFYSIPCPTYPEIRLSVAGYRRVAVEIEKSQPSFVHIATEGPLGFMARRWCVKNHMRFSTSYHTRFPEYVAARFPVPESWLYAFVRWFHNGGNTCMVATPSLETELEARGVRNLKRWSRGIDAELFHPRTKTKLPFDLPRPIFMTVGRVAVEKNLPEFLDLDLPGSKIVIGDGPARYELQEKYPDVLFTGIKTGEELADAYAQADVFVFPSKTDTFGNTILEALASGVPVAAFPVTGPIDILGGNPAAGALDNNLRDACLAALHCSPQAALALSKSYSWEKASRQFLDNVIHAAGKSLPLLSRSRLA

SEQ ID NO: 4648 - protein, 331 aa, Gluconobacter oxydans 621H
MSKKVPLSPAPFEGYAAPRGHVFNSFLETVGGTPLVALPHLTQREHLNGRLLLKLEFFNPLGSVKDRIGVAMLRDAEARGLITPGRTVLIEPTSGNTGISLAFAAVALGYRLIVTMPENASTERRKMLRLMGADTELTPASRGMAGAIERAEQLNRTLPDAWMPSQFENDANPAVHEATTAREIWEDTAGKVDMVVAGLGTGGTASGIAHGLKKHRKSIKVYGVEPRESAVLHGDEPGPHGIQGIGPGFEPDTLDLKALDGVFEVSEQEAVATARLCAAVEGIPIGISSGAALFAGMELARKPSSRGKTIVAIVPSFAERYLSTQLFDGLA

SEQ ID NO: 4649 - protein, 794 aa, uncultured haloarchaeon
MATDSGIGSDVQRREDRRVLLGESKGTDDINVSDALHIQFIRSQKAHARFSIDAETAREMNDVVEVFTPEDIKQCETSTPLPFRLFAAPMPGLDYPDKALWQRCFADKKAHYHGEILGLVVAETQRIARDALEAIDITYDVLEPALTPTEALASDAPAIHEEVPDNIVFSAGQGDEASVAEMFEQASYTAELEKDPQRLSPSPLEPRSAIAAYDTASGHLDFTATTQIPHAYRRLMAQMLAYPEHHIDVTVPDMGGGFGARQHPYPADVLLGWCAIELEETVRWRATRTENQLVENDGRGYEGTWEIAMADDGDLLGVRADIRYDLGAWVAWGAASLAEAGNLLMTGLYDIPTAYSHVTGVVTNTARVDAYRGVSSVPMILMLERLVSKVAKQAHMDPAMVRKQNFVEPDQFPYQAPGGALYDSGDYERNFDLGLETIDYELLREKQERLREEDRYIGIGFACATEVAGLGPASHIDAPSWGYGSVQVHPTGDVTVYSGGSNHGQGHETSLAQVAADELNIPFDDVRVIENSTKEVNEGVGTFASRTAALSGGAVTKSCRKIISKGIEVAADELAVPAEMITYDDGEFTATTENGDTQSFLFDEMASKVHLGQNIPDDMEPGLAAETYYDPENCTWPFGTHIAVIEVNPTTGEFDFLDYVATEDCGVQINPTIVEGQLIGAIAQGVGQALYEDVEYGEDGTLLSDSFRTERVGSRGGYTLPKAEHMPEITIRSTETPSPHTPHGAKGMGEMGSIAAPGAILNAIEDAIEPFDPEPMTPPISSEKIWRAINTEGT

SEQ ID NO: 4650 - protein, 302 aa, Arabidopsis thaliana; identical to SEQ ID NO: 3010

SEQ ID NO: 4651 - protein, 154 aa, Rhodococcus sp. RHA1
MPLEVGTTAPDFTLKDQNNQEVTLSDYRGKKNVLLVFYPLAFTGTCQGELCKVRDELPKFENDETAILALSVGASPTHKIWSAEQGYTFPLLADFWPHGAVAQQYGVFNEKLGFANRGTFVIDKEGVIRFAEMNGPGEARDQEAWEKALATLES

SEQ ID NO: 4652 - protein, 160 aa, uncultured haloarchaeon
MSSEKVDVNLTVNGESHSVSVEPRELLAQTLRERLDYTSINIGCESTLCGACTIHVDGKAIKSCTRLTVQEDGSEIRTVQTLSNDGVLGDLQTAFSEEHALQCGYCTPGILMTVDEYLDNNPDPSRDEIRSEALQGNLCRCTGYENIVDAIDVASDALEE

SEQ ID NO: 4653 - protein, 61 aa, Glycine max
  misc_feature (10)..(10): Xaa can be any naturally occurring amino acid
MGEAARLRMXKYDWRAATRKIRNENYKAAIWFWRKKRAHCLRPFQWLAQPIFPSPDPEANS

SEQ ID NO: 4654 - protein, 153 aa, Myxococcus xanthus DK 1622
MTVRVRINGEEKELDVDPEMPLLWAVRDVLGLTGTKYGCGQALCGSCTVHLDGQPVRACVTPIRRAEGHSVTTIEGLSPDGNHPLQKAWVELGVPQCGFCQTGQIMCAAALLAKKPQPSDKEIDQSLAGNLCRCGTYTRIRSAVKKAAGMSEE

SEQ ID NO: 4655 - protein, 462 aa, Desulfovibrio vulgaris subsp. vulgaris str. Hildenborough
MRRPRVCMLLATDRLGGPGKGLVQFLRHGGLAGCSPVVVAYEAGEPGETEFTRAVRDTGADLRILRQRGAFDVSLIPQALRVVRDEGCEVLQSHGYKSHAVCACLHAMTGLPWVAFVHGWTAENVRVRAYRVLEQALLPLATRVVAVSDALGRSVWPAARRRMVVIPNAIDPAEALRDGDVPATGPHSGAHPDAFAQVPQVPGGASQPEAGDPAEALRDGDVPATGLYASPDASPDASPDASPDASPDANHDTGSDAGKGDLRAAFGIAADALVAGVVGRLSPEKGHIHFLRALARARQTEPRLVGLLAGDGPGADMLRREADMLGLAHAVTFAGHVSRVARVYRALDVAVLPSLSEGMPNAALEAMLHGLPVVASHVGGVPEVVRDGETGLLVPPGDEAQLAAALVALCADVERRKVLGARGRERVLGHFAPHQRAERILGLYHELLQPLAGEGQRHAKLG

SEQ ID NO: 4656 - protein, 338 aa, Alkalilimnicola ehrlichei MLHE-1
MTVCDGFAGAVGNTPLIRLKRLSEETGCEILGKAEFMNPGGSVKDRAALYILLDAERRGLLRPGGTVVEGTAGNTGIGLAHLCNARGYRCVIVIPETQTQEKIDLLRTLGAAVHTVPARPYKDPNNYQKVAGRMAEEMDNAIWANQFDNTANRQAHYETTGPEIWSQTGGRLDGFVAATGTGGTLAGVARYLKAQSPDVRCVLADPHGSALYGYVKTGTPEVTGSGSITEGIGSTRVTANLEGTPIDDAYSIPDQEAVDRVYQALYQEGLFLGSSSGINLAAAVRLARELGPGHTIATILCDGGARYYSRLFNPEWLREKGLTPETNRETGRDDPEAP

SEQ ID NO: 4657 - protein, 252 aa, Ashbya gossypii ATCC 10895
MLARITTIAKNTFKTPSTVLGSMSSTRSVRTFRQEDQPRLRINSPAPNFTADTTEGRINFHEFLGNSWGILFSHPADFTPVCTTELGTFAQLKPEFDKRDVKLLGLSAEGLEKHHEWARDIEEISQLDKFSFPIVADVDREVAFLHDMVDEEGFQNLSGGLVQTIRSVYVIDPSKKIRLMFTYPASVGRNSLEVLRVVDALQLSDRKGIATPINWQQGDEVIIPPAVSDKAAAEKFGEFRTVKPYLRYTKVD

SEQ ID NO: 4658 - protein, 326 aa, Mesorhizobium loti MAFF303099
MNKPVTSARVPGRGRIYSSITDTIGDTPLVRLDKFAKEKGVVANLVAKLEFFNPIASVKDRIGVAMIEALEAAGKISPGKTTLIEPTSGNTGIALAFAAAAKGYKLILTMPETMSVERRKMLALLGAELVLTEGPKGMKGAIAKADELAATIPNAVIPQQFENPANPEIHRKTTAQEIWNDTQGEVDIFVAGIGTGGTITGVGQVLKKLKPSLHVVAVEPEASPVLSGGQPGPHKIQGIGAGFAPKILDTTIYDEIIKVSNEDSVANARLVARLEGVPVGISSGAALQAAIVVGSRPENKGKTLVVVIPDFAERYLSTILFEGLGA

SEQ ID NO: 4659 - protein, 213 aa, Thermodesulfovibrio yellowstonii DSM 11347
METKMPLLGEKVDDRKIKTTHGIINFPSDYKGKWVILFSHPADFTPVCTTEFVAFQKRIDEFKSLNCELIGLSIDQVFSHIKWVEWIKEKLGVEITFPIISDDMGEIAKSFGMISPAKGTNTIRAVFVIDPNGILRVILYYPQEIGRNIDEIVRTVKALQISDANKVAIPAGWPNNELIGDKVIVPPASDVKTAQERPKQFECFDWWFCYKKL

SEQ ID NO: 4660 - protein, 196 aa, Chlamydophila caviae GPIC
MESLFIGKAAPDFSVQAVVNGEVKNVSLKDYRGKYVILFFYPKDFTYVCPTELHAFQDSLEEFENRGAQIIGCSVDDLDTHKRWLNTDKKAGGVKGITYPLVSDTTHELSKLYGVLDSLSGLSFRGSFLIDKEGIIRHLVINDLPLGRSIDEELRVLDALIFYENHGLVCPANWQQGQKAMAPNEEGLKEYFGTID

SEQ ID NO: 4661 - protein, 386 aa, Mycobacterium smegmatis str. MC2 155
MRIGMVCPYSFDVPGGVQSHVLQLAEVLRDAGHEVSVLAPASPHVKLPDYVVSGGKAVPIPYNGSVARLRFGPATHRKVKKWIAEGDFDVLHIHEPNAPSLSMLALQAAEGPIVATFHTSTTKSLTLSVFQGILRPYHEKIIGRIAVSDLARRWQMEALGSDAVEIPNGVDVASFADAPLLDGYPREGRTVLFLGRYDEPRKGMAVLLAALPKLVARFPDVEILIVGRGDEDELREQAGDLAGHLRFLGQVDDATKASAMRSADVYCAPHLGGESFGIVLVEAMAAGTAVVASDLDAFRRVLADGDAGRLVPVDDADGMAAALIGILEDDQLRAGYVARASERVHRYDWSVVSAQIMRVYETVSGAGIKVQVSGAANRDETAGESV

SEQ ID NO: 4662 - protein, 507 aa, Saccharomyces cerevisiae
MTKSEQQADSRHNVIDLVGNTPLIALKKLPKALGIKPQIYAKLELYNPGGSIKDRIAKSMVEEAEASGRIHPSRSTLIEPTSGNTGIGLALIGAIKGYRTIITLPEKMSNEKVSVLKALGAEIIRTPTAAAWDSPESHIGVAKKLEKEIPGAVILDQYNNMMNPEAHYFGTGREIQRQLEDLNLFDNLRAVVAGAGTGGTISGISKYLKEQNDKIQIVGAEGFGSILAQPENLNKTDITDYKVEGIGYDFVPQVLDRKLIDVWYKTDDKPSFKYARQLISNEGVLVGGSSGSTFTAVVKYCEDHPELTEDDVIVAIFPDSIRSYLTKFVDDEWLKKNNLWDDDVLARFDSSKLEASTTKYADVFGNATVKDLHLKPVVSVKETAKVTDVIKILKDNGFDQLPVLTEDGKLSGLVTLSELLRKLSINNSNNDNTIKGKYLDFKKLNNFNDVSSYNENKSGKKKFIKFDENSKLSDLNRFFEKNSSAVITDGLKPIHIVTKMDLLSYLA

SEQ ID NO: 4663 - protein, 183 aa, Bacillus halodurans C-125
MTDKRMVAKQAPRFEMDAVMPNKEFGKVSLEENMKNDKWTVLFFYPMDFTFVCPTEITSLSDRYDEFEDLDAEVIGVSTDTIHTHKAWINTSRDDNGLGDLKYPLAADTNHEVSREYGVLIEEEGIALRGLFIISPEGELMYSVVNHNNIGRDVDETLRVLQALQTGGLCPANWKPGQETLSV

SEQ ID NO: 4664 - protein, 420 aa, Zea mays
MATIVNPSITLMSHFFDTTAASGVTPTDYFHRTYTTTYYICRLQWHLPDGTLSLSTDTAAKPGMCIVKHEVKEEPLSEEVGCHLKLGLRKKSNGQWEISKRVDADLVPSSGNDHDHSGHDENKNCITHSSNIDDTNIADEGYNLEPATNGYPMTHVHDLDSSSADENGPPASTGQDIVVLSDSDDDAIMVLSPGAVNCGSMHNTGNLFPPNTPENLGVCSGETGGCPKETSFLALKEDFGDPGLSFWESHGSPRDASTSQIPDASTKAATTLGEMDNHPANDQSKQGQVSGADFGVAANPVPLEDGHDSALQPCSMSERDSAMGLASLGADTQSCVDVHSDNWTSVSISGRDEVLTAAKIASRKRSNPGDRIEDLDDDFESAPIVPTVSSPSLCHCTNLHLWEAQTKMSAAEGDVQFDRD

SEQ ID NO: 4665 - protein, 158 aa, uncultured bacterium
MTPVSITVNGKVRKAHVEPRTLLVHFLREHLNLTGTHVGCDTSQCGACTVLVDGRSAKSCTIFAVQADGSSVQTIEGLAPEGELHPLQKGFWEEHGLQCGYCTPGMIMSAVNLLQDNASPSEREIREGISGNFCRCTGYQHIVNAIQHAAKNGGAKAR

SEQ ID NO: 4666 - protein, 427 aa, Physcomitrella patens subsp. patens
MRSGYITVDEKAGRALFFWFVEADVQDPASAPLTLWLNGGPGCSSVGGGMLSELGPFYPTRDGAHLLPNAHAWNKVSNMLFLESPAGVGFSYSNTTTDYKTGDKRTAQDSYAFLLRFFEQYPLYSSSKFYISGESYAGHYVPQLADTILEGNKVGSNKKINLQGMLVGNAWTDANVDNFGAIFFWWTHALVSDSTFKGVVKNCNFSSVGPLRSEADDLCDKYVDIANNELAIQGNINIYEIYADICVSAQAQAETRHFGKQLSRTRFGGLSTRPLMKDSYDPCVDDEVEVYLNRPEVQEALHANTTHLPWRWTDCSEIVDYSFDDLLSSVLPVYHNLLESNIKILVFSGDVDAIVPVTGTRTWLNLLPLNITEAWRPWTVDNQVGGYVTKYDKLTFSTVRGAGHMVPYTQPARALHLFQSFINNTPL

SEQ ID NO: 4667 - protein, 274 aa, Halobacterium sp. NRC-1
MIEQMLASGELPEGGTIIEPTAGNTGVGFAVAASQLGIDAVFVVPERFSLEKQQLMRALGADVVNTPTDDGMGGAIQRAHDLAAEREDAIVPQQFSNPLNAEAHYETTGPEIYHALDGAVGAFVAGCGTAGTLMGTSRFLRDQISALHVTAVEPEGSMYASAAGADVSEGEYKTEGIGTHDPSTSELFDPEFVDDVTQIPDEDTHAEMQRLAAEEAQLVASSAAANSLAAIDVAERAAAGHIDLPHDCVVTVFPDSSERYLSKGLYGDYEEWEG

SEQ ID NO: 4668 - protein, 309 aa, Leptospira interrogans serovar Copenhageni str. Fiocruz L1-130
MKAKNILETIGNTPHVKINRLFNTKSEVYAKLERSNPGGSIKDRIALSMIEDAEKTGKLTKDSIIVEPTSGNTGIGLALVAAVKGYKLLLVMPESMSIERRRIMAAYGAEFELTPREKGMPGAIEKAKQIVAENPKAWMPQQFENEANIKIHVETTAQEIAKDFPDGLDYVITGVGTGGHITGVAQVLKQKFPKLKVFAVEPEASPVISGGKPGPHPIQGIGAGFIPKNLHTNLLDGTIQISKDEAFEYAQRAAKEEGLFIGVSSGAALAAVAKKLPEIPEGSRILTFSYDTGERYLSIEGLFPVPSNA

SEQ ID NO: 4669 - protein, 563 aa, Vitis vinifera
MEQLQASTNQGVDQRIPLFNLPSKILCRVVHTRLLAEQETDEVYAQITLQPEADQTEPKSPDSCPDEAPKQTVHSFCKILTASDTSTHGGFSVLRKHANECLPPLDMSQATPTQELVARDLHGYEWRFKHIFRGQPRRHLLTTGWSTFVTSKRLVAGDAFVFLRGDNGELRVGVRRLARQQSPMPSSVISSQSMHLGVLATASHAVTTQTLFVVYYKPRTSQFIISLNKYLEAVNYGFAVGMRFKMRFEGEDSPERRFTGTIVGIGDISPQWSNSKWRSLKIQWDEPATIQRPERVSSWDIEPFVASASLNLTQPPVKIKRPRPLDLPVAVPSPFWYAGSSPSHELTQLDSKTVSTRSILSGYNTSLSSRPNNGLISDQVEKGKRIEASIGCRLFGIDLTNNSKATALLEMIQNLDVSKSSNEQKQVVPEASQKETQGRQSCTPSSRTRTKKVQMQGVAVGRAVDLTALEGYDELISELEKMFEIKGELCPRNKWEVVFTDDEGDMMLVGDDPWQEFCKMVRKIFIYSSEEVKKMSPRCKLSTSSLDGEGTVISLDSELRTEP

SEQ ID NO: 4670 - protein, 876 aa, Oryza sativa
MADLVSSCKDKLAYFRIKELKDILNQLGLPKQGKKQDLIDRVLALLTDEQGQRHHGWGRKNSLTKEAVAKIVDDTYSRKMQIQCAPDLATRSHSGSDFSFRPIEEAYDSFQPEAKVRCICSSTMVNDSMIQCEDQRCQVWQHLNCVLIPDKPGESAEVPPVFYCELCRLSRADPFWVTAGNPLLPVKFVSSGVTNDGTSVPQSVEKSFQLSRSDRETVQRQEYDLQVWCMLLNDKVQFRMQWPQYAELHVNGISVRVVTRPGSQLLGINGRDDGPLITTCSREGINKICLSRVDARTFCFGVRIAKRRTVAQVLNLVPKEAEGESFEHALARVRRCLGGGDTAENADSDSDLEVVAESVTVNLRCPNSGSRMRIAGRFKPCIHMGCFDLETFVELNQRSRKWQCPICLKNYSLESLMIDPYFNRITSLLRNCNEDVNEVDVKPDGSWRVKGDAASRELSQWHMPDGTLCNPKEDVKPAMQNGNEQMMEGTSDGQKSLKIGIKRNPNGIWEVSSKADDKKPSVVGNRMQNNSGFRALNNIMHMSNSPTSSYRDGEDPSVNQESNRHVDLSLRTGNNEFDSFSLNFGQACNTDDRPQQQHNATDVIVLSDSDEENDAMVCPPAVYDNTTTANGSGFPFTTNGTGYTERYQEDAGVGTSGLGLLSNNVDDFEMNNWQMHSSYQQPEQGFQFFGNDTDVHNTFVGSHNSFGLAPNDYSLDCNVGVEEASVTPALSVCRNSNEMHGSLVDNPLALVGDDPSLQIFLPSQPSSVPLQEELSERANAPNGVQSDDWISLTLAAGGGGNEEPAPADVNSQPQIPSTETGIEPLTDAASAFLSTNIERRSGADLNPRRIENIFSHPRQPRSVRPRLCLSIDTDSE

SEQ ID NO: 4671 - protein, 316 aa, Fusobacterium nucleatum subsp. nucleatum ATCC 25586
MRIKFDRRIFMLANSVIDLIGNTPLVKINNIDTFGNEIYVKLEGSNPGRSTKDRIALKMIEEAEKEGLIDKDTVIIEATSGNTGIGLAMICAVKNYKLKIVMPDTMSIERIQLMRAYGTEVILTDGSLGMKACLEKLEELKKNEKKYFVPNQFTNVNNPKAHYETTAEEILKDLNNKVDVFICGTGTGGSFSGTAKKLKEKLPNIKTFPVEPASSPLLSKGYIGPHKIQGMGMSIGGIPAVYDGSLADDILVCEDDDAFEMMRELSFKEGILGGISTGATFKAALDYSKENADKGLKIVVLSTDSGEKYLSNICDL

SEQ ID NO: 4672 - protein, 750 aa, Agrobacterium tumefaciens str. C58
MTGSAEYIDDIPEPAGLVHGALGLADRAHAEIVSMDLSEVEATPGVLWVMVGKDVPGENDVSSGGRHDEPLLAETKVEFHGQPIFAVFAETRDIARKAARKAKITYRDLPHFTDIDTAIENGGALVIDPMTLKRGDAKIEMDVAPRRLTGTMRIGGQEHFYLESHIAMAVPGEDDEVTLWSSTQHPSEIQHIVSHILQVPSNAVTVQVRRMGGGFGGKETQGNQFAALCAIAAKKLNRAVKIRPDRDEDMTATGKRHDFRVDYELGFDEEGRIHAVDATYAARCGFSSDLSGPVTDRALFHADSSYFYPHVHLTSRPLKTHTVSNTAFRGFGGPQGMLGAERFIEEIAYAVGKDPLDIRKLNFYGETGSGRTTTPYHQEVEDNIIARVVEELETSSDYRARREAIIEFNRTSPIIRKGIALTPVKFGISFTMTAFNQAGALVHIYNDGSIHLNHGGTEMGQGLYTKVAQVVADAFQVDIGRVKITATTTGKVPNTSATAASSGTDLNGMAAYDAARQIRERLVKFAAENWNVPEEEVVFLPNRVRIGLEEIAFNDFIKKAYFARVQLSAAGFYKTPKIHWDRAAGRGTPFYYFAYGAACSEVSIDTLTGEYMMERTDILHDVGKSLNPAIDIGQIEGAFVQGMGWLTTEELWWDGKGRLRTHAPSTYKIPLASDRPKSFNVKLAEWAENAEPTIGRSKAVGEPPFMLAISVLEALSMAVASVADYKVCPRLDAPATPERVLMAVERLKKV

SEQ ID NO: 4673 - protein, 167 aa, Zea mays
PLQWFDHNNRNIYIVWFTWACRAELEKMFMGMPAVFSGMLQGEELSQAYASADVFAMPSESETLGQVVLESMAFGVPVVAARAGGIPDIIPKDKEGKTSFLFTPGDLDECVRKIEQVLSSKDFRETVGKAAREEMEKCDWRAASKKIRNEHYSTAILYWRKKMDKSN

SEQ ID NO: 4674 - protein, 507 aa, Saccharomyces cerevisiae
MTKSEQQADSRHNVIDLVGNTPLIALKKLPKALGIKPQIYAKLELYNPGGSIKDRIAKSMVEEAEASGRIHPSRSTLIEPTSGNTGIGLALIGAIKGYRTIITLPEKMSNEKVSVLKALGAEIIRTPTAAAWDSPESHIGVAKKLEKEIPGAVILDQYNNMMNPEAHYFGTGREIQRQLEDLNLFDNLRAVVAGAGTGGTISGISKYLKEQNDKIQIVGADPFGSILAQPENLNKTDITDYKVEGIGYDFVPQVLDRKLIDVWYKTDDKPSFKYARQLISNEGVLVGGSSGSAFTAVVKYCEDHPELTEDDVIVAIFPDSIRSYLTKFVDDEWLKKNNLWDDDVLARFDSSKLEASTTKYADVFGNATVKDLHLKPVVSVKETAKVTDVIKILKDNGFDQLPVLTEDGKLSGLVTLSELLRKLSINNSNNDNTIKGKYLDFKKLNNFNDVSSYNENKSGKKKFIKFDENSKLSDLNRFFEKNSSAVITDGLKPIHIVTKMDLLSYLA

SEQ ID NO: 4675 - protein, 159 aa, Marinobacter sp. ELB17
MITLTINGQEHELDVPDSMPLLWAIRDVVGMKGTKFGCGIAQCGACTVHLNGVAIRSCVTPVAAAKGEITTIEAMADDPVGHKVQQAWLDLGVAQCGYCQGGQIMNATALLKRTPAPQTQEIVDAMAGNLCRCGTYNRILAAIERAADTRTVDKEEASS

SEQ ID NO: 4676 - protein, 195 aa, Mycobacterium marinum
MSLLTIGQQFPAYSLTALIGGDLSKVDAKQPGDYFKTVTSDDHAGKWRVVFFWPKDFTFVCPTEIAAFGKLNDEFEDRDAQVLGVSIDSEFVHFQWRAQHDDLKNLPFPMLADIKRDVVAATGVLNADGVADRVTFIVDPNNEIQFVSATAGSVGRNVDEVLRVLDALQSDELCACNWRKGDPTLDAGELLKASA

SEQ ID NO: 4677 - protein, 422 aa, Nostoc sp. PCC 7120
MNSNTEKRIALISVHGDPAIEIGKEEAGGQNVYVREVGKALAQLGWQVDMFSRKVSPEQELIVHHSPLCRTIRLTAGPEEFVPRDNGFKYLPEFVQQLLRFQKENNVNYPLVHTNYWLSSWVGMQLKAIQGSKQVHTYHSLGAVKYKSIDTIPLVATKRLSVEKQVLETAERIVATSPQEQQHMRSLVSTKGYIDIVPCGTDIHRFGSIARQAARAELGIDQEAKVVLYVGRFDQRKGIETLVRAMNESQLRDTNKLKLIIGGGSTPGNSDGRERDRIEAIVQELGMTEMTSFPGRLSQDVLPAYYAAADVCVVPSHYEPFGLVAIEAMASGTPVVASDVGGLQFTVVSEKTGLLVPPKDIAAFNIAIDRILMNPQWRDELGLAARKHVTHKFGWEGVASQLDGIYTQLLTQQVKEPALVTK

SEQ ID NO: 4678 - protein, 468 aa, Mycobacterium avium subsp. paratuberculosis K-10
MRIAQHISDLIGGTPLVRLNSVVPDGAGIVAAKVEYLNPGGSSKDRIAVRMIDAAEASGALKPGGTIVEPTSGNTGVGLALVAQQRGYKCVFVCPDKVGEDKRNVLMAYGAEVVVCPTAVPPEHPDSYYSVSDRLVTEIEGAWKPDQYANPEGPASHYATTGPEIWADTDGKVTHFVAGIGTGGTITGAGRYLKEVSGGRVRVIGADPEGSVYSGGTGRPYLVEGVGEDFWPQAYDRTVPDEIIAVSDSDSFNMTRRLAREEAMLVGGSCGMAVVAALRVAEQAGPDALVVVLLPDGGRGYMAKIFNDAWMSSYGFLRTRLDGSTDQSRVGDVLRRKSGELPDLVHTHPSETVRDAIGILREYGVSQMPVVGAEPPVMAGEVAGSVSERELLSAVFEGRAKLADAVSLHMSPPLPMIGAGESVSAAGKALRDWDALMVVEEGKPVGVITRYDLLGFLSEGPRGSGGRR

SEQ ID NO: 4679 - protein, 357 aa, Bradyrhizobium japonicum USDA 110
MRILVATDAWHPQVNGVVRTLTKLADAAKGLNVEGLSVEGLGVEFNFLTPQSFRTFAMPSYRDVRLAMPRPARIAKLIAEARPDSIHIATEGPIGLMVRRYCRQRKLPFTTSFHTRFPEYVRARVPVPESLIWRALRRFHAPSRAVMTATPALARELTERGFANVVLWPRGVDTHLFHPRAIDLCLPTPVFLSVGRVAVEKNLEAFLDLELPGTKVVVGDGPARASLEEAYPDAIFLGEKHGEALADIYAAADVFVFPSKTDTFGLVLLEALASGLTVAAFPVKGPRDVIGDAPVGALDHDLRNACFTALGISRQDCVEFAANYTWEASARAFIDRIKAVGAVLPGRNGAEQPRFVA

SEQ ID NO: 4680 - protein, 382 aa, Agrobacterium tumefaciens str. C58
MTSALFVSHTGEKGGAELFLADLVKAGPHSWRACFLSGGATAEDLAEAGRPPVMLSAGEKMLSIRRNSSFGALARGAADVMAVAWQLSREAKHFDVICANSQKALFVCALAAKLSRRPLVWILHDIVTDTAFSATNRRASLAFARIFARLVAVNSEETGRAFIEAGGEADKVRIVYNGFDPAKAKLHDAGMAARLRAELGLGPQPLVGLFGRLSEWKGQHVFLDALAAMEGVQAVIVGGALFGQEAYEARIREQASRLGLDGRVRFLGFRSDVPELMASMDVVAHTSIVAEPFGRVVVEAMMCGRPVVATRGGGVTEIIRDGETGLLVPPGDASALAAALGTILSDPALAQRLGQSGREDVSDRFSLQETCRSVSALLTEAA

SEQ ID NO: 4681 - protein, 346 aa, Streptomyces vinaceus
MAAYPVTPVRTVRTEIAGIPRTITLKLEGHSPWRSVKGRTALSLIRSVAGDLTAPDATVVESTSGNLGLALSAICRDLGLRFIAVVDHRQSPVIQQAIEANGGELDWVRTPDDATTHLQDRLARVRELERDLPHAVWPNQYENDANWRIHETWTAPEFDAQVTHRAQALFAGVSTGGTLAGLSRHFRRTRPGLRIVAVDVRGSTVFGGVPRPRTLTGIGAGRRSAFLTRASTDDVLLVDERQAVACCHTLRADTGTAVGGSSGAVLAGCLEYLYRHPEVRHALCLCPDLGDHYGPTVYHPAWLDRMGLPSEAHRLRHRTGAACPGFEPVDDITPAPSAPSEEDASR

SEQ ID NO: 4682 - protein, 354 aa, Novosphingobium aromaticivorans DSM 12444
MRIAICTDAWHPQVNGVVRTLAATVERLTARGHEVELITPSQFRTLPLPGYSEIRLAMAPRFGTRRTLDAFGPDVVHIATEGPIGWSARSWCKAAGVPFTTAFHTRFPEYAAVRTGLKPEHFWPVMRRFHAPSRAVLVSTPTMANELARQGISQTRLWTRGIDRDLFRPGHAALPELSALPGPVMLNVGRVAVEKNLTAFLDAEVEGTKVVVGDGPDLARLKARYPHVHFTGALHGQDLARAYCSADVFVFPSLTDTFGLVMIEAMACGVPVAAYPVPGPIDVIGASGHGPDGDLPMKIGALDEDLSVAIRKALACDRLGAAVHGASFNWDRATDQFLAAVGEAVQPERKLEPA

SEQ ID NO: 4683 - protein, 1357 aa, Physcomitrella patens subsp. patens
MGSLDAPSLGVAVAPVEYAKEEDILLYVNGKRYVLPPNIAHQTLLEYLRGIGLTGTKLGCGEGGCGACTVMLSHYDTSTGSIVNRAINACLAPIYSVEGMHVITVEGIGNRRLGLHPVQEALASAHGSQCGFCTPGFVMSMYSLLRTKKDKPTQAEIEECLAGNLCRCTGYRPILDAFRVFAKSETSLYTNEAIAAAGGVPTNKSTGSEFVCPSTGKPCDCGKTPSKVPRAEPIFPSKLKERKPQPLVLRGRLGLKWYRPTSLSHLLALKKEYPSAKMVGGNTEVGIEVRFKNLQYPVLIATTHVPELSTIKVIDSGVEIGSSVTLTNIFETFSEIVKTRNEDETSGCKAIIEQLRWFAGAQIRNVSSIGGNIVTASPISDLNPLWIATGTIFTVAGYGASPRQVPAKDFFLGYRKVDLKENEILISVFMPFTRPFEYVKEFKQAHRRDDDIALVNAGIRVSLAESDGAWIVQDSCLAYGGVAAMVAVAKRTQEFLRGKPWSRETLDQALGLLEQEIHMADNAPGGMVQFRRSLISSFFFKFFLFTNYKLEAHANFSHGLPESYRSAVTPYEREPSHGIQVFQTLPNGTAVGLPFQHQSANLQVTGEAEYVDDIAMPPNGLHAALVLSTRPHARIVSIDASEAENQAGFEGFFSAKDLPGANDIGAIVHDEELFATTTVTCVGQVIGIVVADTHENAKDAARKIKIVYEDLPTLLDLDAAVAAQKFHPGSERVLEMGNVDAFFENARGSDDVLAVEGEVRMGGQEHFYLEPNSTLVWTTDAGNEVHLLSSTQAPQKHQRYVAHVLGIPQHKVVCKLKRIGGGFGGKETRSAFIAAAASVPAYLLQRPVRITLDRDTDMAITGQRHAFMGKYKVVFTKEGKILALDVDIYNNGGNSLDLSGSVLERAMFHSDNVYSIKDMRVRGRVCFTNQSSNTAFRGFGGPQGMLIVENWIERIASEVGRRPEEIRELNFQQDGDELHYGQILEASRHRHAWAELKKSCEFEKRLAEVESFNAQHRWKKRGLAMVPTKFGISFTTKFLNQAGALVQVYTDGTVLVTHGGVEMGQGLHTKMAQIAASEFGIPLKDVFVSETATDKVPNSSPTAASASADMYGGAVLDACKQITARMSELSSKNNYSSFAELVTACYLERIDLSAHGFYITPDIGMDWDTGKGRPFSYFTFGAAFAVAEIDTLTGDFHLPRVDIVMDLGHSLNPAIDIGQVEGGYVQGLGWAILEELKWGDSAHPWVRPGHLFTQGPGTYKLPTVNDIPIDFRVSLLKDAPNSKAIHSSKAVGEPPLFLATSALFAIKDAIKAARKDSGHNGWFVLDTPATPERIRMACADEFTKPFAGPDIRPKLSV

SEQ ID NO: 4684 - protein, 395 aa, Cyanothece sp. PCC 8801
MSKIKLLIMFPSNIRGGAEEYALTIAKAAVKEQWKVHAAFPNIETTHSLIEDFKKQSIEYHPLDIAPVDGKRGKLFREHIPQFFRTVSVIIKIKPDIVHLNIPWYNWAFDSLLACGFLKTPTLVVFHLFPNKVTYNQLKLQAYKWSFSRHQKWIAISENNRQFISQSFQIDKNQISLIYNGTKANSNLTDITEQQVSKLRNQLRQELHLPDNSKILLTVGRLHSQKGYKDLIEVIGSIIEKFPEVKFVWVGEGNLKDYLVKKINSYGLEKEVILLGYRTDVPCLLKASDLLVFPTWFEGGQSFVISEAMAHGLPIVASNASGIPEIIENKVHGLLFTSKNQQELLQSILWALNHPEAMKAMAENAQQRVQGFSEDKMIEKTFEMIKIMKENSLRN

SEQ ID NO: 4685 - protein, 377 aa, Bordetella parapertussis 12822
MTQRSEPAVPALRILHTEAATGAGGQETSIYREMLAMRARGHHLEAACQPGAPLARRLRAAGFPVHELAMDGVAAGVRAVWRLRELVRGRFDVVNTHSRRDTVLAAWAGRMAGAPLIVRTRHLAKPVGSLYTYTWLPHRVIAVSDHVRGQILRAGARAAHVEAIASPATLAPAPPASSLRAELGIAAAAQVIGCVAVMRADKGLDDLLDAFVALAGRHAAAHLVLVGEPGGIGALLRERAQRLGLGARVHLTGHRDDIPNVLAAFDVFALPTRSEALGLAMVEAAAAGLPVIAGNVGGVPEVVRHGATGLLVPPSDPAALAQALERLLVDPALRRAMGRAGSRMVRDERDFSPERQAARVEAAYCRWLAQRGRPAWR

SEQ ID NO: 4686 - protein, 375 aa, Rhodococcus sp. RHA1
MKIGMVCPYSFDVPGGVQAHVVDLAEVLIERGHKVSVLAPASDDVDLPDFVVSAGRALAIPYNGSVARLSFGPAASARVRRWISDNNFDVLHIHEPNAPSLSMLAMRVAEGPIVATFHTSTTKSLVLSTFQGVLQPYLERISGRIAVSELARRWQVESLGSDAVEIPNGVDVQAFANAEPLPGYPRPGKTILFLGRYDEPRKGMAVLLKALPALVEKYPDLEVLVVGRGDEDKLRREAGPVFGHLRLLGQVDDAEKASALRSADVYCAPNLGGESFGIVLVEAMAAGAAVVASELDAFRRVLRDGQAGVLVPVGDVAALAAGIDSVLGDPERSAALTDVGRTVVTEYDWPVVAEQILRVYETVTVGRDGVREVGS

SEQ ID NO: 4687 - protein, 526 aa, Alcanivorax sp. DG881
MNDTIATTADNTAGWQASGLAVHQASDLTGKQPEGERLTIEADVVIVGSGAGGAVSAYELARRGFKVVVLEAGAYVPSKDFTERFTDSLDTLYQDHGGQTNSSGDLLVLQGACVGGSTVVNGCVCFRTPDFILQDWQRDFGLDDLTTAELTPYFDEVEKNLAVHENGEHEIPRHGRLIRAGANRLGWSVKPLQRNIRQCGLTGHCLSGCKTERKQSMLVTYLPWAAAHGAQIYADTRVENILTENGKASGVEATVTHRDGSVAARMTVTAPRVIVAAGAVQTPLLLLKSGLGNRSGQVGKNFACHPSLYVPARYPEPVYPWRGAMLGVYVDEFMHPDKGGFVLEDGGAGLVELTMAAEPGTGKPFMDYMADAKYLGGLVTLIHDHNVGTIEWDGERKKINYQLSDMDFPSMQRALKAAARLHLASGAEEVYVPASDNRVIRSEADIDVMVDTLENLPQHLRMVSYHPQGTCRMGADPDQSVVGSDGQSHDVPGLYVADASLLPTSIIVNPQITVYALATRIARQIA

SEQ ID NO: 4688 - protein, 67 aa, Zea mays
YRPAELNWYSACGVSADLTLVPSLAIAEDFETAKASSANRIRLWNKGVDSESFHTKYRRHEMRRFGR

SEQ ID NO: 4689 - protein, 376 aa, Mycobacterium sp. MCS
MVRVAIVTESFLPNVNGVTNSVLRVLEHLRRTGHEVIVIAPDTPRGEPPAERVHDGVRVHRVPSRMFPKVTSLPLGVPRPRMVGVLRGFDPDVVHLASPALLGYGGLHAARHLGIPTVAVFQTDVAGFAQSYGVGAMSRAAWAWTRHLHSRADRTLAPSTSAMENLASHGVPRVHRWARGVDITGFAPSARDHELRRRWSPHGEPIVGFVGRLAPEKHVERLAALSARTDLQVVVVGDGVDRMKLESLMPTAVFTGALYGDALAAAYASMDVFVHPGEHETFCQAVQEAMASGLPVIAPNAGGPRDLVAPYRTGLLLDVTEFEDRLSESVDHLIAERPRYSPAARRSVLDRTWPAICDELIGHYEAVAGLRRLRAA

SEQ ID NO: 4690 - protein, 198 aa, Helianthus annuus
INLHDYVGDSFTIIFSHPGDFTPVCTTELGAMAAYADKFAQRGVKLLGLSYDDVQSHKEWIKDIEAYNKGKKVTYPIAADPNREIIKQLNMVDPDEKDASGQNLPSRALHIVGPDKKIKLSFLYPASTGRNMDEVVRALDSLIKASQHKIATPVNWKEGEPVVIAPSVSNDEARKMFPKGFQTVDLPSNKDYLRFTSV

SEQ ID NO: 4691 - protein, 322 aa, Pseudoalteromonas tunicata D2
MSKIFNDNSLTIGNTPLVKLNRVTTGNVFAKIEARNPSFSVKCRIGASMIWEAEKSGQLTKDKEIIEPTSGNTGIALAFVAASRGYKLTLTMPSTMSLERRKLLKALGANLVLTEGPKGMKGAIEKAQEIQQAEPNKFVLLQQFENPANPKIHFETTGPEIFEATDGNIDFFVAGVGTGGTITGVSRYLKLEKGLAVKAIAVEPVDSPVISQKLAGQEIKPGPHKIQGIGAGFIPGNLDLEMLDGVEQVSNEEAIATAHRLMKEEGILAGISSGAAVAAAIRIAEKPENAGKNIVVILPSSAERYLSSPLFSEEFSDQELVQ

SEQ ID NO: 4692 - protein, 178 aa, Pseudomonas putida GB-1
MANRPLQLTLNGQPVGPVEVPADLAMIDYLHEHQNLTGSRLGCGQGICHACVVIVDNPDGTSEEVRTCITGAHYFEGKKVRTIEGHAKPDQNGNLTLNPIQQKFVDLFAFQCSYCAPGFVNAATVLVETAQRQPLKKSEVEDRIEASLGHHICRCTGYVRYYDATRKVLNDLGLVKEG

SEQ ID NO: 4693 - protein, 159 aa, Medicago truncatula
MSLIPSFFGGRRSNVFDPFSLDVWDPFKDFSFPNSALSASSFPQENSAFVSTRIDWKETPEAHVFKADLPGLKKEEVKVEIEDDRVLQISGERNVEKEDKNNQWHRVERSSGKFMRRFRLPENAKMDQVKAAMENGVLTVTVPKEEVKKPDVKSIEISG

SEQ ID NO: 4694 - protein, 400 aa, uncultured bacterium
MASPVLPKLVGERVKRREDPRLIQGRGTYVDDLKITGMRHMAFKRSDIAHGTITKIDTSAAEKMDGVEAVFTGADIAKILAPMPIGTPFPSPPHFAVAVDTVRYAGEPVAVVIAADRYVARDAADAIVVTYNPLPAVVDVEAAMTGKPTVIHKDFPNNLAVALVPSGTGVAPDFSVIDNTAVDKAFADAEVTISQRMVNQRLVPNAMEPRGVLAHWEPGKDTMTIWSSTQNPHILKTMIAAMNGLGQHQVRAIAPEVGGGFGAKINIYAEEYVASVVSKKLGMPIKWIEDRSEAFVATTHGRDILGYIDLAAKRDGTVLGLKMRLIADIGAYNMLLTAAIPTLTMLMANGTYKIPAIRTTLTEVFTNKTPTDAYRGAGRPEATYFVERAMDMLAAELKMD

SEQ ID NO: 4695 - protein, 152 aa, Polaromonas sp. JS666
MPTLNINGKDTPVNADESTPILWALRDTLGMTGTKFGCGAALCGACTVHLNGAAIRSCVTPISAAVGQKITTIEAVASDRVGKAVQDAWVKHDVAQCGYCQSGQVMSATALLKAKAKPTNADIDAAMAGNICRCGTYVRIRAAIKDAALALA

SEQ ID NO: 4696 - protein, 197 aa, Microcoleus chthonoplastes PCC 7420
MEGCLRVGQPAPDFNATAVIDQEFKTIKLSDYRGQYVVIFFYPLDFTFVCPTEITAFSDRFSEFKEVGTQVLGISVDSEFSHLAWIQTDRKSGGVGDLNYPLVSDIKKEISTAYNVLDPDAGVALRGLFIIDKDGIIQQSTINNLSFGRNVDEVLRTLKAIQYVQAHPDEVCPQGWQPGDKTMVPDPVKSKVYFSAV

SEQ ID NO: 4697 - protein, 346 aa, Bordetella pertussis Tohama I
MRIVLVTDAWHPQVNGVVRTWTTMQGLLQDWGHELIVVSPQGSRTVPAPSEPDLRLCLQPGRQLRRVLGDVVPDALHIATEGPLGLAARRMALRRGWRFTTSFHTMFPDYLQARMGIPAGLPWRYLRWFHRPSQRVLVPTPTVRDIVARRGLGNLQVWSRGVDARRFAPGPRDFLPELPRPLFLCVGRVAREKNLDAFLSLALPGSKVIVGGGPDEARLRRKFPAAHFAGPQADDRLAAYYNAADVFVFPSLTDTFGLVMLEAMACGTPVAAFRSEAPLAVVQQGATGFLDDDLAQACRAALALDRDEVRAHALTRTWDAVARDLLAAFTPLVEAPLALPPAAQRI

SEQ ID NO: 4698 - protein, 382 aa, Mycobacterium smegmatis str. MC2 155
MLLVTNDFPPRRGGIQSYLEAFVGELVRTHELTVYAPKWKGAEEYDEKAARSGYRVVRHPTTLMLPEPTVASRMKRLIGEHDIETVWFGAAAPLALLGPLARRAGARRIVASTHGHEVGWSMLPVARTALRRIGNDADVVTFVSRYTRSRFASAFGPSAALEHLPPGVDTDRFAPDPDARARMRERYGLGDRPVVVCLSRLVPRKGQDMLIRALPELRRRVPDTALAIVGGGPYLETLQRMASDLGVAEHVVFTRGIPAEELPAHHAMADVFAMPCRTRGAGLDVEGLGIVYLEASACGVPVVAGRSGGAPETVLDGKTGTVVDGTDVDAITTAVGDLLADPRRAAAMGVAGRHWALDNWQWRTRGARLAELLSGRREARQA

SEQ ID NO: 4699 - protein, 372 aa, Photorhabdus luminescens subsp. laumondii TTO1
MKIGLVDVTVTMSYGGIQTAVWELAKALTDAGHEIHIFGGKGDIQPELNGRAIQVHTFPFIPREKVINIGRRFQRIIERYSFARHARDTVVTEDFDWVILTKPFDFFWPRMMPKESRTKFCYMSGGTSFFKGDRKLSKRISAWVACSHFNAWQIQHHFKQFPKVIYNGVDINKFRPIDSSVRTRLGISDKTFLLTFAGRLVGWKGMHVAIDAMAQLQDKDVKLLIIGSGEDLKHLEKRVAVLRLKKQIIFHPPVGHDQLPEYYAAGDAGIFPSIGDEAFGITIAEAMACGRPVIASYIGGIPEVVGNENNSGILVTPGDASAIADAVNFLLSQPDRGQKMGKAARQRIETMYTWEHSANRLLKAINNEDCLY

SEQ ID NO: 4700 - protein, 315 aa, Bacteroides thetaiotaomicron VPI-5482
MEKIARKLTDLVGNTPLLELSNYNKSNGLKARLIVKIESFNPAGSVKDRVALAMIEDAEMKGVLTPGATIIEPTSGNTGVGLAFVAAAKGYKLILTMPDTMSVERRNLLKALGAELVLTPGADGMKGAIAKAEELKAATPGSVILQQFENPANPAMHLRTTGLEIWRDTEGKVDIFVAGVGTGGTISGVGEALKMRDPSVKAVAVEPADSPVLSGGKPGPHKIQGIGAGFVPKTYNASVVDEIIQVQNDDAIRTSRALAEEEGLLVGISSGAAVYAATELAKRPENEGKMIVALLPDTGERYLSTILYAFEEYPL

SEQ ID NO: 4701 - protein, 310 aa, Dechloromonas aromatica RCB
MKIANNVTELVGNTPLVKLNRVTAGAGATIAAKLEFFNPGHSVKDRIAVSMLDAAIAAGKVGPDTVILEPTSGNTGIGLAMVCAARGIKCAFVMPETMSRERKLLLKAYGAELILTPGPEGMGGAIAKAKALAESDPKYFVPQQFENPANPEVHRNTTAEEIWRDTDGQVDIFVSGVGTGGTITGVGEVLKAKKPGIKIVAVEPDASPVLSGGQKGPHPIQGIGAGFVPGVLNTAVYDEVIRVKNDDAFAIARQMATEEGLLVGISSGAATWAALELARRPENAGKLIVVIIPSFGERYLSTPLYQHLEV

SEQ ID NO: 4702 - protein, 157 aa, Pseudomonas putida KT2440
MQTTISLQVNGQPVEVSAMPDTPLLLILRNDLCLNGPKYGCGLGECGACTVIIDGVAARSCVIPLAGAAGRNITTLEGLGSKAAPHPVQQAFIDEQAAQCGYCMNGMIMTAKALLDRIPEPSDEQIRNELSANLCRCGTHVEILRAVRRAAETRRKP

SEQ ID NO: 4703 - protein, 456 aa, Mesorhizobium loti MAFF303099
MMELRKNYFADVRKDDLHEIGQPRPRSDSPGHVTGKTAFFADRSFPGMLHLKMVRSPHHHARIRSIDTSEAEKHPGVVKVLTAKDVPHNVYTILILIQIGPEDETVLADGKVRWKGEAVVAVLAETERAAQEAAAKVKIDYEVLPAVFDMEEALKPGAPLVNEYHGQNYYLYDSGECRKVRFGDVEAGFAGADHILEQSYQSSPIEHAPTETTGCVVAPEGNDRFTCYTNTQAMFFTLDNTSIILQMPGSKLHFVGGTVGGGFGGKVDVIVEPIAILGAKLTGRPVCFIYSREEEMQISSPRAAEKVVIKDGVMKDGRIVARKVTGYTDAGAYSRHSPYGAQKGAGHYPGPYTIPNVWIDTYCVYTNRTPSSAMRGFGVTIGDFALEVQMDKLARLIGMDPLEFRFINAYRDGDMKAHRQPTEGAALIECMQEASRAANWPVAEKYMAMSSYRKGA

SEQ ID NO: 4704 - protein, 1361 aa, Arabidopsis thaliana; identical to SEQ ID NO: 149

SEQ ID NO: 4705 - protein, 781 aa, Brucella melitensis 16M
MNRHSATDIKTARIRGGVATEQKHDSAHKHVTGTAVYIDDIPEPEGTLHIGVGYASVAHGRIKSMDLEAVRAAPGVVDILTCKDVPGENDVSPSGMHDDPIFAVDKVEFHGQPIFAVIAKTRDQARRAARLAKIEYEEAPGIYSIDMLDGLKDRLVTPPLTLERGNARAAIDAAPHRIRNRMYLGGQDHFYLEGQVSLAVPGEDEDVTVYCSTQGPSETQHLVAHALGVSSHSVTVEVRRMGGGFGGKETQANQWAAIAAKKHKRAVKIRLDRDEDMTSTGKRHGFVIDYEVGFDDDGTILGVDYLYALNAGFSADLSGPVGDRALFHCDNAYFYPAVHAQSAPLYTNTVSNTAFRGFGGPQGMAGAERVIDKVAFALGKDPLEIRKRNFYDEMGKDGTRNVTPYHQKVEDCIIQRIVAQLEESADYAKRREAIREFNAKSRYVKRGIALTPVKFGISFTKTESNQAGALVHVYADGSVHMNHGGTEMGQGLHMKVAQVVAEEFQIDIDRVKITATTTAKVPNTAPTAASSGADLNGMAAQDAARQIKKRLIRFAAQQYQVPEDQIMFLPNRVRVGNQEISFNDLVNQAYIGRVQLSAAGHYKTPKIHWDRAKGRGHAFYYYAYGAACSEVSVDTLTGEYVVERTDILHDTGRSLNRAIDIGQIEGGFVQGMGWLTTEELVWDEKGRLRTHAPSTYKIPLASDRPKIFNVALTDWSEAYEPTIHRSKAVGEPPLPLGLSVLHALADAVASMADYKVCPRLDAPATPERVLMTVERLRKQNG

SEQ ID NO: 4706 - protein, 224 aa, Flavobacteria bacterium BBFL7
MQPEKQHNLKLLTMAIVGRQFPSIDVDAMNEMGDTFKLNVFEEAKNKNKKVLLFWYPKDFTFVCPTELHAFQAALEEFEKRNTVVIGASCDTPEVHFAWLNTAKDDGGIEGVTYPILADSNRNLANMLDILDVEQEYNDDLEGYILKGDNVTFRATYLIDEEGTVFHEGVNHMPVGRNVNEFLRMIDAYTHVQKNGEVCPANWEEGKDAMSADRKSTAAYLSQN

SEQ ID NO: 4707 - protein, 519 aa, Brucella melitensis 16M
MRWKSALSFTAPGFALFLFDMLGELSNMGQSARHEIRFLLNGETIVLDRVSPTETLLDYLRLSARLRGTKEGCGEGDCGAYTVLVGRVVDGGLVYESVNACIRFVGSLDGCHVVTIEYLRGADGDLHPVQKAMVEFHGSQCGFCTPGFVMSLYALWMRDPRPADAAIEKALQDNLCRCTGYEAIMRAARAISDYGNVAQDPLAAERAHVLQRLTALRDGARVEVGAGKDRLIVPADLDDFATILAAEPKATIVAGSTDVGLWVTKMMRDISPVVFIGHLEELHSIREENGVVTIGAGVTYTQAFGFLAGRIPALGQLINRIGGEQVRNMGTIGGNIANGSPIGDTPPPLIALGATLTLRKGAERRTIALEDFFIAYGKQDRGAGEFVEAVHVPLPGEGSRFAAYKVSKRREEDITASLGAFHLMLDAAGNVAHIRIAYGGMAATPKRAHAVETALMGKPWTEATVEAALEAYAQDYTPLTDMRATAEYRLLVARNMLRRFYLETTGSGETLGALRGEAA

SEQ ID NO: 4708 - protein, 302 aa, Thiomicrospira crunogena XCL-2
MYKTLMDTVGNTPLVKIQRMVNPNTNSVVLAKLEGNNPAGSVKDRPALNMIVQAEKRGEIAPGDTLIEATSGNTGIALAMVSAMLGYRLKLIMPDNMSMERRASMAAYGAELILVSKESGMEGARDLAQRLQAEGQGKVLDQFANPDNPLAHYHTTGPEIWRDTEGQVTHFVSAMGTTGTIMGTSMFLKEQSDAVQIVGVQPTEGSSIPGIRRWPKEYLPEIYDDRRVDRVIDLSQDVAEDTMRSMATQEGIFAGVSSGGAMAAALQLAQEVENATIVTIVCDRGDRYLSTNVFPTGHVTHG

SEQ ID NO: 4709 - protein, 745 aa, Aspergillus nidulans FGSC A4
MTEQLVSFTPLVAPISPVSNEQVFNDLQWKTLLSLADTVIPSVRGPRARKSRATKVVPQAKLDAALETLRASIRGPDADTLVTQYLEENLTSIPEVRQALQRLFTQHVHKEGRNGLSMILSALNTKAGSLLLTGSMIPIQDQPFYVREQIFQGWSDSRLPPVRAVYRALTAIFKKVWVTFSPSLYPTLGVPHVPIYGTPQNGFQFEFLQFPPGQKPEMIETDVLIIGSGCGGSVAAKNLAEAGKRVIVVDKGYSFTNQHFPMKPNEGFNNLFESAGAVMNDESSMAVLFGSTWGGGGTVNWSASLQTQAYVRREWAKRGLPFFTSLEFQNSLDRVCDRMGVSADHINHNKSNRMILEGSRKLGYSAKPVPQNTGGTTHYCGHCTLGCHTGGKKGPIETYLVDAANAGATFIEGFDVERVLFSKKKAGKVATGVLGTWVSRDAHFGVSGLGAVKRKIIVRAKKVIVSGGSLHSPLLLIRSGIKNSNIGRNLYLHPVAVAHAVFDEEIRPWEGACLTAAVNEFEDIDGHGHGFKLEALSMLPAAILPIFTWRDGLDYKLQVAKLPRSAGFITLVRDRDPGRVYPDPNDGRVRIDYDVSGFDRNHMVEGLVATAKISYISGAREIHTSYRDMPPFIRPAEDKGGSPLGINDPVFQAWIEELRRKAPKTSDRVMWASAHQMGSCRMGTSPRHSVVDPDGQVWGTKGLYVIDASIFPSASGVNPMITNMAIADHLSRKIAKSMEFQSAHL

SEQ ID NO: 4710 - protein, 216 aa, Arabidopsis thaliana; identical to SEQ ID NO: 3186

SEQ ID NO: 4711 - protein, 371 aa, Azoarcus sp. BH72
MKILHIESGRFLYGGGMQVLYLMEGLARRGVDNLFACPRGAHIAPPARAHARVVEMPMHGDPDFGMVWRLRRLIQHEKPDLVHVHSRRGADLWGGLAAALSGTPCVLSRRVDNPESRAVAAVKYPLYDRVITISEGIREVLRDAGVPRARLACVRSAIAPRPWLRDYDKAGFRAALGLAPNTPVIGMVAQLIERKGHRYLLAALHEVLPRHPGLQVLIFGRGPLEDALRVQIAEQGLAGNVRLMGFADNLPEVLGCLDVVVHPADMEGLGVSLLQASTAAVPILASRVGGIPEAVRDGETGLLVPPGDVGSLAGALNRLLDDPLLRARMGDNGRALMLREFSVDAMCEGNLAIYRDVLSAALPDALADPLM

SEQ ID NO: 4712 - protein, 464 aa, Mycobacterium leprae TN
MRIAQHISDLIGGTPLVRLNSVVPAGTGVVAAKVEYFNSGGSSKDRIAAKMIDAAEASGQLKPGGTIVEPTSGNTGVGLALVAQHRGYKCVFVCPDKVSEDKRNVLLAYGAEVVVCPTAVPPDDPDSYYSVSDRLVAKIDGAWKPDQYANPAGPASHYETTGPEIWADTDGRVTHFVAGIGTGGTITGVGRYLKEVSGGLVRIIGADPEGSVYSGGTGRPYLVEGVGEDFWPAAYDPMVPDQIIAVSDSDSFNMTRRLAREEAMLVGGSCGMAVVAALQVAEEAGPAALVVVLLPDGGRGYMSKIFNDAWMSSYGFLRSRLDGSTEQPIVGDVLRRKSGALPDLVHTHPSETVRDAIGILREYAVSQIPVVGAEPPVMAGEVVGSVSERELLSAVFEGRASLADAVSEHMGPPLRLIGDGELVSVAGEALRDSDALMVVEKGKLVGVITRYDLLGFLSEGAPLR

SEQ ID NO: 4713 - protein, 308 aa, Arabidopsis thaliana
MASWMKAVLISTGVVATAMHLKVIVPVAMDFSQNPIILSSFLTWLKPPYLYVITNVIIIVVGVSYRITTVSSHVDGKDYEASYSGDNKFQTDHQQIVQEAPLRRRTETKDADFGFIGKVLQIVKEPEVVYEEKERPATVEEEEKKCIVVVSKSENQPPVEKPLVTARIGQKKPVVKTTPAERNSMRALRVAKPKRNETLENTWKMIMEGNKSTLPLTSYYKRPDTFGLGEETKQSGVLKKSETFSDRTNCYQSLPPPPPPLVKVKKVKVSRSRDELNRKVEAFIKKCNDERFASMKLDNEVARHGLSY

SEQ ID NO: 4714 - protein, 223 aa, Sulfitobacter sp. EE-36
MKPENIMSLRINDTIPDLTVETDQGTISLHDWVGDSWAILFSHPKDFTPVCTTEFGAVAQLSDEWEKRGTKVMGISVDGVEEHKKWKGDIETFAGAKAGFPIIADNDLTVAKAFDMLPADAYMPDGRTPNDSATVRAVFIIGPDKQLKLSMTYPMTVGRNFAEVLRALDGLQTSTGKGVATPANWNVGDDVIIPATLSDDDAKAKFGDFNKILPYLRTTKAPS

SEQ ID NO: 4715 - protein, 346 aa, Fulvimarina pelagi HTCC2506
MSRYNSILDAIGNTPLIRLNRASEETGCEIYGKAEFLNPGQSVKDRAGLFIIRDAEEKGLLEPGGIIVEGTAGNTGIGLSLVANTLGYRTVIVIPDTQSEEKKDALRLMGAELIEVPAVPYKNPNNYVKLSGRLAESIAKTHPSGAIWANQFDNVANRDGHVVTTAEEIWHDTDGEVDGFICAVGTGGTLAGTALGLKRHSGHIKIGIADPMGAALYNFYAHGEMRAEGSSITEGIGQGRVTANLEGFEPDFAYQIPDGEALKIAFDLVTEEGLCLGGSSGINIAGAIRLAKDMGPGHTIVTILCDYGNRYQSKMFNPAFLKEKGLPVPEWIGGTPDFEVPFEKVD

SEQ ID NO: 4716 - protein, 161 aa, Silicibacter pomeroyi DSS-3
MPEINMVVNGRSVRGEVEPRDLLVDFLREGLSLTGTHVGCDTGQCGACVVHVDGVAVKSCNMLAVEAAGSEVSTIEGQAAPDGTLNALQQAFQDHHGLQCGFCTPGMVMSAAALLKDNPTPSEAEVRAHLEGNLCRCTGYHNIVRAIMAASGQDVSGIAAE

SEQ ID NO: 4717 - protein, 145 aa, Nostoc punctiforme PCC 73102
MPLAVGTDAPAFTAKDTNGNTVSLSDFAGKTVVLYFYPKDDTPGCTKQACSFRDAQSEYQGKDIVVLGVSADDEVSHQAFTQKYNLNFPLLADYDKSLITAFDVDGGGYAKRVTYVIDPNGKITHVDNAVNTTTHASDILAALGL

SEQ ID NO: 4718 - protein, 168 aa, Candidatus Kuenenia stuttgartiensis
MALKDLITWNRRKQQPALSGLQHPVATLQREVDRLFDDFFRGFDRFPSLPLKEERFAEFSPKIDVSENDKEIEIIAEVPGMDQNDVEITLRDDVLTIKGEKKQEKEEKDKEYYHVERSYGSFYRSLQLPCEVDQEKVKASFKKGVLKINLPKSGKAQENVRKIEIKGE

SEQ ID NO: 4719 - protein, 788 aa, Silicibacter pomeroyi DSS-3
MPKDSGIGASSKRREDVRFLTGAGNYTDDINLHGQAYVHFLRSDMAHGRIVSLDTAAAAAMPGVVRIFTGADFEGVGGLPCGWQVTDKHGEPMQEPGHPVLAQGKVRHVGDPIAAVVAETPDQARDAAEAIGVEIEELPAVIDMKAALAEGAAKVHDDLSSNLCYDWGFVEENKGAVDAAFAEAAHVTTLELVNNRLVANPMEPRVAIGDYARATGDSTLYTTSQNPHVIRLLMGAFVLGIPEHKLRVVAPDVGGGFGSKIFHYAEEAFCTFAAKALARPVKWTSSRSEAFMSDAHGRDHVTRIELALDAQNNFTALRTETLANMGAYLSTFAPSVPTWLHGTLMAGNYKTPLIYVNVKAVFTNTVPVDAYRGAGRPEATYQLERVIDKAARELGVDPIALRRQNFVTEFPYQTPVAVVYDTGDYNATMDKLEEIADLSGFAARRAESEARGKLRGLGINCYIEACGIAPSNLVGQLGARAGLYDAATVRVNATGSISVMVGAHSHGQGHETAFPQVVAEMLGIDESMIEIVHGDSSKIPFGMGTYGSRSLAVCGSAMVRATEKIINKAKKIAAHLMEASEADIELKDGQFSVAGTDKSVAWGDVTLAAYVPHNYPLEDIEPGLEETAFYDPSNFTYPAGAYACEVEVDPDTGKVTVERFSAADDFGNIVNPMIVSGQVHGGLGQGIGQALLENCAYDPETGQLLSASYMDYAMPRADDVPFYAVDHSCATPCTHNPLGVKGCGEAGAIGSPPAVVNAVIDALQSGGKTVTHIDMPMSPSRVWSAMQG

SEQ ID NO: 4720 - protein, 343 aa, Burkholderia xenovorans LB400
MKIMIVTDAWEPQVNGVVRTLKNTTRELSALGHRVDLLTPLEFRTIPCPTYPEIRLSLLPRRKLRQRIDAFAPDALHIATEGPLGMAARAYAIQHKLPFTTAYHTRFPEYVQARFGMPLAATYKFLHWFHKPSLAVMAPTPVVKTDLEKFGFTNVVLWTRGVDLDIFHQMDSKVLNTARPIFLYVGRVAVEKNVEAFLKLDLPGSKWVAGEGPALAELKSRYPQANYLGVLTQAELAKVYAAADVFVFPSRTDTFGLVLLEALACGTPVAAYPVTGPIDVLGEGGAGAMHEDLREACLEALKIDRNHARAWAERFSWAAASEQFAAHLKPLPRAAYREESAAA

SEQ ID NO: 4721 - protein, 313 aa, Pseudomonas syringae pv. syringae B728a
MIGTPRSLDCEDAMTLQYQTIADCVGNTPLVRLQRMAGNTSNTLLLKLEGNNPAGSVKDRPALSMITRAELRGQIHPGDTLIEATSGNTGIALAMAAAIKGYRMILIMPDNSSAERKAAMTAYGAELISVSKDDGMEGARDLAERMQAEGRGKVLDQFANGDNPEAHYTSTGPEIWRQTGGTVTHFVSSMGTTGTIMGTSRYLKEQNPDVQIVGLQPMEGASIPGIRRWPQEYLPKIYQSDRVDRIIDMGQSEAEDTMRRLAREEGIFCGVSSGGSVAGALRISREVENAVIVAIICDRGDRYLSTGVYDSPN

SEQ ID NO: 4722 - protein, 323 aa, Shigella flexneri 2a str. 301
MSKIFEDNSLTIGHTPLVRLNRIGNGRILAKVESRNPSFSVKCRIGANMIWDAEKRGVLKPGVELVEPTSGNTGIALAYVAAARGYKLTLTMPETMSIERRKLLKALGANLVLTEGAKGMKGAIQKAEEIVASNPEKYLLLQQFSNPANPEIHEKTTGPEIWEDTDGQVDVFIAGVGTGGTLTGVSRYIKGTKGKTDLISVAVEPTDSPVIAQVLAGEEIKPGPHKIQGIGAGFIPANLDLKLVDKVIGITNEEAISTARRLMEEEGILAGISSGAAVAAALKLQEDESFTNKNIVVILPSSGERYLSTALFADLFTEKELQQ

SEQ ID NO: 4723 - protein, 213 aa, Burkholderia xenovorans LB400
MMSLRLGDIAPDFEQQSSVGPIRFHEWLGDSWGVLFSHPADFTPVCTTELGLTAKLASEFEKRNVKTIALSVDSAESHKEWIKDINETQAANVGFPILADGDRKVSELYDMIHPNANETLTVRSLFVIDPKKKVRLIITYPASTGRNFDEVLRVIDSLQLTDSHSVATPGNWKQGDDVVIVPSLKDEEIIKQKFPKGYKALRPYLRMTPQPNK

SEQ ID NO: 4724 - protein, 346 aa, Chromobacterium violaceum ATCC 12472
MQQMKLLEGAGYRPVLACRPGTRVAEVAEDKGLAILPFRFRNSAHPSTMLGLWRWMAAHRPALAICHSGHDCNNLALAARLLPKRPFLLRSRTYQAGYPSAWTYNRLVDATMLPSECLRQALLRNPAIRPERLHVVYPGIDFARLDLAAERPLPENISAWLAREQGPVLVHAAMLRGEKGHRVLLQALAALREQWPTLRYVIAGEGGERGAIEGEIERLGLRDRVLLAGVVDPIAPLLRRADIVVMPSTYEPLGMSQIESLGLGVPVVASRTGGIPETVSDGVSGLLAAPGDVGEWTQALGRALSDLPGMRAMADAGRHDVRQRFSVEHNLDSILQLAGLPRQARG

SEQ ID NO: 4725 - protein, 152 aa, Synechococcus sp. CC9311
MALTIGDRAPEIALEDQDGVLRRRDELQDKVLVLFFYPKDDTPGCTAEACAFRDTYATFEALGAVVWGVSSDDAVSHRKFAQRYQLPFPLLSDQGQRLRTSFGVPKVLGLLPGRVTYVIDAEGTIRHLFNNMLDGPAHVREAERIVTELSKG

SEQ ID NO: 4726 - protein, 141 aa, Zea mays
  misc_feature (52)..(52): Xaa can be any naturally occurring amino acid
  misc_feature (67)..(67): Xaa can be any naturally occurring amino acid
  misc_feature (102)..(102): Xaa can be any naturally occurring amino acid
  misc_feature (128)..(128): Xaa can be any naturally occurring amino acid
TWPYSEAAGCVLHSTFINTVDLSDHIANKYCILLFYPLEFTSTSSSEITALXDRYNEFAKVNTEVLXIPLHQAVSHLAWGHTNRKSGGVGDPKYTLASDVSXSISKAFGALITDHGIALRGLFIIDKXGVLQHSTINNLAI

SEQ ID NO: 4727 - protein, 458 aa, Frankia sp. EAN1pec
MEGAPLRIALLSYRSLPTCGGQGVYVRQLSRELVTLGHQVQVVSGPPYPNLDPGVGLTKLPSLDLYRDGDPFRWPGFREFRSLADVVEFGMMRTGQFSEPLAFSIRAFEALRPRRGQGRPDFDIVHDNQGLGYGLLPLRRALRPYGIPVVSTIHHPITVDRRLHLAATTSRRAALGVRRWYSFLPMQARVARGLDGVVVPSESSRHEIVADMNVPIETLHTVPLGVEADVFTPRPAPPSDAGNGTVAPVPGRIIVVTSADVPLKGLMVLLEALAKLRAERSAHLVCIGKVREGGAAQRQVGELGLTEAVTFRSNVPQAEMVDLLRSAEVAVVPSLYEGFSLPLVEEMACGLPLVATTAGALPEVAGPNGEAALLVPPGDAGALAGAIATLLDDPELRARMGAAGRRRVEERFSWQAAAAGTAAWYERQIAAVRAAVPGSGPPPVAVSTGAAAPVEPAC

SEQ ID NO: 4728 - protein, 621 aa, Cryptococcus neoformans var. neoformans JEC21
MTDEERDRREEWLASSRGRKGLRIVIVTENFLPKVDGVTRTLSRLLVHLQTSGHSCILLGPSSTIATYASHPIIGTLGIPLYCYPGLKLNFARPKFWEVVNRWEPDVVHFVDPIWNLATYATLFNLPFLTPLIWSFQRLLHSRVRLTLCPSPSTKAMLEEQGWVSEKDGEVGKVRIWSRGVDLHQFGRSKRSWKRREMWGVGLAPGEKQSEDSPLLKVEKDNPAISMEEKVVGLHWNGSKEEGMMTPPLSPENGPEDKKTYHSQIQSQSDLYPPYERGDVHGEVKQPFKASLAGVYPPDTSLDLPERVVLLYVGRISWEKNIHLLLSAYSHLSSFLPSSSSSSPGPINFMPKLIFVGDGPARKELETKCKEANYDAEFLGHKQGEELAECYASADVFAFPSFTETFGQVVLEALASGLPVVGLDAEGTRDLVTHQSTGLLLSPPHAHSSDYSNKESTSIPWPRACNTSSPYFKTLAKEYAKLLAEVVRIIRRGRRWVKEVAQRESVDGRGGMLWSYREAMRIARSKRSIRIVPHSPTSPETLIPSFNHDPTVTRDSDYSLNEKRRQGSFVNRFGFTNKPLTQRGFDEKGRFGKDYIRQEDNGLFWIMKSLYMPYWQQRRFN

SEQ ID NO: 4729 - protein, 175 aa, Bdellovibrio bacteriovorus HD100
MPMINQPAPHFAAQAVFDGGEVKDISLNDFKGKWVVLFFYPLDFTFVCPTELTQFREHLKEFQNAGATVIGCSVDSVHSHKRWLRDDLGNLGYPLMADLTKRIARDYGVLFEDRGIATRGTFIIDPDQKIQYMGIHNTSVGRDAKEILRVLQGCQTGELCQAGWKAGDEHITPIK

SEQ ID NO: 4730 - protein, 217 aa, Triticum aestivum
MAFAASTACCKPSVLLAPRASSSSSSSQARLCRPSTSAAFHGLRAPASAFALAPAPRRRAASAGIVCGKVSKGSVPPNFTLKDQDGKTVSLSKFKGKPVVLYFYPADETPGCTKQACAFRDSYEKYKKAGAEVIGISGDDAASHKAFAKKYRLPFTLLSDEGNKVRKEWGVPSDLFGTLPGRQTYVLDKKGVVQYIYNNQFQPEKHIGETLKIIQNL

SEQ ID NO: 4731 - protein, 218 aa, Triticum turgidum subsp. durum
MPGLTIGDTVPNLELDSTHGKIRIHDYVGNGYVILFSHPGDFTPVCTTELAAMANYAKEFEKRGVKLLGISCDDVQSHKEWTKDIEAYKPGSKVTYPIMADPDRSAIKQLNMVDPDEKDAEGQLPSRTLHIVGPDKKVKLSFLYPSCTGRNMDEVVRAVDSLLTAAKHKVATPANWNPGECVVIAPGVSDDGAKKMFPQGFETADLPSKKGYLRFTKV

SEQ ID NO: 4732 - protein, 198 aa, Gemmata obscuriglobus UQM 2246
MPAQVTKEAPDFTAKAVVNGQIVNEYKLSSTRGKYTILFFYPLDFTFVCPTEIIAFSDRIAEFEKRNCQVVGVSVDSQYSHLAWIETPRAKGGLGELKYPLVADLTKTISTDYGVLLEGAGVALRGLFLIDTKGIIRHITINDLPLGRSVDEAIRVLDALQFFEKNGEVCPADWKPGAMTINTNNAKEYFEKAAAGQK

SEQ ID NO: 4733 - protein, 299 aa, Pseudomonas putida KT2440
MTLQYPTIADCVGNTPLVRLQRIAGETSNTLLLKLEGNNPAGSVKDRPALSMIARAELRGQIKPGDTLIEATSGNTGIALAMAAAIKGYKMILIMPDNSTAERKAAMTAYGAELILVTKEEGMEGARDLAEKLQAEGRGLVLDQFANGDNPIAHYNSTGPEIWQQTQGTITHFVSSMGTTGTIMGCSQYLKEQNPAVQIIGLQPMEGSAIPGIRRWPEEYLPKIFDATRVDRVVDMSQQEAEDTTRRLAREEGIFCGVSSGGAVAAMLRLSREVENAVMVAIICDRGDRYLSTGLFDPR

SEQ ID NO: 4734 - protein, 479 aa, Pseudomonas fluorescens PfO-1
MLHASFFPANGTRSTPQRGEEMSKDSRPAVLGLIGNTPLVQVTRFDTGPCTLFLKLESQNPGGSIKDRIGLAMIDAAERDGRLQPGGTIVEATAGNTGLGLALVGRAKGYRVVLVVPDKMSTEKVLHLKAMGAEVHITRSDVGKGHPEYYQDVAARLAKDIPGAFFADQFNNPANPLAHEFSTGPEIWAQTEHDLDAIVVGVGSAGTLTGLTRFFKRVQPDLEMVLADPVGSVMAEYSRSKHLGTAGSWAVEGIGEDFIPSITDLSSVRSAYSISDEESFDHARQLLKAEGILGGSSTGTLLAAALRYCREQTEPKRVVSFVCDTGTRYLSKVYNDQWMTDQGLLQRKRYGDLRDLIARRFEDGKVVSVGPDDTLMTAFQRMRLADVSQLPVLVDGKQLVGVIDESDILVRVHEDASLFSKPVSSAMTDKLQTLAPGATLAELEAVLSSGLVAIIADASGFHGLITRVDMLNQLRRSLA

SEQ ID NO: 4735 - protein, 407 aa, Synechococcus sp. WH 5701
MAHIAWLGKKSPFCGNVTYSLSTTERLRQHGHQVSFIHFDTPAAGLGRSWDTGQQVEGSQPSSPVPTDPARTGADDVTLPYLVKSQVYTIPSPGAQRELRESLERLRPDLVHASLTLSPLDFRLPDLCQHLGVPLVATFHPAFDAGLRNITAGTQQLTYQLYAPTLARFDRVIVFSELQAEVLARLGVREERLAVIPNGVDPGLWCPPDPAAPSRELASLRARLGQRRLFLYMGRLATEKNVEALLRAWRLVRPAGCLLVIVGDGPLRQALQGNTDEHDVLWWGYEANLQQRVALLQAADVFLLPSLVEGLSLALLEAMASGTACVATDAGADGEVLEGGAGIVISTQGVTTQLRTLLPVLRDQPVLTTELGRRARERVLERYTLARNIEQLEQLYAELVPQGSLAA

SEQ ID NO: 4736 - protein, 227 aa, Oryza sativa Japonica Group
MPMEVPVVPVPEAMAPEPIPVEVTVPEVVKTAPEAEEAEENFTISRSAWTPRRRSTAEAEAEHEALSPFADLTNSREKPLVSTRFGRKPVKASPEGSSRALGVSRPRKEQTLESTWKAITEGRAPPLARHLKKSDTWETRPGRRQSGSGGGEDAPPPATAMRKAETFNEAAGGGGGGKKVRREPSLGQDELNRRVEAFINKFNMEMRLQRQESLKHYNEMISRGSVY

SEQ ID NO: 4737 - protein, 153 aa, Burkholderia cenocepacia J2315
MSVEVDRQVPDFTAPATGGDISLSDLKGKKLVLYFYPKDNTPGCTTEGLQFRDLYPKFKKAGAEVIGVSRDSLRSHDNFKAKLELPFPLISDADEALCALFDVIKMKKMYGKEVRGIERSTFLLDADGVLRQAWRGIKVPGHVDDVLKAVQAL

SEQ ID NO: 4738 - protein, 199 aa, Wolbachia endosymbiont of Drosophila melanogaster
MNLVTKSAIDFTASSVLSDGEIVDDFCLSKRIKNKYAVLFFYPLDFTFVCPTELISLNNRINEFAKRGVKVIGISVDSKFSHYKWRNTPVNDGGIGEISYTLVSDIKKSISRDYGVLYDDSIALRATFVIDDKFIVRHQSINDFSLGRNIDEFVRIVDAIQHNEEHGEVCPAGWKKGKPAMQASDEGVADYLNSYSEEL

SEQ ID NO: 4739 - protein, 182 aa, Burkholderia pseudomallei K96243
MNRKLASGAAAALFALYAVAAHAVLKVGDAAPDFSAQASLGGKTYTYSLADALKKGPVVLYFYPAAFTTGCTIEAHAFAEAIDAYKRYGATVIGVSADDIGTLTKFSVSECRSKFPVAADPDAKIIREYDAKLPAISKANRVSYVISPDGKVLYEYTSLSPDKHVENTLNAVKAWAASHRQP

SEQ ID NO: 4740 - protein, 184 aa, Brucella suis 1330
MLGIGDKLPSFKVTGVKPGFNHHEENGVSAFEEVTEQSFPGKWKVIFFYPKDFTFVCPTEIAEFARLASEFEDRDAVVLGGSTDNEFVKLAWRRDHKDLNKLPIWSFADTNGSLVDGLGVRSPDGVAYRYTFVVDPDNVIQHVYATNLNVGRAPKDTLRVLDALQTDELCPCNREVGGETLKAA

SEQ ID NO: 4741 - protein, 325 aa, Cyanobium sp. PCC 7001
MAIYADNSLSIGKTPLVRLNRVTRGCGATVLAKIEGRNPAYSVKCRIGAAMIWQAERDGLLGPGKELIEPTSGNTGIALAFVAASRGIPLTLTMPETMSLERRKLLTAYGARLLLTEGRLGMPGAIGAAQELAASEPDRYVLLQQFANPANPRIHHDTTGPEIWEDAEGHVDVLVAGVGTGGTITGVSRYIKHTLGKPLESVAVEPVTSPVITQAKAGEELRPGPHKIQGIGAGFVPANLDLDLVDRVETVNDAEAVEMARRLMREEGILAGISCGAATCAALRLAADPAYAGKTIVVVLPDSGERYLSSVLFEGVFNERGLALV

SEQ ID NO: 4742 - protein, 988 aa, Oryza sativa Japonica Group
MGVPAFYRWLADRYPQTVSDAVEEEPVELEPGAFVPVDLRRPNPNGLEFDNLYLDMNGIIHPCFHPEGRPAPTTYDEVFKSIFAYIDHLFGLVRPRKLIYMAIDGVAPRAKMNQQRSRRFRAAKDAADAAAEEERLRKEFEAEGRTLVAKEKSEAIDSNVITPGTPFMFVLSSALQYYIQLRLNHTPGWQSVKVMLSDSNVPGEGEHKIMSYIRLQRNLPGFDPNTRHCLYGLDADLIMLSLATHEVHFSILREVITMPGQHEKCFLCGQVGHLAAECRGSGQADKTVELPPIHKKKYQFLNIWVLREYLEKDLEIVDPPFKINFERVVDDFVFMCFFVGNDFLPHMPTLEIREGAINLLMNIYRREFTSMGGYLTDGGEVLLDRVEHFIQSVAVHEEQIFQKRARIQKAIQNNEERNRVQTENSEDNQYVDKVKLGEPGYRVRYYAEKFKEEAELKPIDQVQRDVVQKYVEGLCWVMRYYYQGVCSWQWFYPYHYAPFASDLKCLAELEITFFLGQPFKPFDQLMGTLPAASSNALPKYYGDLMNDPNSPLKSFYPKDFEIDMNGKRFAWQGIAKLPFIDERRLLAETQKLEETLTDEERFRNRTMFDILYVRETHPLAAQIAFLYQMCSQSPNASYIIPIDPAASGGMNGFLCLSERNCYSIVVTSPVKGFNGIAQNRVLNATYLNPQYHKHIPEPPEGVIIPAKILKPSDFKPFPILWHEDNSRRQPRERPQVSGALSGSVLGEAAHRLVKNSLQIKSGYSAGLLDMPYRGAPYGPGNRPRPAGPLGYERGFVENSYNGHMSRSVPNSHPQFFGDAQANRQNVRILERPNYRNNDSAIHSGMSQLTIQDGPRMHQNNRMQNSGFSPNQPHPNQYAGFPPQRPMQNSGFTPQRPAQYSGFPHQRPVQIGLQHQPAVNGIQPPLPPSAWIGRPISGVPAGVPAKQDPRMAMDRQPKQDNSRSQHDKRQQATKVVYRVKGQGPNGLSE

SEQ ID NO: 4743 - protein, 229 aa, Zea mays; identical to SEQ ID NO: 4189

SEQ ID NO: 4744 - protein, 407 aa, Silicibacter sp. TM1040
MKLLVVSTNAALTMGGEAMKALQYMQQLLADGRDATLITHERCREALAGQLPEDRVIYVHDSRAMKACWRTPGLGRLVNSFFHLEVARICRGFNPSEVVIHYLCPISPVEQRFPPKGYRYVIGPLSGNIFYPEGFRHLAGRGLRLQHQAYRPLQMALGLLSRQFTRASTVLVSGYDRTREALGWAGCPEARMQDVWDAGLSPDFFARSRIRPGKNPAHFVWIGRMVPYKGADLALRALALAPAEARLTLYGDGPDRAELEALARDLGLMSRVTFAGWLAHGDLSEALGQYRALLFPSLKEANGIIVQECMAIGLPVVALRWGGPVGLADDTEALFVEAQNAVQVEQDLAAAMARLTEDPALAEALSDAARRKAENEFPWPQVAQSWCSAALRAQDAAAAEPKHRGGG

SEQ ID NO: 4745 - protein, 212 aa, Triticum aestivum
GDTAPDFEAKTTKGDIRFHEFIGDNWTILFSHPADFTPVCTTELGIVAALQDEWDARNVKVIGLSANGLEEHEKWIADINEVSQVKLNFPLIADADRKVSALYDMLDHQDATNVDAKGIAFTIRSVFIIDPKKTIRLILTYPASTGRNFDEILRVVDSLQLGDKYRITTPGNWKKGDDVIVHPSVSNELAQELFPKGIKVIKPYLRLTPSPF

SEQ ID NO: 4746 - protein, 351 aa, Shigella dysenteriae
MKFHRKQYDAVFLTNVPAFYKVNLFNEIQKNKDIFVIFVSDKSKIRNEDFYSYDFAFDHFFLNEENFEERSKIKTLFNLLRVLRTISYKKIIYSGWEVKEVTLAALFNKREKNAIVIESSIIETKKTGLTWLLKKIAIGRMSLAYPSGLLQKAILETFSFKGKTVITHGVGISNLKETSFHNKKTCTRNNPLRFIYVGRISSEKNIDFMVKVFKTLPYELILIGDGPLKKQFDDKTYSNIRFLGYIDNKKLSKELLKSDCFILPSLSEPWGLVVEEALTLGLPVIVSNHVGCHSDLVNDRNGIIFDVNDTQSFIDALSKMEKNYERFARGASEFHASEIAKAQIDAYVGSI

SEQ ID NO: 4747 - protein, 155 aa, Clostridium perfringens str. 13
MSIEINKLAPDFKLMGSDGKEHSLSDYKGKNIVLYFYPKDNTAGCTTEACDFRDNIQNFHDLNAIILGVSRDSLASHDKFITKLSLPFVLLSDPDETVCKLYDVIKEKNMCGKKYMGVERSTFLINKEGILIEEFRKVRVKGHIEKVLDKLKEIN

SEQ ID NO: 4748 - protein, 309 aa, Alkaliphilus metalliredigens QYMF
MKKVNYIYDLIGDTPLVKLNRLVEEDMAEVYLKLEFFNPGSSVKDRIALSMIEDAEEKGLLKPGATIVEPTSGNTGIGLAMIGAAKGYSVILVMPDTMSMERRKLLKAFGAELVLTSGALGMKGTIEKAKELLEKNPTYYMPQQFENPANPQVHQDTTAKEVWEQTDGEIDAFVAGVGTGGTITGVGGFLKQKNPNIKIIAVEPEKSPVISGGQPGPHKIQGIGAGFIPKNLNVNVIDQVIQVKDDDSLVMARKVAAIEGILVGISSGAAVVAALQVAKELGKGKRVVVMIPSSGERYLTTALFDFDQE

SEQ ID NO: 4749 - protein, 150 aa, Desulfococcus oleovorans Hxd3
MYNTFLPSLINREWAADDNAYFGNIVDSLWKSFDLPAVFSEKGEWSPAIDVSETEAAYLVKAELPGLDKEAIDISINDGVLTVSGEKKMETREEKENYILTESRCGSFSRSFTLPADASTDNVDATFTNGVLTISVPKSEAARPRKIKVS

SEQ ID NO: 4750 - protein, 380 aa, Silicibacter pomeroyi DSS-3
MDNSPVTPPRLAIVLPHLRSGGIEISTLALIRQLQDRRFRIRLILGSRTGELLDQIPETVEIVDLGGRRAMASLWALRAALAGMDAVYSGTNARNIAALLAARLLPAHQRPVVIISEHSSPAAYLAMARHPGPRRWLMRRLYPLADLLAVPTEGLGADWLAALALDRPAVATLPNPVLSPEAMALAQTVAEGNGPPRDPALVLAVGRLHPAKGHADLIQAFARALRTRPELRLTLLGEGAARPELEALIAALGLQHAVTLPGYSPDVARHMAGAGLLVLPSHREGFGNVVVEALAQGTPVLATDCDGPRRLLAQAGAAGRIVPIGDIDALARGIVEMAGQPEPLRAAQTAAPTLSARYAHAAAAQTFADCIAPLAARRRG

SEQ ID NO: 4751 - protein, 203 aa, Phaeodactylum tricornutum
MLEHIQIGQMAPNFIGVGVYKNQLGKIRLSDYHGKKYVVLIFYPSNFTAVSPTELVELNNRITEFKKLSTQILAISVDSPFSHLQFLLSKRNQGGLEHLNYPLISDLSQTITSNYKLLTKDGFSLPGVFIIDKEGIVQYYTVNNLLCGRSVNELLRILQSLQYLKENPGQACPVDWKYGDKILYSHPLKSKLYFKTLYSQKKT

SEQ ID NO: 4752 - protein, 184 aa, Synechococcus sp. PCC 7335
MAIVRWDPFREVMSLQREMNRLFDDISAHENNQSSMSGRSMGSMGMLPLAEMEESEDKIHLKLEVPGMNADDIDIRVTKEAVMISGERKTESTSEKDGQRRSEFRYGSFSRSIPLPEPVDNSNVQAEYKDGILMLDLPKIEDTSNKAVKVSLNGRSSNTQQISSASNQGNSDAVGQAQTEEQTA

SEQ ID NO: 4753 - protein, 307 aa, Bacillus pumilus SAFR-032
MARIANSVFELIGNTPVVKLNRLVDEDSADVYLKLEYMNPGSSVKDRIALAMIEDAEAKGTLKAGDTLIEPTSGNTGIGLAMVAAAKGINAILVMPDTMSQERRNLLRAYGAELVLTPGAEGMKGAIKKAEELAEEHGYFMPQQFSNEANAEIHRRTTGKEILEQFDGELDAFIAGVGTGGTITGAGEVLKEAIPSIQLYAVEPTDSPVLSGGKPGPHKIQGIGAGFIPSILNTEVYDGIIQVKNEDAFELARKAAKEEGILGGISSGAAIYAALQTAKKLGKGKKVLAIIPSNGERYLSTPLYQFD

SEQ ID NO: 4754 - protein, 381 aa, Bacillus halodurans C-125
MRIALFTDTYIPQVNGVARTMKRLVDHLEKRQVEYALYMPETIEKLDRFESNIHTFASLPFFLYPECRIALPNVFKLRQQLTSFQPDLLHIATPFNVGLSGLQHGKKYGIPMVGSYHTHFDHYLHYYKLQFMSAWLWKYVKWFHQPFERTFVPSVETMRHLQKHGFQRLALWTRGVDCERFHPKQRHRSYAINLLPKDKAVLLYVGRLAPEKDLATLVAIMSLLPRELNEKIQWMIVGDGPSLPEMKKQCPSNVTFTGYLKGEELAAAYASADLFVFPSATETFGNVVLEAFASGTPAIVADRGGVTEIVEHGKSGMICKAGDAHTFIQAIEHLLMNRSKRAEMGYEARQYALTQSWERIFDDLLEQYEQVIFHHKKRHLA

SEQ ID NO: 4755 - protein, 813 aa, Oryza sativa
MALDPADDPLLADCKYKLNHFRIKELKDVLHQLGLPKQGRKQELVDKIIAVLSDQQEQDSRLNGLPNKKMVGKETVAKIVDDTFAKMNGSTNAVPASRNQTDSGHIVKPKRKSDDSAQLDVKVRCPCGYSMANDSMIKCEGPQCNTQQHVGCVIISEKPADSVPPELPPHFYCDMCRITRADPFWVTVNHPVLPVSITPCKVASDGSYAVQYFEKTFPLSRANWEMLQKDEYDLQVWCILFNDSVPFRMQWPLHSDIQINGIPIRVVNRQPTQQLGVNGRDDGPVLTAYVREGSNKIVLSRSDSRTFCLGVRIAKRRSVEQVLSLVPKEQDGENFDNALARVRRCVGGGTEADNADSDSDIEVVADSVSVNLRCPMTGSRIKIAGRFKPCVHMGCFDLEAFVELNQRSRKWQCPICLKNYSLDNIIIDPYFNRITALVQSCGDDVSEIDVKPDGSWRVKGGAELKGLAQWHLPDGTLCMPTDTRSKPNIRIVKQEIKEEPLSEETGGRLKLGIRRNNNGQWEINKRLDSNNGQNGYIEDENCVVSASNTDDENSKNGIYNPEPGQFDQLTSNIYDLDSSPMDAHFPPAPTEQDVIVLSDSDDDNVMVLSPGDVNFSSAHDNGNAFPPNPPEASGICGEQPRGAGPDVTSFLDGFNDLELPFWESSSSQDAAGTQVTDNQCEMQNFIVNHQFLHEPILGVNLGGTAASNTLECEHDGALQACQSSDQDGDQNQTCHDGHSGDLTNLSIISTQDSLTNGKNASQKRTNCEDGTAGLDGSVVRSANGLRGEMPPLGQEQDRTVRQKLILTIESDSD

SEQ ID NO: 4756 - protein, 385 aa, Desulfotalea psychrophila LSv54
MCRTYYGEIVSKKLTIVQIVPEMEEGGVEGETFDLAVELARRGYRSIVISTGGRLVEGLLAAGVEHLSWPGIGSKNFSCLPNIARLRRLMLTEKVDVLHLRSRLPAWVGWLAWKSLPVVKRPAILTTFHGFHSVNCYSKIMTRGERVVAVSKSIKDHIIESYGTDPDKIDIIYGGVDTQQFSPEAVPEQRVLDLARAWGLVERGVPIIVLAGRMTRLKGQDVFIDALAKIKDLNFFAICIGDVPENSYTASLKEKIKSHGLASKVILAGHCKDMPAAFQLSDIVVSASSTHAEAFGKVTIEAMAMAKPVVATAHGGSLEIVQPGKTGWLVPPLDSEGMGQALKEALEDREERERRGALGRLRVEENFTVDVMYNKSIELYHAIVK

SEQ ID NO: 4757 - protein, 372 aa, Desulfotalea psychrophila LSv54
MKIIYYMPFKALDHPTPSGDLIIGRGIFAHLSKEHQLEVASSLRLRWLYRRPGLCWACLLEILRITRKYRKESPDIWLSYHSYYKAPDILGALCSRRLGIPYLLFQGIYSTKRRKKLSTLPGFLLNRYVLRQANLVITNKRRDYKNLRRLLPEDRLLYIAPGIYPEAFYPDATARTALRQSWGVPREGKVIISAAMFRPDVKSEGIKRVIASMITLKAAGKKFLLVLIGDGLCREELEAYARPLEDQVIFMGRIERNEIYRYFSAADLFIFPGIHEALGMVYLEAQSCGLPVIAYGDWGAGEAVIDGETGLLSSAQEPEQMTNNITYLLEHDDIRRKMGKNAQAHIRCHHDIEKNYAILSETLEKYRKASAS

SEQ ID NO: 4758 - protein, 322 aa, Vibrio salmonicida LFI1238
MTKIYEDNSQTIGNTPLVRLNRVSNGNVLAKVEARNPSFSVKCRIGANMVWEAEKAGTLREGIELVEPTSGNTGIALAFVAAAKGYKLTLTMPASMSLERRKLLKALGANLVLTEAVKGMNGAIAKAEEIVASDPSKYLLLQQFNNPANPAIHEKTTGPEIWEATDGNIDVFVAGVGTGGTLTGTSRYLKHTQNKAVLSVAVEPAESPVIAQALAGEEIKPAPHKIQGIGAGFIPGNLDLTLIDRVEAVTSEDSIEMARRLMEEEGILAGISSGAAVVAANRIAALPEFANKQIVVILPSSGERYLSTALFAGLFTEQENEQ

SEQ ID NO: 4759 - protein, 219 aa, Zea mays
  misc_feature (186)..(186): Xaa can be any naturally occurring amino acid
MSAPAPLRLGSTAPNFQAETTKGNIDFHEFIGDNWVILFSHPEDYTPVCTTELGAFAKLQPEFTKRNVKLIGLSANTIQSHEGWIKDIGEVTGGNVEFPIIGDKERKVSLLYDMIDQQDATNVDEKGIAFTIRSVFIIDPKKTIRTIFSYPASTGRNAAEVLRVIDSLQTGDKYRITTPINWVPGXEDVIVHPSVKNEEGQTLFPEFRIVKPYLRFTPL

SEQ ID NO: 4760 - protein, 187 aa, Desulfitobacterium hafniense Y51
MSLIGKEVNEFKVQAFVEGAFKEVTKGDLLGKWSVFVFYPADFTFVCPTELGDLADQYDEFKKIGVEIYSVSTDTHFVHKAWHDASDTIRKIRYPMLADPTAKLAKDFEVYIEEEGLALRGSFVVNPEGKIVAYEVNSNNIGREASELLRKVQAAQFVAEHGDQVCPAKWRPGAETLKPSLDLVGKL

SEQ ID NO: 4761 - protein, 394 aa, Bacillus anthracis
RRYMGSSHHHHHHMKLKIGITCYPSVGGSGVVGTELGKQLAERGHEIHFITSGLPFRLNKVYPNIYFHEVTVNQYSVFQYPPYDLALASKMAEVAQRENLDILHVHYAIPHAICAYLAKQMIGERIKIVTTLHGTDITVLGSDPSLNNLIRFGIEQSDVVTAVSHSLINETHELVKPNKDIQTVYNFIDERVYFKRDMTQLKKEYGISESEKILIHISNFRKVKRVQDVVQAFAKIVTEVDAKLLLVGDGPEFCTILQLVKNLHIEDRVLFLGKQDNVAELLAMSDLMLLLSEKESFGLVLLEAMACGVPCIGTRVGGIPEVIQHGDTGYLCEVGDTTGVADQAIQLLKDEELHRNMGERARESVYEQFRSEKIVSQYETIYYDVLRDDKNGKI

SEQ ID NO: 4762 - protein, 406 aa, Pseudomonas aeruginosa PAO1
MSRPLSIALISETYPPEVNGVANTLGRLHAGLQQLGHRVQVVRPRQPGDDGRRSDAELVLTRGWPLPGYPGLQWGMSSLHKLLRCWKRQRPDVLYIATEGPLGFSALRAARRLGIPAVSGFHTNFQQYSEHYGFGPLTRLVTGYLRWFHNRTQMTLVPSGSQRMELQRRGFERLNLLSRGVDSQLFHPSRRDPELRRRWGLGEQDIAVLHVGRLAAEKNLGLLGGTFRALCAAHPQLKLRLVLVGDGPERKHLERDLPEALFCGVQRGETLAAHYASGDLFLFPSLSETFGNVVLEAQAAGLAVVAFDQAAAGQHIRHGHNGVLAAPGDKSGFVEVASWLLDDQERLRRVRLNARQHASRQGWDSIVEHFQNYLEDACASPLVQPARSKPERPPAEDGGALPRSRE

SEQ ID NO: 4763 - protein, 421 aa, Nostoc sp. PCC 7120
MQKSKLRIALFSGLYAPFLTGVSVAVHQRVHWLLKQGHEVLLVHPQINDKFPKNVGSRPMAGLEELKPFPNFSSFAFPTQPLIFYKSLPQPLSYRHWSDSKLLSDFQPDIIVVEEAAQMRGLYSGLLQGYGRPVGVKYAKRTHTPIISVFHTDIVAYIKYYFGDIFFSLVRPLIPLLVKQFSDNYDLNVFPSREQLKKYHNLKCQRSEYVPYQGIDCEKFHPRNIIHNPIPNDGRPTLLFVGRITAEKNVTQLIDMYPLIAAKIPDVHLVIIGSGPLDEEIRRRVQKFPSGITFWGESHGTELLGWFARADVFVNPSVTENFCTTTNEALASGTPVVAAIAPSTSEQVFPGMNGLLAEANNPKDFAQKIITILENPELKSALSEQARPSIIGYDWSACMEKFESKLYELVQSSDKQEVTSV

SEQ ID NO: 4764 - protein, 293 aa, Photorhabdus luminescens subsp. laumondii TTO1
MASLEHFIGNTPLVKLQRITDKLGGEIWVKLEGNNPAGSIKDRTALSMIQQAELRGEISPGDVLIEATSGNTGIALAMIAAVKGYHLKLLMPDNMSLERQASMRAYGAELILVSRAMGMEGARDLAQQMERNGEGKVLDQFNNPDNPLAHFTTTGPEIWQQTQGRITHFVSSMGTTGTITGVSRYLKSQSNRVQIIGLQPAENSHIPGIRRWSPAYLPGIFRKELVDQVLDITQKEAEDTMRLLAQKEGIFCGVSSGGAVAGALSIAAQNPGSVIVTIICDRGDRYLSTGVFN

SEQ ID NO: 4765 - protein, 295 aa, Methylococcus capsulatus str. Bath
MFPTIESFVGNTPLVRLQRLPGDTANFILAKLEGNNPAGSVKDRPALSMIRCAEARGDIQPGDRLIEATSGNTGIALAMAAAIKGYRMTLIMPDNMSAERRATMKAFGAEIILTPAAGGMEAAIDLARAMEARGEGKILDQFSNSDNPRAHYEGTGPEIWRDSQGRVTHFVSSMGTTGTIMGTARYLKERNPAIQIIGVQPKDEARIPGIRRWPQEYLPKIYDPSLVDRILDVTQEEAESTTRELAAQEGIFAGISSGGAVAAALRLSREVENAVIAVIICDRGDRYLSTGVFPE

SEQ ID NO: 4766 - protein, 211 aa, Crocosphaera watsonii WH 8501
MALQLGDTVPDFTQDTSEGSISFHSWAGDSWVVLFSHPADYTPVCTTELGTVASLKPEFEKRNVKVLALSVDSVDSHKGWINDINETQNTTVNYPIIADPDRKVADLYGMIHPNSLNNLTIRSVFIIDPNKKLRLSLTYPASTGRNFDEILRVIDSLQLTDYHQVATPANWKDGDDCVVVPSISTEEAKQKFSKGVTEVKPYLRMTPQPNK

SEQ ID NO: 4767 - protein, 212 aa, Nostoc sp. PCC 7120
MALRLGDTVPNFTQASTHGDIDFYAWAGDSWVVLFSHPADYTPVCTTELGTVAKLKPEFDKRNVKAIALSVDDVESHNGWVGDIEETQSTTLNYPILADADRKVSDLYDMIHPNANAAVTVRSVFVIDPNKKLRLTFTYPPSTGRNFDELLRVIDSLQLTDNYSVATPADWKDGDKVVIVPSLKDPEVLKEKFPKGYEVVKPYLRLTPQPNK

SEQ ID NO: 4768 - protein, 1353 aa, Arabidopsis thaliana; identical to SEQ ID NO: 150

SEQ ID NO: 4769 - protein, 219 aa, Rhizobium sp. NGR234
MSLRINETAPDFTAETTHGTINFHEWIGDGWAVLFSHPKNFTPVCTTELGAMAGIEGEFRKRGVKIVGISVDPVDSHAKWKNDIKVATGFDVEYPLIGDRDLKVAKLYDMLPAGAGDTSEGRTPADNATVRSVYVIGPDKKIKLILTYPMTTGRNFNEILRAIDSIQLTAKHQVATPANWKQGEDVIITAAVSNEDATQRFGSFDTVLPYLRKTKQPTA

SEQ ID NO: 4770 - protein, 222 aa, Physcomitrella patens subsp. patens
MALKLGDAAPSFVADSTHGKIDFHQYITGSWAILFSHPNDFTPVCTTELGAVGKFLPEFEKRGVKVIALSCNDVESHKGWIADIESFTPGAKVSYPILADPTRELAVKFGMLDPDEIDAKGIPLTARAVYVFGPDKKLKLSILYPATTGRNFNEVLRVIDSLQLTANYSVATPVNWNQGDKCMVVPSLSNDAATAKFPKGFETVEVPSGKSYIRLTPQPNVD

SEQ ID NO: 4771 - protein, 327 aa, Rhodospirillum rubrum ATCC 11170
MTIRDGFLGTIGGTPLIRLPWASRITGREILGKAEFLNPGGSVKDRAALAIITDALERGALAPGGTIVEGTAGNTGIGLTLVGNAIGCKTVIVMPETQSQEKKDALRLCGADLRLVAARPYKDPGNYVRYSETLAKELGGFWANQFDNTANRDGHRATTGREIIEQCEGRLDAFTCAVGTGGTLAGVALALKAHDPAIKVVLADPFGSALYSWITSGELKAEGGSVTEGIGQGRVTANLRDAPLDEAVRIGDAEALEAIFAMVREDGLMLGGSSGVNVAAAMKVALTLPKGSRVVTILCDGAQRYQSKLFNPDFLRSKALPVPDWLA

SEQ ID NO: 4772 - protein, 356 aa, Ashbya gossypii ATCC 10895
MHAQLIRKMSAPTLAAGGFPDAIGKTPLIKLQKLSQELGRNIYGKAEFMNPGGSVKDRAALYLVEEAERAGLIDPSRPGTIVEGSAGNTAIGLAHIARSRGYNAVFYMPDTQSREKVNLLRYLGTEVHPVPVCPSTDPLNFNNRARDHAAALDNAVWTNQFDNEANWKAHYATTGPEILQQMRNAGLEVDAFTCSTGTGGTFSGIARYLAEATERKCKLVVTDPPGSVVYSFVKTGNLEREGSSFTEGVGQGRITKNLEASVDIIDDAVFVPDPESLNMTYRLLDEEGLFLGGTSGLNVAGAVRVARELPPGSNVVTILCDTGHKYADRVFSKKWLQEKKLYDEIPDSLKKYVTLE

SEQ ID NO: 4773 - protein, 310 aa, Arabidopsis thaliana
MVSSMISIKAALITAGIVAVSLFLKSSVPIAVDFSVSRFPIFWSSFLSWLKPPYLFVAINVIITIIMASSKFYQSVGEQDGEDDEILLGGEYTIPNVITQAPPRRLVDLDADFDFVATVQSPILVAEVEILEVVFEEKEMAISGQTNGGDEFAVMRSELNQPIMEESENLPPAEKPLVSARSGHRKPIKASSKGVNRKKKALKVVKPNRHETLENTWNMITEEGKSTPLTCHYRKTSMSGLNAGGDVKPVLRKAETFRDVTNYRQSSPTVTSPVKMKKEMSPSREELNRRVEAFIKKCKEERLESLKLEK

SEQ ID NO: 4774 - protein, 211 aa, Moniliophthora perniciosa
MVALVQRPAPGFKATAVIEGLFQEVSLSDYLGKWVVLFFYPMDFTFVCPTEILAFNDALAEFQNLETVVLGVSTDSQYSHFAWANQPRKEGGLGPNLKLPLIADRSMSISRDYGVLLEEQGIALRGLFIIDPKGTLRQITINDLPVGRSVEETIRLVKAFQFTDKHGEVCPANWSEGGKTIKADPKSSLEYFGSAGDDASLGSAKKRPRTE

SEQ ID NO: 4775 - protein, 507 aa, Burkholderia xenovorans LB400
MTEPIRFYHRNAIREIKDAPVTRTVLQYLREDAHCTGTKEGCAEGDCGACTVVIGERNEAGGVDFKAVNACIQFVPTLDGKALFTVEDLRQPDGSLHPVQEAMVECHGSQCGFCTPGFVMSMWSLYEKHGHEHSCANRTVPSREAISNALTGNLCRCTGYRPIVDAAVRMFEAPAPKAPVNVEALVRALGTLERTDTFHYEHAGQQFDAPRTVEALARIKEAEPATRILAGSTDIGLWVTKQMRELGNIVYVGQIAGLQKLETNGEWIEIGAGVSVEKAYAEIAKQYPELNEMWQRFASLPIRNAGTLGGNIANGSPIGDSMPGLIALGARVIVRGGEIEREMPLEDLYLAYQKKDMAEHEFVVGLKVPTRSGVRQNLQFRTYKLSKRFDSDISAVCAAFAFIADGNLIREPRIAFGGMAATSKRATHAEAVLRDAEWHEATAQAAMLALGNDYAPLSDMRATSNYRLESAKNTLYRFWLETRPDNPLPKSALDVRAVAAACAPAGV

SEQ ID NO: 4776 - protein, 221 aa, Physcomitrella patens subsp. patens
MGGGWALGELVPDVEADSTVGHIKVRDYCKDGWTIIFSHPGDYTPVCTTELGKIAAYNPEFENRGVKLLGLSTDSVEDHLGWIEDIETYTPGAPVLYPILADPDRKITVALNMMDPDEKDANGKPLASRALHIVGPDCRLKLSFLYPGTTGRNFDEVLRVLDSLQLASKHKIATPANWQPGEPVVISPSVSNEEAKELFPQGWETFKLPSGQPYLRMTFVE

SEQ ID NO: 4777 - protein, 788 aa, Burkholderia xenovorans LB400
MNQQAEPFLKNLQDPDDFTQVHISRPHESAHLHVSGRATYTDDIPTLAGTLHAALGLSSKAHAKIVSISLDKVRATPGVVAIFTADDIPGVNDVGPIIHGDDPILADGLVQYIGQPIFIVVATSHETARLAARRAEIVYEELPAILTAQQARAANQHVLPPMKLARGEAGTKIARAAHREAGEMLLGGQEQFYLEGQISYAVPKDDDGMHVYCSTQHPTEMQHLVAHALGVASHNVLIECRRMGGGFGGKESQSGLFACCAALAAWKLLCPVKLRPDRDDDMMVTGKRHDFHYTYEVGYDDKGVIDGVTVDMTSRCGFSADLSGPVMTRALCHFDNAYWLPDVTIDGFCGKTNTQSNTAFRGFGGPQGAFAIEYIMDNVARSVGEDSLDVRRRNLYGKTERNQTPYGQIVEDNVIHELIDELEATSEYRARRAAINEFNANNAILKKGMALTPVKFGIAFNVTHFNQAGALVHIYTDGSVLVNHGGTEMGQGLNTKVAQVVAHELGIGFNRIRVTATDTSKIANTSATAASTGSDLNGKAAQDAARQLRERLSAFAAERFGAGQVSASEVRFAHDRVVVGDSVVPFEEVIAKAYLARIQLWSDGFYATPKLYWDQSKLQGRPFYYYSYGAAVSEVVIDTLTGEMRVLRADALHDVGASLNPALDVGQVEGAFIQGMGWLTTEELWWNAGGKLMTHAPSTYKIPTVNDTPPDFRVRLFKNRNAEDSIHRSKATGEPPLLLPFSVFFAVRDAVSAVGGHKVNPPLNAPATSEEILKAVGAVRAATAAPRR

SEQ ID NO: 4778 - protein, 200 aa, Pseudomonas aeruginosa PAO1
MSVLVGKKAPDFNVAAVLGNGEIVESFTLSEAIKGKYGLVFFYPLDFTFVCPSELIALDHRIPEFQARNVEVIGVSIDSHFTHNAWRNTPVDKGGIGAVKYTLAADTKHEIAKAYDVESDGGVAFRGAFLIDKEGVVRSQIVNDLPLGRNMDELLRLVDALQFHEEHGEVCPANWKKGDKGMTASPEGVAKYLAENASKL

SEQ ID NO: 4779 - protein, 406 aa, Pseudomonas syringae pv. syringae B728a
MSQILNVTLITETFTPEINGVANTLGRLCEGLRLRGHRVELVRPRQNDETGAGTAEDLLLCRGWPIPGYPGLQWGQSSMHKLLRRWQRRRPDVLYIATEGPLGLSALRAARRLGIAVISGFHTNFPQYTQQYGMGFITRLLTHYLRWFHNRSRMTLVPSISQKVELERRGFERIELLSRGVDSQLFSPSRRSQPLRENWGLQPDDVAVLHVGRLAPEKNLSLLKACFEALKDSYPQRNLKLVVVGDGPQRAQLEQQIPEAIFCGTQRGEVLATHYASADMFLFPSLTETFGNVVLEALASGLGVVAYDEAAAGQHIRHGHNGALAMPGDEAAFIDAARWLLEDSETLRRVRLNARQHASRQGWTAVIDQFERQLREACPSQNAASVKEIRSVASKKIRPVSSVRLD

SEQ ID NO: 4780 - protein, 199 aa, Microcystis aeruginosa PCC 7806
MTAEGCLRVGQAAPDFTATAVFDQEFKTIKLSDYRGKYVVLFFYPLDFTFVCPTEITAFSDRVSEFSSINTQILGVSVDSEFAHLAWIQTERKSGGVGDVAYPLVSDLKKEISTAYNVLDPDAGVSLRGLFIIDKEGVIQHATINNLSFGRSVDETLRTLKAIQYVQSHPDEVCPAGWQEGDATMVPDPVKSKVYFAAV

SEQ ID NO: 4781 - protein, 228 aa, Zea mays
MAEGRSEPLRLGSTAPNFKAETTAGPIDFHEFIGDSWAILFSHPADRTPVCTTELGAFAKLEPEFARRNTKLIGLSADSIESHDEWVKDIDEVTGSNLKFPIIGDKERKVALLYDMLDHQDATNVDQKGIAFTIRSVFIIDPKKTIRLILSYPASTGRNTAEVLRVLDSLQTGDKHRVTTPINWVPGDDVIVHPSVSNEQAKDLFPDFRIVKPYLRFTPLAKEKTSAA

SEQ ID NO: 4782 - protein, 463 aa, Mycobacterium smegmatis str. MC2 155
MRIARHISELIGNTPLVQLNSVVPEGAGLVAAKIEYLNPGGSSKDRIALKMIEAAEVSGELKPGGTIVEPTSGNTGVGLALVAQQRGYKCVFVCPDKVSEDKRNVLRAYGAEVVVCPTAVPPDHPDSYYSVSNRLVTEIEGAWKPDQYSNQMGPESHYETTGPEIWADTEGKITHFVAGVGTGGTITGTGRYLKEVSGGKVKVIGADPEGSVYSGGTGRPYLVEGVGEDFWPTAYDPSVPDEIIAVSDADSFEMTRRLAREEALLVGGSCGMAVVAAIEVARKAGPDAVVVVLLPDGGRGYLSKIFNDAWMSSYGFLRTRLDGSVEKTVGDVLRGKSGALPDLVHTHPSETVRDAIGILREYGVSQMPVVGAEPPVMAGEVAGSVSERELLSAVFEGRAKLADAVAEHMSPPLPLIGAGELVSTAAKTLRESDAVMVVEDGKPVGVLTRHDLLGFLSEGGYRH

SEQ ID NO: 4783 - protein, 169 aa, Mesorhizobium loti MAFF303099
MSVRDLIPWSRGGGPAPSIYRGDDMDPFLSLHRNVNRLFDEVFRGFDTPSVLGRMAPLNGTWPGVEFSETDEEIRLTAEIPGLDENDVEVMLDDGVLTLRGEKKAETEDKDRQFSERYYGRFERRFGLGREVEDDKVAATFKNGVLTVTLPKTKRAQANAKRIAINGNK

SEQ ID NO: 4784 - protein, 401 aa, Vibrio salmonicida LFI1238
MKVRLVNKFFFMKGGAETVYFQERDMLLSEGIDIIEFSMNHEKNLESNYSYFFVNNVDYYQEQTLKNKITTAVNFIHNSEACIKFKQLLEQEKPDLVHFHNIYHQLTPSIIKVAKQFGCKTVLTAHDTKIACPSYTMYRDGHTCEDCVHGSVFNATIHRCQESSLIKSFLLSAEAIYQKVSGNYQQLDAIVSPSRFLGRFIQQKLPHNRVDIIVNGIDEHVSNEGISDQGYFLYLGRLSTEKGVPTLAKAHQLMKENTALKIVGDGPVFNELKETYPRAELLGFKSGDELLTLIKQAKAVIVPSECYENCSMSVLEAMSYSKPVIASRIGGLPEQIRDGVDGYLFEAGNAQALADKLDVLAASLSASAEMGKNARQRFLSKYTLTKHKTDLLNLYNELLKG

SEQ ID NO: 4785 - protein, 317 aa, Photorhabdus luminescens subsp. laumondii TTO1
MNKIYEDNSLTIGRTPLIRLKHFGNGRILAKVESRNPSFSVKCRIGSNMIWDAEKHGILQPGKELVEPTSGNTGIALAYVAAARGYKLTLTMPETMSIERRKLLKALGAQLVLTEGAKGMKGAIEKANEIKASDPDRYIILQQFSNPANPEIHEKTTGPEIWEDTDGEVDVFVTGVGTGGTLTGVARYLKNTKGKNITTVAVEPEESPVISQTLAGEEVKPGPHKIQGIGAGFIPDNLDLTLVDRVFKISSEEAIKTAREIMVKEGILAGISSGAAVAAAVKLSQEPEYKDKNIVVILASSGERYLSSVLFADLSDE

SEQ ID NO: 4786 - protein, 199 aa, Pseudomonas aeruginosa PAO1
MSVLVNKQAPDFTAAAVLGDGSIVDAFQLSSLRGKYVVLFFWPLDFTFVCPSEIIAHNNRMDKFRELGVEVVGVSIDSQFTHHAWRSTPVEKGGIGAVEFTMVADVKHEITRAYGIEHEDGVALRASFLIDRAGVVQHQVVNNLPLGREVDEMVRLVEALQFTEEHGEVCPAGWRKGQKGMKASAEGVASYLAENAEAL

SEQ ID NO: 4787 - protein, 407 aa, Corynebacterium glutamicum ATCC 13032
MRVAIVAESFLPNVNGVTNSVLRVLEHLKANGHDALVIAPGARDFEEEIGHYLGFEIVRVPTVRVPLIDSLPIGVPLPSVTSVLREYNPDIIHLASPFVLGGAAAFAARQLRIPAIAIYQTDVAGFSQRYHLAPLATASWEWIKTVHNMCQRTLAPSSMSIDELRDHGINDIFHWARGVDSKRFHPGKRSVALRKSWDPSGAKKIVGFVGRLASEKGVECLAGLSGRSDIQLVIVGDGPEAKYLQEMMPDAIFTGALGGEELATTYASLDLFVHPGEFETFCQAIQEAQASGVPTIGPRAGGPIDLINEGVNGLLLDVVDFKETLPAAAEWILDDSRHSEMCAAAWEGVKDKTWEALCTQLLQHYADVIALSQRIPLTFFGPSAEVAKLPLWVARALGVRTRISIEA

SEQ ID NO: 4788 - protein, 1473 aa, Cryptococcus neoformans var. neoformans B-3501A
MGIPKFFRWISERYPLTSQLITPNSIPTFDNLYLDMNGIIHNCSHPPSTENDPHFRITEEQMILAIFAYIDHLFTKIKPQKVFFMAIDGVAPRAKMNQQRSRRFRAGKDARDQREKAEKNGEKLPDEKAFDSNAITPGTPFMARLSQHLKYYVRKRISEDADWRSIRVILSGHDVPGEGEHKIQEFIRLNKAQPDYNPNTRHCLYGLDADLIMLGLLSHDPHFCLLREEVTFGRKSRQNTELANTNFFLLHLSLMREYLDLEFSSLQTQISFEYDLERIIDDFILMAIFVGNDFLPHLPDLHINEGALERIWGMYKDILPTIDGYINEHGTISLPRLQLLLDKLAEFEVKRFEDDLLDQVHFSGNHTRDTMVIEKARKKNRKVITKYQQKVLNQLRSFIEKQQNQPNPTHRLELINTQDKRDNAFVQELADELHLHTTWDEVDDYGQSLIVCTFNMEGVSQDGSADGKEEDGDWESDEMEDEGKLAVQRVFRNWSKAAVVDTYPEDVEKSMDEKLKEAMDDIKRQYYHDKLEINYNDPAQMQDLVHHYIEGLQWILNYYYKGVSSWGWFYKYHYSPRITDLKGVADMKFEFDYGKPFTPFQQLMGVLPVDSMDHVPLAYRDLMYEETSPIIDFYPRNFELDMNGKKQDWEAVVKIPFIDQNRLLKAMAARDVRLTPEERERNKSGVLSTQFVYDPEIDENYPSSFPGVFPELTRSHCRASPFNLPVLGGDVQLIFGLVEGVQLGVSALAGFPSLDTLPHNGTLDYHGVNVFQSDSKNPSMVITIIGKDELPKTSEIARNVLGQRTFHSWPYLQEGIVAAVSDDMFKYTLQQVGKSLRVVHMPHQDAVKWRRQADHVERHYSRRYGVIIGGVEVLLHIRPLKGLKHLDNGALVKDYETPEKEIVQAYQVAVSQVTFEDERFLERAPPDLKVDFPVGEKVLFLGDMHYGLAAQVSAVNEEAQTLSVILAYFEEETEETLRFMKAVAHRPAGKWWPSPILSRRLGISALALSRITSTLLVQLGDGSKTNIGLSLKFESRGLKVLGYSKRNDRGWEFSEKTAQVLEAYKKAFPEVFKHLENRGGDLVKSKELCPTAEDPDTVIKGMKKWLKDEGLNDLESVSLFADQLEAETCQIVEKLADDILSKKTFQSIKKKRLDNVPRQTLLKPAQAIYRLQGQVFEPGHRVVMVQDPAAGGVPTGMRGVVVGLGMRTVDVIWDNGFMGGSTLQGKCSPYRGSTVPFSSCLNLTRPQFTVSERAGPKPVPQNVFRPQLGPRPAVPMQHYQPSVPGRQQTATTTHHILQKPKTVHSTQSTTVVGSNGHLKYSGVAKGVRPQPVQQQPVSHRDQLSNLLGGLRLGPGPVVNDNRDSSHVTHVQAQGNLPVVHSHASVHQAIPTNPPIRGKAQNMNNKSGIGAVRGRGAANGAPFAHRGTHNGVPASARGGAPNGGPRGRGGFRGGSRGFTRGRGVGSGGSAVVEE

SEQ ID NO: 4789 - protein, 110 aa, Pseudomonas aeruginosa
YVEYDVGFDDDGRLHGIQIDLAGNCGYSPDLSGSIVDRAMFHSDNAYFLGNATINGHRCKTNTASNTAYRGFGGPQGMVAIEEIMDAVARSLGKDPLEVRKLNYYGKDER

SEQ ID NO: 4790 - protein, 813 aa, Vitis vinifera
MKVRCHQGPYNAFFNMCAFTRTELSSREMESLIAISDTFLPSVEAPHNAAHAYVDKFYRTSASMAGTPHIVGGLISERLEHPKLWLSRVVLWLLSTWFGTFIICGLASMSSHFPYFQSFPQVSPHKRHEIVLSWSLSYFSLIRMLFRSLKLVTLLVFFTQVDEKNENLTWKAIGYCGPDPDFKTLYRANKTAQPNGYGREDFNGPLYRGLINVKRPREVVAEALRLSGFSISIHSRKHETPNSSSPLIIRCDAVVIGSGSGGGVAAGVLAKAGYKVLVLEKGNYCARSNLSLLEGPTLDQMYLYGGMLATDDTGVIILAGSTVGGGSTINWSASIRTPQHVRKEWCDQHELELFDSQLYKEAMDVVCEKMGVQSEIYEEGLNNAVLRRGCQELGYPVTDIPRNSQPKHYCGWCCFGCKDGRKKGTAETWLVDMMNSGNGVILPGCEAIKVLHNRKKGRARSTATGVAFEFEYKGVKEVFMVESKVTIVACGAISTPGLLKRSGLKNPNIGKNLHLHPVAMAWGHFPEPTPFYEGEIMTVMSTVVADFEGSGYGAVIQTPSLHPGMFSVLMPWISGPDMKDRMIRYSRTAHIFALARDKGSGTISSPSTISYQMDETDEENLKRGMEKLLRILAAAGAEEIGTHNCNGRSINVKKVSSHAFEKFVKEESSRALRDLSTPVCSAHQMGSCRMGVDPRSSAVNQMGETWEVEGLYVADTSVFPTALGVNPMVTVQAIAYSTAKSVVEKKDVKLNGKLCYLAESGAFQLGVAALICLFIAHILGNMVICRRICSGEKSSSGKAKTPWITSTLLVVSW

SEQ ID NO: 4791 - protein, 118 aa, Zea mays
MYQCTVVHQTFQLSRADRETVQRQEYDLQVWCILINDKVQFRMQWPQYAELQVNGIPVRVMTRPGSQLLGINGRDDGPLVTTCSREGINKISLSRVDARTFCFGVRIVRRTVPQVLFI

SEQ ID NO: 4792 - protein, 519 aa, Marinobacter sp. ELB17
MIKFYLNGKPQKLTKADPNMSVLDWLRTEKRLTGTKEGCASGDCGACTVTIGSPDAAQSGQLRYDSVNSCIALVGSLHGKHLITVDALRDEPAHPVQKEMVECHGAQCGFCTPGIIMSLFALHTESAATGSAPNDEAVLESLSGNLCRCTGYRPIIDAGRKACVQTWEGNSGGTVLNRGAALSGPIAADSANAAPGLSGPAWLQSPDMIADLLKIQKSEANLRSHQGYRYNTPTTLASLRELRVQFPEARLLAGGTDLALEITQQLKDLPHLIALGGIEELQAIHEDDDGIYLGAAVTYRALFHKLAERWPHFGPMLERLGSRQIRNVGTIGGNVGNASPIGDMPPALIALGAELELDSSDGVRRIPLETFFHGYKQTDLRANEFIRGVWIPASATDEQLLIYKISKRMDDDISAVLGAFWLKRDGEHIVDCRIAFGGMAATSKRALGAEAALRRQPWNSASVSAAIAALEAEFQPMTDVRGSAAYRLQVAGNLLRRALLETSQSTSETRQPLMVTDYA

SEQ ID NO: 4793 - protein, 796 aa, Marinobacter sp. ELB17
MRKLPSNIPRTQEAARGLAGTQAFHDSAWKHVRGQARYIDDIPEPEGLLHAAVGQSSEAHARITAMDLSAVKAYPGVVAVLTVEDVPGHTDIGPVFPGDPVLTSDLVEYVGQPLFAVAATTHRAARQAARLAKVSYERLEAVLTAEAALEKQLFVRPDHTQQRGDPDAALADAPHRLQAQMHVGGQEHFYLEGQACLVEPTEDAGVFVHTSSQHPSEIQKLVAEVLNLPIHEIQVEVRRMGGGFGGKETQAAPLACISALLARHTGRAVKYRMARLDDMVQTGKRHDFYNTYDIGFDDDGILRGADLMVAGRCGFSPDLSDAIVDRAMFHADNGYSLGEARVVGHRCKTHTVSNTAFRGFGGPQGMMIIERAMDDIARHLGQDPLDIRKRNIYGPGRDVTHYGQTIEQHVLPELIEQLETSSDYRQRRDEITAFNRQNTVIKRGLSLTPVKFGISFTAKHLNQAGALVHVYTDGSIHLNHGGTEMGQGLYIKVAQVVAAAFQVDLERVKVSATRTDKVPNTSPTAASSGTDLNGMAALDACETIKQRLVNYAVETYGVNADAVAFANNQVQVGEQRFDWAEFVQQAYIARVSLSSSGFYSTPKIHYDRATGQGRPFLYFANGAACSEVVVDTLTGEYKVMRVDILHDVGQSLNPAIDIGQIEGGFIQGMGWLTTEELVFSEDGRLLSNGPATYKIPAVSDTPPDFRVALLAQSPNREATVFRSKAVGEPPLMLAISVWCALRDAVASLSDYRYSPPLDTPATPERVLAVVTATQRWVDGNATAGLNDEGAPSCTHA

SEQ ID NO: 4794 - protein, 310 aa, Streptococcus thermophilus LMG 18311
MNMTIYNSITELVGRTPIIKLNSIVPEGSADVYVKLEAFNPGSSVKDRIALRMIEDAEKAGIIKPGNTIIEPTSGNTGIGLAWVGAAKGYKVVIVMPDTMSVERRKIVQAYGAELVLTPGSEGMKGAIAKAKEVAAERDGWVPLQFANPSNPAAHADTTGQEILEDFGADGLDAFVAGIGTGGTISGVSKTLKAANPNIKVYGIEADESAVLNGDKPGPHKIQGISTGFIPDTLNTKSYDSVIRIPSDEAISTSRTLGSKEGFLAGISSGAAIAAALKVAAELGEGKKVLTLLPDNGERYLSTTLYDFQN

SEQ ID NO: 4795 - protein, 199 aa, Prochlorococcus marinus str. MIT 9211
MMTNECIRVGQKAPDFTATAVIDQEFKEISLSNYRGKYVVLFFYPLDFTFVCPTEITAFSDRYSEFSSKNTEVLGVSVDSQFSHLAWIQTQRNDGGIGDINYPLVADLKKEISLAYNVLDDAEGVALRGLYIIDPDGVIMHATINNLPVGRNVDETLRVLQAFQYVQANPDEVCPANWTPGEKTMKPDPEGSKEYFSSL

SEQ ID NO: 4796 - protein, 337 aa, Yersinia pseudotuberculosis IP 32953
MKIIYDGIINSLQNMGGVTVYFSELVSRLPATDFYWYSYADEISGFGVGNVKIKSRLLERYRNFSLDTINYNSLSVFHSSYYRLPDFDIPIVTTVHDFTYEKFVNGPAKWVHSWQKNRAVNNSDLIICVSENTAKDLQMYCSVPSNKIRVIYNGVSDKYHYIKGVKITTNKVIFVGARGGYKNFDIAVKAISKTPHLELSVVGGGAFTSKELSLLNHYLPGRYHGLGRLSDEALNEAYNSAYALLYPSSYEGFGIPILEAMSAGCPVISVNVSSIPEVAGDAAILVQKPTVDELVDGLLAVESERSKLIGYGMKQAAKFSWDKCYQETLDVYKELNK

SEQ ID NO: 4797 - protein, 362 aa, Rhizobium leguminosarum bv. viciae 3841
MRVAFYAPMKSPNHPVPSGDRLMARLLIRALELGGHQVDVASEFRTHVSTPEAAAALEPVIGAELERLRLRWKVGPRPELWFCYHPYYKSPDPFGPAISAEFAIPYVTAEASYAAKRDRTGWATSQKLVGEAIMRAAVNISFTERDQAGLAAAFPQARLARLKPFIDTVLFEKMSPAPDPRRLMTVAMMRAGDKMDSYAMLAKALRLIEDRPWRLAVIGDGPMRQEVQALFAGLPGRIEWLGERNAVEIAELLGRGGVYVWPGCGEAYGLAYLEAQAAGLPVVAQETAGVPAVVEAGVTGLLTPDGDVAAYAEAVAALLDDRQRRDAMGQAARRFVLGERSLATAAQILNGILRDSAATGVT

SEQ ID NO: 4798 - protein, 389 aa, Aeropyrum pernix K1
MRKGLGSGVYGSILDLVGGTPLLRLGRVERFFRLEGVELYGKLEMFNPGGSVKDRIGLYMLMDARSRGLVEEGAVIIEPTAGNTGVGLALAAIHYGFRLVAVMPSKMSVEKELILRAYGAYVIRTPTAVPPESPLSYYRVAEAVRNLLWMIGGRPGGGEVRKVVEKVQTLVREERVEDLRSILEASVEPTPYAYIPNQYSNPANPRAHEETTGREIWMQTGGRVDVVYAGMGTRGTITGVARYLKRAKPSVRIVGVDPEGSIYSLVKKGMSPHEAAKHARPYKVEGIGEDFIPSTIDLSLVDEVVVVTDQQAFSMARMLARLEGVLAGGSSGAALYAAVKHIKTRRVRGVAVVILPDTGRNYINKLYNDRWMGENGFSTRDEEVLGELL

SEQ ID NO: 4799 - protein, 424 aa, Prochlorococcus marinus str. NATL2A
MTHIAWLGKKTPFCGNVCYGLSTTEELKERGYQTSFIHFDNPMRDGNNKTSLLANDPDVSLPYLIKSQVYTIPSLNAQRELRESLSRLKPDLVHASLTLSPLDFRLPELCHQLNLPLIATFHPAFDSKLRNLTANTQQLTYQLYAPSLAKYDKVIVFSDLQAEVLAKLGVKESRLEVIPNGIDIKKWNTLKPHNSQNELHFEIRKKLGSERIFIYMGRIASEKNVEALLRAWRFVQPKGCRLVIVGDGPLRPTLENHSISNKEDNVFWWGYEADQNKRVALLQIAEVFLLPSLVEGLSIALLEAMATGTACVATDAGADGEVLENGAGIILNTEGVTSQLRTLLPVLHDQPVLTHELGRRARLRVEEKYTLQQNIDSLENLYTNVLRSSSSKLPQPIDDSSALPKQLLQLRRISSQQVQGVEEH

SEQ ID NO: 4800 - protein, 920 aa, uncultured marine bacterium 582
MDNVARLLGQSTEFKLNGRMVTVSAAAGARLSHSLREQLGAKDVKIGCNAGDCGACTVLVDGDPVCACLMPTQQAAGKTLETLVGLVGQDPRAKALVQSFQNHQAAQCGICTPGVMVSAVALLRNVRTPTIGQIQDALGGVLCRCTGYRKIIDAVCEVGQAEAFPEAVSGSGAVGTSVARLDGLQKLQGREVFGDDVAPTQALVIKAVRSPFARAEFRFGDLEHYVTSTAGVHAVLTAADVPGKNAFGVIPAFQDQPVFAEKEARFRGEAVAAVIGTATAMACFDETGFPVTWEERHAVSQVAQALMTTAPQLHADHPKNVMCGGFVARGDAQSGLIGAEVVVEGLFETGFVEHGYIEPEAGFAECVEGRIEVHACTQAPVMDLESLAAILGCDQRKIRIRPTAVGGGFGSKLDLSVQPFLALAALKTGQPVRMTYSRTETMQATTKRHPSQINLKIGATKAGRLCGFAFKGDFNTGAYASWGPTVANRVPVHASGPYQIANYRAESRGIYTHCPPAGAFRGFGVPQAAIAQESLFDELANKLGIDALEFREINALEDGAETVCGQVFEQGVGIKACLRALRSAWRREKALCAAFNAENASRKRGVGVAAGWYGCGNTSLPNPSTIKSGITADGRIFLHQGATDIGQGANTVITQIFAQALGVSVYDIHLLGPDTDITPDAGKTSASRQTFVSGNAARLSGESLRRKVLALANAGPDAPLSFDVGTVTIGDSAAPHVVALQRLPEGADGYVLTATETYDPPTLPLDENGQGVPYAQFGYAAHLAVVEVDIRLGCVTPQRFTAAHDVGQAINPLLVEGQVQGGIAQGLGMALMEEYLPGKTENLHDYLVPTIGDVPPIETLIIERADAEGPYGAKGLGEHVLIPTAPAILNAIKDATGVRLYSVPATPSRVRMALKEAGYD

SEQ ID NO: 4801 - protein, 214 aa, Brassica napus
MPGITLGNTVPRVETTHKNFKLHDYFADSWTVLFSHPGDFTPVCTTELGAMGKYAHEFEQRGVKLLGLSCDDVQSHKDWIPDIEAFTPGSKVTYPIIADPNKEIIPQLNMIDPIENGPSRALHIVGPDCKIKLSFLYPSTTGRNMDEVLRALHSLLMAAKHKNRIATPVNWKPDEPVVISPAVSDEEAKKLFPQGFKTAELPSKKGYLRVADVS

SEQ ID NO: 4802 - protein, 323 aa, Salmonella enterica subsp. enterica serovar Typhi str. CT18
MSKIYEDNSLTIGHTPLVRLNRIGNGRILAKVESRNPSFSVKCRIGANMIWDAEKRGVLKPGVELVEPTSGNTGIALAYVAAARGYKLTLTMPETMSIERRKLLKALGANLVLTEGAKGMKGAIQKAEEIVASDPQKYLLLQQFSNPANPEIHEKTTGPEIWEDTDGQVDVFISGVGTGGTLTGVTRYIKGTKGKTDLITVAVEPTDSPVIAQALAGEEIKPGPHKIQGIGAGFIPGNLDLKLIDKVVGITNEEAISTARRLMEEEGILAGISSGAAVAAALKLQEDESFTNKNIVVILPSSGERYLSTALFADLFTEKELQQ

SEQ ID NO: 4803 - protein, 339 aa, Vigna angularis
MVVLSNQSALNELFLAKTCNPSTMFTEVPEVDLSHPDAKTIMVKACQEIGLFKLVNHGLPLEMITRLENEALKFFTQSQSVKDKAGPPDPFGVWAARELARTGDMGWVEYLLLSTNPDIVSPKTVQLFNQNPQSFRLCVEEYIGAMKKICCEVLEEMGDGLGLGRRKNVFSRMIREERSDSCFRVNRYPACGELKDESALSGRNLIGFGEHTDPQILSVLRSNNTSGLQICLPDGTWASIPPDHSSFFVNVGDLLQVMTNGRFKSVKHRVLADSRLSRLSMIYFGGPSLEEKIAPLPSLVSKEEESLYRELTWREYKNAAYKTRLSDDRITLFYKSSNT

SEQ ID NO: 4804 - protein, 402 aa, Lactobacillus plantarum WCFS1
MNRVYVERSDWLFNRQSTMLMKILITVENLVMDGVKRAATVLGNALTSQAEVAFYSLAQPRSFYELSAPLITARRPASATVLNYFGADPLTVYAPQIDDLLTTIGSGAYDAVILPGGLLTSFAPAIKQRFPRVNVIAWMHNNVDIYLNQYYVQMQDELVAGLLAADTVVTLTDYDWEGYSRFNAHTVKFYNPPTMQAHGQQADLAQHIIAYTGRIDLQHKGLDYLLTVARALPDDWQIAVAGTGPEDQLATFNRLMAELDVRDRIIYRGALKDTELRAHYQQASVFMMTSRWEGMPLVMGEAMTMGLPIVSMWNTGSAEYLQGGQYGVLTPARDVNALITGLMPLLTDFDCRAEYAARARQRSHDFTLSKIVRQWLALLNRQYVPQTVVESNWPADLSSGGH

SEQ ID NO: 4805 - protein, 157 aa, Solibacter usitatus Ellin6076
MITLNINGKQQRFDGDPDMPLLWVLRDEFNLKGTKFGCGMGLCGACTIHVNGEPVRSCVMSAANAAGKKITTIEGLSPDGSHPVQVAWEALDVPQCGYCQTGQIMSACALLTKKKTPRDADIDSAMAGNICRCGTYGRLRAAIHKASDAMKSGATKR

SEQ ID NO: 4806 - protein, 110 aa, Pseudomonas aeruginosa
YVEYDVGFDDDGRLHGIQIDLAGNCGYSPDLSGSIVDRAMFHSDNAYFLGNATINGHRCKTNTASNTAYRGFGGPQGMVAIEEIMDAVARSLGKDPLEVRKLNYYGKNER

SEQ ID NO: 4807 - protein, 155 aa, Oryza sativa Japonica Group
MACAFSVSSAAAPLASPKGDLPLVGNKAPDFEAEAMFDQGFIKSKCMFVSSAEITAFSDRYEEFEKINTEVLGVSIDSVGIALRGLFIIDKEGVIQHSTINNLAIGRSVDETLRTLQALQYVQENPDEVCPAGWKPGEKSMKPDPKDSKEYFASI

SEQ ID NO: 4808 - protein, 303 aa, Salmonella enterica subsp. enterica serovar Typhi str. CT18
MNTLEQTIGNTPLVKLQRLGPDNGSEIWVKLEGNNPAGSVKDRAALSMIVEAEKRGEIKPGDALIEATSGNTGIALAMIAALKGYRMKLLMPDNMSQERRAAMRAYGAELILVTKEQGMEGARDLALAMSERGEGKLLDQFNNPDNPYAHYTTTGPEIWRQTSGRITHFVSSMGTTGTITGVSRFLREQEKTVTIVGLQPEEGSSIPGIRRWPTEYMPGIFNASLVDEVLDIHQNDAENTMRELAVREGIFCGVSSGGAVAGALRVARATPGAIVVAIICDRGDRYLSTGVFGEEHFSQGAGI

SEQ ID NO: 4809 - protein, 151 aa, Physcomitrella patens subsp. patens
VYVQLAVGDPLPPLSLKDQDGREIKLSKFRGRPLILYFYPANETPGCTKQACSFRDSYEDYRKLGATVVGVSGDSPESHKAFKAKYNLPYTLLSDEGNKVRKAFGVPADFFGALAGRQTYVVNRQGIITLIYNNQFQPEKHVPETLKVLQA

SEQ ID NO: 4810 - protein, 332 aa, Caulobacter crescentus CB15
MSALPSVLDAIGNTPLIRLARASEATGCEILGKAEFMNPGQSVKDRAALAIIRDAEAKGLLRPGGRIVEGTAGNTGIGLAMVASALGYKTTIVIPRTQSQEKKDAIRLLGAELVEVDAVPYSNPDNYVRYSGRLAEELARTEPHGVIWANQFDNTANRDAHYHTTGPEIFDQTSGKVDGFICAVGSGGTLAGVAAALRERKPGVRIGLADPYGAALYAWYKDGELKSEGSSISEGIGQGRITANLEGLAIDDPFRVSDQEMLEVLYDLVQHEGLCLGGSAGINVAGAIKLATAMGPGHTIVTVLCDHGSRYQSKLFNPVFLKEKGLPTPPWM

SEQ ID NO: 4811 - protein, 215 aa, Picea glauca
MATVASAKSNVMKSVIPAVKKCLLPSGRQGDSSASAMCRSLSTAAAKYRPEYDSAIQDDTQNRQASETRRGGLPNIFGDPFYPLRSLGFGLDQLFDNPFLAASRGTGDAVRGGSRKPWDAVEDKEALHLRVDMPGLGKEDIKVYAEENALVIKGESVSDAELDGSARKYSSRIELPPKVYKLDHIKAQMKNGVLKVTVPKFTEQEIKNVINVNIE

SEQ ID NO: 4812 - protein, 212 aa, Ralstonia solanacearum GMI1000
MSLRLGDIAPDFEQDSSEGRIQFHTWLGNSWGVLFSHPADFTPVCTTELGLTAKLKDAFAKRNVKVIALSVDPVDSHKKWIDDINETQNTRVNFPIIADADRKVSQLYDMIHPNASETFTVRSLFVIDPNKKVRLTITYPASTGRNFDEVLRVIDSLQLTDHHSVATPGNWKDGDDVVIVPSLKDEEVIKQKFPKGYKAVRPYLRLTPQPNK

SEQ ID NO: 4813 - protein, 353 aa, Leuconostoc mesenteroides subsp. mesenteroides ATCC 8293
MAKILIALENIELGGMKRATTVVGNALAASHEVTYYSFSDLPPFYGLSAPLVVASPALRLTSESHPFKRYAQAIENFSLLAQRYDVVILAGGLLSSFAAVLKPKLPRTKLLGWMHNNITTYRDQYYAMMREEFIAGLRVLDAVVVLTDFDLGGFKKYNERTVKIWNPLTIAPKGPSKLEKHIISFTARIAIQHKGIDFAVQLATKLPDDWQLAIAGGGMQEDMETFEQLINEYGAHEKIIYRGPLKDNELRDHYRNSSLFLQTSRWEGLPLVLVEAMSFGLPIIAMRQTGSAEVLKEGEFGVLIENGDIDGAAIAIQRLINSRQQQLDLAEKSLNRVRDFQIEPILKQWEALF

SEQ ID NO: 4814 - protein, 388 aa, Prochlorococcus marinus str. MIT 9515
MVHIAWLGKKSPFCGNVSYGNLTTEQLKVKGHKVSFIHFDNPSSANESKPLFLANDPEVSLPYLIKSQVYTIPSPRAETELRHSLERLKPDIVHASLTLSPLDFRLPELCKQINLPLVGTFHPAFDKKNRNLTASTQQLTYQLYAPSLAKFDKIIVFSEPQKTLLENLGVSKEKQIIIPNGVDENIWQPMKVKSKKYNSVKSKLGEGRIFIYMGRIANEKNIEALLKSWRQTKTNNCKLVIVGDGPMKPTLENSFSNLGKDKLIWWGSEIDLETRVAIMQIAEVFFLPSLIEGLSLSLLEAMSTGTACVATDAGADGEVLDKGAGIVISTDNVVTQLKTIIPILIDHPSFTKALGEKGRARVIERYTIKKNIQALEQLYLDIIKASKV

SEQ ID NO: 4815 - protein, 110 aa, Pseudomonas aeruginosa
YVEYDVGFDDDGRLHGIQIDLAGNCGYSPDLSGSIVDRAMFHSDNAYFLGNATINGHRCKTNTASNTAYRGFGGPQGMVAIEEIMDVVARSLGKDPLEVRKLNYYGKNER

SEQ ID NO: 4816 - protein, 732 aa, Magnetospirillum magnetotacticum MS-1
MIPRFGFGQSHTRVEDRRFLTGRGCYTDDVNLTGQSYGMVVRSLLPHADVKVNAEAARSMPGVLLILTYAEMAEQGVGPMVCGFLPENAVPRHPRPVIAGPRPRHAGEPLAFVVAETLDQARDAAEAVLVDYHPLPPVAEDAFVWEMGDAAKVAQAFAQAARVVELNLINNRLAPTAMEPRACLARPLASGRLELTSGSQGVHEIRDRLAPVLGIKAESLDVITPDVGGGFGLKISPFPEQAMALVAARILDRPVKWTADRTESFLTDTHGRGHVSNARLALDATGRFLGLQVETVADLGAYISNYGAYVPTLAGTGMLTGVYDIPAFHARVRAVHTSTTPVDAYRGAGRPEAAYLIERLVDTAARDTGLSPVEIRKRNFIPPEAFPYASAGRHTYDSGEFARVMDVALERSGWAEFETRRAESKGRGKMRGIGLAYYIEICGGTSGEDVTLTLTPDGGAEILVGTQSNGQGHETAYAQMVAAELGLAMERIRVVQGDTRRIAKGGGAGGSRSLSQQGGAIASAVESFIEHLRPQAAKLLQAERAEFESGRYRAGESSVSFAQVLAEAGMPLSASLRFRPPASTFPNGCHVCEVEVDPETGETEIVRYTIVDDVGTVLNPLLLRGQIVGGAVQGIGQALLEHAVFDPESAQPLTSSLIDYAVPRAAHIPEIDFSTVEIPCRTHPLGLKGAGEAGTIGAAPAVINAVCNALGIRHMDMPATPLAVWNTLNGKP

SEQ ID NO: 4817 - protein, 164 aa, Magnetospirillum magnetotacticum MS-1
MSFSLTLTVNGETRAIDLDDPRVTILDLLRERLHLTGSKKGCDRGQCGACTVLVNGRRVNSCLALAVSLDGADVLTIEGLARGDALHPVQAAFIDHDGFQCGFCTPGQIMSAVGLIREGQAGDDPERVREGMSGNLCRCGAYIGITQAVLEAQARLASEQGEAA

SEQ ID NO: 4818 - protein, 288 aa, Elaeis guineensis
MACSVPSIVSSNPRVFPSKPLTPTASLPPAPGLLSKTLAVPKSFHGLRKSFHPRSAPMVSSPRSSRRSFVVNAVSGSELPLVGNRAPDFEAEAVFDQEFINVKLSDYIGKKYVILFFYPLDFTFVCPTEITAFSDRYSEFEQLNTEILGVSIDSVFSHLAWVQTDRKSGGLGDLKYPLISDVTKSISKSFGVLIPDQGIALRGLFIIDKEGVIQHCTINNLAIGRSVDETMRTLQALQYVQDNPDEVCPAGWKPGEKSMKPDPKLSKEYFAAISGLFHFATAILLCHL

SEQ ID NO: 4819 - protein, 907 aa, Desulfovibrio desulfuricans subsp. desulfuricans str. G20
MIKRSLMINGAPRMAIAKPDTTLATYLRESLGLTSVKIGCGTGQCGSCSVIVDGKVVRSCSYKMSRLADGAVITTLEGIGTPDHLHPLQVAWLAHGAAQCGFCSPGFIVSAKALLDQNTSPTREDVRDWFQKHRNACRCTGYKPLVDAVMDAAAVLRGDMKVNELLFKIPEDGRIWGTKYPRPSGIAKVTGTLDYGADLGIKMPEGTLRCALVQAEVSHARILGIDTSEAETMPGVAKVVTHKDIKGKNRITGLITFPTNKGDGWDRPILCDDKVYQYGDAIAIVCADTEEHAKAAAAKVKVDLEVLPAYMSAPEAMAEDAMEIHPGTPNVYFEQKIAKGEETASYFEKADVVAEGDFYVGRQPHMPIEPDVGFAFFNEDGKLCIHSKSIGLHLHLYMIAPGLGIEPENVIMVQNPAGGTFGYKFSPTMEALVGAACMATGKPVYLNYTWYQQQTYTGKRSPFFMNVRFAADKQGKLLAMESDWSVDHGPYSEFGDLLTLRGAQFIGAGYDIPNIRGEGRTVCTNHAWGSAFRGYGSPQSEFASEVLMDMLAEKLGMDPLELRYKNAYRPGATTPTGQNPEVFSLPDMLDTARPKYKAALEKAAKNSTAEVKRGVGISLGVYGCGLDGPDTAEVDAELHPDGTVSIYTTWHDHGQGADIGALTTAHEALRPLGIAPENIKLVLNDTEFCPNGGPAGGSRSQVVVGRGIKAACELLLGGMRKSDGTYRTYQEMVDEKIATKYNGKWTAPCTDCDTNGQGNPFAVYMYGIFMAEVAVEVATGKTTVEKMTMIADVGKIVNKLAVDGQMYGGVAQAIGLALTEDFEDIKKHSTMKGAGFPYIKQVPDEIELIYHESDRPEGPFGAAGVGELPLTCPHAAVINAIYNACGVRITRLPALPEKVLAGLQAKA

SEQ ID NO: 4820 - protein, 310 aa, Bacillus licheniformis ATCC 14580
MRAVQNIAELIGETPLVKLNRVQPENAAQVYIKLESFNPSGSVKDRAAYQMILDAEEKGLLKPGSTIIEPTSGNTGIGLAMNAAARGYKAILVMPDTMTKERINLLKAYGAEVVLTPGDERMPGSIKKAQELARQIPGSFIPMQFDNEANPEAHRRSTALEIARAIEEIGKPLAAFVATAGTGGTITGTGEKLKALFPGITVHVAEPAGSPVLSGGKPGKHKLVGTSPGFIPNILNENVYDEILKIKDEEAYEMTRRLAREEGILVGPSSGAACFAAVETAKKLPPDKVVVCMTADTGERYLSSDLFQFD

SEQ ID NO: 4821 - protein, 156 aa, Thermobifida fusca YX
MPIEVGQNAPDFELADQHGQTVRLSDFRGRSRVAVVFYPLAFSGICDKELRQLHECMSEFTARSVQPLAISVDSMFAHRVWADREGVDFPLLSDFWPHGAVAQRYGVFDETKGVALRGSFLIDTEGVVRWKVVNPTFQGRDMDDYRQAFADLGWNP

SEQ ID NO: 4822 - protein, 202 aa, Rickettsia conorii str. Malish 7
MNMSVFVGKTAPDFTAKAIMPNNNIDDKFKLSNYAAGDNIVLFFYPLDFTFVCPSEIIAFHNKLGEFTERRTKVVAVSVDSHFSHLAWKNTPHNKGGLGQVQFPMVSDIKKDISSKYNVLNEDGVALRGTFLIDKDFIVRHMLVNDLPIGRDINYTLKVIDALTHHQKHGEVCPAGWHKGEEAITPSHEGIAHYLSSHAEKL

SEQ ID NO: 4823 - protein, 172 aa, Serratia marcescens
MMLRIKSVCLRDSFTMEINVNGRVVPLGDISPDTPLLYVLRNDLQLNGPKYGCGLGECGACTVLIDGVAARSCSMPLSAVGKKSVTTLEGLSTPEALHPVQQGFIDEQAAQCGYCTNGMIMTLVALFEREPEADEQTIKKELAYNLCRCGTHIEILHAAERARDLLAARRQA

SEQ ID NO: 4824 - protein, 431 aa, delta proteobacterium MLMS-1
MNICMFTNTYLPHVGGVARSVSCFEEDLRRLGHRVLIIAPTFPDQPENEDPARVLRVPAIRNFNGSDFSASIPAPLLIHKRVDEFAPDVIHSHHPYLLGDAAMRAGRRRHLPVIFTHHTRYEEYTHYVLASKTMQKFVINLATAYANGCTRVIAPSDSIAELIKERGVTAPVEVIPTGVDCQRFQQGEGGRFRQQAGIAGDVELIGHVGRLAPEKNLDFLAGAVKIHLRQNPRAKFLVVGDGPSAPELKASFARDGLADRLIMTGKKTGDDLIDAYCAMDVFVFSSHSETQGLVVAEAMAAGCPVIALAASGVREVVEDNRNGRLLPAAAAAEEFAKALSGCFADGELAARWGQNAQATAREFDRLKTAQKLLDLYQRARQQQLKTAQEYHRFFEGWEHLLAGVKTEWDMLSSKVGAIADTFGTDDNGHRQ

SEQ ID NO: 4825 - protein, 189 aa, uncultured marine bacterium 582
MGGNNHLTKLRNDLSSTGPRKSELGTRGMLQLNMKVNGVPVSGQAEGRTLLVQFLRDRLGLTGTHIGCDTSQCGACVVHVNGDAVKACTMFAAEAAGAEVSTIEGQANADGSLNPIQQAFQDHHGLQCGFCTPGMVMSATALLNQTPKPNEHMIRTYLEGNMCRCTGYHNIIKAVLAASGQGVSGPDPR

SEQ ID NO: 4826 - protein, 406 aa, Bacillus clausii KSM-K16
MNIGIFTDTYFPQISGVASSIATLEKELSARGHRVYIFTSTDKAADPEQEEGKVFRFSSLAVGFVPERRLAYAGIRRATKLMKELNIEIVHTHTEFTMGCLGKHLAHKCKLPHIHTYHTMYEDYVHYIARGKLLSPKMVGRLTKWFCRGADAVIAPTEKVKTYLRRYKVSEPIYVIPTGVSVKQFKRSEASLVDVLALRKKLAINESDKVIISIGRMAEEKNMEALLYAIKSLESELDHVKTVMVGDGPVRKSLEALAVSLGISEHVRFTGAVEWNQIHHYYHLGDLFVSASTTEAQGLTYIEAMASGCIVVAKSDPSIKRIVLDGTTGFVFKEDEDLGPLLRRLLHSSHLSKVRKAAKKQIQPLTAEAFGAKVEQTYFELAKNKKIENSSPKLRQAILYRKEQSL

SEQ ID NO: 4827 - protein, 300 aa, Burkholderia thailandensis E264
MAYKTIEDTIGNTPLVQIVRLPDDEIRARNNVILAKLEGNNPAGSVKDRPALSMIRKAEERGRIKPGDTLIEATSGNTGIALAMVAAIRGYKMVLIMPEDLSVERRQSMAAYGAEIVLTPVKGGMEFARDLADQMQREGKGVILDQFANPDNPLAHYEGTGPEIWRETEGRITHFVSAMGTTGTIMGTSQYLKERNPAVEIVGAQPEEGSRIPGIRKWPEAYLPKIFDRSRIDRVENVSQAASEAMARKLAAVEGIFCGISSGGACEVALRVARQVENATIVFVVCDRGDRYLSTGVFPA

SEQ ID NO: 4828 - protein, 328 aa, Prochlorococcus marinus str. NATL2A
MSRIYEDNSFAIGHTPLVKLNSITKNAKATVLAKIEGRNPAYSVKCRIGANMIWDAEKKGLLNKDKVIIEPTSGNTGIALAYTAAARGYKLILTMPESMSIERRRMMAVLGAELILTEAAKGMPGAIAKAKEIADSDPKKYFMPGQFDNPANPEIHFKTTGPEIWDDTDGQIDVLVSGVGTGGTITGVSRFIKQEKNHSLLSVAVEPTHSPVITQTLNGEEVKPGPHKIQGIGAGFIPQNLDLSVVDQVEQVSNDESIAMALRLAQEEGLLVGISCGAAAAVALRLAEKEEFSGKTIVVVLPDLAERYISSVMFENVPTGVIKEPSLA

SEQ ID NO: 4829 - protein, 409 aa, Burkholderia xenovorans LB400
MRVAIVTHVVRHNDGQGRVNHEIARAALDENIGVTLVASHVAPDLLAHPNVRWVPVKIGRWWPTNLLRQQVFAFRSAMWLRAHRREYDVLHVNGFITWMRADVNTSHFVHSGWFGSKYYPFGLTKGVWSAYQSVYTRCNALLERWAYRRSKVITAVSQKVADEIRAIGLTPDNRVDVIYNGVDTQGFAAATGDREKFGLPKDAFLLLFVGDLRTPRKNLGTVLAALRFLPEHVQIAVAGFLPGSPYPEQAKALGIAHRVHFLGLVKEMPVLMHSVDAFVFPSRYEAMSLSLLEAMAAGLPVVTARTAGGAEIITPECGIVLDDPDDPKALAEAIARLAGNHDERRAMGVAANELATGFGWARMAAQYIALYRQLAGQQKDRRRSEAEAAAVARNDALTLNTLAGQKSAE

SEQ ID NO: 4830 - protein, 306 aa, Myxococcus xanthus DK 1622
MKVNNILETIGNTPHVRINRLFPSRVTVHMKLERANPGGSIKDRIALSMIEDAEQRGLLKKDSVIIEPTSGNTGIGLAMVAAVKGYKLVLVMPESMSVERRRLMAAYGATFELTPRAQGMKGAIARANELLSQVPNSWMPQQFENEANIEVHRRTTVQEILKDFPEGLDYLITGVGTGGHITACAEELKKVWPKLKVFAVEPTKSPVISGGQPGPHPIQGIGAGFIPKNLHKDALDGAIQVTEEDAFEFTRRAAREEGIFVGISTGAALSAVNQKLGEMTDGSRVLAFNYDTGERYLSIEPLFPAQ

SEQ ID NO: 4831 - protein, 317 aa, Solibacter usitatus Ellin6076
MANALPVPHLARTQAEPLLATVGNTPLLRLERIPREFPGIEILAKAEYFNPGGSVKDRAAVNMVLDGERSGKLNHTRTILDSTSGNTGIAYAMIGANRGYHVKLVLPGNASEERKRILKAYGAETIFSDPGEGSDGAILLCRQIYREDPDRYFYPDQYNNPANWKAHFDGTGPEIIKQTNGTITHFVSAMGTSGTFTGTTRRLRRDLPEVKCYSAQPSSGFHGLEGLKHMPTAIRPGFYDDTLADGNLWIETEDAYRMVRRLAREEGLLVGISSGCNVHAATLLARDIAARGETATIVTVLCDSAEKYLSEHFWDEE

SEQ ID NO: 4832 - protein, 198 aa, Candida glabrata CBS 138
MVAQVQKPAPTFKKTAVIDGMFEEVSLDKYKGKYVVLAFVPLAFTFVCPTEIVAFSEAAKRFEALDAQVLFASTDSEYSLLAWTNVARKDGGLGPVDIPLLADTNHKLSRDYGVLIEDEGIALRGLFIIDPKGIVRHITINDLPVGRNVEESLRLVEGFQWTDKNGTVLPCNWTPGSATIKPTVEDSKEYFKEANSKN

SEQ ID NO: 4833 - protein, 274 aa, Zea mays
  misc_feature (93)..(93): Xaa can be any naturally occurring amino acid
  misc_feature (111)..(111): Xaa can be any naturally occurring amino acid
  misc_feature (127)..(127): Xaa can be any naturally occurring amino acid
  misc_feature (151)..(151): Xaa can be any naturally occurring amino acid
MASVASSTTLISSSASVLPATKSSLLPSPSLSFLPTLSSPSPSASLRLARPSPLTSIRSSSRRSFAVKAQTDDLPLVGNRAPDFEAEAVVDQXVIRVKLSEYIGKKYVILXFFYPWDSTFVCPTEIXTAFRGPGCAEFGKLNTPRGVRGLXCDDRGVSHLAWVQTDRKSGGLGDLNYPLISDVTKSISKSFGVLIHDQGIALRGLFIIDKEGVIQHSTINNLGIGRSVDETMRTLQALQYIQENPDEVCPAGWKPGEKSMKPDPKLSKEYFSAI

SEQ ID NO: 4834 - protein, 110 aa, Pseudomonas aeruginosa
YVEYDVGFDDDGRLHGIQIDLAGNCGYSPDLSGSIVDRAMFHSDNAYFLGNATIYGHRCKTNTASNTAYRGFGGPQGMVAIEEIMDAVARSLGKDPLEVRKLNYYGKDER

SEQ ID NO: 4835 - protein, 151 aa, Wolbachia pipientis
MSNIVHLNKNNNRDNFSVRGLQRAVDDIFDSFFTGWNPELSKRGSSLLPVCDLYETKESYCLSLELPGIPKESIDISISGDNLIVKGEKTCDNESKDKQFYHKERYYGSFYRSIQLPTNVEQDKVSANFLDGVLHVTIPKSEKHIKKIDVK

SEQ ID NO: 4836 - protein, 332 aa, Xylella fastidiosa 9a5c
MCTSSLITSTETFMTIYNTILDTIGHTPVVKLNRIAPAHVDLYIKVESFNPSGSVKDRLALAIILDAEQQGLLKPGDTIVEATSGNTGVALAMIAAARGYTFVATMVETFSIERRKLMRAYGAKVILTPAAERGSGMVRKAKELAEQHGWFLASQFSNPANPAYHRNTTAAEILRDFAGRRLDHFVSGWGTGGTLTGVGEVLKIARPDITITASEPASAALLQGKEWQPHKIQGWTPDFVPEVLNRSVPHHILSVTDDDAITVARRLAAEEGVFSGISGGATVATALQIAQQAQPGAVILAMLPDTGERYFSTPLFADINEHSDDAWLASLG

SEQ ID NO: 4837 - protein, 367 aa, Torenia hybrid cultivar
MARAGPLTLTSLALEKSLHEKFIRDEDERPNLAYDQFSSQIPLISLSGIDDECNKRKELCKRIAQACEDWGIFQVIDHGIDLKLVNDMTRLAREFFDLPDEEKLRFDMSGGRKGGFIVSSHLQGEVVQDWREIVTYFTYPIKGRDYSLWPDKPEAWRAVTETYSSQLMCLGCKLLGILSEAMGLEREALTKACLNMDQKVVVNFYPKCPQPNLTLGLKRHSDPGLITLLFQDNVGGLQATRDGGKSWITVQPVEGAFVVNLGDFAHYLSNGRFKNADHRAVVNSNTNRMSIATFQNPSPEAIVYPLKIGDDGKPIIEKPITYGEMYKRKMAKDIELAKLKKLAKEQKLQEEVVNNVEDHHLNNGKTK

SEQ ID NO: 4838 - protein, 456 aa, Xanthomonas axonopodis pv. citri str. 306
MAIHSSVLELIGNTPIVKAQRLDTGVCELFLKLEANNPGGSIKDRIGLSMIEAAERRGDLKPGATLVEGTAGNTGLGLALVAQQKGYQLILVVPDKMSREKIFNLKAMGANVVLTRSDVAKGHPEYYQDLAARIAAETPGAYFINQFGNPDNPAAHEFGTGPEILAQMDGQLDAIVFGCGSSGTMTGLSRAFASASPHTELVLADPVGSILTQYIEEGTVSEKSGSWLVEGIGEDFLPDISDFSRVKKAYSISDAESFHTARELLAKEGILGGSSTGTLLAAALKYCREQTTPKRVLVFVCDTGNKYLSKMYNDYWMLDNGFLERPQHGDLRDLILRPYNKRDTVVVGSKDLLTTAYQRMKLYDVSQLPVIDDGELVGIVDESDVLLHVYGDEARFRDPISTAMVSKLDRLDVASPIEALLPVFDRGQVAIVMDGTQFLGLITRIDLLNYLRRRVQ

SEQ ID NO: 4839 - protein, 380 aa, Bacillus cereus G9241
MRVAIFTDTFTPQMNGVAKTLERLTRYFQKEKIAYSVFAPQHTAEDNFVANVNKMRSIPLTILYPECRFSFPTPRIKRELLSFKPDMIHIATPFNMGLCGLYYAKKLNIPVVGSYHTDFDAYLRYYKIEFLSNMLWNYLKWFHSHMQKNFVPSPETLHQLKHKGFQALSIWGRGVDCNLFHPSYNTDLFRKKYNITAKYVLSYVGRIAPEKDIDMLKNLILKSAHTRSDIHWLIAGDGPLATSLREDIPKTNVTFTGYLQGADLAEAYACSNIMVFPSATETFGNVVLESLACGTPVIGANSGGVKNIITDGKTGVLCPPKNEDAFLSSIYSLLQNEEKLEQMGIAASSYAKSKSWDEIFRGLLNEYEEVLQHNASELLA

SEQ ID NO: 4840 - protein, 383 aa, Mycobacterium marinum M
MRVAIVAESFLPNVNGVSNSVVRVLEHLRRTGHEALVIAPDNPPGEPRADRLHDGVRVHRTPARMFPKVTTLPLGVPTPRILRVLRGFEPDVVHLASPALLGYGALRAARRLGVPTVAVYQTDVPGFAASYGIAATSRAAWAWFRHLHGLADRTLAPSTPTMQTLLDQGFPRVHRWARGVDLIRFAPSARDESLRRRWSPDGRPIVGFVGRLAPEKHAERLAGLAASGAVTLVIVGAGVDRRKLELAMPTAVFTGALYGDELAAAYASMDVFVHAGEHETFCQVVQEALASGLPVIAPDAGGPRDLVTPQRTGLLLPVDGFETQLPAAVAHLVHERQRYSQAARRSVLGRSWSVICDELLDHYAEVLAPTGRAQDWLWRRRRA

SEQ ID NO: 4841 - protein, 406 aa, Pseudomonas fluorescens PfO-1
MASADTEVMTTALHITLISETFPPEINGVANTLGRLCDGLRARGHRVELVRPRQADDPQRTEDDSLLLCRGWPLPGYPGLQWGQSSMHKLLRRWTRQRPDVLYIATEGPLGLSALRAARHLGIAVVSGFHTNFQQYTHQYGLGLLTRLLTHYLRWFHNRSALTLVPSVSQRLELERRHFERLALLSRGVDSQLFHPAKRLNALREQWGLGEQDIAVIHVGRLAPEKNLGLLKRSFDKLAGTYPQRNLKLIVVGDGPQRLALEKELPKAVFCGSQRGEALAAHYASGDVFLFPSLTETFGNVVLEALASGLGVVAYDQAAAAQHIRHGYNGVLAMPGDEEAFCEAAVWLLEEDERLRCVRLNARQHASRQGWAAIVEQFENHLLGACRDLRDKPPTTIKPASSTPHG

SEQ ID NO: 4842 - protein, 437 aa, Zea mays
MAIGGKEVKDDLEEAPPPVLDEAMRPRRVALFVEPSPFAYISGYKNRFQNFIKHLREMGDEVIVVTNHEGVPQEFHGAKVIGSWSFPCPMYGKVPLSLALSPRIISEVAKFKPDIIHASSPGIMVFGALAIAKLLGVPLVMSYHTHVPVYIPRYTFSWLVEPMWQVIRFLHRAADLTLVPSAAISKDFETAQVISANRIRLWNKGVDSASFHPRFRSHEMRVRLSDGEPEKPLVIHVGRFGREKSLDFLKMVMERLPGVRIAFIGDGPYRGELEKMFEGMPAVFTGMMQGEELSQAYASGDVFIMPSESETLGQVVLESMSSGVPVVAARAGGIPDIIPEDQEGRTSFLFTPGDLDDCLGKVQQLLTNREFRENMGRTARSEMEKCDWRAASKTIRNEFYNAAIWYWRKKHAELVKPLQWLAQMFLPAPEVRSIMQC

SEQ ID NO: 4843 - protein, 344 aa, Mesorhizobium loti MAFF303099
MPRSVIDAIGNTPLIRLNKASEETGCEILGKAEFMNPGQSVKDRAGLFIIRDAERRGLLKPGGVIVEGTAGNTGIGLTLVAKALGYRTVIVIPDTQSQEKKDTIRLLGAELIEVPAVPYKNPNNYVKLSGRLAEQMARTESNGAIWANQFDNVANRDGHIRTTAEEIWAQTGGKVDGFVSAVGSGGTLAGVAFGLKAKSKDVKIALADPLGAALYSFYTSGELKSEGSSITEGIGQGRITANLEGFTPDFSFQIKDEDALPIVFDLIQEEGLCVGGSTGINIAGAIRLARELGPGHTIVTILCDYGTRYQSKLFNPEFLREKNLPVPGWMELQSKISVPFEKVE

SEQ ID NO: 4844 - protein, 223 aa, Picea sitchensis
MSLKLGDKVPDFVADSSEGPIKFYEYIDNSWAILFSHPNDFTPVCTTELGAVGKLMPEFEKRGIKVLALSCDEAERHKAWIEDIESFSEGKGKVTYPILADPEREVAVKYGMLDPDEKDKAGMSVTARAVFVIGPDKRLKLSILYPATTGRNFSEILRVIDSLQLTANYSVATPVDWKHGEDCMIVPSIPNHTANELFPKGFRTVPLPSGKEYVRLTPQPNLP

SEQ ID NO: 4845 - protein, 361 aa, Cyanobium sp. PCC 7001
MARSLFGALLPVLQRTSNPVLHSPSCLPCRLDRELNASDADLLHLHWVQGEMLSIEAIGRLRKPLVWTLHDCWAFSGSEHYPNGLEDLRYEQGYHHHNRPPCHHGLDLDRWCWQRKRRHWRRPFQLVCPSRWLAGCVQRSALLGHWPVRVIPYPLPTHIYRPWPKEMARQLFGLPAEGPLLLFGALGGSRDPRKGWDLLEAALLQLAPTLPGLQAVVFGQSQPPDPPRVGLPIHYVGTLHDDQSLALLYSATDVMVVPSRMDNLPQTAIEAQSCGVPVVAFNTSGLPDAVEHQRTGYLAEPFDPADLAHGIGWVLENSEGRERLGRQARARAIQLWSPQRIANLYAALYEEVLSATFTSMG

SEQ ID NO: 4846 - protein, 337 aa, Spinacia oleracea
MVVLSHVALDQFMKTCKPIDTHLFPTVIPTIDLNSPDVKSLIVKACKEFGFFKVVNHGVPIEMTRQLEDEASKFFSLPQGLKESAGNPNPFGYGNKKIGRNGDVGWIEYLLLSASDEFISQTCLSIYPDNPDVFRCALNNYISKMKKMGVRVLETMAEGLNLKGEDRYALSNLIKDSKSDSYFRLNHYPPRPEAFEGINGRNLVGFGEHTDPQIISVLRSNKIGGLQISLNDGTWVSVPPDDNSFFILVGDSLQVMTNGRFKSVKHRVLADNMKSRLSMIFFAGPPLCQKIAPLPCIMQKGEESLYEEFTWCEYKKSAYKSRLSENRLLRFVKRNHN

SEQ ID NO: 4847 - protein, 212 aa, Burkholderia thailandensis E264
MSLRLGDIAPDFEQDSSLGRVKFHEWLGNSWGVLFSHPADYTPVCTTELGLTAKLKGEFEKRNVKVIALSVDSVESHKGWIDDINDTQATSVGFPIIADGDRKVSELYDMIHPNANETLTVRSLFVIDPNKKVRLIITYPASTGRNFDEVLRVIDSLQLTDNYKVATPGNWKDGDDVVIVPSLQDPEELKQRFPKGFKAVRPYLRLTPQPNK

SEQ ID NO: 4848 - protein, 421 aa, Streptomyces ribosidificus
MRVLRLTPFFHHDCVTAWPAEFDAVGGMQVQILRLSRELADRGVEQLVMTVGFPGLPRERVDRPGLTVRVTRAPLPPLRSELTGIVGLNQAWLAAALAACLPLRRRWRPDLVHVHADGQLWALLAGPLVSRMVGAPYVLTLHCSRLAVYEPMSRFDRLQHRLVDAAERYALRHACRVSALTERTADTVARLLPLDRAVIDVLPDSVGDVRPVPRGRAEEHVRALGVPAGVPVVGWVGRVAHEKGWRDFVAMAERWDSDSGAPGAVFLVVGDGPQRERMRDAVVAAGLADRFVFTGFLPHDAVPSLMTALDVLVMPSAHEELGGSALEAMVCGTPVAGYAVGGLRDTVGSVTPGLLVPRGDVAALARAAGEAVTDAERHRKTVASAVPDLLGRYGADTVERALEHYRRALGRTSGGGAGWTP

SEQ ID NO: 4849 - protein, 381 aa, Leptospira interrogans serovar Copenhageni str. Fiocruz L1-130
MILGIDASNIKSGGGVTHLKELLGNAKPEKYGFDRVILWSVEETLCQIEDKSWLEKVNYSKFFKSRIYRWYWQKFKLPKLAQNSGCKLLFIPGGSFSGKFRPFITMSQNLLPFEWGELKRYGLSFHTLRLLLLYFFQGTSFRKSDGIIFLTKYAKDLISKKLNLKNSNIIIPHGINKKFFHNPRKQNILLGKKKRPIELLYVSFIGAYKHQWNVLEAVSDLNCAGIPIHLSLVGSHNEKASVNKLFQKINHLNSSEKIISLYPNVSYKKISEFYLNADLFIFASTCENLPNILIEAMASGLPILSSKYGPMPEVLDDAGLYCDPLSVEDIKTQLKKLIFSKELRENLSLKAYKKAKQYSWKRNADITFDFFYKIVKAYKKY

SEQ ID NO: 4850 - protein, 329 aa, Spinacia oleracea
MVVASPNPLKRSKKTKAMGVPTIDLSLKYQQRSTLTDLIVEACEDFGIFKVVNHGISTEVISALENHGLDFFSKPTPEKHLVVGPTVPKPFGYGFRNIGNNGDVGDLEYLLLHANLSSTHPPLFGEAVDDYVGAVADLSCELLDLMAEGLWVSDKTIFSKLIRDVQSDSLLRLNHYPPLKNKDSFINGSGERIGFGEHSDPQILTILRSNDVGGLQICMPDGLWVPVQPDPNAFYVMVGDALQVLTNGRFGSVKHRAMANNSTTKARMSMNFFGAPPLNATISPIQEMVSPMNPNLYKPFTWGEYKRAMHSSRLSDCRLNLFKRRINDQ

SEQ ID NO: 4851 - protein, 187 aa, Exiguobacterium sibiricum 255-15
MSLIGSEVKPFSASAFHNGEFVDLTDANLRGKWSVVCFYPADFTFVCPTELEDLQNQYATLKALDVEVYSVSTDTHFTHKAWHETSETIGKIEYVMIGDPSHVISRNFEVLNEQDGLADRGTFIIDPDGVIQTVEINAGGIGRDASTLVNKIKAAQYVRNNPGEVCPAKWEEGSATLTPSLDLVGKI

SEQ ID NO: 4852 - protein, 478 aa, Oceanobacter sp. RED65
MIEININGKWQQVSQIDPNMTLLGYLRTIEGQNEIKEGCASGDCGACTVLMIEDGKEASDGRLALQPINSCITLLASMHKRAVYTLPTLSSQSDLHPAQKAMIECHGSQCGFCTPGFVHSMAAMHHNHENDVALSEEEITEELAGNLCRCTGYRPIIEAAMKMQQYQVPKDARIAELDSGVKIFDPVEPTRESIVSLNERVFIPETLEALNQLLKQYPDATLWAGGTDLGLELTQAYKQFDHIICLHRIAQMSEIQQSKRTIEIGAMVTYNQAQSLFESEFPSMAQLNKRIAATQIRNLGTLGGNIANASPIGDTPPVFLALQAVLKVDGVNGPRNIAIDDFFQGYKQTALEKGEYLASIEVPKLNANEHFVTFKVSKRKDDDISSVLMAAKITTKGDEIETAKVAFGGMDAIPRRCVEVEQALQGKSFALSSFEVAAEKISDSFSPMSDVRATAQYRLDVATNLIIKMGLELTGAAL

SEQ ID NO: 4853 - protein, 645 aa, Glycine max
  misc_feature (134)..(134): Xaa can be any naturally occurring amino acid
  misc_feature (216)..(216): Xaa can be any naturally occurring amino acid
MTYIGWYSPLKPSFTYLKCRKKDAISSYIHPYINKKLLQIRDGVPLEDIICSSDEGNSSLVESFGGSACSSTQNQNLTRVDFSKPDEVNMEQLVRAIKMGLFEFSPQDELEGELVYFQHRLLQNAVAKRGILIXLIYSVAKSLPHEIDKAHQQRWDEVIVNQYLRDLREAKKQGRKERKHKEAQAVLAAATAAAAASTRALRKDNLDESMQQENLXKIGYSNGTLPAARRRQKGVAVTRTSSEKYSEFCMPTSDLSKEQCKSCDICRRSEFILNPILVCSGCKVSVHLDCYRSVKETTGPWYCELCEDLSSRSSGAAAINFWEKSVVECALCGGTTGAFRKSSDGQWVHAFCAEWVFESTFKRGQIDAVEGMETLQKGTTFHPSCARRAGLYMNVRPTGGKAQHKAYCEKHSLEQKAKAETQKHGIEELKSIRQIRVELERLRLLCERIVKREKIKRELVISSHDILAFKRDHVARSVLARSHFILPDGSSESATTSLKGNTEGYRSCSEPLQRSDDVTVDSSVSAKRRVRVAISMDTDPKLDDDCSTSQSRYNHKILDRSQFSGKKVPQRAAASRNISDEGGWRSKSRKHSETFGKELVMTSDEASMKNSMLPKGYAYVPADCLSNEKHSNEDVYASEPVEHDR

SEQ ID NO: 4854 - protein, 394 aa, Blastopirellula marina DSM 3645
MSEMRIAMVTRRFWPLVGGAEMVMANLAQQMRRQAADVRIVTARWHKAWPERIVHREIPILRLPNPQLRGWGTLRYMMSLGKYLQKHQAELDAVYVSMLKHSAYMAVERLKNTSTPIVLRAEGGGETGDCRWQAEANFGLRIRAVCQQADAIVAPSAAIREELLAAGYDPAKLHFIPNGVAIPSAGNQQRRFDARMALQSAQPLFSFRNDTPLAVYTGRLHPKKGLLTAIEAWPHVLQRFPNAKLVLVGEGPQESQLRERINAFGLQERVFLPGVFDDVSDLLDAADLFLLPSHEEGMSLSLLEAMAAGLPVIATDIPGNRQLVESGRNGLLFPVDDATALQAEIINVIHQPRAAKRLGEAARADVTQKYSLTAAATRHLNLFAELRERKRPES

SEQ ID NO: 4855 - protein, 470 aa, Rhodococcus sp. RHA1
MTILDPPTVDAASLGVYDSITDAIGNTPLVRLNRVTGSISATVYAKLEFLNPGGSVKDRAALAMIHAAEESGELLPGGTVVEGTSGNTGVGLTLVAAARGYRSVVVVPDKTSVEKIALLRAHGAQVHVTPGGRPSHHPEFVRNVATRLAAEIPGGWLAGQYDNPANPDAHRTTTGPEIWRQTRGRVTHFVAGVGTGGTITGTGEFLTKISGGAVKIIGADPETSVYGGGDGRAWYIESVGHFLHPQTEHDEWPDSYHPDVVDRLERIPDIEALTVLHRLAREEGLLVGGSAGTAVAAALRVARTLGPDDVVVVIVPDSGRAYLSKYFDNEWLGRLGFPLYHAATGPVVRDALGGRGIAPRAVPSTATVAEARELLADTPALPVVLARPVTGPVVVAEIQGTVSAAALSDAPDDDPIGVHVDQPLPVVGVTEELSVAVRRIAGHRGPVVVSENGRAVVLVDADVVRTSPVA

SEQ ID NO: 4856 - protein, 1003 aa, Debaryomyces hansenii CBS767
MGVPALFRWLSRKYPKIISPVVEDDVTQEIGAAQFSDPNPNGELDNLYLDMNGIVHPCSHPEHKLPPETEDEMFLDVFKYTDRVLLMARPRKVLMIAVDGVAPRAKMNQQRSRRFRSAQDAKIAHEEKERQIRERESRGELIDDAIKGKKSWDSNAITPGTPFMDSLAQALRYWVAYKLATDPGWANLQVIISDATVPGEGEHKLMSFIRLQRLDPEYDPNTKHCIYGLDADLIFLGLATHEPHFRVLREDVFANQSRQMRISDQLLMTQDQKDSIAEQDAKKPFLWLHVNVLREYLEIELYNPHLSFPFDLERAIDDWVFMCFFVGNDFLPHLPSLDVRDNGIDILVNCWKRMLPKLRDYITCDGNLNLESVEKLLSSLSYKEDEIFRKRHEGEKRREENDKRRKLAQEEEKALKNQYIPQVSKGSDKAPLTADINMPLLSTSGDAVEGYAQLSNKDIVENRDVITKANMSNADAAAALKKLLDSKNNKESDKNVSASAAIQEQQNKLDINTTENSKKRPIDQVEAELPKPDENGDSVRMWEPGYRQRYYQSKFGVVSEEEINKIRRDMVRCYLEGISWVLLYYYQGCPSWQWYYPYHYAPFAADFVNINDIIGEQGIKFTLGEPFKPYEQLMSVLPAASGHNLPEVLRILMSDPSSEILDFYPEEFQIDMNGKKMSWQGIALLPFIDENRLLEALEKRYHLLTDDERERNTLKNEVLFISNQNKNYKRFYNELYDNNVKELKFRFSRSSLAGTVIKNEYFVPDGITKFPLSEGDMPDLNNIEFFQSSYKMPTKKMGKSMLINGYISHTRTLTQEDRDSILHGNQRNGGYNRFRTPNDNSGYVNKGPSGKEDYLIYSMRRGGYRAFMHNLKNQNQQHQQPVPMNAMANNSYDNQYNSYSNNNNYNNNYNGGYPNQSNNNYSNQNSYNNYSNQNSYNNYNNQNSYNNYNNRNNHGNYNNYNRYNNQGSNYDRQGQGNASSNRSGYIPAPNRTGNFRNRNGYNR

SEQ ID NO: 4857 - protein, 408 aa, Synechococcus sp. WH 7803
MKLLALTNLYPPQELGGYGRSIADFVWGLKQRGHDLSVLCSDAPHLGPSDTQGPSGERVDRGLLLKGSYEGGVRPLQDSERCRRIDRHNAEAIQKIWQQRGPFDGVLVGNIDLLGVEVLGSLLAHQVAVLHHIGFVNPPFHPQHLPRSSDYRLVAASAAVAQALSSAGFQGSASGSLPVVYPGVRCELFGPAVTGRPLPAPLNGDRLLMPLGSQRHPLKVCFAGLMMGSKGAHTLVQALVTLNQKGLHVEGHLAGGDFQAGYQQQLKALLSQHGLDAVRFTGQLQRRSLSRFYGLHHVCVFPSIHPEAFGIVGAEAMASGLALVSSGVGGAAELFVDQVSGLRFQAGNADDLASRLEELCHDPSRLVTLAQAGACRAREQLSVRESARRLEALFQPSSAPTQDALQQF

SEQ ID NO: 4858 - protein, 219 aa, Bradyrhizobium japonicum USDA 110
MTLPIGTTAPDFEAETTEGKIKFHDWIGNSWALLFSHPKDFTPVCTTELGALAKLKPEFDKRGVKLMGLSVDPVDRHAKWSEDIKETQGAAPNYPMIGDTDFNVSKLYEMLPASTSGDPLTRTPADNQTVRNVFIIGPDKKIKLVLVYPMTTGRNFQEILRVVDSLQLTAKHRVATPADWTQGEDVIIAGSVSNDEAKTIYPQGWKEPKPYIRIVPQPK

SEQ ID NO: 4859 - protein, 367 aa, Blastopirellula marina DSM 3645
MKRLLLIIPTLDRGGAEKQLTMLAAGLPRDQFDVHVCLLTRSGPLAETLRAHDVPIIEIHKRRKLDPVAYLRLKKEIKRLRPEIVHTWIFAANSYGRSAAQTVKVPHIICGERCVDPWKQGYELAIDRYLDRKTDKIAVNSTGVEQFYVEKGRNAKKFVVIPNGIDATPPEPLQTREQLLRQLQLPYDARLLIAVGRLWPQKRLKDLIWSIDILGRIRKDVHLLIVGDGPQRDRLMKFSRQNHTQNNVHFLGARDDVPQLIAHADCFLLASGYEGQSNALMEAMVAGVPAIVSDIPGNRDLVIPEKTGFLIPLGQRAEYARYVNRVLDDNDLHQRLGQAAQERIAAEFSIPQMIERHVALYNDVTSA

SEQ ID NO: 4860 - protein, 148 aa, Cyanothece sp. PCC 8801
MSLVRWEPFREMEALQREMNRLFDAFSPTTPLEGRGDGLTFIPAAEMTETPEAIQLKLEVPGLEPKDLEVEVEADSVTIKGERKSETKTEENGVTRTEFRYGSFHRVIPLPSRIENTNVTAEYKDGILNLTLPKVPEERNKVVKVNIG

SEQ ID NO: 4861 - protein, 205 aa, Photobacterium profundum SS9
MRSTKMVLVGRQAPDFTAAAVLGNGEIVDSFNFAEFTKGKKAVVFFYPLDFTFVCPSELIAFDKRFEDFQAKGVEVIGVSIDSQFSHNAWRNTAIEDGGIGQVKYPLIADIKHEICKAYDVEHPEAGVAFRGSFLIDEDGLVRHQVVNDLPLGRNIDEMLRMVDALNFHQKNGEVCPAQWEEGKAGMDASPKGVADYLSEHTADL

SEQ ID NO: 4862 - protein, 398 aa, Burkholderia xenovorans LB400
MRTHARCTQDDFSRSGIKMTASVTIFHNVVWSRHKGVVFSALHNISASGAIRYSMVQIADTEHDRVGFSDVDYSFHRYPMQKLFDGCYEDVPTMKLIARLTWEVLRTKSDLIVLPGYHRPEYWAMLAACIVTGKRRAVFCDSTARDRPKKLLTSIPKRVFFSLCDGYFGFGERSREYLLSLGAKRDKIFVPCQAAALPGSFSPERALVERVAARAGNPPVFLFVGRLSEEKGIGTLIEALAGLRRRIPAAKLRIVGTGPMADALHAKVAELELGDAVTFVGSLQDEPLTQEYYGATCMVLPSYSEPWGLVVNEALAHGCPAVVSESCGCVPELVIDGVSGYAFTAGDVAGLQRTMLKAMEAFADAGGTARRCMDVIRRFDPPSAAANIARGCALMLSD

SEQ ID NO: 4863 - protein, 434 aa, Mycobacterium smegmatis str. MC2 155
MRLATDLETPRRVAVLSVHTSPLAQPGTGDAGGMNVYVLQTALQLARRGVEVEVFTRATSSADAPVVPVAPGVLVRNVVAGPFEGLDKNDLPTQLCAFTAGVLRAEATHEPGYYDVVHSHYWLSGQVGWLARDRWAVPLVHTAHTLAAVKNAALAAGDAPEPPLRAVGEQQVVDEADRLIVNTEVEAQQLVSLHNADRSRIDVVHPGVDLDVFTPGSRDAARAVFGLPTDQKIVAFVGRIQPLKAPDILLRAAAKLPGVRVLIAGGPSGSGLAQPDTLVRLADELGISDRVTFLPPQSREQLVNVYRAADLVAVPSYSESFGLVAVEAQACGTPVVAAAVGGLPVAVADGVSGALVDGHDIGDWADTISEVLDREPAALSRASAEHAAQFSWAHTVDALLASYSRAMSDYRARHPRPAARRSGRRFSMRRGVRT

SEQ ID NO: 4864 - protein, 792 aa, Bordetella parapertussis 12822
MTTEHTGAEVGAGSRQGVGARVPRKEDARHLHGKGNFVADMAMPGLCEVAFLRSPLAHARITDVRVPESVRDKVVLRSMMGDARDIAADSTLPTYQPSVQPPLASGKVRFVGEPVAMTFAPTRAEAEDHAELVEVDYDDLPVYADVASAQQATSDLVHEHWRDNVFVTLNADRDFDEHAARAEVVVKRKIDLARQCMVPMEGKAVLAYWDHQADQLVVISATQVPHMIRSVLAQCLDLEQGRVRVVSPDVGGAFGYKCVLQQEELCVAWLAKTYKRPFRFIEDRREHLTAGANSREHHYEMTAYADKRGKLLALDARITIDGGAYSVWPFTIGLEPGQAVGNLPGPYGFRGYRCETRCVATNKPGFVPYRGVARTGVCFAIELTMDAVAREVGREPWEVRLENLVQPEQMPYVNVTNKHFDSGDYPASLRKALEMIDIDGVRTRQARGEADGRRIGVGVATYTEQAAHGTSVFAAWGTPVIPGFDQATVRVTPDGGLEVRVGVHSHGQGMETTFAQIAHEILGIDVARIKVLHGDTGQTPFSTGTYASRSLVMSGGAVSQACKRLLPRMRHIAAHMLGVADDAVTLQDGIYRAGEKSVATGDVADAWYLRPQLLPPDVDPAGLEVNVGYKPKVDTGCFTYASHAAVVAVDPDTGAVEILDYVVVEDCGTMINPMVVEGQTIGGIAQGIGTAFYEETPYDANGQPLASTLADYMLPGPTEVPNMRLHHFETPSPHTEFGAKGMGEGGAIAPPAVLFNAVNDALRGLGAAELSRTPLTPIRVLQAIAQGAGEAA

SEQ ID NO: 4865 - protein, 351 aa, Parvularcula bermudensis HTCC2503
MTEPRAALGRRFQSILETIGATPVVKINRLSPEGVDLFVKAEFFNPGASVKDRLALSIIEHGERTGALKPGQTVIEATSGNTGIGLAMVCAAKGYPFVCTMIETFSIERRKLMRYLGAKVILTPKEEKGVGMVRKAKELAEANGWFLARQFETEANADIHEKTTGPEILADFDGHRLDAFVTGFGTGGTVTGVARVLRQHRPDTKIILSEPDTAQMLASGTPQERATDGSAAATHPAWSPHPIQGWSPDFIPLVLQESIDKKLYDALIPVKGEDGIHWAKRLAAEEGILTGISGGSTFAVAHDLAQQAEIGSAILCMLPDTAERYLSTPLFADISAEMNDEEVAIFNGPII

SEQ ID NO: 4866 - protein, 395 aa, Bordetella parapertussis 12822
MTMVQVTLEVNGRQVAHEAPPRMHLGDFLRDQARLTGTHLGCEHGVCGACTVLVDGQPVRSCITYAVACEGRQVTTIEGYDGDPVMARLRAAFTKYHALQCGYCTPGMLTTSRDIVLRLPDADEARVRVELSGNLCRCTGYMGIVGAVMSVLRDLREQPDAAVQALRAAAADGRLPAPRGEQPIAFQPFTPSAPAAAQAAPRPAAAASPASGKGNQIVDAFTVPFPAAEVWAFMVDLPAVAACLPGAVIEETDGQRVKGKIAIKFGPMAAAFNGAARLERDEEAMRAVFRGAGQDSLSQSRATGDIAYQVEAVSENETRVKVDLQYALQGPLAQFSRSGLVQDFVRRMIADFGKNVTARLRQPGGEALPQAQFNPVAMFFSVLWMRVKRWFGRGG

SEQ ID NO: 4867 - protein, 305 aa, Bacillus cereus E33L
MKLCENITELIGDTPVVRLSKFIPEDAADVYVKLEMFNPSRSVKDRAAYNLLHVAEENGLIKPGDTIIEPTSGNTGIGLAMNAAAKGYKAILIMPDNMSKERINLLKAYGAEVVLTPAEQRMPGAIAKALELQKEIPNSFIPQQFENPANPNIHRYTTALEIYEQMDGELDAFVATAGTGGTITGTGETLKEKLPNLYIAVVEPKGSPVLSGGVPGPHKLVGTSPGFIPKNLNTEVYNEIIQIADEEALTTMRNLARQEGLLVGPSSGASVYAAIMIAKRLGAGKKVLCIAPDTGERYLSMGLFE

SEQ ID NO: 4868 - protein, 311 aa, Desulfitobacterium hafniense Y51
MSKIARSLTDLIGNTPLLELSNYNRTTELEAKVIAKLEYFNPLSSVKDRIGYAMIKDAEEKGLLNKDTVIIEPTSGNTGIALAFVSAARGYRLILTMPETMSVERRNLLKALGAELVLTPGPAGMKGAIQKAEELAAEYQNSFIPQQFNNPANPEIHRQTTAEEIWRDTDGEVDIFVAGVGTGGTVTGVGEALKKKKPGVKVIAVEPADSPVLSGGTPGAHKIQGIGAGFVPGVYNSEVIDEIFQVKNEEAFETSRKLSKTEGLLVGISSGAAAYAATQIAKRPENKGKNIVVLLPDTGERYLSTVLFQEG

SEQ ID NO: 4869 - protein, 218 aa, Rhodococcus sp. RHA1
MTLQLGDTAPDFHADTTEGRIGFHDWLDGSWAVLFSHPKDFTPVCTTELGYLARIKPEFDRRAVKIIGLSVDHVDKHRDWATDIEQTQGVAPNYPVIGDSDFAVSKLYGMLPASTTGDPATRTPADNQTVRNVFVIGPDRKIKLILVYPMTTGRNFDEVLRVIDSLQLTANHKVATPVNWRQGDDVIIAGAVSNSEAKQIFGTWEEPKPYIRIVPQPV

SEQ ID NO: 4870 - protein, 421 aa, Streptomyces fradiae
MRVLRLTPFFHHDCVTAWPAEFDAVGGMQVQILRLSRELADRGVEQLVMTVGFPGLPRERVDRPGLRVRVTRAPLPRLRSELTGLVGLNQAWLAAVLTACAPLRRTWRPDLVHVHADGQLWALLAGPLVSRLVGAPYCLTLHCSRLASYEPMSRFDRLQHRLVAAAERYALRRARRVSTLTSRTADTVARLLPLDRALVDVLPDSVGDVRPVARPEAEEYVRSLGVPAGRPVVGWVGRVAHEKGWRDFVAMAERWDAGSGAPGAVFAVVGDGPQRERMREAVEAAGLADRFVFTGFLPHDAVPSVMTALDVLVMPSAHEELGGSALEAMVCGTPVAGYAVGGLRDTVGSVTPSLLVPRGDVAALTRAAGDAVTDAERHRKTVAAAVPDLLGRYGADTVERALEHYRLAVGRASGGGAGWAP

SEQ ID NO: 4871 - protein, 368 aa, Hyphomonas neptunium ATCC 15444
MRIMLVTDAWDPQVNGVVRTMKRVIAETEAMGHVWEIVHPGDGFMTMPLPTYPEIKLAMFARRKIRERFDAFEPDAVHIATEGTLGMAGRAVCLTEKHPFSTAYHTRFPEYVSARLPVPVSWGYSFVRWFHKYSGKVMVATPSLLDELRQQRFINLVSWSRGVDTELFNPAKRIEEGQPGDPFAGMKRPIYLNVGRVAVEKNIESFTGLDLPGTKVIVGDGPQLEELKRKYKDVVFLGAKFGDDLAAHYASADVFVFPSLTDTFGLVVLEAMAAGTPVAAYDATGPRDVIPGSGAGTITPVGGNLRQGVLDCLELSRETCRAYAETYSWRACAEAFIENLQPLPAPERKRFWQKIRIRRRRSPAGPGF

SEQ ID NO: 4872 - protein, 754 aa, Coccidioides immitis RS
MAVSDAVTYIIKETPLPPAPETHDIFDPCQWATLLSIADAIIPSIRRKRAAVPACHHAVADKDYDDAIALLVAGSNDPDRLALAQNYLEENAVAIPAFKESLCRTLALYVPPEARSALLRLLTLLNHRAFALPLTGSTVPFRLQPVHVRESVLRAWETSYFPALRRAHRSLVALCHKSWTSISPTLPKVLGLPRVPVHGKTGEGYPYTFLQFPAGDAMEIIETDVVIVGSGCGAGVAAKNLAEAGYRVIVAEKSYYFSENHYPMTAAAGTVHLYANGGAEISDDGSISVLSGSTWGGGGTINWSASLQTQSYVRQEWAKSGLDLFTSMAFQDSLDRVCDYMGASTDHIEHNFSNSVLLEGARKLGYNAKAVPQNTGNQKHYCGYCTLGCASATKQGPAVSFLADAARAGATFIEGFEVDKVRFDTRDPKRPKVAVGVKGTWRSRDANGLTHGQPLVSKKLIVKAKKVIISCGSLQSPLLLLRSGLKNSHIGRNLHLHPVMIVGAIYDHETRPWEGGILTSVVSDFENVDGTGHGTKIEALTMMPSFFLPSFTWKNGLDYKLFAANLRNMSGFISLARDRDTGSVYPDPVDGRCRIKYTPSAYDRKHILEGVIASAKIAYVSGAKEIRTTCHSVPPFVRPKEPADSLEEGINNPAFQAWIQQLRQSDPLPTWGSSFASAHQMGTCRMGSSARKSVVDPSGQVWGTDGLYVMDASVFPSASGVNPMVTNMAITDWTSRCLVETMKKENALIGSPRL

SEQ ID NO: 4873 - protein, 203 aa, Polytomella parva
KVSSLCKAAPKANMTIANNVTELIGNTPMVYLNKVNEGCYGKIIAKLEIMEPCSSVKDRIGYSMIQAAEKDGFITAGKTTLIEPTSGNTGIGLAFIAASRGYKLILTMPASMSLERRVLLRAFGAELVLTDPAKGMKGAVQKAEELVASTPDAYMLQQFANPNNPKVHYETTGPEIWKGTDGKVDYLIAGVGTGGTITGTGRF

SEQ ID NO: 4874 - protein, 177 aa, Candidatus Kuenenia stuttgartiensis
MEGNMGIQVGQCAPCFTLQGVVGEKFEDFSLDNYKGKWVVLFFYPLDFTFICPTEITEFSKKDGDFKSLNAQVFGVSIDSVFSHKAWLKDLGKLNYPLLSDITKEVSRKYGVLIEDKGIALRGTFIIDPEGKIKYQLVHDLGVGRSVEEILRVLNALQTGELCPVEWKPGKKTLGKG

SEQ ID NO: 4875 - protein, 788 aa, Oceanobacter sp. RED65
MSFISSRLEPYEQRRKRPAKGKSGKSLAHESAEKHVTGEAVYVDDMPELAGTLHMAVAQSTEAHANIVSMDLTKVFQAQGVVDVITLDDVPGEADIGPVFKGDPLFADKKVEYVGQPLFAVVAQSLAQAKRATKLAEVEYEVLPSVLEIEQALEQNFFVRPSHSMQKGDFQTAYNKAPNRLENTVYVKGQEHFYLEGQVSYVVPTEDKGMKVYTSSQHPTEVQKLVAEVLDLPMNYISVEVRRMGGGFGGKETQAAPWACMASVAANKLKRPVKLRLPRQDDMVMTGKRHDFLNQYRVAFDESGKILATDIMVAGKCGYSPDLSDAIVDRAMFHSDNAYDLGDCQVVGHRCKTHTVSNTAFRGFGGPQGMTIAEYMVDDIARAVGKDPLEVRKLNLYQDGSSTHYGQVVENYHMRELIEQLEKDCDYQTRRQAITEFNKNHTYKKRGLALTPVKFGISFTVQFLNQAGALVHVYTDGSIHLNHGGTEMGQGLFTKVAQVVANEFDVDIDTVQVSSTNTEKVPNTSPTAASSGTDLNGKAAQNACLTIKQRLIDFASDYFKVEPSEIRFENNHVLIGSGDNLEEMTFQAFVELAYLNRISLSSTGYYSTPKIHYNREKADGRPFFYYAIGAACSEVEIDTLTGEYDVLSTNIIHDVGQSLNPAIDIGQIEGGFIQGMGWLTTEELNWDGHGRVTSNGPANYKIPTTMDMPKEFNVKLFDRINEEQTIYNSKAVGEPPLMLGMAVWLALRDAAASVADYKVNPPLNAPATPEQVLRAVQYCQRHLEGRAS

SEQ ID NO: 4876 - protein, 321 aa, Cucurbita maxima
MAAASSFSAAFYSGIPLIDLSAPDAKQLIVKACEELGFFKVVKHGVPMELISSLESESTKFFSLPLSEKQRAGPPSPFGYGNKQIGRNGDVGWVEYLLLNTHLESNSDGFLSIFGQDPQKLRSAVNDYISAVRNMAGEILELMAEGLKIQQRNVFSKLVMDEQSDSVFRVNHYPPCPDLQALKGTNMIGFGEHTDPQIISVLRSNNTSGFQISLADGNWISVPPDHSSFFINVGDSLQVMTNGRFKSVKHRVLTNSSKSRVSMIYFGGPPLSEKIAPLASLMQGEERSLYKEFTWFEYKRSAYNSRLADNRLVPFERIAAS

SEQ ID NO: 4877 - protein, 319 aa, Microcystis aeruginosa PCC 7806
MRIAHDVTELVGRTPLVQLNRIPQAEGCLGRIVMKLEGMNPAASVKDRIGTHMINSAEKAGLINPETTVLVEPTSGNTGIALAMTAAAKGYRLILTMPETMSLERRAMLKAYGATLELTPGSQGMKGAILRAQQIVDSIPGAYMLQQFRNPSNPEIHRLTTAEEIWQDTEGQVDFIVAGVGTGGTITGVAEVIKSRKPSFQVVAVEPFNSPVISGGNPGPHKIQGIGAGFIPEVLRTDLIDEVITVSDEEAFQFGRRLAKEEGLLSGISSGANLCAAIQLAQRPENEGKLIVVIQPSFGERYLSTLMFQNIEERELTLV

SEQ ID NO: 4878 - protein, 324 aa, Anabaena variabilis ATCC 29413
MDIKNGFVGTVGNTPLIRLNSFSEETGCEILAKAEFLNPGGSVKDRAALYIIEDAEKKGLLKPGGTVVEGTAGNTGIGLAHICNAKGYKCLIIIPNTQSQEKIDALTALGAEVRPVPAVPYKDPNNYVKLSGRVAAELDNAIWANQFDNLANRLAHYETTGPEIWTQTDGKVDGWVASTGTGGTFAGVAMYLKDQNPAIKCVVADPLGSGLYSYIKTGEIKIEGNSITEGIGNSRVTANMEGAPADDAIQIDDHEALRVVYQLLRKDGLFMGGSTGINVAGAVALAKQLGPGHTIVTILCDSGSRYQSRIFNRDWLASKGLTVD

SEQ ID NO: 4879 - protein, 248 aa, Triticum aestivum
  misc_feature (126)..(126): Xaa can be any naturally occurring amino acid
MLQAVVSNPQPVAASLGAPCRPGRGSVRVRSTRNGSADNLDHLRRPPTATARQPRQGSGSPAPRRRVIQTTPFGLWDSFPDARTLDQMMRTMERIIDEADDDDGRRPFVVPAAPTARRADDTARWXRRGRTPWEIKERAGDYLVRFDMPGMTREDVRVSVQDRTLVVVAEKAAKPGEAVGEKDKDNEEDGEEEEAWPAASYGRYRTRVELPENVEVERIAAEVRDGVLYLNIPKVSPSGGKVVSIQVQ

SEQ ID NO: 4880 - protein, 199 aa, Trifolium subterraneum
GLAFMAAAKGYKLIITMPASMSLERRIILLAFGAELVLTDPAKGMKGAVQKAEEILAKTPNAYILQQFENPANPKVHYETTGPEIWKGTDGKVDAFVSGIGTGGTITGAGKYLKEQNSNIKLIGVEPVESPVLSGGKPGPHKIQGIGAGFVPGVLEVNLIDEVVQISSDEAIETAKLLALKEGLFVGISSGAAAAAIQI

SEQ ID NO: 4881 - protein, 184 aa, Bradyrhizobium sp. ORS278
MLGIGSKLPSFEIVGVKPGFHLQEEKGESAFETLTEASFPGKWKIIFFYPKDFTFVCPTEIAEFARLSKDFADRDAVVLGGSTDNEFCKLAWRRDHKDLHKLPIWQFADTKGSLVDGLGVRSPDGVAYRYTFIVDPDNTIQHVYATNLNVGRAPKDTLRVLDALQTDELCPCNREVGGETLKVA

SEQ ID NO: 4882 - protein, 385 aa, Streptococcus suis
MKKILYLHAGAELYGADKVLLELIKGLDKNEFEAHVILPNDGVLVPALREVGAQVEVINYPILRRKYFNPKGIFDYFISYHHYSKQIAQYAIENKVDIIHNNTTAVLEGIYLKRKLKLPLLWHVHEIIVKPKFISDSINFLMGRFADKIVTVSQAVANHIKQSPHIKDDQISVIYNGVDNKVFYQSDARSVRERFDIDEEALVIGMVGRVNAWKGQGDFLEAVAPILEQNPKAIAFIAGSAFEGEEWRVVELEKKISQLKVSSQVRRMDYYANTTELYNMFDIFVLPSTNPDPLPTVVLKAMACGKPVVGYRHGGVCEMVKEGVNGFLVTPNSPLNLSKVILQLSENINLRKKIGNNSIERQKEHFSLKSYVKNFSKVYTSLKVY

SEQ ID NO: 4883 - protein, 404 aa, Oryza sativa Indica Group
MAMAAAAVEVEEGRTGIPSLLRLSAVGEEAIASNVAQLIGWTPLIEMKNIAKKEGIQARLVGKMEAYQPLFSVKDRTALGMVEDAEEKGLITPGVTTLIEPTGGNLGTGLVLVAIQRGYRFIAVMPAGYSLDKQMLLRFLGAEVILTDPAGGFKGMMDKVEELTKVMPNYHCFNQSINPANPDAHFKWTGPEIWKDTAGKVDIFVTAAGTGGTLSGVGRNKNTGKSSACKGSYTDLRNMTKQTEIASEGRGPNLQACILPHLKSSSPSSVPPTAWALPVRKSSGSRRESQEHHCLIDSGGSPGFHKIQGTGPGFIPENLDRSIIDEVVTVSSEESITMARRLAKEEGLLVGISSGANVSACIKIAAREENKGKMIVTMLPSGGERYMNSDLFADVREECANMTF

SEQ ID NO: 4884 - protein, 199 aa, Azoarcus sp. EbN1
MAVLVGKQAPDFAAAAVLGDNQIQDITFSQFTKGKYAVLFFYPLDFTFVCPSELIAFDHRLDEFKKRGVEVLGVSIDSQFTHLAWKNTPVNSGGIGQVQYPMVADTKHEICRAYDVESEGGVAFRGSFLIDKAGVVRHQVVNDLPLGRNIDEMLRMVDALQFTEEHGEVCPAGWNKGKAGMKADPSGVADYLAHHAESL

SEQ ID NO: 4885 - protein, 457 aa, Oryza sativa Indica Group
MPPGSDSPLLLVRLDLVGFGAAVLRWLRRPRRWRGSGAARVKEAEVDWSLFSSLGGECGERGGGKALTELVRPALAKKATEEDITEFHRINAAFCSSWVEMGEEIKNGEEGPDMAAPGEEEQEQGRKGIPSLLSSREENIASNITQLIGWTPLVEMKNIAKNEGVQARLVGKMEAYQPLCSVKDRSALRMIEDAEEKGLITPGVTTLIEPTSGNLGIGLVLVAVQKGYRFIAVMPAKYSLDKQMLLRFLGAELILTDPAIGFNGMMDKVEELMKSIPNSHCLNQVTNPANPEAHFMWTGPEIWKDTAGKVDVFVASVGSGGTLTGVGRYLKMKNPSINIVCVEPSESPVISGGSPGPHKIQGTGAGFIPEILDKSVIDEVVTVNTEESMAMARRLAKEEGLLVGISSGANVAACIKIADREENKGKMIVTMFPSGGERYMNSDLFAPVREECDNMTF

SEQ ID NO: 4886 - protein, 376 aa, Solibacter usitatus Ellin6076
MNVGITCYPTYGGSGIVATELGMELAARGHEVHFITYANPIRLDPGIPRITYHEVEVSTYPLFQYPPYCLALASRMAEVAQTYKLDLLHVHYAVPHAVSAMLAQQMLAPIRRLPFITTLHGTDITLVGIDPSYFSITKFSIEQSNGITSISDDLRNQTVEVFGVTKEIRVIKNFVNCSLYHSDDEKRGAALYAPNGEKLLIHLSNFRPVKRPLDCIRIFAEVRKQVPARLLMVGDGPERGPAEHLARTFNVQDDVIFLGKQNHVERLIPLAHVLLMPSEMESFGLAALEAMACGVVPVATRVGGVPELITHGEDGFLEEVGDIEAQAARVVSLLTDDDLHYRMAKAGRWNASERFCTDRIIPQYEKHYADVLNAAR

SEQ ID NO: 4887 - protein, 192 aa, Zea mays
MAADFTPVCTTEMAAMAGYAKEFEKRGVKLLGISCDDVESHRQWTKDVEAYGGKQQQQQHTTTKVTFPILADPARDAIRQLNMVDPDEKDAAGRSMPSRALHVVGPDKAVKLSFLYPATTGRNMDEVLRAVDSLLTAAKHGGKVATPANWKPGECAVIAPGVSDEEARKMFPQGFETADLPSKKGYLRFTKV

SEQ ID NO: 4888 - protein, 374 aa, Desulfitobacterium hafniense DCB-2
MPTYKILQLIGGGEIGGAEQHVLTLLQGIDKAAFSLTSGSLIDGPFARSTEEKGIPTLRFPMKHALDLSPLPKLMADIRREKFSLIHTHGSRANLLGRLAGGCLKLPVVSTVHSSLKRDYLSPAAACLALALDRLTLPLTSGIITVSEALAEEVARRGGQRIRTIYNGIPPLPQLATSERRGELRESFRRTWGIPKDALVLGSVARLHPTKGLHTLLEAAHILRPQFPHLHILIIGDGPLHRELEEQAEAWELPHTFTGYLPDAYQTLPAMDIFILPSLSEGMGLVLLEAMQAHLPLVATAVGGIPELIRPSLDGLLIPPGQPAELAGACRTLLQNPELAQSCLDSGAQRWQDFSVQEMLRQTENFYQEVLTRC

SEQ ID NO: 4889 - protein, 214 aa, Rhodococcus erythropolis
MSKNDRSIDDQLAELAADTGEHHVAVTFTLNEVTSTVVLPSRTLASDAIRHHLRKTGTHVGCEHGVCGACTVLLDGKPVRSCLVLAASLEGRSITTVEGLVEPDGTLHPVQQAFKDCHGLQCGFCTPGFVTTIAAFLEENPNPTREEATDAIAGNLCRCTGYQNIRASVLRAAEIKRERAGQFPLGIDDASTRAALDRKVRGTTNPVGGRAGKA

SEQ ID NO: 4890 - protein, 409 aa, Trichodesmium erythraeum IMS101
MFMKIAIIASGFLPVLDGVTVSGYYRVQKLSQFGHQVLLFCPDYSPLAHLYPNWKDYTGNIFPGIQVINLPSTPFLDFERNVGFNTYKIVVRELEKFQPDIIHVDEPERLFFAFFRLAGIKFARENNIPCICTFRTNFLEYFEDFLPLPKGINLMLQLIFEKSFVSIYNKYDLTLVSSTITHQKIIGMGIKNAMYINFHGFDIEKFNSATITTNFWELNYQIPNLNNKVKIVFLGRLTEDKGWKFTLGAFVKLQQLVNIENVAIIIVGDGPMREEISNRLSQVTNHVYLLGRISPKHIPNILKNSNFHVTASEKETRGLTVLEAFAAGIPVVAPEAGGVTENIQNGRNGLLFTPGNQESFCDKLKLLIEDSNLRKEMGINGRETISKYSWDNAVANLVKIWQEQIILQS

SEQ ID NO: 4891 - protein, 152 aa, Silicibacter sp. TM1040
MKLTVNGTEYEVDVEPEMPLLWVLRDELHIKGPKYGCGIAQCGACTVHVDGMAVRSCQLPVGALEGEVTTIEGLGTPESLHAVQAAWVAHQVAQCGYCQSGQIMQAAALLDLNPAPTDEEIDAVMSANLCRCGTYPRIRAAIHDAAQKLSEA

SEQ ID NO: 4892 - protein, 154 aa, Trichodesmium erythraeum IMS101
MKIQVGDQAPEFTLPSQEGTEVSLSDFRGKKNVVLYFYPKDDTPGCKIQACTFRDQYTIFKNVDAEIIGISGDSKQSHKQFSTKYSLPFTLLCDTDNKVRQLYDVPPTLWILPGRATYVIDKEGIIRYICDSTFDFEVHSKEALKALRKLRVTV

SEQ ID NO: 4893 - protein, 147 aa, Bdellovibrio bacteriovorus HD100
MPMRSLSPWGGRRLPSSDLFSQFQDFINEFDRGESSALTRAGFDFSPSVDVEEKDNAYLVSADLPGMKKDEIKVELNDNILTISGERTRESKSEGGYSERSYGRFQRSFTLPVQVNSEKIEAHFEDGVLQITVPKAEGARSHSIKIM

SEQ ID NO: 4894 - protein, 552 aa, Actinomadura madurae
MTATESTDVLIIGSGFGGAIAAYHLAAGGADVVVLERGPWLEGDDFEHDFKLGSSYTRIFDFVVGDGMSVLGGNCVGGGSVVYFAAMPRAPRFIFERRGGIGRRMWPESVSRDALEPWYDRVEEALPVVKQSWDEVTYAGGLWAAACDHAGRTANPVPVAVDNSKCVNCNWMMAGCKFDAKRSLLFNYLPAAVAEGAEIRPLHEVQRLTRNAGGGYRVHYNVIDGEDYRVHTGNGTIDAKIVVLAAGSAATPVILQRSEDDLGRMPHAVGRYFSGNGERLNTAVVNEDKVREVLGLSRPDGRAYAANQIGRGPVVASWDRLDGSLPEYSRFSLEQLYFPPGLGTILAQVPDAAGPTWFGAEKKEMLRNWQSWLTIFTISEDDNEGVFGPPPATGNAMRISQQMLGRGNLHYRPTLNTMRGWAESDAAVRDILERDGLAEVRPWTNDLVGAYTVHPLASCRIGDDPATSALDDRHELRGHPGIFVTDGSAVPCGLTVNPAMTIAALAERAMPAIVRAARDRGVEVGYGAPAPDGSTAGRRATLPLAPAVGGDR

SEQ ID NO: 4895 - protein, 308 aa, Corynebacterium glutamicum ATCC 13032
MYNNITETIGHTPLVKLNKLTEGLDATVLVKLESFNPANSVKDRIGLAIVEDAEKSGALKPGGTIVEATSGNTGIALAMVGAARGYNVVLTMPETMSNERRVLLRAYGAEIVLTPGAAGMQGAKDKADEIVAERENAVLARQFENEANPRVHRDTTAKEILEDTDGNVDIFVASFGTGGTVTGVGQVLKENNADVQVYTVEPEASPLLTAGKAGPHKIQGIGANFIPEVLDRKVLDDVLTVSNEDAIAFSRKLATEEGILGGISTGANIKAALDLAAKPENAGKTIVTVVTDFGERYVSTVLYEDIRD

SEQ ID NO: 4896 - protein, 272 aa, Persea americana
DIPTISLAGIDSEDGRAEVCKKIVEACEDWGVFQVVDHGVEAGLISEMTRLAREFFTLPAEEKLRYDMSGGKKGGFVVSSHLKGEAVQDWREIVTFFSYPIRSRDYSRWPDKPEGWKEVAQVYSDKLMGLACKLLEVLSEAMGLEKEALTKACVDMDQKMVVNFYPKCPQPDLTLGLKRHTDPGTITLLLQDQVGGLQATKDGGQTWITVQPVEGAFVVNLGDHGHFLSNGRFKNADHQAVVNSNFSRMSIATFQNPAPEAIVYPLAIREGE

SEQ ID NO: 4897 - protein, 218 aa, Agrobacterium tumefaciens str. C58
MSLRINDIAPDFTAETTQGPVRFHDWIGDGWAVLFSHPKNFTPVCTTELGAMGGLQPEFEKRGVKIIGISVDPVESHEKWKADIRTATGFNVDYPLIGDKDLKVAKLYDMLPAGAGDSSEGRTPADNATVRSVFVIGPDKKIKLVLTYPMTTGRNFDEILRAIDSIQLTSKHQVATPANWKQGEDVIITAAVSNEDAIARFGSYDTVLPYLRKTKQPG

SEQ ID NO: 4898 - protein, 382 aa, Cyanobium sp. PCC 7001
MKIAFFTETFLPKVDGIVTRLTKTVQHLVALGDEVLIFCPEGAPEAYMGARVVGVPAMPLPLYPELKLALPRPAVAEALEEFQPDLVHVVNPAVLGLGGIWLARTRSYPLVASYHTHLPKYLEHYGMGMLEPLLWELLKAAHNQARLNLCTSTAMVQELSEKGIQHTDLWQRGVDTELFRPALRNAGMRQRLLGGHSDTGKLLLYIGRLSAEKQIERILPVLDALPDARLALVGDGPHRQTLEKVFTGTPTTFVGYLAGEELASAYASGDAFVFPSSTETLGLVLLEAMAAGCPVVGANRGGIPDIVTDGINGCLYDPDGIDGGSASLTAAVQRLLGDDAERQQLRQAARQEAERWGWASATRQLRGFYSRLLDQPQLQLAA

SEQ ID NO: 4899 - protein, 925 aa, Gibberella zeae PH-1
MTVPQPHPVATALPDAPPFDFFTPLQWDVLFALVDGVLPSITSESAVTDEQGQIQLPDHEIDHVLETSTKSLAAPATRDNIRAFLQDRPAYDERVRENIMRTLAFSPPAQQKRLAGLLSLMSTRPGSYFITGYWQPIYNQPAHVREAIIKSWATSPRERWSALAKTMSSLSFKSYAQTSSLLSQLSGYSDTPQHWQPKQSFDYSFIQIEAGDEPHVIETDVVIVGSGCGGGVSAKNLAEAGHKVLVVDKAYHYPAKHLPMSQEAGCAHLFDSGGFITTEDSGATVTAGSAWGGGGTVNWSVCLKPQGFVRKEWADSGLPLFTSPAFDESLDRVWEFQGAGTDQIRHNHRNKVLLNGSSKLGWASSPAPVNTGGREHFCGQCHLGCGLAEKRGPATSWLPDAAKAGAQFMEGFQVDQVMFDADGQTAIGVEGDWLSRDSEGGVSDSVGDRVKRRVVVKAKKVILAAGSIWSPVVLMKSGITNQHVGANLHIHPCNFVTAVYKEETRPWEGGIITSYSSEFDNTDGSGYGTKLETTCMVPFTIMSQPSWLGGLNAKLHMTKYRHMDGWISLTRDRDGGRVFPDPSTGRPRIDYTTSDYDRAHTMQGVEGLAKICYVTGATEIRPLLPGLESFIRDGECSSEHSLDSKGPVADPETSDPAFAAWLARLREVGNKPPTTTWGSAHQMGTCRMSASRDEGVVDEKGRVWDTENLYVADASVFPSASGVNPMITIMAIADWISRGVDADLRASEVVSHIEGAKSDSDQGCGALKLEPQPCHVVWPASQQSERTWIVSELSVSSTEYSIRTSLGILYFKPCKSNSQRFRAMVPYPRERLLVPRFAGDFRVMSEALSTCRPPNACIWGARHKRAQPPGDLQATSDFDITLLQRSCWYFNAELGSAALVGELFGSISAVQGNKAQRESHVTVVR

SEQ ID NO: 4900 - protein, 230 aa, Gossypium arboreum; identical to SEQ ID NO: 148

SEQ ID NO: 4901 - protein, 156 aa, Picrophilus torridus DSM 9790
MVNENEKAPDFEAPDMNLKMVRLSDFKGKNVVLAFFPGAFTSVCTKEMCTFRDSMANFNKLNATVLGISVDAPFSLAEFAKQNNLKFDLISDSTREISRKYDVLYNSFLNIKNLQASKRSVFVLDRDGIIRYKWVSEDPGREPDYKKIEEVLSSLN

SEQ ID NO: 4902 - protein, 380 aa, Geobacter metallireducens GS-15
MTVEPLHILHLISTSGLFGAERVLLELASQSRSLGMHVTVAALKNSRNPNTELAEAARGAGLPTLVVPCGGRFDAGVVGILTEEIRKSGTQIIHSHNYKSNYYARQAAELSGARWIVTNHGRRAGFKLFLYALLDAMLVRKADRVVAVSPKIADRLAVLGIGRDGLSVIDNGVDFSRFESLPTKADAGNVLGVAGSSYVIGTVGALTEEKGHRHLLQAVKSVRKSIPNVVCVVVGDGPERRRLEQLAREEGIEQTAIFTGKRDDVPSILPRFDLFVLPSLSEGLPMALLEAQAAKVPAIATNVGAIATVINNGVTGVVVSPGDVPALAEAIIRSHDEADKARCMALKGYERVKVHYSADTMAQRYIEIYRGMIGAGGAIG

SEQ ID NO: 4903 - protein, 162 aa, Alteromonadales bacterium TW-7
MVTFTINGKLIESQASEDTPLLWVIRDEVGLKGTKFGCGIAMCGACTVHLDGQATRSCVLPVGAVAGKNITTIEGLNNEHPLQKAWVEEQVPQCGYCQSGQIMQAATLLADNPSPTDEEIVNHMNGNYCRCMAYKRIKSAIQRAADESQSAVQMFNPNEQDV

SEQ ID NO: 4904 - protein, 265 aa, Oryza sativa
MAFAVSTACRPSLLLPPRQRSSPPRPRPLLCTPSTAAFRRGALSATTTPTPARAALPSTTGRNRIVCGKVTTTNNYPSSCRSRRSTMMHAAAWLLLQQLSPAAARVARAADDDSSVQVSKGSAAPNFTLRDQDGRAVSLSKFKGRPVVVYFYPADETPGCTKQACAFRDSYEKFKKAGAEVIGISGDDAASHKEFKKKYKLPFTLLSDEGNKVRKEWGVPADLFGTLPGRQTYVLDKNGVVQYIYNNQFQPEKHIGETLKILQSL

SEQ ID NO: 4905 - protein, 234 aa, Burkholderia xenovorans LB400
MDNIEEDFRAQRPPFLYEPAPDFEARSTMGMVSSADYRGKWLLFFSHPADFTPVCTSELIAFARIAPRFKELGCELLALSIDGLYSHLAWLRSIQERFNMDIPFPVVEDPSMAVAKAYGMLPPKAVSSSTVRGMFLIDPEGIIKAISWYPISTGRSVEEAFRLFQAVRMTWQENLYAPADWQPGSPCVVPPPKTIEDASKRLSEGDVLDWYYQTRQIAQDAPPERAPVKRGRRA

SEQ ID NO: 4906 - protein, 350 aa, Clostridium perfringens SM101
MVRVLMIGPNKLENGGISSVVNSYYDVGLDKDKNLQLTYLDTFKSGSLLKKISVFLKSIILFRNNIKENDIVHIHMSYRGSFYRKSIFVLMSKYKNKKVIIHIHGSEFKKFYDKSNNFIKKYIENTLNKADYVLALSEEWRENLISIAPKSRVEILHNSIIVPKYDYKNYKFKNILFLGRLGKRKGVYDILKVANSISSKFPDCKFILAGDGEIENVKKICNDLSINNIIIPGWISGYDKVNLLKEATIYILPSYNEGMPISILEAMAYKLPIISTKIGGIPQLIDNGVEGFLVDAGDILGLENSINKLLESEELRKNMGENSFKKVEKDFNLVKNIEKLKSIYKSLIEE

SEQ ID NO: 4907 - protein, 523 aa, Geobacillus kaustophilus HTA426
MRILMVCTEKLPVPPVLGGAIQTYISGILPHVSQFHDITVLGISDSSLPEQETIHGVHYVRVPGKIFEIYRENVVRYVEANKFDLIHIFNRPRLVLPIRQAAPDAKMTLSMHNDMFQPEKIDPEEATAAIAEVAYIVTVSDYIGNVIRSLYPQASPKLRTIYSGVDSERFLPGNHPKMQKIRNDIRRAHGLENKTVILFAGRLSRNKGVDKLILALPELAKKFKNLALVIVGSNWFSENDITDYVAYVRALAKRMPVPVVTTGFVPPNEIQNWFAAADLFVCTSQWQEPLARVHYEAMAAGLPIVTTARGGNPEVIFANENGLIVENPEDPSDFANKIAQILSDQSLMRRMGEKGRQLAISIYHWERVASELLEVWEQAEKTEQAVVSEEQAAGMTIEPLKEDATEQLNRPTPKADAKEKVHSKKNAAASSDKTKKGKTKKERAISMEDHQQTAKQKEAAAERTELAKSAPAPKQPQTGRHIKPFTIASGNQQTLDASPKTHLNRKLAQAKHDTKHFTIASSH

SEQ ID NO: 4908 - protein, 840 aa, Rhodococcus erythropolis
MSTPVKPAKRNGAKHPASDHSTADHSVADDGKFFGKPIPREEDTRLLSGQGRYLDDLGHNALIAAFVRSPHAHARIIDIDIDQALEVPGVHAIYTYEDLLADTPEMAENLPLLIPHPGIIAPRNGYPLAKDEVKHVGEAIAMVVADNRYIAEDACAKIDVTYEALKPVVGIDVARTAANAVHADVPDNVAAHLQHGFGDLDAELAAAPHRLTLDLEIERSASMPMEGKGVYARWDGDENTLTFWTSTQTSTSARAAIAARLGMALNKVHCIAPDVGGGFGVKIVHPWPEEVMITWAARRLGQAGISCEVKWVEDRREHFISSAHERGQIQKVDIGFDDEGRLLAFDFTFWHDNGAYLPYGIIVMINTATQVLGPYKPKSFRVNAYSLYTNTVIVTPYRGAGRPQAVFAMERSMDAIAKYLNKDKIAVREANFIRPEDMPYDFGLMFQDGRPLIYDTGDYQAGIDKLKKLIDWDGFPEYQRKARAEGRSVGIGIGAYVEGTGPGPYEGAHVVVETSGKVKAATGLTTQGQGHQTAFAQIVADDLGVKVSDVEIVTGDTRRFGYAVGTFASRGAVMSGSAFHVAAQMVAEKAKKIASGILDLPETELELREGHVCKIGTEAGVEGTSVPLSVVAVLSNPLRYAFDRESKLATGFAKTDTDMSKPPIPEGEQPGLEATGYYSPPSSTFASGVHAAIVETDPVTAEITVRRYVVIHDCGNVINPRIVEGQVMGAVAQGIGGALYERIVYDEHGQMLNASYMDFLMPFVTEMPDSLEMDHTVTPSGLNPLGMKGAGEAGVIPTSAVIAAAIEDAEGISITSMPISPSELFELRLAHAGSSSEENA

SEQ ID NO: 4909 - protein, 212 aa, Anabaena variabilis ATCC 29413
MALRLGDTVPNFTQASTHGDIDFYEWAGDSWVVLFSHPADYTPVCTTELGTVAKLKPEFDKRNVKAIALSVDDVESHKGWVGDIEETQSTTLNYPILADADRKVSDLYDMIHPNANAAVTVRSVFVIDPNKKLRLSFTYPPSTGRNFDELLRVIDSLQLTDNYSVATPADWKDGDKVVIVPSLKDPEVLKEKFPKGYEVVKPYLRLTPQPNK

SEQ ID NO: 4910 - protein, 381 aa, Mycobacterium avium subsp. paratuberculosis K-10
MRVVQVANFYGPRSGGLRTAVDRLGAEYCAHGHEVFLIVPGQRTERARLYTGVVRITLPARLIPFTGGYRAVLPGPVKALLEALRPDALEVSDRLTLRSLGRWGRDHGVTTVMISHERLDRLVGQVLPRRAAQKFADLANARTAADYDTVVCTTGFAREEFDRIGAGNTVTVPLGVDLQTFHPRHHSQLVRRRWAAPTQLLLVHCGRLSVEKRVDRSIDALGELCHAGVDARLVVVGEGPLRARLQRQAARLPVDFTGFVSDRTTVAQLLASADVTLAPGPHETFGLAALESLACGTPAVVSRTSALTEIVTPDSGASAANDPAAIARAVSAIVSRPERQRRISAQRRAEDFTWHRAAAGMLASLRAPVFDDPGGDSEQTA

SEQ ID NO: 4911 - protein, 200 aa, Vicia sativa
GLAFMAAAKGYKLIITMPASMSLERRIILLAFGAELVLTDPAKGMKGAVQKAEEILAKTPNAYILQQFENPANPEVHYETTGPEIWKGTDGKVDAFVSGVGTGGTITGAGKYLKEQNSNLKLIGVEPVESPVLSGGKPGPHKIQGIGAGFVPGVLDVGLIDEVIQISSDEAIETAKLLALKEGLFVGISSGAAAAAAIQI

SEQ ID NO: 4912 - protein, 408 aa, Leuconostoc mesenteroides subsp. mesenteroides ATCC 8293
MNIGLFTDTYFPQVSGVATSIKTLKEALESQGHEVYIFTSTDPKVPKNKFESHIYRFSSLPYLGFKDRRLAFRGLIQAVEIAKSVQLDIVHTQTEFSLGLMGKFVARQLKIPAVHTYHTMYEDYTHYFAKGMLIGPHGVGRIMKGYMVSMAGVIAPSNLVQDTLRRYGVTVPMRVIPTGVCLPEHGTKQTNLREKYHFSELQPIVLSLGRLAFEKNISVTISVFSEVLQTIPEARLVIAGDGPARKSLEEQVEELALEDKIIFTGMVNHDDIFDYYKMSNVFVSSSDTETQGLTFIEAMAADRPFVAIHSPYLDNLVDNEAIGTLVSDYDELLAGITKYLKRPNTEEDIAYRHKKMKDVDANTFATRVLAFYDDILASYHASDVEDEYPNDEEVGYMKRILRNPFRRN

SEQ ID NO: 4913 - protein, 297 aa, Thiobacillus denitrificans ATCC 25259
MSTYKTIEDTVGNTPLVRLKRLPGETSNIVLVKLEGNNPAGSVKDRPALSMIEQAEARGEIRPGDTLIEATSGNTGIALAMAAAMRGYKMVLIMPEHLSIERRQTMRAFGAELRLVSREAGMEGARDLAIELEKQGVGRVLDQFTNPDNPAAHYRSTGPEIWRDTEGRISHFVSSMGTTGTIMGCSRYLKEQNPAIQIVGVQPTEGAQIPGIRKWPAEYVPKICDPSRVDRMIYVGQQDAEETTRRLAREEGIFAGISSGGALWAALQLSKEVENATIVSIVCDRGDRYLSTGVFPA

SEQ ID NO: 4914 - protein, 264 aa, Picea sitchensis
MACSLSYLTAVASTCTTPISARNGASGPWKLGCTRSSINVVTFFPVGKRLQSNVGWSSSSHQRLTNALVVRAESGKENVAGAIDLKVTKSKNVDDEKHRAEVSPFGLVDALLPKRTMRQMLDTMEGQASSVRTPWDIIENENELKMRFDMPGLSKDDVKVSVVEDRVLVIEEREERQKDLWSFYSSYHTRLVLPENYETNEIGAELNNGVLKITIPKTKVMSKINDLPGNREMDKILAEFKNGVLNIIIPISKVVSKVKDLSVN

SEQ ID NO: 4915 - protein, 364 aa, Nostoc sp. PCC 7120
MNSFPKTLSSENFSSSQYNNRKRYNLFVSANVTQALGNVPIVQLGNISRVCIESECLLKLESCNPGGSIKEKNAVYLVKRAEEEGLLVPGGTIIESSSGNFGVGLAMVGAVRGYRVIIVVDAKTAPPFRRMLKAYGAELVDVPLHEADESGSMQKARMKRAHELTATIPNAWYPCQHLNPWNTEAHSYYTAREIEAHFAGELDAVVVGVSTAGQIMGIARYLLPRFPKIRIVGVDVVGSVIMGTPAKPYKMTGIGLSFFPPNLDISMLDRAYVIPEDMAYSVCHALASREGLLLGASTGAIVAGGLHLARSLGAGARILMINPDRGDRYLETVYDSDWLDHHGFTLKQGEHLDDAIASLTPLYF

SEQ ID NO: 4916 - protein, 388 aa, Legionella pneumophila str. Paris
MKILTVLDSYPPDLNGGAYFTHRLAKFLQAKGHEVLVICPSRSLKQGYTSYEGVNLYGVRSWPALGYKNFRVCWPFFIKKGILKAITDFNPDVVHLQGKFFLGGICYRACRKKDIPLIATNHFMPENFFHYTHLPRYFEKWFHRTTWNIVIDMLNHVKIVTTPTHTAANLLKEVHVQKEIHVVSCGVDLQKFQPKQNANLIRQRYKIPDKPILLYAGRLDKEKNLSIAIKAFYKTRQSIDAHFVLTGCGAELQRLKKLVQTLNLTEHVTFTGYLSDAEYPLVYSLANCFVNPGTAELQSIVALEAIASGLPLIAAKAMALPELVKEGVNGYLFDPNDVETLSCYMVKILSDRTLSEQMGRESRKLSQEHDIKRTIEQYETLYQSMVSL

SEQ ID NO: 4917 - protein, 168 aa, uncultured marine bacterium 443
MANIKINGKDHSLEGLDPTMPLLWALRDHAGIQGVKYGCGVGQCGACTVWLDGIATRSCLLPVGALDGQAVTTIEGLATKALHPVQRAWIEHDVAQCGYCQAGQIMSAAALLEKNPRPTDDEINDAMKGNICRCGTYVRIKSAIKSASASMVASALFYDATQTEETPV

SEQ ID NO: 4918 - protein, 306 aa, Helicobacter pylori 26695
MMIITTMQDAIGRTPVFKFTNKDYPIPLNSAIYAKLEHLNPGGSVKDRLGQYLIGEGFKTGKITSKTTIIEPTAGNTGIALALVAIKHHLKTIFVVPEKFSTEKQQIMRALGALVINTPTSEGISGAIKKSKELAESIPDSYLPLQFENPDNPAAYYHTLAPEIVQELGTNLTSFVAGIGSGGTFAGTARYLKERIPAIRLIGVEPEGSILNGGEPGPHEIEGIGVEFIPPFFENLDIDGFETISDEEGFSYTRKLAKKNGLLVGSSSGAAFVAALKEAQRLPEGSQVLTIFPDVADRYLSKGIYL

SEQ ID NO: 4919 - protein, 153 aa, Burkholderia pseudomallei K96243
MSVEVDRQVPDFTAPATGGEFSLSGIKGKKLVLYFYPKDNTPGCTTEGLQFRDLYPKFKKAGAEIVGVSRDSLRSHENFKAKLELPFPLISDPDETLCALFGVMKLKKMYGKEVRGIERSTFLIDGAGMLRHAWRGVKVPGHVDDVLSAVQAL

SEQ ID NO: 4920 - protein, 338 aa, Erythrobacter sp. SD-21
MTQIPVRERTLDLIGNTPLVRLAGPSEEAGCDIYGKCEFANPGASVKDRAALYIIRDAEARGELKPGGCVVEGTAGNTGIGIALVANALGYRTIIVMPDNQSREKMQTLRALGAELVTVPPTKYADPQHFQHVSRRMAEETDGAIWAGQFDNIANRKAHIEGTAKELWEQLEGRIDGFTCAAGTGGTIAGVGMGLKELDETVTIALTDPHGAALYNYYANGELKGEGSSVAEGIGQGRITGNLEGAPIDTQFRISDEEGLNWVSRLLREEGLCLGLSSGINVAGAVALGRHLVAEGRENSRVATILCDTGFRYLSTLYNADWLRSKDLPVFDWLEDSD

SEQ ID NO: 4921 - protein, 307 aa, Bacillus anthracis str. Ames
MRVAQSVSELIGKTPIVKLNRIVESDSADIYLKLEFMNPGSSVKDRIALAMIEDAEKKGLLKEGDTIIEPTSGNTGIGLAMVAAAKGYKAILVMPETMSVERRNLLRAYGAELVLTPGPEGMGGAIRQATELAKEHGYFIPQQFKNQSNPEIHRLTTGPEIVEQMGDQLDAFIAGIGTGGTITGAGEVLKEAYKDIKIYAVEPADSPVLSGGKPGPHKIQGIGAGFVPETLDVEVYDEIIQVKTEQAFEYARRVAKEEGILVGISSGAVIYAATEVAKKLGKGKKVLVIIPSNGERYLSTPLYQFES

SEQ ID NO: 4922 - protein, 199 aa, Oryza sativa
MSCTSFPKIDKPAPDFKGQAVVNGAFKEIKLSDYRSKYVVLFFYPLDFTFVCPTEIIAFSDRADEFKRIGVELIACSADSHFSHLAWTNVPRKQGGLGQMNIPLLADKSGKISRDYGVYIEEEGITFRGLFIIDKNGTLRQITINDLPVGRSVDETLRLVQAFQFTDEHGEVCPANWKPGKETIKPAVEASKEYFSKAG

SEQ ID NO: 4923 - protein, 156 aa, Desulfitobacterium hafniense Y51
MAINIIVNGDPYEIQIKPHWTLVYVIREKLNLIGTKEHCDEGACGMCTVIVDGKPILSCMTLAATMDGKSITTIEGLAENGKLHPLQEAWVEEHGAQCGYCTPGMIMSAKALLDKNPEPNTMEIKEAMGGNICRCGNYEFIINSVHTAAKMMKGGK

SEQ ID NO: 4924 - protein, 300 aa, Herminiimonas arsenicoxydans
MQYLTIEDTIGNTPLVQLKRMDGEESARRNNVILGKLEGNNPAGSVKDRPALSMIKHAEERGTIKPGDTLIEATSGNTGIALAMVAAMRGYKMILLMPENLSEERRQAMAAYGAKIVLTPKAGGMEYARDLAEQMQKNGEGLILDQFANPDNPRSHYETTGPEIWRDTGGKITHFISAMGTTGTIIGVSEYLKEKNPDIRIIGVQPEEGSQIPGIRKWPEAYLPKIYDASKVDQLEYVSQGVAERMARRLAMEEGIFCGISAAGACEVALRISQTTENATIVFVVCDRGDRYLSTGVFPA

SEQ ID NO: 4925 - protein, 787 aa, Desulfitobacterium hafniense Y51
MAKELKVVGKPLPKQGDELRATGTAMYSSDYKMPGMLHGVILRSPYASADIVDIDTSAAEAMTGVKLVMTYKNFPSFCATSVQYVGYPVACVVALTEEIAEKAMELIKVEYKPKPFVIDPVEALDPDSPRVFPDTPNAYPFKLNSIFTDPNEKGLFTKRELAECDGYGDLEAGFKEADIIVEDDGYSFATQHAPVPERRGALVDYDGERITMYVVTQSAQSIRNALCWSTVGITSPLKVRILSEFNSGTFGARGDDAGFWPDGSPDDPVAFMGGGHDKSSGFAIMAAMTLRKPVRIFYTSNEENFFHFWGRGSANVKVRMGFKKDGTLTAWDQEELLNCGQFGNRWTLFFRNGTPMFMYSHNLPATRIKKTALLTNIPGMVGWSGYGNPEVMFATEQVMDIAAEKLGMDPVELRKKNCAMPGDNALNCSQAYMFTGANWFGSADYPQLLDKLAAQIGWEKRKPHTEKTGVIRSGMGMALTCQQCAGEGVGANALVKLNVDGTAEICVTYADIGQGGRSACRQMTAEALNISFDKVRVVAGDTDATVWGTCNACSGGTVKYGWAVYNACQDALKDLFALGAPVLGVFPEELATENGEIYVKADPSKRMPWAGAFFNQHNNEADPYQIIGKSTWSVPAGAKNIEKAATFCSLDVDTETGELKNVKFYHCADVGRALNDKDTRAQLLRIHHGWESALGGTMRLDSATGKLLNGNYIDYPVATMWECDVEPSYIESGENDPSHPYGAVGLGQALQNAVHAAAANAIYNATGVRIKQVPMTPDVILKALGKI

SEQ ID NO: 4926 - protein, 317 aa, Daucus carota
MVVLSQPVEHVNFPAIKSCNGNSTHIPVVDLSNPDAKTQIVNACQEFGFFKVINHGVPMEIVTKLEAQALSFFKQPQNHKNKAAPFGYGNKNIGRKGDTGWVEYLLFGTDTQLISQNSLTILPNDFWAMVNKYLSAVKNLACEILKLMAEELNLQPKNVLSRLLSDKKSDSFFRINHYPASDRNELGFGEHTDPQIISVIRSNNASGLEIALKDGTWTQVPADPSSFFITVDDCLQVMTNGRFRSVKHRVITESLKERLSMIYFGGPPLSEKIAPSTSLMQGEESLYKEFTWGEYKKAAFNTKLAFNRISFFEKSPS

SEQ ID NO: 4927 - protein, 174 aa, Thermoplasma volcanium GSS1
MSLVNKAAPDFEANAFVNGEVKKIRLSSYRGKWVVLFFYPADFTFVCPTEVEGFAEDYEKFKKKNTEVISVSEDTVYVHKAWVQYDERVAKAKYPMVEDRKGIIARAYDVYNEETGNAQRGLFIINPDGIVKYVVITDDNVGRSTDETLRVLEALQSGGLCPVNWHEGEPTLKV

SEQ ID NO: 4928 - protein, 381 aa, Leptospira interrogans serovar Lai str. 56601
MILGIDASNIKSGGGVTHLKELLGNAKPEKYGFDRVILWSVEETLCQIEDKSWLEKVNYSKFFKSRIYRWYWQKFKLPKLAQNSGCKLLFIPGGSFSGKFRPFITMSQNLLPFEWGELKRYGLSFHTLRLLLLYFFQGTSFRKSDGIIFLTKYAKDLISKKLNLKNSNIIIPHGINKKFFHNPRKQNILLGKKKRPIELLYVSFIGAYKHQWNVLEAVSDLNCAGIPIHLSLVGSHNEKASVNKLFQKINHLNSSEKIISLYSNVSYKKISEFYLNADLFIFASTCENLPNILIEAMASGLPILSSKYGPMPEVLDDAGLYCDPLSVEDIKTQLKKLIFSKELRENLSLKAYKKAKQYSWKRNADITFDFFYKIVKAYKKY

SEQ ID NO: 4929 - protein, 321 aa, Cucurbita maxima
MAAASSFSAAFYSGIPLIDLSAPDAKQLIVKACEELGFFKVVKHGVPMELISSLESESTKFFSLPLSEKQRAGPPSPFGYGNKQIGRNGDVGWVEYLLLNTHLESNSDGFLSMFGQDPQKLRSAVNDYISAVRNMAGEILELMAEGLKIQQRNVFSKLVMDEQSDSVFRVNHYPPCPDLQALKGTNMIGFGEHTDPQIISVLRSNNTSGFQISLADGNWISVPPDHSSFFINVGDSLQVMTNGRFKSVKHRVLTNSSKSRVSMIYFGGPPLSEKIAPLASLMQGEERSLYKEFTWFEYKRSAYNSRLADNRLVPFERIAAS

SEQ ID NO: 4930 - protein, 734 aa, Pseudomonas aeruginosa UCBPP-PA14
MSSLPHSTGQALDRVDGPAKVTGQARYAAEYPAADLLHGSVVSSDVARGRVRGIDCAAALAVPGVVAVLHHLNRPPMAGDDEPYKDADAAEGEPFRPLFDDRVLYSGQPLALVLARSLELARYAGSLLRIDIEPEPHQTDLLAALEQAHEAPAELPAERGDFYTAYRAAPIRVEASYSTPIEHHNPMEPHASTVIVQPDGSLLVHDKTQGTQNSQAYLQKVFGLPADKVRVCAAYVGGAFGSGLRPQYQLTLAVMAALQLRRSVRVVLTRQQMFTFGYRPRTLQRLQLGADAEGRLLALGHQATAQTSRFEDFTEHVVEWSGMLYRCENLSLAYRLVPLDVYTPLDMRAPGAALGLIGLECAMDELAVRLGMDPIALRRFNFAERNGNEDKPYSSKALLACYEEGARRFGWQARDPRPRSMSEGRQLLGWGMAGGVWEAMQSKASARARLEADGLLRVASATTDIGTGTYTVMTQIAADAAGMAPEEVRFQLGDSALPKAPLQGGSFTVSSVGSAVRLACLRLRQALVAHARARHPELAGAAEERFRICRGHLEAGDTRYALADLLQGLPEDALQVEVEAEPSARRKGYATATHSAVFVEVRIDEALGTLRVSRVVSAVAAGWVINPKTARSQILGGVVWGLGMALQEETQVDHALGRCMNHNLAEYHIPVNADIGDIEVIFVDEPDDIVNELGSKGVGEIGIVGVAAAVANAVYHATGRRLRDFPLTVDKLLG

SEQ ID NO: 4931 - protein, 222 aa, Physcomitrella patens subsp. patens
MALKLGDTAPSFVADSTHGTIDFHKYIDGSWAILFSHPNDFTPVCTTELGAVGKFLPEFEKRGVKVIALSCNDVESHKGWIADIESYTPGAKVSYPIVADPTRELAVKFGMLDPEEIDGKGVPLTARAVYIFGPDKKLKLSILYPATTGRNFNEVLRVIDSLQLTANYSVATPVNWNQGDKCMVVPSLSNEAAKEKFPKGFETVEVPSGKSYIRLTPQPNVD

SEQ ID NO: 4932 - protein, 391 aa, Streptomyces coelicolor A3(2)
MSDSRARTLIVTNDFPPRQGGIETFVRELADRFPPDEVVVLTSAPTAAPGSGESFPYPVVRHPVRTLLPTPGATAHAAAVARRYGCDRVWFGAAAPLALMAGRLRRTAGIGTAVASTHGHEVWWARTPGPRALLRRIGSQVDTLTWLGERTRAPIEAALAAGTRTARLVPGVDTGTFHPAADGTRVRTRYGLGHRPVILCAARLVPRKGQDTLIRALPWVRRAVPDAVLLLVGDGPHAAGLRQLALREGVMDSVHFAGGHPHHALPAFYAAADAFAMPCRTRKGGLELEGLGIVYLEAAASGLPVVAGDSGGAPDAVREGETGHVVDGRSVAATADRLIRLLRDPRLARAMGGAGRDWVRTAWSWDHSYATLRDLLSGRTAGCRTVGPADT

SEQ ID NO: 4933 - protein, 736 aa, Sulfitobacter sp. EE-36
MTDGSNISTAELTMDEPDDRNRLDATVQGLIHTGMDRPDGPLKVSGRATYAHEDQPTGMMTGVLVRAPVAGGQVTGLNAEAIRKLDGVRGVFHGKTFLRNPAQGTANEAPVQPDGKISYVGQPVGLVVADTFEQARHAAHMVELEITPDDAVTDLETAEIETPKEKQSSQGDLDAALSQAAYTVDETYRTGGHSSSAMEPHAAIAQWDGDKLTLRGSYQMLKYNVNELADALGIDPENVHLLAPFVGGGFGSKLGISHEAVAAALAARELGAPVAVVLTRQQVLEATMRRSETVQHIKLAADADGRMTGIGHDSTVSQLMDESFAEPVAQATPFLYRGENREIGMHIKRINRMCAGSVRAPGEAVGITALEIAMDELAVASGIDPVELRKRNIPDVDPSDGRAFSSHKLAEALDDGAKTFGWDSREVGKTDGEWLIGYGMASATRVNMLGESHARVTLNQDGSLLVETDMTDIGTGTYAILTQIAGEMLGVPSDRVTVRLGDSSLPKAAGSGGSWGAASSGGSVFVACEALRKKIAEAMGVEERDLTLQDGVATANNRRADLPEFTKDGPLTVKGVIKKGDTQTDRRQATFGAFFAEVGVNSVTGETRVRRMHGSFAAGRILNAKTARSQCLGGMTFGIGMALTEELMFDKRDGHLVNNDLAEYHVPVNLDVPQLTVNFVQERDPWANPMQAKGIGELGICGAGASIINAIYDACGVRVRDLPATMDKILSGLPEM

SEQ ID NO: 4934 - protein, 180 aa, Geobacter sulfurreducens PCA
MVQSEPERAMVGEPAPAFSLEAVVNKEFKRVNLADYRGKWVVLFFYPGDFTFVCPTEIRGFNAAVDRFTELNAVVLGASVDSKFSHLAWINRGDLGDLKFPLLADNKKEATIRYGILDEKEGVALRGLFIIDPNGVLQYQVVQTPSVGRSVEETIRVLEALQTGELCPLGWKPGEKTIKK

SEQ ID NO: 4935 - protein, 537 aa, Leptospira interrogans serovar Lai str. 56601
MGGIPAANDKIITPKKHKEIIKKESIKNGIWELNSDVVVIGSGAGGAVAAATLAKNGWNVILIEEGSYFTPAQFNGNEFISSARLYRDAGFIVTEEQTLSILQGRTIGGSTTVNWQTSLYPPDYVTEEWDRRFGLKGYSRKDMDFYISSVHERLGVHPVPQNLINANNNILMKGGKSLGLDPEVLNNNNRGCIGLGRCGLGCPINAKQSMFLTYIPDAIESGAIVIANMKAQVIHDGPTKTVIADFTPDPYEKTPDVVIQKLKISTKVVVVSAGAIEGPALLQRSGIGNDWVGRNLKVHPTSTIFAVFNEKINMYSGPPQSAVIKDGHNQDNTGYGFWLEVAPFRPTLVASLIPFYGSKQFEQIEKYSNMSAGIVLVRDGSDGEANASVKWSLGRRKVYFELTSGDGKNMLRGLKMLAEVQAAAGAKELIFPFTDMETPVLVDRNTKFDWVLEKKFNPGSLVVGSAHPHGSIQAANSPEKGAIDLNMELYGHKNIYVMDASVYPTGLSVNPQITTMSLVLRASQTLALKKSEKLSQF

SEQ ID NO: 4936 - protein, 168 aa, Sulfitobacter sp. EE-36
MKTTLTVNGEDHSLDADTRTSLLDALRNHLNLTGTKKGCDHGQCGACTVMVNGRRINSCLTLACMHDGDEITTIEGLGDERNLSDMQQNFVKHDGFQCGYCTPGQICSATAMLEEFKAGWPSNVSGSLTASPELTDDEISERMSGNICRCAAYPNIVDAIRETAKGQS

SEQ ID NO: 4937 - protein, 963 aa, Desulfitobacterium hafniense Y51
MIFRKGTYTINGVDRMVISDIENETLAQVLRRIGLTSIKIGCGVGQCGTCTVLLDGSPVRACTRKFKSIPEYSKIETLEGLGTASNLHPLQLAWIKYGGVQCGFCTPGFIVSAKGLLDVNPKPTRQDVRDWFTKNNNLCRCTGYKQLVDAVIAAAEVMRGEKTKDSLLFEMPGDKRVYNTHYPRPAALGKVLGVTDYGDDIDIKMPPGTLHMALKWSDEMHANILSIDTTEAEAMPGVVKIITAKDVPGPNEMGNPLFHPRSLVKQFHQPVLCDKEVNRLGDAIAIVVADTRKNARAAAKKIKVEYEKLPVYKSYLEACLPGAVPIMGIPSPFGFQPVIKGEPTADIFDKAGEPASDVHVVEGSFSSSRQPHLSLEPETAQGFYDEDGRLTLAYKTQGPHLHQLMISMILGLDQSQLRVIESPTGASFGAAMGVETLAYVGVATMVMKQPVTLTCTFEEKQRVTGKRPASFCNSKLACDSSGKILAHEFDFVSDLGAYPWGAEGVYVKSARFSLNPYNNPNIRGLVRAGLSNNSQATAYRGAGSPEMYTSGEQIMDMMARKLGIDPFEMRYRNIARPGDLTNNGYPFKFYPLEDMMNKMRPDYEDALKWKKEPATPGWKRGVGVCVGGYHVSTPADKSEVSVEIDPNGFFTYYNAWADQGQGADIGSLALVHEALRPLGVTPDKIRVVQNDTKTCPNTGIAAGSRSHFFAGNATRDAVKKLMDAMRKEDGTYRTYEEMVAEGLPTRYEGLFSTIGSGLSQLSPDTGMGDPMPDQNFIINIARIEVEEATGKVKVSAVHSMADVGVIGNYLAVDGQAYGGLMHSLGFALSENYYDEGKKYGTPLGCGFPKCNDIPDDMTFEYHETPRGNGPFGSGGASECFQSVCHVCVLNAIADAVGVRIYELPALPEKVKAAMEAKAAGREYAPGKYYLGQDYHEVLEDIEANPVATKPAKLSDIEIARAGH

SEQ ID NO: 4938 - protein, 154 aa, Nocardioides sp. JS614
MTGLELGGPAPDFTLRDQFGQDVTLSSFRGRKAVVMFFYPYAFSGVCTGEMAGIRDRLAEFLTFETEVLAISCDPVYSLRAFADQDGLNFPLLSDFWPHGEVSRAYDVFNEAKGSSRRSSYVVDKDGRVRWAVHNAMPEGRDLDEHLKQLTGVL

SEQ ID NO: 4939 - protein, 173 aa, Zea mays
WPCREGERKKNEGSGGEKMFTGMPAVFTGMLQGEELSQAYASGDVFAMPSESETLGQVVLESMASGVPVVAARAGGIPDIIPKDKEGKTSFLFTPGDLDECVRKIEQLLSSKDLRETIGMAPREEMEKCDWRTASKKIRNEHYSTAISYWRKKMGKTNQTSLFQDSSVAALSN

SEQ ID NO: 4940 - protein, 422 aa, Candidatus Kuenenia stuttgartiensis
MLKRSMNRIECMKIAFIVDEFPVLSQTFILNQITGLIDRGYEVDIFPEKPGNEPVMHEDVIKYNLLKRTYYQTIPVNKFSRLGKYIFLVISNFHKNPIVLLKTLNILRIRRSSPLLNILCKAIQFSDKGHYDIIHCHFGPLGNTGALLKDIGVIKGKVVTAFHGYDISMYMKNKGNKVYNYLFEVGDIFLPISERWKNELIKLGCGEKKIIVHRMGIDTSKFRFSPRNHPKNGKIHLLTIARLVEKKGVQYGINAVAKILNKYPDIEYRIIGDGPLRNNMVDLIQELNIGNNVKLLGWKKQEEIIELMKYADILLAPSVTSQDGDQEGIPVVLMEALAQGMPVISTYHSGIPELVQDGISGFLVPERDVDSLAERLTYLCEHQEIWPEMGKAGRKYVEENYDINKLNDQLVELYRRFLNEES

SEQ ID NO: 4941 - protein, 270 aa, Brassica napus; identical to SEQ ID NO: 4401

SEQ ID NO: 4942 - protein, 551 aa, Triticum aestivum
VRENQYVDMVKLGEPGFRERYYAEKFREEAESKPIDQVQRDVVQKYAEGLCWVMRYYYQGVCSWQWFYPYHYAPFASDLKNLTEFEITFFLGQPFKPFDQLMGTLPAASSNALPKHYGDLMTDPNSPLNYFYPKDFEIDMNGKRFAWQGIAKLPFIDERRLLAETQKLEDTLTEEERFRNTTMFDIIYVRETHPLAAQIAFLHQMYSQQMITDPSYCIPIDPAASGGMNGFLCLSQRNWYSISVGSPVKGFNGITNNRVLNATYVNPQYHKHIPEPPEGAIIPPKILKPYDFKPFPVLWHEDNSRRQTRDRPQVHGALTGSVLGEAAHRLLKNSLQIKSGSSAGLLHVPYGAAPYGPGNRARPSGPLGYERGFVDNPYHAHMSRSAPNPRPQFFGEAQANRQNVRILERPNNRNNDGGIHSGMSKLTIQDGPRMHQNPRMQSPGYFPNQPYPNQYGGFPPQSAHAERQFCTAATFPKCTIPTAAACSAAACSKCCIPTAEACSKCRIHAAAAAAATSERGSPTTTSQHLDRQATKRRPGWYTCQAAGPKGK

SEQ ID NO: 4943 - protein, 334 aa, Synechococcus sp. PCC 7335
MRVAKDVTGLIGRTPLVQLNRIPQSEGCLAQILVKLEGMNPAASVKDRVGANMIEAAERAGTITPGETVLVEPTSGNTGIGLAMVAAARGYRLILTMPETMSTERRAMLKAYGAELVLTPGNQGMGGAIAAAEEIATQLSNAFVPQQFKNPANPQIHQETTAEEIWSDTDGQVDIVVAGVGTGGTITGVAERLKTLKESFQAIAVEPENSPVLSGGSSGPHKIQGIGAGFVPDILRVDLIDEVVSVTDEAAISFSRRLAREEGLLSGISTGAALAAAIQVGKRAENADKLIVMVQPSFGERYLSTVLFKDLEPASPSLIPDSLPLEYLATNSAV

SEQ ID NO: 4944 - protein, 387 aa, Microcoleus chthonoplastes PCC 7420
MHIAWIGKKSPFCGNVTYGREVTNALLDRGYQVSFLHFAHDETAADPLCSGCQEVSLPCLYKSQVYTIPSPKASKVLKQALQQLRPDLVHASLTLSPLDFLLPEICEDLNLPLVATFHPPFDGKRRNLKSGTQLVAYQLYAPFLAHYDRVIIFSQLQRDLLVRLGVPRHKLAVIPNGVDVLKYAPGTSNLKVRFDAQRLFVYQGRIATEKNVEALLKAWKQSEMGDRCKLLIVGNGPLVPTLRPFYDRYDGILWLGFVADEQQRIEILQAADVFILPSLLEGLSLSLLEAMACGLACVATDAGADGEVLEGGAGIILNTHRVTSQLNTLLPLLRDHTEWTTLLGQKARARVLERYTLSGNISQLEILYKEVLKGTQACVTHPSPSSL

SEQ ID NO: 4945 - protein, 187 aa, Burkholderia thailandensis E264
MPIINSQIKPFKATAYHNGDFVQVSDETLKGKWSVVVFYPADFTFVCPTELGDLAERYAEFQKLGVEIYAVSTDTHFTHKAWHDTSDTISKIKYPMIGDPTLAISRNFDVLIEEEGLALRGTFVINPQGEIKLCEIHDNGIGRDAGELLRKVQAAQYIAAHPGEVCPAKWTPGADTLTPSLDLIGKI

SEQ ID NO: 4946 - protein, 204 aa, Gibberella zeae PH-1
MSQAFVQRPAPEFTATTLFPGGEFKDIKLSDYQGQWVVLLFYPMDFTFVCPTEIIQYNNALDRFKEINTTVFGVSTDSHFTHLAWVEKPRKQGGLGPDLELPLIADKSTKISRNYGVLIEDEGIALRGLFIIDPKGVLRQITVNDLPVGRDVEETIRLVKAFQFTDEYGEVCPAGWQEGGKTMKADPKGSLEYFSAQGENGAKA

SEQ ID NO: 4947 - protein, 324 aa, Pseudomonas syringae pv. phaseolicola 1448A
MSRIYADNAHSIGNTPLVQINRIAPRGVTILAKIEGRNPGYSVKCRIGANMIWDAESSGKLKPGMTIVEPTSGNTGIGLAFVAAARGYKLMLTMPASMSIERRKVLKALGAELVLTEPAKGMKGAIAKAEELLAGDPEKYFMLAQFENPANPAIHEKTTGPEIWADTDGAIDVLVAGVGTGGTITGISRYIKYTAGKPILSVAVEPDGSPIITQAMAGEEIKPSPHKIQGIGAGFIPKNLDLSIVDRVERVTDEESKAMARRLMQEEGILCGISCGAAMAAAVRLAEKPEMQGKTIVVILPDSGERYLSSMLFSDLFTDQELSQ

SEQ ID NO: 4948 - protein, 212 aa, Burkholderia xenovorans LB400
MSLRLGDIAPDFERQSSVGPIRFHEWLGDSWGVLFSHPADFTPVCTTELGLTAKLAGEFEKRNVKTIALSVDSAESHKEWIKDINETQAANVGFPILADGDRKVSELYDMIHPNANETLTVRSLFVIDPKKKVRLIITYPASTGRNFDEVLRVIDSLQLTDSHSVATPGNWKQGDDVVIVPSLKDEEIIKQKFPKGYKALRPYLRMTPQPNK

SEQ ID NO: 4949 - protein, 53 aa, Glycine max
LVIPLYAASLLLGMNDVRSDRARRQRSDSPFSFPRQKRSVRPRLYLSIDSDSE

SEQ ID NO: 4950 - protein, 426 aa, Cyanothece sp. PCC 7424
MSFNKRIAFISVHGDPAIDIGKEEAGGQNVYVRQVGEALAKQGWQVDMFTRKADATQPAIVEHSPNCRTIRLVAGPETFIPRDKLFSYLPEFVEQLRSFQRDNNIQYSLVHTNYWLSAWVGMELKKYQPIQQIHTYHSLGAVKYQSVSDIPPIATTRLEVEKACLETAARIVATSPQEQDHMRQLMSQKGNIDIIPCGTDIERFGAVSSSEARLKLGIPRSSLVVLYVGRFDQRKGIETLVRAMGHSIFPGLADIRLIIVGGSRPGQSDGIERERIEAIVDELGLRDYTTFPGQIDHETLPYYYAAANLCVVPSHYEPFGLVAIEAMAAGTPVVASGVGGLQFTVVHEKTGLLCPPKDDKAFAQAIDSILSKPTWQAKLGKSARKRVETLFSWDGVAQQLSNLYLSLVDVPTAKPTVNISLKQVSA

SEQ ID NO: 4951 - protein, 326 aa, Azoarcus sp. BH72
MTHWYEDNARSIGHTPLVRLNRVTDGAPATILAKIEGRNPGYSVKCRLGAALIWDAEKRGLLGPGKELVEPTSGNTGIALAFVAAARGIPITLTMPETMSIERRKLLLAYGAKLVLTEGPKGMSGAVAKAEEIAASDPSRYVLLQQFKNPANPAIHEETTGPEIWNDTEGAVDIFVSGVGTGGTITGVSRYLKKTRGKDVLSVAVEPAASPILTQKRSGQELKPAPHKIQGIGAGFVPEVLDLSLVDQVETVGNEEAVDYARRLAREEGILSGISSGAAVAAAVRLARDPQHAGKTIVVVLPDSGERYLSSVLFEGVFDATGLPTA

SEQ ID NO: 4952 - protein, 355 aa, Xanthobacter autotrophicus Py2
MRVLVATDAWHPQINGVVRSLEYTANEAAALGAELEFLSPQGFRSIPMPSYNEIRLALATPRMIMRRIEAMQPDFVHIATEGPIGILVRRACIASRRTFTTSYHTKFPEYLSARAPVPERLTYAWLRSFHNAGGGVMVSTATLERDLEARGFKRLMRWSRGVDAELFRPRPEATLNLPRPVYLFVGRVAVEKNIEAFLELDLPGSKVVVGGGPALNSLKERFPAAHFLGPKEGEDLAQVYAACDVFCFPSRTDTFGIVLLEALASGLPVAAYPVTGPTDVLEDATEPVGVLDNDLRTACLKALELSPAAARRFALRYTWRESARQFIDNVLIAHDIGPIARRYRLRRRRRIASGA

SEQ ID NO: 4953 - protein, 163 aa, uncultured marine bacterium 443
MTTFTLNGETRSVDTDPETPALWVIREQLDLTGTKFGCGMAQCGACTIHVNGRAQRSCTTPIASLEGAMVTTIEGLRSADGSLHALQQAWIDQQAPQCGYCQSGQLMSAAALLAVNPNPTDADIDLAMRGNICRCGMYGRIRSAIKQVAGASFYDAMGGAQNG

SEQ ID NO: 4954 - protein, 308 aa, Arabidopsis thaliana; identical to SEQ ID NO: 4063

SEQ ID NO: 4955 - protein, 187 aa, Pseudomonas syringae pv. syringae B728a
MPIINSQVKPFKATAFKNGAFVDVSDADFKGKWSVVFFYPADFTFVCPTELEDLADNYEEFKKLGVEIYSVSTDTHFAHAAWHNTSPAIGKIQYTMIGDPTLTISRNFDVLIEEAGLADRGTFVINPEGQIKIVELNDGGVGRDASELLRKIKAAQYVAAHPGEVCPAKWKEGEATLAPSLDLVGKI

SEQ ID NO: 4956 - protein, 152 aa, Streptomyces coelicolor A3(2)
MAIQVGDKAPDFELKDNHGATVRLSEFRGRKNVVLLFYPFAFTGVCTGELCEVRDNLPQFSDRDTEVLAVSNDSIHTLRVFAEQEGLEYPLLSDFWPHGNVSRAYGVFDEDKGCAVRGTFVIDQEGVVRWTVVNALPDARDLAEYVKALDAL

SEQ ID NO: 4957 - protein, 306 aa, Streptococcus pneumoniae TIGR4
MSIYNNITELIGQTPIVKLNNIVPEGAADVYIKLEAFNPGSSVKDRIALSMIEKAEQDGILKPGSTIVEATSGNTGIGLSWVGAAKGYKVVIVMPETMSVERRKIIQAYGAELVLTPGSEGMKGAIAKAQEIAAERDGFLPLQFDNPANPEVHERTTGAEILAAFGKDGLDAFVAGVGTGGTISGVSHALKSENSNIQVFAVEADESAILSGEKPGPHKIQGISAGFIPDTLDTKAYDGIVRVTSDDALALGREIGGKEGFLVGISSAAAIYGAIEVAKKLGTGKKVLALAPDNGERYLSTALYEL

SEQ ID NO: 4958 - protein, 739 aa, Idiomarina loihiensis L2TR
MNKTKLLKVLFYLNIAVVVGLIGYKIYLNLVTSEFEAEHTEQLSDISARLEGQDSYSFAVVGNINNSVGIFERRIIPMLNDTDIDFLVSAGNAVSSGGEDKYRAIKGTLSRLDMPYLLTFGNNEYEEFGSFRFYDHYGPHFFSFTADDSRFIFLDSTGKTPWQWQLRWLTDILKADDSKHRFVFIGHPPLEPEEEFFLAQEDDFLQPMEFRHALLQTISNFGVDRVFSSNISIYSEREHNGIPYITTGGAGGLVLNQDESFYHYVKVTVNADGSVEHSVEELEIGQHPILKQLESLWFFIHSLFYVGYLNFILLVSLFLVISTKLYNAVFVGKDYYPDYDIDPQPWFKKPLRVAMFTNNYLPFIGGVPISIERLRLGLVKLKDKVLVVAPRYQQSSEKEEHVVRMPSLFSFGEKSEFQFANIFSGAVRKKVKAFKPDIIHVHHPFWIGSLGVFIARRLKVPVVYTYHTRLEHYAHFVFLPGSLFRNIIAHFLVRRFANKCDGVIVPTQSTEEYLRMIGVKKPTFVQPTGIEFERFQQVDDKQIEELRQQQKLGDETVFVSVSRLSNEKNIDFMIEAVAQLKDQTDKPFRLLIVGDGHQRHRLQERIDNMKLQQYITLVGSVPPEQMAAWYQLGDAFLFASQSETQGMVILEAMAAGLPVVAVRSSGIDDVVEDGHNGFKTPAKQALWCERVKQLLDDEALRQSLAENALAFARDYSVEKFSDDVRHIYAETLARYHEKK

SEQ ID NO: 4959 - protein, 323 aa, Klebsiella pneumoniae subsp. pneumoniae MGH 78578
MSKIFEDNSLTIGHTPLVRLNRIGNGRILAKVESRNPSFSVKCRIGANMIWDAEKRGVLKPGVELVEPTSGNTGIALAYVAAARGYKLTLTMPETMSIERRKLLKALGANLVLTEGAKGMKGAIQKAEEIVASNPEQFLLLQQFSNPANPEIHEKTTGPEIWEDTDGQVDVFISGVGTGGTLTGVSRYIKNTKGKKDLITVAVEPTDSPVIAQALAGEELKPGPHKIQGIGAGFIPGNLDLKLVDKVIGITNEEAISTARRLMEEEGILAGISSGAAVAAALKLQEDEAFTNKNIVVILPSSGERYLSTALFADLFTEKELQQ

SEQ ID NO: 4960 - protein, 420 aa, Verrucomicrobium spinosum DSM 4136
MMTNTYLPLVGGVARSVSTFAEEYRKQRHKVLVVAPTFEGRPPPKRYESYVERVPAIQNFNGSDFSVCLPMAGALNERLDSFQADIIHAHHPFLLGATALRVGASKNVPVVFTHHTRYEDYTHYVPFDSPAFREVAVNLSTQFANLCDGVIAPSESIATMIKERGVESPVKVVPTGIDIKAFSSGDGRGMRKKLKIPDDAFVVGHLGRLAAEKNLEYLAGAVGIFLKINPGARFLVVGSGPAEETVRAALTREGVADRLHLAGKLTGPRLAAAYHAMDVFAFASMSETQGLVLAEAMAAGLPVVALDAPGAREVLKDGVNGIQLPADAEVQTFAKALTQLHDDPAMRETCAMAARETANVFSKERCAKMALDFYAEVRRGTLRQRKEIEQSPWGTLVERLGVEWRLITERADAVVSALMV

SEQ ID NO: 4961 - protein, 388 aa, Mycobacterium sp. MCS
MRGRATHRSDRFPRGMRVVQVANFYGPRSGGLRTAVDRLGAEYCAAGHEVYLVVPGHRTEHQRLATGVTRITLPARLIPFTGGYRAVLPGPVTALLHELQPDAIEVSDRLTLRSLGGWGRRHGVATVMISHERLDRLVGQVVPGRVARAVADIANRRTASNYDTVVCTTAFARREFDRIDATNVVTVPLGVDLDQFHPRRRSDQMRRRWAAPDQTLLVHCGRLSVEKHAHRSIDAVAALRHSGVDARLVVVGEGPLRQRLERQATGLPVDFTGYIGCRDTVAGILASADVALAPGPHETFGLAALEALACGTPAVVSRTSALAEILTADSGAAADNDPQAIADAVGRVIRVPETVRRINARRRAEQFTWPRAAEGMLGAMCAGDVGTV

SEQ ID NO: 4962 - protein, 1369 aa, Oryza sativa
MGSLTRAEEEETAAAEEWSGEAVVYVNGVRRVLPDGLAHLTLLQYLRDIGLPGTKLGCGEGGCGACTVMVSCYDQTTKKTQHFAINACLAPLYSVEGMHIITVEGIGNRQRGLHPIQERLAMAHGSQCGFCTPGFVMSMYALLRSSEQPPTEEQIEDSLAGNLCRCTGYRPIIDAFRVFSKRDDLLYNNSSLKNADGRPICPSTGKPCSCGDQKDINGSESSLLTPTKSYSPCSYNEIDGNAYSEKELIFPPELQLRKVTSLKLNGFNGIRWYRPLKLKQVLHLKACYPNAKLIIGNSEVGVETKFKNAQYKVLISVTHVPELHTLKVKEDGIHIGSSVRLAQLQNFLRKVILERDSHEISSCEAILRQLKWFAGTQIRNVASVGGNICTASPISDLNPLWMATGATFEIIDVNNNIRTIPAKDFFLGYRKVDLKPDEILLSVILPWTRPFEFVKEFKQAHRREDDIALVNAGMRVYIRKVEGDWIISDVSIIYGGVAAVSHRASKTETFLTGKKWDYGLLDKTFDLLKEDVVLAENAPGGMVEFRSSLTLSFFFKFFLHVTHEMNIKGFWKDGLHATNLSAIQSFTRPVGVGTQCYELVRQGTAVGQPVVHTSAMLQVTGEAEYTDDTPTPPNTLHAALVLSTKAHARILSIDASLAKSSPGFAGLFLSKDVPGANHTGPVIHDEEVFASDVVTCVGQIVGLVVADTRDNAKAAANKVNIEYSELPAILSIEEAVKAGSFHPNSKRCLVKGNVEQCFLSGACDRIIEGKVQVGGQEHFYMEPQSTLVWPVDSGNEIHMISSTQAPQKHQKYVANVLGLPQSRVVCKTKRIGGGFGGKETRSAIFAAAASVAAYCLRQPVKLVLDRDIDMMTTGQRHSFLGKYKVGFTDDGKILALDLDVYNNGGHSHDLSLPVLERAMFHSDNVYDIPNVRVNGQVCFTNFPSNTAFRGFGGPQAMLIAENWIQHMATELKRSPEEIKELNFQSEGSVLHYGQLLQNCTIHSVWDELKVSCNFMEARKAVIDFNNNNRWRKRGIAMVPTKFGISFTTKFMNQAGALVQVYTDGTVLVTHGGVEMGQGLHTKVAQVAASSFNIPLSSIFISETSTDKVPNATPTAASASSDLYGAAVLDACQQIMARMEPVASRGNHKSFAELVLACYLERIDLSAHGFYITPDVGFDWVSGKGTPFYYFTYGAAFAEVEIDTLTGDFHTRTVDIVMDLGCSINPAIDIGQIEGGFIQGLGWAALEELKWGDDNHKWIRPGHLFTCGPGSYKIPSVNDIPLNFKVSLLKGVLNPKVIHSSKAVGEPPFFLGSAVLFAIKDAISAARAEEGHFDWFPLDSPATPERIRMACVDSITKKFASVYYRPKLSV

SEQ ID NO: 4963 - protein, 1000 aa, Zea mays
LKWFAGTQIRNVASIGGNICTARPISDLNPLWIAVGAKFHIIDVNGNVRTTLAKDFFLGYRKVDIKPEEILLSIILPWTRPFEYVKEFKQAHRREDDIALVNAGMRVYLQETERNWIISDVSIVFGGVAAVPLSASRTENFLTGKKWDSGLLDDTFNLLKEDISLSENAPGGMIEFRRSLTLSFFFKFFLSVTHEMKIKGLLADGLHADHLSAVQPYSRPVTVGTQSYELVRQGASVGQPMVHMSAMLQVTGEAEYTDDTPTPPNTLHAALVLSKKAHARILSIDDSLAKSSPGFAGLFLSKDIPGVNHTGPIIHDEEFFASNIVTCVGQIIGIVVADTHDNAKTAANKVHIEYCELPAILSVEEAVKIGSFHPNTKKCLVKGDVEQCFLSGACDRIVSGQVHVGGQEHFYMEPQCTLVWPVDSGNEIHMVSSTQAPQKHQKYVASVLGLPQSKVVCKTKRIGGGFGGKETRSAIFAAAASVPSFCLRRPVKLVLDRDVDMISTGQRHSFLGKYKVGFTNEGKILALDLEIYNNGGHSLDLSLAVLERAMFHSENVYDIENIRINGQVCFTNFPSNTAFRGFGGPQGLLIAENWIHHIATELQRSPEEIKELNFHNDGVVLHYGQLLQNCTISSVWDELKASCNFVEARKAINNFNSNNRWRKRGIAMIPTKFGISFTAKFMNQAGALVQVYTDGTVLVTHGGVEMGQGLHTKVAQVAASSFNIPLSSVFISETSTDKVPNASPTAASASSDLYGAAVLDACQQIKVRMEPIASKGTHNSFAELAQACYMERVDLSAHGFYATPNIGFDWTIGKGTPFNYFTYGAAFAEVEIDTLTGDFYTRTADIVMDLGFSINPAIDIGQIEGAFIQGLGWAAIEELKWGDDNHKWIRPGHLFTCGPGSYKIPSVNDIPLNFKVSLLKGVPNPKAIHSSKAVGEPPFFLGSAVLFAIKDAISAARAEEGHLDWFPLDNPATPERIRMACVDSITKKFAGIDYRSKLSV

SEQ ID NO: 4964 - protein, 368 aa, Methanosarcina mazei Go1
MKILHLTKKYHPMIGGDAYAVYNLKKYQMETGCAVYVLTSNCDEITQNEKVFKYGLKDTSANLDKITPQRLISLFLLFFESFRMLGELKPDIIHSHSADLGFFISFAAKFYNIPVVNTCHGISFDDKRYFFLKRQAEKFFIKHSGFKKVIAVDKNGLEILKKAEIKNGIYIPNGVDIHRFENITREKNCGKIRFLFVGRLEKQKGLEYLLKATEYLRSKNDFEIIIAGNGREAKKLKESAKEYGIQDIVKFTGKLSEQELFEHYLKCDIFVLPSLWEGLPLTLLEAASAELPIIATKVGGIPSVFSHGKNAILVKSGESVELAREMRRLIEDKKLREVLGSNARNLVEEYSWENSVKKLDSVYSLRVS

SEQ ID NO: 4965 - protein, 792 aa, Pseudomonas syringae pv. tomato str. DC3000
MSEHSSPLTQADMLALFQQDLSTGVGRSVKHDSADKHVSGEAVYIDDRLEFPNQLHVYARLSDRAHARIVSIDTAPCHAFEGVRIAITHQDIPGLKDIGPLLPGDPLLAIDKVEFVGQPVLAVAARDLDVARQAAMAAIIEYEDLEPVLDVVQALRQKHFVLDSHTHKRGDSATALQGATHRLQGNLHIGGQEHFYLETQISSVMPTEDGGMIVYCSTQNPTEIQKLVAEVLNVPMNRIVVDMRRMGGGFGGKETQAASPACLCAVIARLTGQPTKMRLQRFEDMQMTGKRHPFYIEYDVGFDDNGRLQGIQLDLAANCGYSPDLSASIVDRAMFHADNAYYLGEATINGHRCKTHTASNTAYRGFGGPQGMVAIEEVMDCIARFLGKDPLAVRKANYYGKTERNVTHYYQTVEHNLLEEMTADLEQSSQYAERREAIRGFNASSPILKKGLALTPVKFGISFTASFLNQAGALIHIYTDGSIHLNHGGTEMGQGLNTKVAQVVAEVFQVDIDRIQITATNTDKVPNTSPTAASSGTDLNGKAAQNAAEILKQRLVEFAARHYNVAETEVEFRNGHIRIGEIVLPFAELAQQAWMGQVSLSSTGYYKTPKIFYDRSQAHGRPFYYFAFGAACVEVIVDTLTGEYKTLRTDILHDVGASLNPAIDIGQVEGGYIQGAGWLTTEELVWNDKGKLMTSGPASYKIPAVADMPLDLRVKLVENRKNPEDTVFHSKAVGEPPFMLGIAAWCAIKDAVASLGDYRHQPNIDAPATPEKVLWGCEQMRQLHTAETHEYE

SEQ ID NO: 4966 - protein, 152 aa, Robiginitalea biformata HTCC2501
MATYQLNINGETREVDVDPSTPLLWVLRDHLNLVGTKYGCGIAQCGACTIHLGNTATRSCMLPVSAVGNQEVTTIEGLSENGDHPVQKAWLEVDVPQCGYCQAGQIMSAAALLKSNPSPTDADIEGAMNGNICRCGTYVRIKKAIKMAASGE

SEQ ID NO: 4967 - protein, 200 aa, Prochlorococcus marinus str. MIT 9303
MTTNECLRVGQQAPDFSATAVVDQEFKEISLSQYRGKYVVLFFYPLDFTFVCPTEITAFSDRYTDFSSRNTEVLGVSVDSQFSHLAWIQTSRKEGGLGDINYPLIADLKKEISTAYNVLDDAAGVALRGLFIIDPDGVIMHSTINNLPVGRNVDETLRVLQAFQYVQSHPDEVCPANWTPGEKTMKPDPVGSKEFFASIN

SEQ ID NO: 4968 - protein, 146 aa, Trichodesmium erythraeum IMS101
MALSVGTKAPEFTVKDTNGKTVSLSDFAGKTVVMYFYPKDDTPGCTKEAQSFRDNYAEYQGKDMVVLGVSMDDEASHKAFTEKYGLPFQLLADVDGAITKAYDVEGGGYPKRVTYIIDAEGNISHVDQNVKTGSHAQDILEVIGKK

SEQ ID NO: 4969 - protein, 201 aa, Polytomella parva
MLSSIKSSLKLSSLILKVNHNGRYLLFLVIVSKALFPSTADMHVTLCLQCPCEFIYVILCPYSILHFFNNILLLNLFLFMNVGKYVVLFFYPLDFTFVCPTEITAFSDRYSEFKKLNTEVIGVSVDSKFTHLAWIQTDRKEGGLGNLTYPLMSDLKRDISESFGVLTPDGIALRGLFIIDPQGFVQHATINNLGFGRSVDE

SEQ ID NO: 4970 - protein, 515 aa, Glycine max
MKTTAITINPSLSPPFCSKATTPPSCSSSSSSFPPSFPRFHLSGAKPISLSCRGTRLCSLKGSKTLWGRKSFVLGAGNMTMAEVDSHEEGENEGALVGSENENNSRPRRIALFVEPSPFAYVSGYKNRFQNFIRCLREMGDEVMVVTTHEGVPQEFYGAKLIGSWSFPCPLYQKVPLSLALSPRIISEVARFKPDIIHASSPGIMVFGALIIAKLLCVPIVMSYHTHVPVYIPRYTFSWLVKPMWLIIKFLHRAADLTLVPSAAIAGDLLAARVTAANKIRLWNKGVDSEKFHPKYRSHEMRLRLSNDEPDKPLIIHVGRLGVEKSLDFLKRLMDRLPDARIAFVGDGPYREELEKMFEGMPAVFTGMLGGEELSQAYASGDVFVMPSESETLGFVVLEAMSSGIPVVAARAGGIPDIIPADQDGKTSYLYDPRDLEDCLSKLRPLLHNKELRETMGKAAREEMEKYDWKAATRKIRNEQYNAAIWFWRKKRAQLLRPFQRLAKRFFPSPQVNYR

SEQ ID NO: 4971 - protein, 530 aa, Oceanobacter sp. RED65
MAIQDIFKTRAQSENWDLHDAGLKQQNETIEADVIIVGTGAGGGVTAEVLSQAGLKVVMIEEGGLYTSDNFNMDELEATANMYQESGGRSTKDGAISIFQGRTVGGTTVINWTSSFRTPPQTLDFWQKEFGIEDASQQQMAPYFEQMEQRLNVSKWAMPPNANNDTLKQGCEKQGWSWGVIPRNVAGCWDLGYCGTGCPTNAKQSMLVTTVPEALKNGASLYYRCSAHKLHFSEHKVDAVECRALKADGQTPTGITLTFKAPTIVLSGGAINNPGLLLRSQAPDPHGRIGKRTTIHPVNASLASMAHDVNGFYGAPQSIYSDHFQWQDRDGIGYKLEVPPLQPALSSQILGFHGLDLSEQMADLPNMQVVIALLRDGFHEGSQGGTVELDDGGKPILDYPITDYLWQGLKHAHYTMAEAQFAAGAKQVMPLHHDAGYAKTMAECRKMIDALPMEKHRERIMTAHLMGGCAMGGDERQSVVDNNAKFYQADNLYVIDGSVFPTSIGANPQLSIYAMALKQAKKLAQSLTSA

SEQ ID NO: 4972 - protein, 622 aa, Arabidopsis thaliana; identical to SEQ ID NO: 4136

SEQ ID NO: 4973 - protein, 313 aa, Streptococcus pyogenes M1 GAS
MTKIYKTITELVGQTPIIKLNRLIPNEAADVYVKLEAFNPGSSVKDRIALSMIEAAEAEGLISPGDVIIEPTSGNTGIGLAWVGAAKGYRVIIVMPETMSLERRQIIQAYGAELVLTPGAEGMKGAIAKAETLAIELGAWMPMQFNNPANPSIHEKTTAQEILEAFKEISLDAFVSGVGTGGTLSGVSHVLKKANPETVIYAVEAEESAVLSGQEPGPHKIQGISAGFIPNTLDTKAYDQIIRVKSKDALETARLTGAKEGFLVGISSGAALYAAIEVAKQLGKGKHVLTILPDNGERYLSTELYDVPVIKTK

SEQ ID NO: 4974 - protein, 154 aa, Helicosporidium sp. ex Simulium jonesii
NGKTPMVRLRKLPLGCTANIVAELESMEPCKSVKDRTALNMVRRAEEHGLITPGQTILVELTSGNTGVGLAFVGAARGYRVMLTMPDTMSLERRILLKAFGVELQLTRNSGGMSDAIVRAERIVERVPGSYMLQQFDNMANPEVHYQTTGPEIW

SEQ ID NO: 4975 - protein, 205 aa, Ehrlichia ruminantium str. Welgevonden
MNLITKQAIDFTAKAVMPDDKICEFNLKQYISGKYAILVFYPRDFTFVCPTEIISLHNRIPQFIEKNTEIIGISTDSEFCHSHWRNISVNKGGIDKISFPLIADDSHSISNNYGVLYNNSIALRATFIIDDHFIVRHQSINDLPIGRNVDELLRIIDAIKHHQIHGEVCPAGWIKGDPAMEASQHGIEDYLKSHIDNLEKSIMDK

SEQ ID NO: 4976 - protein, 394 aa, Bacillus licheniformis ATCC 14580
MMKQLKIGITCYPSVGGSGIIATELGKLLAEKGHEIHFITSSVPYRLNKVYSNIYFHEVEVNQYAVFKYPPYDLALASKMAEVAKREQLDVLHAHYAVPHAISAFLAKQMLNGNIKTVTTLHGTDITVLGYDPSLKDLIKFAIESSDRVTAVSSALAAQTYDLIKPNKKIETIYNFVDERVYLKKQEHHSLKEQYGIAPDEKVIIHVSNFRQVKRVQDVIHVFSRIVKQMKSKLILVGDGPEMTVICQLVRQLGLKDDVLFLGKQDSVEELYAISDLKLLLSEKESFGLVLLEAMACGVPCIGTNIGGIPEVIKNGVSGYLVDVGDIEGAASKALHLLTDESLQRQFAEAALQSIKERFSSNKIIAQYEEIYQQLTDWECDNGGSLFEGSSSPS

SEQ ID NO: 4977 - protein, 161 aa, Helicosporidium sp. ex Simulium jonesii
ANPEVHYQTTGPEIWRDTEGRVDIFVAGVGTGGTITGTGRYLKEQNPDVQVVAVEPLESPVISGGEPAPHMIQGIGAGFIPKNLDMSIVDSVLTVGSAEAMVAARRLASEEGLLVGVSSGAALVAVDRLARRPENEGKLIVTVLPSMGERYLSSALFQDLR

SEQ ID NO: 4978 - protein, 177 aa, Zea mays
MDLVQAPARITADSSFRWRKPIGADVVELIEKYMELLRVKVIEDGQMCWFPPIFPSDDGISPQFQPRPAFFIVFSPSPAYIRNGDLALFLARAMAIGGKEVKDDLEEAPPPVLDEAMRPRRVALFVEPSPFAYISGYKNRFQNFIKHLREMGDEVIVVTNHEGVPQEFHGAKVIGSW

SEQ ID NO: 4979 - protein, 215 aa, Triticum aestivum
MSLARILCRATGMKAAAPLRSAPKLFGRSSLMAPNSVAFKPAAFRRAAFGLCASRFFHNSAARLSPEFTSKAMVQSPAPAWKADAVVNGQFKTVSSTDYKGKWLVLFFYPLDFTFVCPTEIIAFSDRANEFRALGCEVVGASVDSKFSHLAWINLPRKEGGLGKMDIPLIADLDKKISKDYGVLLPAGIALRGLFIVDPSGTLRISTVNDLPIAA

SEQ ID NO: 4980 - protein, 450 aa, Picea sitchensis
MSRGAMAEEVYISFVILLLLVALQSTATSTWEESNERDWRNEQAKDRITQLPGQPSNVNFAQYSGYITVDNNAGRALFYWLIEATENPSSKPLVLWLNGGPGCSSVAYGEAEELGPFHINADGKSLYLNPYSWNKLANILFLDSPAGVGFSYTNTSSDISQSGDRRTGHYVPQLAQVIYKRSKGLANPVINLKGYMVGNGVTDDFHDIVGIFEYMWSHGLISDNTYRLLNVLCDFSSLLHPSALCNMALDKADVEMGEIDPYSIYTPPCLNSTGTYRKQHRKRYPWRHLFGEYDPCTEKHSEIYFNLPEVQKALHANVTGIPYRWTTCSDAVADHWGDSPRSMLPIYQELIKAGLRIWMFSGDTDAVIPVTSTRYSINALKLPTVTQWHPWYDNGQVGGWTQVYEGLTFVTVRGAGHEVPLHEPRKAFTVFESFLEGKPMPVSPKLVDTL

SEQ ID NO: 4981 - protein, 191 aa, Acinetobacter sp. ADP1
MDLLMMIRNVVLSCALVFTGTVFSSQIFANPFSNQNQAEKQWVGQPAPAFKLQDQNGKWHSLSDYAGKWIVLYFYPKDNSPGCTQEANQFKALYPQFLKSNAAVLGVSLDDVQSHQKFSEKLGLNFPILSDDNHQLAEKFGIVRNLGIVKIAKRESFLIDPKGTIVYHYTSVNTQTHADEVLKDLKRFQSK

SEQ ID NO: 4982 - protein, 133 aa, Zea mays
MCKDLLLNYFTASKTTNCEFHSEQTFQLSRADRETVQRQEYDLQVWCILINDKVQFRMQWPQYAELQVNGIPVRVMTRPGSQLLGINGRDDGPLVTTCSREGINKISLSRVDARTFCFGVRIVRRTVPQVLFI

SEQ ID NO: 4983 - protein, 768 aa, Arabidopsis thaliana
MENHSCLQKDTTSAAKLDVETGNLRQRDETKPFYANSLTPREMESLVAICDTFISSIDDSGVGHVDDCVAGYFSASASQTGTPDRVARLMSERLHHPKKWILRAGLWLLSTWIGSLVLCGWRSFTGEFPYFRRFCRLPEKRREEILLNWSSSYFSLLRMLFRTIKLISALVFFTQVDEKGRNLAWKAIGYNGPSPDHSDHEVELNEEKKKKKPEEIFGPLYNGIVDLKSPREAVEKKLAGRGFAVSNQKRNTNGSSISDPVMKIQCDAVVVGSGSGGGVAAGVLAKAGYKVLVIESGNYYARSKLSLLEGQAMDDMYLSGGLLATSDTNVVILAGSTVGGGSTINWSASIKTPEHVMKEWAEKSKLEMFGSDLYREAMDVVCKRMGVQCGFVEEGFNNEVLRKGCEKLGLPVKNIPRNAPSDHYCGFCCLGCKKGQKQGTSETWLVDLVESDNGLILPGCQATEVMYDCEQGKKKKATGVAFAFGEEIYVVESRVTIVACGALRTPHLLKRSGLKNSNIGRNLCLHPVVMAWGWFPEEDKWPEKKKKSYEGGIMTAMSSVVIEETHSSYGEMVIQTPALHPGMFSGIIPWTSSKDFKTRMLKFSRTAHIFALLRDKGTGTIDSKTYIDYNLNDEDEESLKNGLERVLKILAAAGAEEIGTHHSEGRSLNVRTASSLEIERFVREESSKPLKDLSGQICSAHQMGSCRMGIRPEESAVRPTGETWEVERLFVADTSVFPTALGVNPMVTVQSIAYCIGLNVVDVLKKKK

SEQ ID NO: 4984 - protein, 171 aa, Chlamydomonas reinhardtii
MGIPKFYRWLSERYPLLNQKLTLTEGPPEMDNLYLDMNGIIHNCTHANRKDIGGVTEEDMMLKVFDYLDKLVQIVRPQKLLFMAIDGVAPRAKMNQQRSRRFKSAMERLKNEEEQRRKGEVVPDDAFDSNCITPGTEFMARLGKHLRFFIRRKMAEDPLWQKPNVVFSGRN

SEQ ID NO: 4985 - protein, 321 aa, Idiomarina baltica OS145
MKVYDNVLEMIGNTPLVKVNNIDTGPCDLYLKLELQNPGGSIKDRIAVEMINAAERDGKLKPGDTIIEATAGNTGLGLALVAASKGYPLMIVMPDKMSQEKVNNLRAMGATVKQTRSDVQKGHPEYYQDMAARLAEENGWFYVNQFENPANVEAHYKTTGPEIWQQTDGDIDAFVCGVGSGGTLTGIGRYLREQKSDVDLVLADPAGSILEPLVNRGEHVEAGSWLAEGIGEDFVPKICEIELANKAYAISDKEGMQMARQVLEKEGVMVGSSSGTLIAAAVRYCQDQTERKQVVTLACDTGNRYLSKLFNDEWMRENNLL

SEQ ID NO: 4986 - protein, 156 aa, Rhodopseudomonas palustris CGA009
MTVNGKLVTADVEDRTLLVHLLRDHLGLTGTHVGCDTSQCGCCVVHIDGRAVKSCTTLVGQVDGANITTIEGISKGDELHPMQAAFRDNHGLQCGYCTPGMIMSAIDIVHRYGGNLDEETVRHELEGNICRCTGYHNIVKSVLDAASRMNVAQAAE

SEQ ID NO: 4987 - protein, 784 aa, Rhodopseudomonas palustris CGA009
MGIEGIGARVARKEDRRFITGRGRYVDDIKLQGMTFAHFVRSPHAHAKITGIELDAAKAMPGVVDVLTGQQIVDDKVGNLICGWAIHSKDGSAMKMGAWPAMAPETVRFVGQAVAVVIAESKNLARDAAEAVVVHYEELPAVANIKAAIADGAAQLHPEAPGNIVYDWEIGDQKATDEAFSKAANVVSIELTNNRLVPNAMEPRAALAEYNPAEEHFTLYTTSQNPHVARLVLSAFYNIAPEHKLRVVAPDVGGGFGSKIFIYPEEMVALWASKKTGRPVKWTGDRNEAFVTDAHGRDHLSKAEMAFDADNKMLGLRVKTYANFGAYMSLFSSSVPTYLYATLLSGQYNIPAIYTEVVGVYTNTTPVDAYRGAGRPEACYLLERLVETAARQLKVDPAELRRKNFITQFPHQTPVIMAYDTGDFNASLDAALKAIDYAGFPARKAKAKSEGKLRGLGLSCYIEACGIAPSKAVGSLGAGVGLWESAEVRVNPVGTIEILTGSHSHGQGHETTFAQLVADRLGIPINQVSIVHGDTDKVQFGMGTYGSRSAAVGMSAIFKAMEKVEAKAKKIAAHQLEASENDIVIENGEFKVTGTDKAIALPMVALAAYTAHNLPDGMEPGLKESAFYDPTNFTFPAGSYICEVEVDPGTGKTSFVNFVAVDDFGRLINPMIVEGQVHGGLVQGIGQAILEHAIYDADGQLVTASFMDYAMPRADDVPSFNISHTTTLCPGNPLGVKGCGEAGAIGASAAVINAITDAIGNNRLEMPATPDRVWHAMQLQQAAE

SEQ ID NO: 4988 - protein, 153 aa, Robiginitalea biformata HTCC2501
MANFNLKINGSTMAVDVDPATPLLWVLRDHLNLVGTKYGCGIAQCGACTIHLGDTATRSCMLPVSAVGDQEVTTIEGLSENGDHPVQKAWLDVDVPQCGYCQAGQIMTASALLKQNPNPSDSDIESAMNGNICRCGTYVRIKKAVKQAAQGGS

SEQ ID NO: 4989 - protein, 157 aa, Gluconacetobacter europaeus
MTTFRLNGREVTVDVPGDTPLLWVIRDEVGLTGTKFGCGIGMCGACTIHIGGRATRSCVTPVSAAEGADITTIEGIDPEGNHPVQQAWREIQVPQCGYCQSGQIMQAVSLLKDYPSPTDEEIDAVMAGSLCRCMTYIRIREAIKKAAATARGDASNG

SEQ ID NO: 4990 - protein, 906 aa, Desulfovibrio vulgaris subsp. vulgaris str. Hildenborough
MIKRMVTINGAPRMAITRPDTTLATYLRESLGLTSVKVGCGQGHCGSCNVIVDGKLVRSCSYKMSRLTEGATITTLEGIGTPDNLHPLQVAWMAHGAAQCGFCSPGFIVSAKALIDTNPKPSRDDVRDWFQKHRNACRCTGYKPLVDAVMDAAAVVRGEMKVDDLLYRIPADGRIWGTKYPRPSALAKVTGTLDFGADLGIKMPEETLRCALVQAEASHAKILGIDTSEAEKMPGVFKVVTHKDIKGKNRITGLITFPSNKGDGWDRPILCDEKVFQYGDAIAIVCADTEEHAKAAAAAVKVDLEVLPAYMSAPAAMADDAMEIHPGTPNVYFEQHLVKGPETKPIFDKADVVVEDDFYVGRQPHMPIEPDVGFAFFNEDGKLCIHSKSIGLHLHLYMIAPGLGIEPDNIIMVQNPTGGTFGYKFSPTMEALVGAAAMATGRPVFLNYSWYQQQTYTGKRSPFFINLRYAATREGKLLAMESDWSVDHGPYSEFGDLLTLRGAQFIGAGYDIPSIRGLGRTVCTNHAWGSAFRGYGSPQSEFASEVLMDELAEKLGIDPLELRYRNVYREGATTPTGQVPEVLSLPELLDTARPRYLAAKEKAARESTAEVKKGVGISVGVYGCGLDGPDTAEIAVELNEDGTVTIFATWHDHGQGADMGTLGTAHEALRPLGIAPENIRLVLNDTAVCPNAGPAGGSRSQVVVGRAIKAGCELLLGGMRKADGTFRTYAEMRDEKIATRYSGKWSAPCTDCNAEGQGSPFAVYMYGVFLAEVSVELATGKTTVDKMTLVADIGKIVNRLTVDGQLYGGIAQGIGLALSEDFEDIKKHSTMPGAGFPYIKQIPDEIDLVYVEVPRPEGPFGAGGVGELPLTCPHAAIINAIHNACGVRVTRLPALPEKVLAGLQGK

SEQ ID NO: 4991 - protein, 749 aa, Lotus japonicus
MRKECHPLLRGGRKDNKFRQGFSSSEMESLASICEVILPPLPMDALKIKKHDDVSIEDVEFFWNTSASHYPIPHEVAEILSKRSLIEAVILIRVVLWLLATRLGTFLLCGLLCFSEKWPFINNFSSMSLKKRERVMQWWLKNRFITPIRLAFAYLKVLCLFAYFTWVDENGDNPAWKAIGYEVSADEKLPNSSNGRLLEKGIVETMHETNSTLQQSLTEKGLNVTLDSRNNILKVKCDAIVVGSGCGGGVAASVLSGAGHKVVVLEKGNYFAPRDYSSLEGPSMDQLYETGGILASVDSRILLLAGSTVGGGSAVNWSACIKTPHEVLKEWSENHNLSLFSTSEYLSAMETVCERIGVTESCTHEGFQNQVLRKGCQNLGLKVDYVPRNSSGNHFCGSCGYGCPKGEKQGTQDTWLVDAVENGAVIITGCKAERFLLENNRNGSGRKKKCLGVLAKALSSRVTMKLQIEAKVTISAGGALLTPPLMISSGLKNKNIGKNLHLHPVLMTWGYFPESTSELKGKIFEGGIITSVHKVPSRDSNSYSDTRAIIETPSLGPGSFASLCPWESGLDFKERMLNYPRTAHLITIIRDKACGQVTTEGRVSYKLSAFDKENMKCGLQQALRILKAAGAVEVGTHRSDGQRVKCGEVSENEMAEFIDSVCPMEGALSPGENWNIYTSAHQMGSCRMGMNEKEGAVDENGESWEAQGLFVCDASLLPTAVGVNPMITIQSTAYCISNRVVDYLKRDQI

SEQ ID NO: 4992 - protein, 330 aa, Myxococcus xanthus DK 1622
MAPRIGTLWDSVGNTPLLRIGSLSRQTGCEILAKAEFMNPGGSIKDRAAKGMIQCAEAQGLLKPGGAIFEGTAGNTGIGLGLLGRERGYRVVVTMPDNQAREKYELLEAMGVEVRKVPAVPFANPNHFFHQARVLAEAQGGFWANQFENPANGDYHYETTGPEIWEQCEGRVDVLVASVGSGGTMGGVSRYLKEKNPAVRVVLVDPPGSGLFTYVREGRMEGPGSSITEGIGIMRLTENFRRAQVDEAMRLGDQDMVEMLYHLAREDALVVGTSAALNVRAAWELARRHRGEGLRIVTFLCDHGSRYASKVFNPEFLASKQLEVRPLPVD

SEQ ID NO: 4993 - protein, 396 aa, Pseudomonas putida GB-1
MNTPALRITLVSETFPPEINGVANTLGRLSEGLRQRGHEVEVVRPRQAGEAPVQNDPHLMLCRGWALPGYPGLQWGEVSMHKLLRRWRRQRPDVLYIATEGPLGLSALRAARRLGIAVVSGFHTNFPQYSGQYGLGLLARLLTHYLRWFHRRTAITLVPSVSQRLELERRGFERLELLARGVDAGLFNPTRRNQALRESWGLGPDDIAVLHVGRLAVEKNLGLLRPCLEALQKTYPQKRLRLIMVGDGPQRASLQQQVPDAVFCGAQRGEVLAEHYASGDLFLFPSLTETFGNVVLEAMASGLAVVAYDEAAAAQHIRHGHSGGLAMPGDEAAFIDAACWLLEEEETLRRVRLNARQHASRQGWPAIVEQFEGYLHSAQNPSAAAPASSLGPTRSV

SEQ ID NO: 4994 - protein, 750 aa, Lotus japonicus
  misc_feature (314)..(314): Xaa can be any naturally occurring amino acid
MEREESCETHPLLKGGRRKEKGYSHGLSSSQMHVIAAICEALFPSQPLDSQNNQSSVDKALSAFYTASGSQAPLPDEAAELLFKFNRSFPEALSLVSWVLLILSFRLGTLLLCGTLCLDWRWPFIHKFSEIPLEKREEILKRWSREKCWIPLRLVFVLTKLVCFYNLFSRADVNGHNPIWKAIGYQVDTREKLTQKKRPLQEGLIETMYETDSTLIQSLTEKGLEVTEDLEQNMYKIKCDAVIVGSGCGGGVAAAVLANSGHKVIILEKGEYFVSHDYSSLEGPSMNELYESGGILPSLDGKMMILAGSTLGGXSAINWSACIRTPDSVLREWSEKHKIPLFASPDYQSAMDTVCRRIGVTENCNKESFQNQILRQGCAKIGFKVEPVAINSSADHYCGSCCYGCRTGDKKGTESTWLVDAVGNGAVILTGCKAEKLNFTLKDGDNGTKRKTCSGVIASATWRSKVTKKLQIESKVTISACGSLSTPPLMISSGLKNPNIGKNLHLHPCQFAWGYFPEDMTNFSGNNYEGGIITSIHKVFEEDSTSTPRIIIEAPALGPGSFSALVPWVSGLDVKERMVKYARTANLFALVRDHGSGEVKAEGRISYKLDKIDRESLQTGLRKALRILVAAGAVEVGTYRSDGQRIKCRGIKESDLEEFLDSVRVVGGPSSRNEVWTVFTSAHQMTSCRMSATEEEGAVDENGESWEAKGLYVCDGSVLPSAVGVNPMITIQSTAYCIASNIAESLKKQN

SEQ ID NO: 4995 - protein, 212 aa, Pseudomonas syringae pv. tomato str. DC3000
MTLRLGDIAPDFEQESSEGRIRFHEWLGNSWGVLFSHPADFTPVCTTELGFTAKLKDEFAKRGVKAIALSVDPVDSHIKWIDDINTTQNTQVNFPILADADRKVSDLYDLIHPNANDTLTVRSLFVIDPNKKVRLTITYPASTGRNFHEILRVIDSLQLTDNYKVATPANWVDGDDVVIVPSIKDEAEIKERFPKGYKAVTPYLRLTPQPNR

SEQ ID NO: 4996 - protein, 401 aa, Vibrio vulnificus YJ016
MKILLVNKFFFLKGGAETVFFQERELLQSAGFEIIDFAMKHEKNLTSPYSDFFVDNVDYHQGHGISSSLKTAWAFIHNSDACAKLKALIEQEQPQVVHFHNIYHQLTPSLIKVAKSAGCKTVLTAHDTKIACPSYTMYRQGKTCEACLDGSVWNATRYRCQQGSLFKSVLLSLEATYQSLAGNYRALDVIISPSEFLASILRRKLPENHIEVIVNGIDENVDCSDVSDDGYFLYLGRLSQEKGVATLAAAYQQSQRLLPLKVVGDGPLHDTLKQQYSMIEFLGFQSGDALHQLIKKASAIVVPSECYENCSMSVLEAMAYGKPVIGANIGGIPEQVREGTEGHLFVAGNSTSLAEVMDTFAQHPEKAAQLGHNARQRLEQRYSLTRHQQSLMSLYRNLINK

SEQ ID NO: 4997 - protein, 294 aa, Robiginitalea biformata HTCC2501
MPGSLEDLIGNTPLVRSRKLVENPDVALYFKLEGQNPGGSVKDRAALNMIRSMLSRGEIGPETRLIEATSGNTGIALAMIARLYNLDLELVMPANATAERVQTMRAYGAKVTLTPQDVGIEGARDYAEEKVRDAGYKMFDQFANPDNWKAHYQTTGPEIWRDTRGAITHFVSSMGTTGTIMGTSAYLKEKNPDIQIVGVQPDDQASIPGIRKWPQAYLPKIYRPERVDHILEVTEKEARDMARRLASEEGIFAGMSSGGAAAAAVRLASELDSGHIVSIVCDRGDRYLSSDLFE

SEQ ID NO: 4998 - protein, 303 aa, Zea mays
  misc_feature (114)..(114): Xaa can be any naturally occurring amino acid
NLLTHSLSHSQRQPRKGGNPSQLIPNPKPPIHPSPPHPLRAAMACSFAAATVVSSAPTPAARPLAAAPQSVSVSRSAVATAARPLRLVASRSARAIRLVARAGGVDDLPLVGNXKAPDFEAEAVFDQEFINVKLSDYIGKKYVVLFFYPLDFTFVCPTEITAFSDRYEEFEKLNTEVLGVSIDSVFSHLAWVQTDRKSGGLGDLKYPLISDVTKSISKAFGVLIPDQGIALRGLFIIDKEGVIQHSTINNLAIGRSVDETMRTLQALQYVQENPDEVCPAGWKPGERSMKPDPKGSKEYFAAV

SEQ ID NO: 4999 - protein, 194 aa, Rhodococcus sp. RHA1
MQVNMTVNGEAVSAEVEPRMLLVHFLRDQLGLTGTHWGCDTSNCGTCVVTVDGDPVKSCTMLAAMAGGHDVRTVEGLEHDGELDPVQQGFMQCHGLQCGFCTPGMMMTARALLDREESPDEATIREAISGQICRCTGYTTIVRSIQWAADHRAGEAAEPEPAGDFDADVQEDKTRGAEGAPMTVEEHATTGSAS

SEQ ID NO: 5000 - protein, 800 aa, Rhodococcus sp. RHA1
MTTVESRPPSGGADIVDNDKKPCGHGRMLRKEDPRFIRGLGNYVDDITLPGMLHLAILRSPVAHARIVNIDTTAAQEHPKVTAVVTGADLAAKNLAWMPTLSNDVQAVLATDKVRFQGQEVAFVIAEDRYSARDALELIDVEYDMLDPVVDARAALSPDAPVIRDDLEGKTDNHCFDWETGDAAATEAVFAKADVVVKQEIVYPRVHPAPMETCGAIADVDKVSGKLTLYTTSQAPHAHRTVYALVSGIPEHKIRVVSPDIGGGFGNKVPIYPGYVCAIVASLVTGKPVKWMEDRSENLMSTGFARDYIMVGEIAATAEGKMLAIRTKVLADHGAFNGTAAPVKYPAGFFGVFTGSYDIEAAHCAMTAVYTNKAPGGVAYACSFRITEAVYLVERLVDCLAFDLKMDPAELRLKNLLRPEQFPYTSKTGWVYDSGDYETTMRKAMDMIGYQQLREEQKERRERGELMGIGMSFFTEAVGAGPRKDMDILGLGMADGCELRVHPTGKAVVRLSVQTQGQGHETTFAQIVAEELGIPPDDIDVVHGDTDNTPFGLGTYGSRSTPVSGAAAALVARKVRDKAKIIASGMLEASVADLEWEKGEFHVKGDPSAKVTIQDIAMRAHGAGDLPEGIEGGLDAQICYNPENLTYPYGAYFCVVDVDPGTAVVKVRRFLAVDDCGTRINPMIIEGQVHGGIVDGIGMALMEIIEFDEDGNCLGGSLMDYLIPTALEVPKLETGFTVTPSPHHPIGAKGVGESATVGSPPAVVNAVVDALAPFGIRHADMPLTPSRVWEAMQGRATPPI

SEQ ID NO: 5001 - protein, 463 aa, Streptomyces venezuelae
MQFHDSMISLVGNTPLVKLNNVTAGIQATVLAKVEYFNPGGSVKDRIAVRMIEAAEQSGELKPGGTIVEPTSGNTGVGLAIVAQQKGYKCIFVCPDKVSLDKINVLRAYGAEVVVCPTAVDPEHPDSYYNVSDRLVRETPGAWKPDQYSNPNNPRSHYETTGPELWEQTDGKITHFVAGVGTGGTISGTGNYLKEASGGSVKIIGADPEGSVYSGGSGRPYLVEGVGEDFWPTAYDRNVTDRIVAVSDKDSFQMTRRLAKEEGLLVGGSCGMAVVAALEVARELGPDDVVVVLLPDSGRGYMSKIFSDEWMAGHGFLEDTSSATVADVLRHKEGGTMPSLVHMHPDETVGQAIEVLREYGVSQMPIVKPGAGHPDVMAAEVVGSVVERDVLDALFTQRASLEDSLESHMSAPLPQVGSGEPVAALMSVLGDAADAAIVLVEGKPTGVVSRQDLLAFLANGGAK

SEQ ID NO: 5002 - protein, 301 aa, marine gamma proteobacterium HTCC2080
MNPAENSYPTIESVVGETPLVRLQRLVQNSSNHVLCKLEGNNPAGSVKDRPALSMIVEAEARGDIQPGDTLIEATSGNTGIALAMAAAIRGYHMRLIMPAHMSSERKLAMAAYGAELIQVAREEGMEGARDLAEAMQARGEGTVLNQFGNFDNPLAHYRGTGPEIWRQTGGQVTHFISSMGTTGTIMGVSAFLKEQNPDIEIIGLQPQDGSQIPGIRRWSEAYRPTIFQSAKVDRTIDISQAESEVMMRRLASEEGIFAGVSSGGAISAALQVSQEVEGATIVAIVCDRGDRYLSTGVYEI

SEQ ID NO: 5003 - protein, 1378 aa, Debaryomyces hansenii CBS767
MYAAIFSYIEHLFEIIKPHKVFYMAIDGVAPRAKMNQQRARRFRTAFEAEENMKNAIEKGLEIPKDDPFDSNAITPGTEFMAKLTDNLKYFIHKKISEDSRWANVKIILSGHEVPGEGEHKIMEYIRTMKNQPNHDPNSRHCIYGLDADLIMLGLVSHYPHFALLREEVTFGPRGQKQSNELTDQNFYLLHLSLLREYLSLEFQALDNQLSFEYNFERVLDDFILIMYVIGNDFLPNLPDLFINKGAFPLLLETFKQTLQQSDGYLNENGTINLKRLNIWLNSLSEFELENFEKQDVDVEWFNKRLEDISITGEKKRERMGKLLILKDQKKLVGMIKPWLLENSSKKVEELVALANEDKLPQLQLPTDEATKDIEFLKTFALDAGIVIIHSKSEDTYTVKLDIDGLSPYETEEEQNERFNDLRRTIKKYQSANLFETDEILKDSKNIYDTKFMNWKDKYYKEKLHFSIYETDKMIEFTQHYLEGLQWVLYYYYKGCPSWNWYFRYHYSPRISDISIGLNEFLKTNTGITFEKSKPFKPFEQLMAVLPARSRKLMPSVYRPLMTEPHSPIIDFYPHEVDIDMNGKSAPWEAVVLLSFVDENRLIDALKPIEAQLSPEELRRNSIGNDIEFIFNPQIDYIYPTPLPGYFHDLEHDKCIEESFLLPKVEGEIKIVLGENALLGKESLAGFPTLETIPFNSELSLHEVKVFQNPSRSESMILSLENMWNDLSIYQFSQKFINKVVYTKWPFLRESRVVSIMDKEFKYESMKVQNSRKVISTPLTPDESKSFYQTARSISDNYEKTKGIKLGDIEGLAYVQPVTGLIRNEKGAYVKTFSKETEIYPIQLVVEEVINEDTRFATRPPLPIDEEFPLESQVVFLGAFAYGTQATVAGYTGNDKVNVKISKIQSTNEPNIGKRRLDIESKEIRYLPSFEVSKKLRLNALFMSKITSGYMLENDFNNKRRVNIGLELKFEGRRQKVLGFTRKNGKVWEFSPLAIQLITDYRSKFPKLFKSLQEIDQKAIPKASTVVNTESELQEVTKWLKEVKAQLLKVSLESESFTKFSYEAIESYMEHYIGQAVPYTNKDIKGVPKSAVLDPSESYQLLSTQRFELGDRVIYVQKSGKVPYLSKGTIASITSFGTKNSLGVIFDYPLMSGNNMNGKLKTNRGLIVDSSLVLNLTNKQLVYHSKASKQKSKPLGDNEKKQRSKEIALAKKQKQEIENAKKQANSEKTNELLNLLKKSDRENKNGADEANPSKEADKNENTDQEEDLRLNSNAIRHIYGQIYSNVMNEGAVPPQHMPYGVPPVVPGIPLPPQFFQQQPSQLQQQQQQQQQQQQPEQIPSSQQSRENGRNDRGRGNRGNYRGNGRGRGRGGRGRGKPN

SEQ ID NO: 5004 - protein, 387 aa, Arabidopsis thaliana
LLNPLTSSSSSTLRRFRCSPEISSLSFSSASDFSLAMKRQSRSFADGSERDPSVVCEAVKRETGPDGLNIADNVSQLIGKTPMVYLNSIAKGCVANIAAKLEIMEPCCSVKDRIGYSMVTDAEQKGFISPGKSVLVEPTSGNTGIGLAFIAASRGYRLILTMPASMSMERRVLLKAFGAELVLTDPAKGMTGAVQKAEEILKNTPDAYMLQQFDNPANPKIHYETTGPEIWDDTKGKVDIFVAGIGTGGTITGVGRFIKEKNPKTQVIGVEPTESDILSGGKPGPHKIQGIGAGFIPKNLDQKIMDEVIAISSEEAIETAKQLALKEGLMVGISSGAAAAAAIKVAKRPENAGKLIAVVFPSFGERYLSTPLFQSIREEVEKMQPEV

SEQ ID NO: 5005 - protein, 351 aa, Erythrobacter sp. SD-21
MPAPRIAAQEKQRVAIVTDAWLPQMNGVVRTLTTTCDLLRTQGHELLVVSPDQFASLPCPTYPEIRLAISPPGAISRKLRDFAPSAIHIATEGPLGVAARRYCARSGTPFTTAYHTQFPEYLARRTHLPAAWFWRYIEWFHAPARRVLVATESIREELRDHGLGKLHHWTRGVDLACFDPAAPPPSEYADLPRPIQLYVGRVSVEKNIEAFLEASHPGSKVVVGDGPALEALKRKFPEALFLGRKSGPELAGCYAGADVFVFPSRTDTFGLVMIEALACGTPVAAYPVAGPRDIVTDDVGALSEDLDRAIDAALYCARRACAEYGARFSWEAATEQFLSGLATLDPEPLPV

SEQ ID NO: 5006 - protein, 400 aa, Kineococcus radiotolerans SRS30216
MRIMFVTSAGWPEGGVETGLQEIKKLLVEEGHEVMLVASDRRWSPDHFSDRTFRQPTTGGWRRLIQHAWNHSAFTTVRASVREFAPDVVSFHVLGEPTAAALVAARGVPRVVCVHGPEIYVKRLLPWCLPRTDFRGDSYALSSLSALGWVHYVYLRAVCKPLLELALRGVSAFVAFSTYTQGVLQEEGRSPVGRVNNGIRLNGFRPLTPESTTIAYAGRLEKVKGVHYLIRALAHVRRSFPEVHLEIAGTGSYQEDLVRMVEDLGLGEHVRFLGQLDLDGVADLYARSRVVAMPSVWPETFGKAGVEALSVGRPVVASGVGGVFDWLEHEVNGLIVEPGDVEDLSEALLRVLADASLAERLGIAAHRSAQRFSIDEEARGLVGVFADVVRPPAPHAARHD

SEQ ID NO: 5007 - protein, 381 aa, Corynebacterium glutamicum ATCC 13032
MSASRKTLVVTNDFPPRIGGIQSYLRDFIATQDPESIVVFASTQNAEEAHAYDKTLDYEVIRWPRSVMLPTPTTAHAMAEIIREREIDNVWFGAAAPLALMAGTAKQAGASKVIASTHGHEVGWSMLPGSRQSLRKIGTEVDVLTYISQYTLRRFKSAFGSHPTFEHLPSGVDVKRFTPATPEDKSATRKKLGFTDTTPVIACNSRLVPRKGQDSLIKAMPQVIAARPDAQLLIVGSGRYESTLRRLATDVSQNVKFLGRLEYQDMINTLAAADIFAMPARTRGGGLDVEGLGIVYLEAQACGVPVIAGTSGGAPETVTPATGLVVEGSDVDKLSELLIELLDDPIRRAAMGAAGRAHVEAEWSWEIMGERLTNILQSEPR

SEQ ID NO: 5008 - protein, 187 aa, Enterococcus faecalis V583
MNLINQKLFDFECDAYHDGEFTRVSTEDILGKWSIFFFYPADFSFVCPTELGDMQEHYAHLQELNCEVYSVSEDSHYVHKAWADATETIGKIKYPMLADPNGQLARFFGVLDEASGMAYRASFIVSPEGDIKSYEINDMGIGRNAEELVRKLEASQFVAEHGDKVCPANWQPGEETIAPSLDLVGKI

SEQ ID NO: 5009 - protein, 423 aa, Penicillium janthinellum
FVKNSGICETTPGVNQYSGYLSVGSNMNMWFWFFEARNNPQQAPLAAWFNGGPGCSSMIGLFQENGPCHFVNGDSTPSLNENSWNNYANMIYIDQPIGVGFSYGTDDVTSTVTAAPYVWNLLQAFYAQRPEYESRDFAIFTESYGGHYGPEFASYIEQQNAAIKAGSVTGQNVNIVALGVNNGWIDSTIQEKAYIDFSYNNSYQQIIDSSTRDSLLDAYNNQCLPALQQCSQSGSTSDCTNADSVCYQNIEGPISSSGDFDVYDIREPSNDPYPPKTYSTYLSDPTVVKAIGARTNYQECPNGPYNKFASTGDNPRSFLSTLSSVVQSGINVLVWAGDADWICNWLGNYEVANAVDFPGNAQFSALDLAPYTVNGVEKGQFKTVDNFSFLKVYGAGHEVPYYQPDTALQAFKQIIQKKPISST

SEQ ID NO: 5010 - protein, 801 aa, Sulfitobacter sp. EE-36
MSVAKPLPHDAAKLHVTGAARYVDDIPTPATTLHIAFGLSTVASGTLNGMDLRDVAAAPGVVAVLTAADLPFDNDVSPSNHDEPLLATDAVHYAGQPVFMVIATTHLAARHAARLGAVDITPTAPILTIEEALAADARFEDGPRIYQKGDATAALTTAPQTLSGTINIGGQEHFYLEGQAALALPQDNGDMVVHSSTQHPTEIQHKVAEALGTPMHAVRVETRRMGGGFGGKESQGNALAVACAVAAARTGRPCKMRYDRDDDMIVTGKRHDFRIDYTVGFDATGRISALDFTHYTRCGWAMDLSLPVADRAMLHADNAYHLDNIRITSHRLRTNTQSATAFRGFGGPQGIVGIERVMDHIAQSLGFDPLAVRRANFYADVMQPDATGQARDHRALPHDTEADLASRGAPPAPQESTPPQPTGLQTTPYHQPVQDCIINALTDRLAQTSDYAARRAAIADWNATQPVLKRGIALTPVKFGISFTLTHLNQAGALVHVYQDGSIHLNHGGTEMGQGLFQKIAQVAASRFGVDLSVVKITATDTGKVPNTSATAASSGTDLNGMAVQAACDTIRDRIADHLAERYQTTADQIRFAQGQVHIGEEVISFAQAAASAYENRVSLSSTGYYKTPEIEWDRIKGKGRPFFYFAYGAAVTEVVIDTLTGENRILRADILHDAGASLNPALDIGQIEGGYVQGAGWLTTEELVWDAKGTLKTHAPSTYKIPAISDRPDVFNVALWDEPNPAQTIYRSKAVGEPPLMLGISAFMALSDAVSACGDGFGDLQTPATAEAVLTAIGKARNAL

SEQ ID NO: 5011 - protein, 472 aa, Sulfitobacter sp. EE-36
MDITFLLNGEVVSLTGVSPTMTLLDWLRETRHLTGTKEGCNEGDCGACSVMISDDQGHRALNGCILFLPQINGKSVTTVEGLSAPDGSLHPVQQTMVDYHGSQCGFCTPGFAVTMATDHLNGATDHDTQLAGNLCRCTGYAPIIRAAKAAEAAPVPAHLRNLKLPDGPKSSGGPAQPDGGGQPPATSRPTTTDELARWYADHPDATLIAGATDVGLWVTKQFRDLGPVVFLNQIPDLRGVTDGGDHWRIGAATTLATLTAHFGPLYPSLGAMLRRYGSAQVRNAATIGGNIANGSPIGDGPPALIAMGATLHLRHGDTRRSLPLEDFFIDYGKQDRAPGEFVEAITVPKLPTGKDDSLRCYKISKRFDQDISALCGCINITRAGDVITDARIAFGGMAGTPKRASQTEALLINQPFDEATIRRAMDAMALDYQPMSDMRASAQYRLLTAQNLLLRYLHDVNGLPTNLHEVTA

SEQ ID NO: 5012 - protein, 356 aa, Noctiluca scintillans
MADRGRGRGRLYGSVAETVGNTPCVKISDAMCPPGRTIYAKCEFFNPCSSVKDRLALAIIEDAEQKGLLKPGDTLIEATSGNTGIAVAMMAAQRGYGCVIVMAEPFSVERRKLMRFLGAKVIITPKAGKGLGMVKKAKELADEHGWFLCHQFETEANARFHELTTGPEILADFSGQRLDYYVLGYGTGGTYAGAGKAIKAARPDVKICLAEPEAAALVQSGVASERNPDGSATGSHPAFAAHPIQGWTPDFIPKVLEVGLAATPYDEYISIPGTAALETSRKLAKTQGILTGISGGGSMWAAIEMAKKAPEGSVLVCMLPDTGERYLSTALFESIQADMNEEEIAVSKSTPSYTFE

SEQ ID NO: 5013 - protein, 194 aa, Prochlorococcus marinus subsp. pastoris str. CCMP1986
MSLRVGQEAPDFTATAVYDQEFKDITLSSYKGKWVVLFFYPLDFTFVCPTEITAFSDEFNKFSDLNTEVLGVSVDSKHCHLAWIQTPRNEGGIGDINYPLVSDLKREICQAYNVLNDDGEADRGLFLINPEGIVMHTTVNKAPVGRNVDETLRILQGYQYVAANPDEVCPANWTPGEKTMLEDPKGSKEYFSAL

SEQ ID NO: 5014 - protein, 775 aa, Mycobacterium sp. MCS
MTDTVATRYSGTRVARVEDNRLLTGRGTFVDDIQRPGMLHACFVRSPFARAKVNGIDASAALAMPGVYAVFTAEDLNGDAVESWHAVAGKDVPDTPRPPLAEGEVKFVGDPVALVVAESRYLAEDAADAVQVDYEPLPAVADFRTAVNAETVVHEQYPDNVAGGMGGAPPDEETFSSAPCVVSENIYQQMYVPVPIETRGMVVEWEPTTGELTLWASTQTPHELRAFTARLLGIPAQKVRVIMRDTGGGFGQKVVPMREDMVIMLAARKVPGALKWIEDRRENLMSAGQSRHVDGTARMAFDEDGTILAVDIDFNQDVGAYPTPYPVLTTAAIGMFFPGPYRVPKASFNYKTVFSNTAGLHAYRGPWQYETLAREIMFDIAARKLGIDPVELRRKNILRGDEMPYFNPNGMPYDHVAPADTFEQAVKILDHEGFRKEQAEALAQGRYIGLGFSAYIEPTGAATGHLGTEGCTIRMEPTGKINVYVNGGSTGNSLETTVIQLTADALGADIDDVATIQGDTAITPYGAGTQGSRSAPMTAGAVNEAGGILRAQLIRMAAHHLGVEVDDIELGGSKAYVREDPTKSVSFADIAYRAHYQPEHLPPGGTATLEATARFTSMAMIHWANATHACTCEVDVETGQVTLTRYIVSEDVGPMINPNVVEGQVAGGTVQGIGGALLESLVYDADGNPLSSTFVDYLLPTATEVPPIEFGHVEIPGPGVGGYKGAGEGGAIGSTPAVINAINDALAPLGVTVTRLPATPATIVELLEQANREDH

SEQ ID NO: 5015 - protein, 182 aa, Fulvimarina pelagi HTCC2506
MERPDKRREIPVNVTLSINGRYHTLDIDPRTSLLDACRDHLALTGSKKGCDHGQCGACTMLVNGRRINSCLTLAVMHENDTITTVEGLGTAENLHPMQAAFVEHDGYQCGYCTPGQIVSAVGMLGEIGDGWPSHVTKDIKTGTELSGDEIRERMSGNLCRCSAYPNIVDAIETAAGKTKEPA

SEQ ID NO: 5016 - protein, 613 aa, Arabidopsis thaliana
MASVEGDDDFGSSSSRSYQDQLYTELWKVCAGPLVEVPRAQERVFYFPQGHMEQLVASTNQGINSEEIPVFDLPPKILCRVLDVTLKAEHETDEVYAQITLQPEEDQSEPTSLDPPIVGPTKQEFHSFVKILTASDTSTHGGFSVLRKHATECLPSLDMTQATPTQELVTRDLHGFEWRFKHIFRGQPRRHLLTTGWSTFVSSKRLVAGDAFVFLRGENGDLRVGVRRLARHQSTMPTSVISSQSMHLGVLATASHAVRTTTIFVVFYKPRISQFIVGVNKYMEAIKHGFSLGTRFRMRFEGEESPERIVLDSETWNVFRFTGTIVGSGDLSSQWPASKWRSLQVQWDEPTTVQRPDKVSPWEIEPFLATSPISTPAQQPQSKCKRSRPIEPSVKTPAPPSFLYSLPQSQDSINASLKLFQDPSLERISGGYSSNNSFKPETPPPPTNCSYRLFGFDLTSNSPAPIPQDKQPMDTCGAAKCQEPITPTSMSEQKKQQTSRSRTKVQMQGIAVGRAVDLTLLKSYDELIDELEEMFEIQGQLLARDKWIVVFTDDEGDMMLAGDDPWNEFCKMAKKIFIYSSDEVKKMTTKLKISSSLENEEYGNESFENRSRG

SEQ ID NO: 5017 - protein, 399 aa, Dictyoglomus thermophilum H-6-12
MKIAFFSDTYIPQKNGVATSLNFLKKTLEEENHSIYLFIPNIPNLPKEKNIYILPSITFPFQKEHRVALPYSLKYDFMIRKINPHVIHTHSPFSLGIFGLYEGKRIKRPIIHTYHTLLPDYAYYIWDHFPNFIKQNIIDEEKARKIAIWISREYCNHSDLVIAPSTKIKRLLKEFGVKKPIEVLPNGIDLDKFRKIPKNEARKDLNLPLNAVLLLFVGRLGKEKNIEFLIEVLEIIKNNTDKLIYLVIVGDNPDKRVMEELKNKAKALNVYDRTIFTGYLDYDKVIKAYYASDIFVFSSITETQGLVILEAMASGLPVVAIEDDAISDFVKNGINGFLIPNNQEAKKIFSEKIITLIENRDLYEKMSINALDNSKLFHIKILNKKLLSLYEYLIKEYNI

SEQ ID NO: 5018 - protein, 199 aa, Thermoplasma acidophilum
MGQKAPDFTVNTSKGPVTLSSYRGKWVLLFSHPGDFTPVCTTEFIAFTERYKDFQALGVELLGLSIDSVYSHIAWIRDIKEHFGIEIPFPIIADIDKEVARQYNLIDEKSGATVRGVFIIDPNQIVRWMIYYPAETGRNIDEIIRVIKALQFNWERKLATPANWQPGQEGIEGAPSTVDASLKRDGEPGVKTWYLKFVK

SEQ ID NO: 5019 - protein, 164 aa, Mycobacterium sp. MCS
MHELPVELTVNGRNHRGVVEPRITLADFLRETCGLTGTHLGCEHGACGACTVLLDGQAVRSCLVFAVQADGQEVTTVEGIAGPDGELSPVQAAMKECHGLQCGFCTPGFVTSITALLADNPDPSDEEIREGLSGNFCRCTGYQGIVNAVRLAAERTRNGQTVSP

SEQ ID NO: 5020 - protein, 744 aa, Fulvimarina pelagi HTCC2506
MNDMNKHVMDEAIGETRLDRNTQGVIGKGAPRYEGKLKVSGTAPYAYEHLGGEDVAYGFIVPASIARGKIRSVDTSAAEAVPGVLKVISGEKIVRAASQPMAPAAQTIDGEVFHYNQPVAVVIADTFEVARHASKLVKVEYSETEGRFDITNRHTVREPDSMPMTPNQSRGDFEHAFAEAEVQFDQTYTTPSYQAAAMEPHATTAKWDGNHLTVWTSHQLLETAPGQIAKHTGIDEDKITVHSPYIGGGFGSKLGLGPDAVMAANATIAIGKPVKIALTRQNVFQATSRRGETIQRVRIGATKAGKITCFAHETDTTNSPGNGFFEPSGISSLFLYPGKDRIIAHNIVETDVLMTSAVRAPGEATGMLATESALDELAETLGIDPVEFRRMNEPEVNPQDDRPFSSRRLMECIDEGAKRFGWSDRPEKPASRREGEWLIGYGMSSASRKNDLMPSAAEIEMSSDGRATVRTGMTDIGTGTYTILQQIAAEMLGLPLDMVDVELGDSRFAASSGSGGSWGANSAGSSVYVASLALIRELASRLDADAETLTLKDGHAIFGNKQIPLPDILKGETISVTGKIEPGKQAEETHQASYGAHFCEVGVNVVTGETRIRRLLTVGAAGRILNEKTATSQCYGGQIWGIGYALEEDLVIDKRNGLIVNHDLAEYHVPVHADVPALEVVLLEDRDPHASPLAGKGIGELAIAGVGAAITNAIYNACGVRIRDYPATLDKVLAGLPDDYLTAA

SEQ ID NO: 5021 - protein, 233 aa, Thermoplasma acidophilum
MPDENKFPLIGEKFPEMTVETTHGSMKLPDQYKGRWFMLFSHPGDFTPVCTTEFYSFARRFEDFQKINTDLIGLSVDSTISHIEWVNWIRDNLKIEVPFPIIGDSMGRVATRLGMIQAESSTSTVRAVFIVDPNSTVRLIMYYPLEIGRNVDELLRAIKALQMSDKYRGAMPANWPYNELIGEKMLNPAPKNVKDATGRLKEFKGYAWWLTYKDVPDNEVQETKKIVKMREEK

SEQ ID NO: 5022 - protein, 173 aa, Bordetella parapertussis 12822
MPRRIEVCRIAMLAATRDFTLEVNASRHTVTADPDTPLLYILRNDLCLNGPKFGCGLGECGACAVLIDGVAARACTIPVRGAAGHAITTLEGLGTPQAPGPVQQAFIDEQAAQCGYCLNGMIIATQALLLRNAAPTDEDIRRELQYHLCRCGTHIEIMAAVRRAARLWAARQA

SEQ ID NO: 5023 - protein, 346 aa, Bordetella bronchiseptica RB50
MRIVLVTDAWHPQVNGVVRTWTTMQGLLQDWGHELIVVSPQGSRTVPAPSEPDLRLCLQPGRQLRRVLGDVVPDALHIATEGPLGLAARRMALRRGWRFTTSFHTMFPDYLQARMGIPAGLPWRYLRWFHRPSQRVLVPTPTVRDIVARRGLGNLQVWSRGVDARRFAPGPRDFLPELPRPLFLCVGRVAREKNLDAFLSLALPGSKVIVGGGPDEARLRRKFPAAHFAGPQADDRLAAYYNAADVFVFPSLTDTFGLVMLEAMACGTPVAAFRSEAPLAVVQQGATGFLDDDLAQACRAALALDRDEVRAHALTRTWDAVARDLLAAFTPLLEAPLALPPAAQRI

SEQ ID NO: 5024 - protein, 752 aa, Escherichia coli O157:H7 EDL933
MRVDAIAKVTGRARYTDDYVMAGMCYAKYVRSPIAHGYAVSINDEQARSLPGVLAIFTWEDVPDIPFATAGHAWTLDENKRDTADRALLTRHVRHHGDAVAIVVARDELTAEKAAQLVSIEWEELPVITTPEAALAEDAAPIHNGGNLLKQSTMSTGNVQQTIDAADYQVQGHYQTPVIQHCHMESVTSLAWMEDDSRITIVSSTQIPHIVRRVVGQALDIPWSCVRVIKTFVGGGFGNKQDVLEEPMAAFLTSKLGGIPVKVSLSREECFLATRTRHAFTIDGQMGVNRDGTLKGYSLDVLSNTGAYVSHGHSIASAGGNKVAYLYPRCAYAYSSKTCYTNLPSAGAMRGYGAPQVVFAVESMLDDAATALGIDPVEIRLRNASREGDANPLTGKRIYSAGLPECLEKGRKIFEWEKRRAECQNQQGNLRRGVGVACFSYTSNTWPVGVEIAGARLLMNQDGTINVQSGATEIGQGADTVFSQMVAETVGVPVSDVRVISTQDTDVTPFDPGAFASRQSYVAAPALRSAALLLKEKIIAHAAVMLHQSAMNLTLIKGHIVLVERPEEPLMSLKDLAMDAFYHPERGGQLSAESSIKTTTNPPAFGCTFVDLTVDIALCKVTINRILNVHDSGHILNPLLAEGQVHGGMGMGIGWALFEEMIIDAKSGVVRNPNLLDYKMPTMPDLPQLESAFVEINEPQSAYGHKSLGEPPIIPVAAAIRNAVKMATGVAINTLPLTPKRLYEEFHLAGLI

SEQ ID NO: 5025 - protein, 185 aa, Vibrio sp. Ex25
MINTKIKPFAATAYKNGEFVEVTEQDVLGKWAVFFFYPADFTFVCPTELGDLADHYEELQKRGVEVYSVSTDTHFTHKAWHDSSETIGKIQYYMLGDQTGNITNNFGVMREGQGLADRATFLIDPEGTIQAMEITAEGIGRDAEDLLRKVKAAQYVAAHPGEVCPAKWKEGEETLAPSLNLVGKI

SEQ ID NO: 5026 - protein, 192 aa, Zea mays
  misc_feature (42)..(42): Xaa can be any naturally occurring amino acid
  misc_feature (54)..(54): Xaa can be any naturally occurring amino acid
  misc_feature (133)..(133): Xaa can be any naturally occurring amino acid
  misc_feature (169)..(169): Xaa can be any naturally occurring amino acid
  misc_feature (183)..(183): Xaa can be any naturally occurring amino acid
MASVASSTTLISSTRILLPATKSPLLPSPSLSSPSPSASLRXSLIPLPSPQSAXTSRRSFAVKAQTDDLPLVGNKAPDFEAEAVFDQEFIKVKLSEYIGKKYVILFFYPLDFTFVCPTEITAFSDRYAKFEKXNKKVLGALVDSVFSHLAWIQQTENLEGLGDLNYPLXISDGTKSSQKSFGXVLIHDPGKS

SEQ ID NO: 5027 - protein, 151 aa, Glycine max
MDLVASCKEKLQHFRIKELKDVLTHLGLSKQGKKQDLVDRILAILSEDQVSKLWTKKNAVGKQEVAKLVDDTFRKLQVSGAIDLASKGQGASDSSNVKIKGEIDDSYQSDTKIRCLCGNVFDTEPLVKCEDTRCHASQHISCVIIPEKPMD

SEQ ID NO: 5028 - protein, 159 aa, Escherichia coli O157:H7 EDL933
MNHSETITIECTINGMPFQLHAVPGTPLSELLREQGLLSVKQGCCVGECGACTVLVDGTAIDSCLYLAAWAEGKEIRTLEGEAKGGKLSHVQQAYAKSGAVQCGFCTPGLIMATTAMLAKPREKPLTITEIRRGLAGNLCRCTGYQMIVNTVLDCEKTK

SEQ ID NO: 5029 - protein, 369 aa, Iris x hollandica
MPARVESLASTGMASIPTEYVRPEWERDGSLGDALEEAKKSDQLEGHQIPTVDLKGFDSEDEKERSRCVEGVKEAAVEWGVMHVVNHGIPPELIERVRAAGKGFFDLPVEAKERYANDQSEGKIQGYGSKLANNASGKLEWEDYYFHLIFPPDKVDLSIWPKEPADYTEVMMEFAKQLRVVVTKMLSILSLGLGFEEEEKLEKKLGGMEELLMQMKINYYPRCPQPELALGVEAHTDVSSLSFILHNDVPGLQVFHGGRWVNARLVPDSLIVHVGDTLEILSNGRYKSILHRGLVNKEKVRISWAVFCEPPKEKIVLEPLAELVAEGSPAKYPPRTFAQHVQHKLFKKAQAQAQVQAQAGVHIPEAIQT

SEQ ID NO: 5030 - protein, 365 aa, Sinorhizobium meliloti 1021
MKIAFHAPLKSPDHPVPSGDRQMARMLIEALRVAGHDVGIASELRTFSREASDAAFSALRKEAEREIARIRRLWQSKGPPDLWFCYHPYYKAPDLIGPALSADFSIPYVTAESSYSFRRNLGAWKLAQDEVAAGARQAAVNICFTHRDREGLEAPIPEVRSALLAPFIDVSPFRDLRRTEAGGNRLVAVAMMRTGDKMDSYRMLARALALVADVPWTLTVVGDGPARADVSEAFSAFPAGRLDWLGERPPQAIPEILAGGDLYVWPGCGEAYGLSYLEAQAAGLPVVAQHTAGVPEVVRNGETGYLTTAGDIDALAAALRHFLVDGTLRRQFGERARRFVFEQRSLPAAAARLSGIFAEFVGSAK

SEQ ID NO: 5031 - protein, 531 aa, Cupriavidus taiwanensis
MAIDNLYDAGIAAGWKVLDASTFTTTRTLDADVVIVGSGAGGGISAEALSRAGLRVVLLEEGALRTSDSFRDMDENRAYRELYQEAAARTTADGAIAILQGRAVGGSTTVNWSSSFRTPPQTLAHWATHHAVTGHGEAEMAPWFDQVEARLGIAPWAMAPNPNNDVLRRGCETLGWEWHVIPRNVKGCWNSGYCGFGCPVNAKQSMLVSTIPAALASGATLVHRVRVRTLDHDGQRVRSVTGEALGADGYTPTGIAVVVRARHVVAAGGAINTPALLLRSRVPDPHQRLGLRTFIHPVNISIAKMPERIDPYYGAPQSIASDHFQWQHGATGPMGYKLEVPPMFPGISAGVVNGVGDALRRDMAQLPNTNAMLALLRDGFVPDSPGGRVRLAPDGSPLLDYEMTDYAWDGVRRAWLSMAQAQFAAGAERVRPAHLDAAEYRSWPEARDAIARLPLKPFRTALFTAHLMGGCGMSDDPRGGVVDSRGRHHQLANLSVFDGSVFPTSVGANPQLSVFALSAQNADALARNLTS

SEQ ID NO: 5032 - protein, 124 aa, Zea mays
  misc_feature (25)..(25): Xaa can be any naturally occurring amino acid
  misc_feature (115)..(115): Xaa can be any naturally occurring amino acid
CTFILTYQSTVVQQTFQLSRADREXVRRQEYDLQVLGILINDKVQFRMQWPQYAELQVNGIPVRVMTRPGSQLLGINGRDDGPLVTPCSREGITKISLSRVDARTFCFGVRIVRXRTVPQVLFI

SEQ ID NO: 5033 - protein, 312 aa, Thermoanaerobacter tengcongensis MB4
MSGRENKIYEDITQLIGNTPMIRLNKVVPENSAEVIVKLESFNPGGSVKDRIALNMIKRAEEEGRLKPGGTIVEPTSGNTGIGLAMVSAVKGYKLILVMPDTMSIERRNLLLSYGAELVLTPGAEGMKGAIKKAQEILELNPDYIMLDQFKNPANPEIHELTTAKEILKDTNGIVDAFVAGVGTGGTISGVGKVLKQYNKDIKIFAVEPEESPVLSGGKPGPHKIQGIGAGFIPDTLNLDVIDEIIKVKERDAFEMSMKLAKQEGILCGISSGANVFAAVEVANRLGKGKRVVTVLPDTGERYLSMHKFFEY

SEQ ID NO: 5034 - protein, 207 aa, Triticum aestivum
  misc_feature (11)..(11): Xaa can be any naturally occurring amino acid
  misc_feature (14)..(14): Xaa can be any naturally occurring amino acid
  misc_feature (25)..(25): Xaa can be any naturally occurring amino acid
  misc_feature (104)..(104): Xaa can be any naturally occurring amino acid
  misc_feature (116)..(117): Xaa can be any naturally occurring amino acid
  misc_feature (119)..(120): Xaa can be any naturally occurring amino acid
  misc_feature (123)..(123): Xaa can be any naturally occurring amino acid
  misc_feature (129)..(129): Xaa can be any naturally occurring amino acid
  misc_feature (139)..(139): Xaa can be any naturally occurring amino acid
  misc_feature (147)..(149): Xaa can be any naturally occurring amino acid
  misc_feature (151)..(154): Xaa can be any naturally occurring amino acid
  misc_feature (158)..(158): Xaa can be any naturally occurring amino acid
  misc_feature (162)..(162): Xaa can be any naturally occurring amino acid
  misc_feature (165)..(166): Xaa can be any naturally occurring amino acid
  misc_feature (177)..(177): Xaa can be any naturally occurring amino acid
  misc_feature (180)..(180): Xaa can be any naturally occurring amino acid
  misc_feature (187)..(187): Xaa can be any naturally occurring amino acid
  misc_feature (194)..(194): Xaa can be any naturally occurring amino acid
  misc_feature (200)..(201): Xaa can be any naturally occurring amino acid
QEFGTNLGGGXYNXVEGPSMERLFXKGGIFCTSNVTTMVFTGSTVGGGSAVNWSACIRTPGEVLQEWSRDHRVPLFAGQDYQQAMNAVCDRLGVTDECLKERFXNKVLRPGCQALXXSXXGPXRANSFXGHYCGSLNFXLPTRDKPXXXTXXXXYPLXHRAXDSXXGCKGQPFILQXKNXQGRSEQXKSFAFLXNCINNXXTKKIGI

SEQ ID NO: 5035 - protein, 377 aa, Solibacter usitatus Ellin6076
MPGSKTIVSVYGFEPFRIGGGETFIRELSLLLGRRGWKNVVCFLTEPTPQVREFLSLPNVTIEVIPDVWQLKWQPTRDLARILRRYRPEILHLQFTGFVSPYPWLARFYGAKRVLFTDQASKPEGFVPRRASLFKRVATRIINWPLDRVTCISDYVLRCWTTLDVLQSERFTRIYNHVDFTRCQPDGSAFRKTLTIPDSRQIIVQVSWMIPDKGFDDLLAAARLVIARNPEAYFVMVGEGADRQRYIRETKELGLQDHITWTGILPDPLKMGVFSAADVVCQVSRWEEGFGYVIAEAMASGKPLVGTRVGAIPELVHHGKTGFLVDRRDPPAIAERILELLADRDLRCRMGQAGREFAFRNFDANVNIAEFLKLYGI

SEQ ID NO: 5036 - protein, 305 aa, Arabidopsis halleri subsp. halleri
LVYLNNVAEGCVGRVAAKLEMMEPCSSVKDRIGFSMISDAEKKGLIKPGESVLIEPTSGNTGVGLAFTAAAKGYKLIITMPASMSIERRIILLAFGVELVLTDPAKGMKGAIAKAEEILAKTPNGYMLQQFENPANPKIHYETTGPEIWKGTGGKIDGFVSGIGTGGTITGAGKYLKEQNANVKLYGVEPVKSAILSGGKPGPHKIQGIGAGFIPSVLNVDLIDEVVQVSSDESIDMARQLALKEGLLVGISSGAAAAAAIKLAQRPENAGKLFVAIFPSFGERYLSTVLFDATRKEAESMTFEA

SEQ ID NO: 5037 - protein, 214 aa, Glycine max
MASLTVPNHCVPTLLRTHSLNYPSSQNLPLPSAPSNSQFFGLKLSHSSFSTIPSSSSSLKGSIFAKVTKGSKPPNFTLKDQNGKNVSLSNFKGKPVVVYFYPADETPGCTKQACAFRDSYEKFKKAGAVVVGISGDDAASHKAFASKYKLPFTLLSDEGNKVRKEWGVPGDFFGSLPGRETYVLDKNGVVQLVYNNQFQPEKHIGETLKILQSL

SEQ ID NO: 5038 - protein, 104 aa, Arabidopsis halleri subsp. halleri
YMLQQFENPANPKIHYETTGPEIWKGSGGKVDGFVSGIGTGGTLTGAGKYLKEQNKNIKLYGVEPVESPILSGGKPGPHKIQGIGAGFIPGILDVDLIDEVVQV

SEQ ID NO: 5039 - protein, 424 aa, Corynebacterium efficiens YS-314
MRVAMISMHTSPLQQPGVGDSGGMNVYILSTGTELARQGVEVDIFTRATRPSQGEVVQVAPNLRVINIVAGPYEGLAKEELSTQLAAFAGGVLEFTRRGGIEYDLIHSHYWLSGQVGWLMRDLWRIPLVHTAHTLAAVKNSYRADEDTPESEARRICEQQLVDNADVLAVNTQEELADLVHHYDADPDRISVVSPGADIALYTPGNDRATERSRRELGVPLHAKVVAFVGRLQPFKGPQVLIHAVAELLERDPQRNLRVLICGGPSGPSATPETYRNLAVELGVDKRIRFLDPRPPEELVAVYRAADIIAVPSYNESFGLVAMEAQATGTPVVAARVGGLPVAVAEGETGLLVDGHDPALWADTLATLLDDDETRIRMGQDAVEHARNFSWAATATQLSSLYSEATTAECDGGIPRRADGARWD

SEQ ID NO: 5040 - protein, 217 aa, Synechococcus sp. RS9917
MDSTTQAATPSLPRLKEPAPAFEARTTHGPRKLSDYSGRWLVLFSHPADFTPVCTTEFIGFARAYSQFQDLNCDLLGLSIDSNYAHLAWVRNIREKFGVEIPFPIIEDLSMKVAHAYGMIQPGASDTSAVRATFVIDDHGILRAMVYYPMTNGRSVEEFLRLVKALQTSDTHGVATPENWKPGEQVIVPPPADAAAADQRMHEGYDYTDWYFCKKSL

SEQ ID NO: 5041 - protein, 422 aa, Cyanothece sp. ATCC 51142
MNNKRKKALLIIEQCNPDWSSVPLVGYNFYYEISQLCDVTLVTHIRNKAALQKHQEHQDIIYIDESQFSKNYHKFIAALTSIGRKNWPLYIALSYPIYEEFNKQVYQKFKDKVLGKEYDIVHVITPMMPRYPAKIIRACVNTPFILGPVNGGVPFPPGFQKVARQEFAYFNFLRAIGRKLIPGYVETYQKADKILAGSTYTLNLIKDLFKIPKERLELFYENGISKNFFHQKKTNTNNSVINLLFVGRLVPYKGADMLIDAIHNLSDDLRNKIKLTIVGDGSEKVKLENQVKNLGLEKVVSFTGWIKQEETVEYYKQADIFCFPSIREFGGAVVLEAMACGLPCIVANNGGIGEYVTPETGFSIEPKSREYLVKELTAKIQTLVENKDLREKMSAKCYQRAREFEWSKKAKKIVELYQQLLK

SEQ ID NO: 5042 - protein, 184 aa, Streptomyces coelicolor A3(2)
MLTVGDKFPEFDLTACVSLEKGKEFQQINHKTYEGQWKVVFAWPKDFTFVCPTEIAAFGKLNDEFADRDAQILGFSGDSEFVHHAWRKDHPDLTDLPFPMLADSKHELMRDLGIEGEDGFAQRAVFIVDQNNEIQFTMVTAGSVGRNPKEVLRVLDALQTDELCPCNWSKGDETLDPVALLSGE

SEQ ID NO: 5043 - protein, 208 aa, Frankia sp. EAN1pec
MGLRLGDTAPDFTATTTDGEITFLEWKKDSWAVFFSHPADFTPVCTTELGRTAALQSEFQKRNTKALALSVDPVDQHNAWAPDIAEVAGSALNFPIVADPDHRIAELYDMIHPGEGDTSTVRSVFIIDPANKVRLSLTYPKSVGRNFDEIIRVIDALQATDANPIATPADWKPGDRVIVAISVSTEDAKKRFQNVEETKPYLRYADAP

SEQ ID NO: 5044 - protein, 160 aa, Methanosarcina acetivorans C2A
MAKTSLESGQPAPDFCLPDQEGNRTCLEKLRGKWVVLYFYPRDNTPGCSLEAKNFSCLKKDFEAENAVILGVSRDSEESHRKFIEKKELKIKLLSDEHAEVHGKYDVLHPKHFRGKDVISAVRTTFLINPEGIILKVWDNVKASGHAEKVLSELQKLKET

SEQ ID NO: 5045 - protein, 515 aa, Gluconobacter oxydans 621H
MNSTTVMKTFAETDIVDAVIIGSGAGGAPLAAELARNGKTVVVLEAGPAFTAMGHTPDEIAARELYWLHERLSAGTNPQAFGGNNSGTGLGGSLLHYGAFMPRMDARDFHLHTETGKGVDWPFGLDELLPYIERVESFIGVSGPASYPWDPTRRYAYPPPPANSAALKMREACDALGLRHADGPAALITRKIEQPHFGTRHGCANCGACHQGCRNSAKSGADNTWLPMAVAHGAELRPGCFAHTIERDTSGRVTGVVYRQNGVEHRQKCATLVLAAGAVETPRLLLTNGLANSSGQVGQNYMTHVSTQVWGEFDEDIRPNRGYPSLTITEDMMRPKDADFVGGYLIQSLGMMPATWGQNLARSTTTRGPAFARALAGYNRSAGMGINGECLPRPENRVTLSNEKDAFGIPKPLIEHSYGPNEWAMHNHAANLLSRMWEAIGAKDIRVIDRAAHMIGTCRMGTDAGSNVVNPKGRSFDIDNLWISDHSIFPSAAAANPALAIMALSLRTADAMLKA

SEQ ID NO: 5046 - protein, 155 aa, Codonopsis lanceolata
MALIPSIFGGRRSNVFDPFSHDIWDPFQGLSSALANARDQETAAIANTRIDWKETPEAHVFKADLPGLKKEEIKVEVEDGRVLQISGERSKEQEEKTDTWHRVERSVGKFHRRFRLPENAKVDQVTASMENGVLTVTVPKKEEKEPEVKAIDISG

SEQ ID NO: 5047 - protein, 422 aa, Anabaena variabilis ATCC 29413
MNSNTEKRIALISVHGDPAIEIGKEEAGGQNVYVREVGKALAELGWQVDMFSRRVSREQELIVHHSPLCRTIRLTAGPEEFVPRDNGFKYLPEFVQQLLRFQKENNVNYPLVHTNYWLSSWVGMQLKAIQGSKQVHTYHSLGAVKYKSIDTIPLVATKRLSVEKQVLETAERIVATSPQEQQHMRSLVSTKGYIDIVPCGTDIHRFGSIARQAARAELGIDQQAKVVLYVGRFDQRKGIETLVRAVNESQLRDSNKLRLIIGGGSTPGNSDGRERDRIEGIVRELGMTEMTSFPGRLTQDVLPAYYAAADVCVVPSHYEPFGLVAIEAMASGTPVVASDVGGLQFTVVSEKTGLLVPPKDIAAFNVAIDRILMNPEWRDELGVAARRHVTHKFGWDGVASQLDGIYTQLLTQQVKEPALVTK

SEQ ID NO: 5048 - protein, 144 aa, Rubrobacter xylanophilus DSM 9941
MLSPFRGFRDLQSEMDRLFGEAFGRPPRADAEGGWTPAVDVLTRGDDLIIRAELPGVRREDVEVTVSNGVLTLAGERREEEERERAGYLIRERRQGSFRRSMTLPEGVNEDEIKATFRDGVLEVSVPGASAAVEAPPRRIEIEG

SEQ ID NO: 5049 - protein, 148 aa, Frankia sp. EAN1pec
MNVGDRVGDLSGVDETGAELRLSDLLAKGPLVVFFYPAAMTPGCTRESCHFRDLASEFAAIGAGIVGVSADDTAKQAEFSAKHSLGFPLLADTSRTIADAFGVRRKFGPNKRATFVLDRDGTVVARIDSEFAMNRHADKALDALRALG

SEQ ID NO: 5050 - protein, 200 aa, Prochlorococcus marinus str. MIT 9313
MTTNECLRVGQQAPDFNATAVVDQEFKEISLSQYRGKYVVLFFYPLDFTFVCPTEITAFSDRYTDFSSRNTEVLGVSVDSQFSHLAWIQTSRKEGGLGDINYPLIADLKKEISTAYNVLDDEAGVALRGLFIIDPDGVIMHSTINNLPVGRNVDETLRVLQAFQYVQSHPDEVCPANWTPGEKTMKPDPVGSKEFFASIN

SEQ ID NO: 5051 - protein, 202 aa, Oryza sativa
EFKEINLKDFENKYLVLLFYPLDFTFVCPTEIIAFSDRIQEFKSINTEVVAISVDSQFTHLAWINTPREQGGLGKIQIPLLADLTHQISKDYGVYLQDVGHALRGLFIIDGRGILRQITMNDLPVGRSTDETLRLLQAFQYTDKHGEVCPAGWRPGSDTIIPNPEEKLKYFSKNYETKNLDQLPITLVFSSFLGWVGLYLGK

SEQ ID NO: 5052 - protein, 541 aa, Polaromonas sp. JS666
MSQMSDPIREGIQRGWKVSGGALGPVPAKIVCDVAIIGSGAGAGITAELLAKAGLQVLIIEEGPLKSSSDFNQKESEAYPSLYQESAARKTEDKAINILQGRCVGGSTTVNWTSSFRTPPATLQFWQDRFGLSGYTAPALAPYFAQAEQRLNIQPWRVAPNENNDLLRRGAAALGIPVAVISRNVKDCWNLGSCGLGCPTNAKQSMLVTSIPAALDRGAQLLTETRAEKFEFANGKVTALICRAVAPNGALAPVNPSGEVIKIKAKHYVLAGGAINSPAVLLRSGAPDPHGRLGARTFLHPVVMSSSVFEQKVEAWNGAPQAIYSDHFLDTQPLDGPIGYKLEAPPLHPVIFASTVPGFGQGQHDLLTSFPHNHTLLALLRDGFHEESPGGKVKLRSDDSAVLDYPLTDYVMEGGRRALLSMMEIQFAAGARQVLPLHEMARPYTSWAQAREAVKALPMKPRLTKVVSAHVMGGCGLAGAERLGVTRPDGVHWQLDNLSIHDGSLFPTSIGANPQLSIYGAVNRLAQDLAKRLSGRDVALA

SEQ ID NO: 5053 - protein, 212 aa, Trichodesmium erythraeum IMS101
MTLRLGDKVPDFTQDSSEGQISFYDWAGDSWVVLFSHPADFTPVCTTELGAVARLKPEFDKRGVKVIALSVDDAESHKGWVGDINETQKTTVNYPILADVDKKVSDLYDMIHPNSLNNLTIRSVFIIDSEKKLRLTFTYPASTGRNFNEILRVIDSLQLTDNHQVATPVDWKDGDDCVIVPSLKDPEVLKEKFPKGYTEVKPYLRMTPQPNK

SEQ ID NO: 5054 - protein, 348 aa, Bdellovibrio bacteriovorus HD100
MSHIYDSILETIGNTPIVRLKNVTKGSKHQFFAKIEYFNPGGSIKDRVAVAMIEEAEKRGDLKAGGTIVEATSGNTGVGLALAAAVKGYKCIFVMPEKMSEEKRAILRAYGAKVVITPMVDPEHPLSHYSVSQKIAKETPGAFLTNQYHNPDNPQRHYQTTGPEIWKQMDGKVDVVVGGAGTGGTLSGVAKYLKEMNPNIKAICADPIGSILYDLYYHKKIVDPPGSYKVEGVGEDMLPDNVHLNIYDGFERVSDPEAFTMTRRLVAEEGLLVGPSSALALVGAMKAAEKIEKPSNIVVVFPDSGRAYLSKAFNDTWMIENALLKPEEAKNVFNRVVNAADFLAELNK

SEQ ID NO: 5055 - protein, 220 aa, Oryza sativa
MPGLTLGDVVPDLELDTTHGKIRLHDFVGDAYVIIFSHPADFTPVCTTELSEMAGYAGEFDKRGVKLLGFSCDDVESHKDWIKDIEAYKPGRRVGFPIVADPDREAIRQLNMIDADEKDTAGGELPNRALHIVGPDKKVKLSFLFPACTGRNMAEVLRATDALLTAARHRVATPVNWKPGERVVIPPGVSDEEAKARFPAGFETAQLPSNKCYLRFTQVD

SEQ ID NO: 5056 - protein, 318 aa, Zea mays
LALSPRIFSEVNKFKPDIIHATSPGIMVLGALAIAKMISVPMVMSYHTHLPAYIPRYNLNWLLEPTWSFIRCLHRSADLTLVPSVAIAEDFETAKVVPANRIRLWNKGVDSESFHSKYRRHEMRVRLSGGEPEKPLVIHVGRFGREKNLDFLKGVMERLPGARIAFVGDGPYRSELEKMFTGMPAVFTGMLQGEELSQAYASGDVFAMPSESETLGQVVLESMASGVPVVAARAGGIPDIIPKDKEGKTSFLFTPGDLDECVRKIEQLLSSKDLRETIGMAAREEMEKCDWRAASKKIRNEHYSTAISYWRKKMGKTN

SEQ ID NO: 5057 - protein, 252 aa, Yarrowia lipolytica CLIB122
MSFRLATYLRTAKSLRPATLPAGARFYSFKAEDQPRIRIGSTAPNFSAQTTGGDIDFHNFIGDKWTVLFSHPADFTPVCTTELGAFAALKDEFTKRNAQLIALSADDLQSHKDWVQDIEDTSTSGKAFDFPIIADPERKVAFLYDMVDQQGFENINKGIAFTIRSVFIIDPNKKVRLFITYPASTGRNSSEILRVLDSLQLNDATGLVTPIDWEAGKDVIIPPSVKNEDAKKKYGDFKELKPYLRFTKDPVN

SEQ ID NO: 5058 - protein, 200 aa, Synechococcus sp. WH 7803
MTANGCLRVGQQAPDFTATAVVDQEFKEISLSQYRGKYVVLFFYPLDFTFVCPTEITAFSDRYADFSSKNTEVLGVSVDSQFSHLAWIQTPRNQGGLGDINYPLVADLKKEIASAYNVLDDEEGVALRGLFIIDPEGVIMHATINNLPVGRNVDETLRVLQAFQYVQSHPDEVCPANWTPGEKTMKPDPVGSKEFFAAVN

SEQ ID NO: 5059 - protein, 163 aa, Polaromonas sp. JS666
MELPIKLDLNGRAVQLDADPGMPLLWLLRDVLNLTGTKFGCGVAACGACTVRVDGQAVRSCMTPVSAVLGKRVQTIEALGTPDKPHALQLAWIAEQVPQCGYCQSGMLMAAAALLDRKPKPTDADIDAAMTNICRCGTYQRIRAAIKRAAGIAANGGLKKAGP

SEQ ID NO: 5060 - protein, 199 aa, Cyanothece sp. PCC 8801
MTTQGCLRVGQLAPDFTATAVIDQEFQTKKLSGYRGKYVVLFFYPLDFTFVCPTEITAFSDRYEEFTKINTEVLGVSVDSEFSHLAWIQTDRKEGGVGDVAYPLVSDIKREISIAYNVLDPDAGVALRGLFIIDKEGYIQHSTINNLSFGRSVDETLRTLKAIQYVQSHPDEVCPAGWEEGDRTMIPDPVKAKVYFSAI

SEQ ID NO: 5061 - protein, 956 aa, Escherichia coli O157:H7 EDL933
MIIHFTLNGAPQELTVNPGENVQKLLFNMGMHSVRNSDDGFGFAGSDAIIFNGNIVNASLLIAAQLEKADIRTAESLGKWNELSLVQQAMVDVGVVQSGYNDPAAALIITDLLDRIAAPTREEIDDALSGLFSRDAGWQQYYQVIELAVARKNNPQATIDIAPTFRDDLEVIGKHYPKTDAAKMVQAKPCYVEDRVTADACVIKMLRSPHAHALITHLDVSKAEALPGVVHVITHLNCPDIYYTPGGQSAPEPSPLDRRMFGKKMRHVGDRVAAVVAESEEIALEALKLIEVEYEVLKPVMSIDEAMAEDAPVVHDEPVVYVAGAPDTLEDDNSHAAQRGEHMIINFPIGSRPRKNIAASIHGHIGDMDKGFADADVIIERTYNSTQAQQCPTETHICFTRMDGDRLVIHASTQVPWHLRRQVARLVDMKQHKVHVIKERVGGGFGSKQDILLEEVCAWATCVTGRPVLFRYTREEEFIANTSRHVAKVTVKLGAKKDGRLTAVKMDFRANTGPYGNHSLTVPCNGPALSLPLYPCDNVDFQVTTYYSNICPNGAYQGYGAPKGNFAITMALAELAEQLQIDQLEIIERNRVHEGQELKILGAIGEGKAPTSVPSAASCALEEILRQGREMIQWSSPKPQNGDWHIGRGVAIIMQKSGIPDIDQANCMIKLESDGTFIVHSGGADIGTGLDTVVTKLAAEVLHCPPQDVHVISGDTDHALFDKGAYASSGTCFSGNAARLAAENLREKILFHGAQMLGEPVADVQLATPGVVRGKKGEVSFGDIAHKGETGTGFGSLVGTGSYITPDFAFPYGANFAEVAVNTRTGEIRLDKFYALLDCGTPVNPELALGQIYGATLRAIGHSMSEEIIYDAEGHPLTRDLRSYGAPKIGDIPRDFRAVLVPSDDKVGPFGAKSISEIGVNGAAPAIATAIHDACGIWLREWHFTPEKILTALEKI

SEQ ID NO: 5062 - protein, 212 aa, Streptomyces avermitilis MA-4680
MAPVRRCSMDSHTEPGVAAPDPHRSEVTLRVNGKLYTLTVDHRSVLLDVLREDLDLTGAKKGCDHGQCGACTVLVDGRRVNSCLLPAVAQDGRDITTIEGLAGTGEVVGEEGLAGGDGLVEGGGAGLHPLQRAFLERDAFQCGYCTPGQICSALGALAEAEAGHPSRVTDPARPSGQPVPLGRDEIRERLSGNLCRCGAYTHIVEAVEDVIR

SEQ ID NO: 5063 - protein, 1384 aa, Oryza sativa
  misc_feature (36)..(36): Xaa can be any naturally occurring amino acid
MGSLTRAEEEETAAAEEWSGEAVVYVNGVRRVLPDXLAHLTLLQYLRDIGLPGTKLGCGEGGCGACTVMVSCYDQTTKKTQHFAINACLAPLYSVEGMHIITVEGIGNRQRAVWNYLCDEVVTCWLKTLRKERLAMAHGSQCGFCTPGFVMSMYALLRSSEQPPTEEQIEDSLAGNLCRCTGYRPIIDAFRVFSKRDDLLYNNSSLKNADGRPICPSTGKPCSCGDQKDINGSESSLLTPTKSYSPCSYNEIDGNAYSEKELIFPPELQLRKVTSLKLNGFNGIRWYRPLKLKQVLHLKACYPNAKLIIGNSEVGVETKFKNAQYKVLISVTHVPELHTLKVKEDGIHIGSSVRLAQLQNFLRKVILERDSHEISSCEAILRQLKWFAGTQIRNVASVGGNICTASPISDLNPLWMATGATFEIIDVNNNIRTIPAKDFFLGYRKVDLKPDEILLSVILPWTRPFEFVKEFKQAHRREDDIALVNAGMRVYIRKVEGDWIISDVSIIYGGVAAVSHRASKTETFLTGKKWDYGLLDKTFDLLKEDVVLAENAPGGMVEFRSSLTLSFFFKFFLHVTHEMNIKGFWKDGLHATNLSAIQSFTRPVGVGTQCYELVRQGTAVGQPVVHTSAMLQVTGEAEYTDDTPTPPNTLHAALVLSTKAHARILSIDASLAKSSPGFAGLFLSKDVPGANHTGPVIHDEEVFASDVVTCVGQIVGLVVADTRDNAKAAANKVNIEYSELPAILSIEEAVKAGSFHPNSKRCLVKGNVEQCFLSGACDRIIEGKVQVGGQEHFYMEPQSTLVWPVDSGNEIHMISSTQKAPQKHQKYVANVLGLPQSRVVCKTKRIGGGFGGKETRSAIFAAAASVAAYCLRQPVKLVLDRDIDMMTTGQRHSFLGKYKVGFTDDGKILALDLDVYNNGGHSHDLSLPVLERAMFHSDNVYDIPNVRVNGQVCFTNFPSNTAFRGFGGPQAMLIAENWIQHMATELKRSPEEIKELNFQSEGSVLHYGQLLQNCTIHSVWDELKVSCNFMEARKAVIDFNNNNRWRKRGIAMVPTKFGISFTTKFMNQAGALVQVYTDGTVLVTHGGVEMGQGLHTKVAQVAASSFNIPLSSIFISETSTDKVPNATPTAASASSDLYGAAVLDACQQIMARMEPVASRGNHKSFAELVLACYLERIDLSAHGFYITPDVGFDWVSGKGTPFYYFTYGAAFAEVEIDTLTGDFHTRTVDIVMDLGCSINPAIDIGQIEGGFIQGLGWAALEELKWGDDNHKWIRPGHLFTCGPGSYKIPSVNDIPLNFKVSLLKGVLNPKVIHSSKAVGEPPFFLGSAVLFAIKDAISAARAEEGHFDWFPLDSPATPERIRMACVDSITKKFASVYYRPKLSV

SEQ ID NO: 5064 - protein, 144 aa, Cyanothece sp. PCC 7424
MALAVGTEAPNFTTVNDEGKTVSLSDFKGKVVVLYFYPKDDTPGCTKEAQSFRDNYQEYQTKDMVVLGVSMDDQASHKQFKEKYGLPFNLLVDTDGAITKAYDVEGGGYSKRVTYIIDAEGKIMYVDEKVKTDSHAKDILSTVG

SEQ ID NO: 5065 - protein, 181 aa, Listeria monocytogenes str. 4b F2365
MAERLVGTQAPRFEMEAVMPNQTFGKVSLEKNIEDDKWTILFFYPMDFTFVCPTEIVAISARSDEFDALNARIIGASTDTIHSHLAWTNTPIKEGGIGRLNYPLAADTNHQVASDYGVLIEEEGVALRGLFIINPKGEIQYEVVHHNNIGREVDEVLRVLQALQTGGLCPINWQPGEKTIV

SEQ ID NO: 5066 - protein, 706 aa, Streptomyces avermitilis MA-4680
MADAPTALGAPVERREGRDKVTGTARYAAEYPLPGRAHGWPVPAAIGRGAVRAIDARAALDLPGVLAVLTHENAPRLAEPEDPTLAVLQNPRVPHRGWFVALVVAETLEEARAGAAAVRVDYAAEDHDVTLTETHPEAYTPDTANGGYPAHREHGDPEWAFTSAPVRVDVGYRLPPLHNHPMEPHAATASWQGGRLVVHDSSQGATTVRTVLAGLFELPEDRVTVVAEHVGGGFGCKGTPRPHVVLAAMAARETGRPVTVALPRRFLPAVVGHRAPTLHRVRLGAAADGTLAAVLHEVTTHTSRIKEFVEQAATPARVMYAAANILTSHRVVPLDVPSPSWMRAPGEAPGMFALESAMDELAVELGMDPVELRIANEPDAEPDSGRPFSSRHLVECLREGARRFDWAARPAAPRARTAGPLLMGTGVAAATYPVLVSPATATAQALPGGDFVVRINATDIGTGARTVMAQIAAHALGVPVDRVRSEVGSSDLPSAPLAGGSSGTASWGWAVHEACTRLRARLAEGTGPVPDQGIVTNADTAGHADAESAYARHAFGAHFAEVAVDTVTGEVRVSRLLGVYAAGRILNARTARSQFIGGMTMGLGMALTEGSTMDPAFGDFTESDLAAYHVPAHADVRDIEAYWVDEDDPHLNPMGSKGIGEIGIVGTAAAIGNAVHHATGVRFRELPLTPDRVLGGLATPGSVSGG

SEQ ID NO: 5067 - protein, 377 aa, Geobacillus kaustophilus HTA426
MGSESGKGERNVSGGPPMKVALLAPSKSIHTHKWARFYQTQGIDVKVVTFKDHYGPEQAKEVETVVLPKWLPGKLSYFSTVFSLKRLLASFRPDILHAHYASSYGLIGALAGYHPFYVSVWGRDVYQFPNTNRWNRRMLEYTFQRADVICSTSRVMAKETGKYTDKPIEVTPFGVDVTRFKPLPKQPKRTVTIGTVKALSDKYGIADLIRAFAIVHERHPQTELLIVGDGPQRSEYEELCARLGIQSVTTFAGKVPNEQVPLYINQMDIFAVPSTEDSESFGVAAVEAMACGVPVVVSNVGGLPEVVREGTTGLIVPKNSPEKLAEAFERLLLDERLRQRMGENGVNHVHEHYDWTENAMRMIRLYEQTLKGGGGSR

SEQ ID NO: 5068 - protein, 234 aa, Solanum lycopersicum
MAYTSLTSSPLVSNVSVGGTSKINNNKVSAPCSVFVPSMRRPTTRLVARATGDNKDTSVDVHHSSAQGGNNQGTAVERRPTRMALDVSPFGVLDPMSPMRTMRQMIDTMDRLFEDTMIPGRNRASGTGEIRTPWDIHDDENEIKMRFDMPGLSKEDVKVSVENDMLVIKGEHKKEEDGRDKHSWGRNYSSYDTRLSLPDNVVKDKIKAELKNGVLFISIPKTEVEKKVIDVQIN

SEQ ID NO: 5069 - protein, 112 aa, Zea mays
  misc_feature (15)..(15): Xaa can be any naturally occurring amino acid
GQTNRKSGGVGDFKXPLVFDVAKSISKAFGVLIPGQGIALRGLFFIDKGGGGQPFSLNNLALGCRGGGAMGALPALQYVQGNPDGGGPAGWKPGGGGMKPAPKGSKEDFGAL

SEQ ID NO: 5070 - protein, 402 aa, Bacillus licheniformis ATCC 14580
MKILLATYWSIPHVGGVWTYMVQLKESLESMGHEVDLLGYGEENEIVHIVNEDRKVKKEQLLPMIEQSVDQQSFPQLYDNQLVHFTEIQRYVYELAAIYLGLEKYDLIHAQDVISSGCLKRVKQKDTPLVATLHGSVAHEIRHQLTTIHRKSNSDIARAYFDHLERVGAVSADATIVANNWLKNLLTKEFDTPEEQISVLHYGYDIDSFLKRKDTKSAEIPQTDKKIILFTGRLVENKGVQHLLAALSHLKEVRDDWVCWIAGDGERMAGLRILCGQLGLENDVVFMKKRDDVPYLLSIADVYVLPSLLENQPLSVIEAQLAGLPIIVSDAGGLPEIVEHNVTGMVTPKGDAQAICNSINQLLEDETLRKTLGSNAHKFAMEYWNMDEAVNKVLDIYQQTLK

SEQ ID NO: 5071 - protein, 159 aa, Nostoc sp. PCC 7120
MSNIPQAGQPAPDFSTPDQNGNLVSLNDFQGQWVVIYFYPKDDTPGCTTEAKDFTGLHQEFNQLGAKILGVSPDSGKAHCKFIDKHNLSINLLSDPEHQLIEAYGAWRLKKFMGKEYMGVARSTFLISTDGIIAYAWPNVKTKGHAQAVLNKLQELINS

SEQ ID NO: 5072 - protein, 200 aa, Yersinia pestis CO92
MVLVTRQAPDFTAAAVLGNGEIVENFNLKKHLNGRPAVLFFWPMDFTFVCPSELIAFDHRYEEFQKRGVEVVGVSFDSEFVHNAWRKTPVDKGGIGEVKYPMVADIKREIQKAYGIEHPDAGVALRGSFLIDKNGIVRSQIVNDLPIGRNIDEMIRTVDALQFHEEHGEVCPAQWEKGKAGMGASPDGVAKYLSENASKL

SEQ ID NO: 5073 - protein, 203 aa, Nostoc sp. PCC 7120
MSITYGTQESLRVGQQAPDFTATAVVDQEFKTIKLSDYRGKYVVLFFYPLDFTFVCPTEITAFSDRYEEFKKLNTEILGVSVDSEFSHLAWIQTDRKSGGVGDLNYPLVSDIKKEVSDAYNVLDPAAGIALRGLFIIDKDGIIQHATINNLAFGRSVDETLRTLQAIQYVQSHPDEVCPAGWQPGEKTMTPDPVKSKVYFAAV

SEQ ID NO: 5074 - protein, 189 aa, Brassica napus
  misc_feature (165)..(165): Xaa can be any naturally occurring amino acid
  misc_feature (174)..(174): Xaa can be any naturally occurring amino acid
  misc_feature (178)..(178): Xaa can be any naturally occurring amino acid
  misc_feature (185)..(186): Xaa can be any naturally occurring amino acid
  misc_feature (188)..(188): Xaa can be any naturally occurring amino acid
HASVNLSSSSLSINLSPTHHPFLPSTTTNTNTCSSSSSATTCSPRCSFVSSPVSLGASCPRRSSPVSLIRRKSQSFFAGLEVVSASSSGSSGMTITEARGEGDESEIEAPLLDPESYSKPRRIALFVEPSPFAYVSGYKNRFQNFIRYLREMGDEVIVVTTHEGXPEEFYGAKXIGSXSFPCPYXXKXP

SEQ ID NO: 5075 - protein, 349 aa, Zea mays
MGYARTLKAAAAAVLAAGGVRFLGPALAAFVTEELPRARAVAATWLTPPYLYLVINAIIISIAASSRFQPSDGGRPSAPSYAPAADAGAGAIGVGGAGDEIEQDGIQPAVVLQLQVPAAMPLVAVKAAAVAAVEEREPVVEVHTTEVAPVPPDEVDEDYSISRSTWTPRRRGEEPEVAADVETDVLPFTDLTNSRDKPLVSARFSRKAAKASPEGSRALRVARPRKEETLESTWKAITEGRGPPLARHLKKSDTWDARPGRRPGGSGKVDPAAVAPAGAMRKAETFNDGGRAGRSKAPPAPVRREPSLGQDELNRRVEAFIHKFNMEMRLQRQESLKHYSDMLGRGIRY

SEQ ID NO: 5076 - protein, 182 aa, Triticum aestivum
  misc_feature (12)..(12): Xaa can be any naturally occurring amino acid
  misc_feature (106)..(106): Xaa can be any naturally occurring amino acid
RIPFIGDAPFRXELEEMFSGRPAGVTGDIAKGKNWSQAYARGDVFVMPSESETLGSVVLEAMSSGVPVVAARAGGIPDIIPEDQEGKTSFLYIPGDVDDCVGKVNXLLSCEELRETMGKAARKEMEKFGWKAATRKIRNEQYTAAIWSWRKKRSQLLRPLQWVFRRLFRPAPAPAPAITNQS

SEQ ID NO: 5077 - protein, 235 aa, Solanum lycopersicum
MAYTSLTSSPLVSNVSVGGTSKINNNKVSAPCSVFVPSMRRPTTRLVARATGDNKDTSVDVHHSSAQGGNNQGTAVERRPTRMALDVSPFGVLDPMSPMRTMRQMIDTMDRLFEDTMTFPGRNRASGTGEIRTPWDIHDDENEIKMRFDMPGLSKEDVKVSVENDMLVIKGEHKKEEDGRDKHSWGRNYSSYDTRLSLPDNVVKDKIKAELKNGVLFISIPKTEVEKKVIDVQIN

SEQ ID NO: 5078 - protein, 454 aa, Kineococcus radiotolerans SRS30216
MRYAETVVDLVGGTPLVKLNRVTEGLACTVLAKVEYLNPGGSVKDRIATRMIEAAEAEGLLKPGGTIVEPTSGNTGVGLALVAQQRGYKCVFVCPDKVGADKRNVLKAYGAEVVVCPTAVPPEDPQSYYSVSDRLVREIEGAWKPNQYSNVHGPRSHYETTGPEIWADTEGRITHFVTGVGTGGTITGTGRYLKEQGPVKVIGADPEGSVYSGGTGRPYLVEGVGEDFWPTAYDPSIPDEIIAVSDADSFEMTRRLAREEGLLVGGSCGMAVVAALRAAKDLGPDDVVVVLLPDGGRGYLGKIFNDDWMASYGFLDSGARGTVGEVLRAKTTGLPALVHTHPTETVHDVIEIMREYGVSQLPVVGAEPPVMAGEIAGAVNERALLDALFTGRAKMSDAVSAHMGPALPLVGAGQSVEDVRSVFSGADAAVVVEDGKPTGVITRHDLLAYLAISH

SEQ ID NO: 5079 - protein, 389 aa, Bacillus subtilis subsp. subtilis str. 168
MKILWITSVYPSSMKPGEGVFHETQVQELQKLGLDITVICPRPFHSAPVRMLKKTYRKKDVRPEYEIRKGIPVYRPFYRAVPGQLKWAQPHRRIASAVLKTMKQRDLYPDLIHAHFAMPSGGAAAVVSESAQIPYVLTLHGSDVNVYPHYSKGAFKAFKRAVGSASVVLAVSHKLQEEAKKLSGFDSSVLPIGIQLSRFQGNEETKEEIRKRLGLPLDQRLAVYVGRLVREKGIFELSEAIESLQDSPKAVFVGDGPAKSTLTQKGHIVTGQVPNHQVRDYLLAADLFVLPSYSEGMPTVVIEALALRVPVICTDVGGVSSLFGKHQHLLIKPKSAQALAEAITRYEHEQIWKPEVADDLYETVQAQFDAGKNAKALHHQYQTVTKTSV

SEQ ID NO: 5080 - protein, 167 aa, Glycine max
  misc_feature (115)..(115): Xaa can be any naturally occurring amino acid
  misc_feature (151)..(151): Xaa can be any naturally occurring amino acid
MACSATSASLFSANPTPLFSPKSSLSLPNNSLHLNPLPTRPSLSLTRPSHTRRSFVVKASSSELPLVGNTAPDFEAEAVFDQEFINVKLSDYIGKKYVVLFFYPLDFTFVCPTVXHLAWVQTDRKSGGLGDLNYPLISDVTKCISKSYGVXLIPDQGNCIGEGWSFI

SEQ ID NO: 5081 - protein, 362 aa, Arabidopsis cebennensis
MSMIPSFFNNNRRGNNIFDPFSLDVWDPFKELTSSSLSRENSAIVNARVDWRETPEAHVFKADLPGLKKEEVKVEIEEDSVLKISGERHVEKEDKNDTWHRVERSSGQFTRRFRLPENVKMDQVNAAMENGVLTVTVPKAVTKKADVKSIQITEEVLVIGAHALSLFSLFSFTEAKVDLRQGSISLSGLAVDLRLLKVVAPKLSCGVVAKRVTALAIVFSSRSVPSLRFCSGGDDSYLIALRLESLTAEEVMELKDGSGSDPLSPSIWSLRPLIGFGSFLASLLGPFVVVAAWMEFSERLSTSVQGGCDGGVWRCYVHLRLPFVASMWLRGGSVRLLRFAVKIVSSVAPVGFSVGNRGGGLV

SEQ ID NO: 5082 - protein, 171 aa, Sulfolobus tokodaii str. 7
MKQMKIINSDQKVKITLKINGEKYETEVEPRRLLVHVLRELGFTGVHIGCDTSNCGACTVIMNGKSVKSCTVLAVEADGAEILTVEGLAKDGKLHPIQEAFWENHALQCGYCTPGMIMEAYWLLREKPNPTEEEIREGISGNLCRCTGYQNIVKAIKAAAEKLSQTPYQHQ

SEQ ID NO: 5083 - protein, 408 aa, Mycobacterium sp. JLS
MKIAMVSDHASPLAALGGVDVGGQNVRLAELSAAMARRGHDVTVYTRRDDPDLPERVSTPQGYTVVHVPAGPARRLPEDELLVHTGPFAQHLDQQWSADRPDVAHAHFWMSGIATQLAARHLDLPAVQTFHALGVVERRHQGAHDTSPEDRLKLEAMVARTATWVAATCTDEVFELMRLGRSRSRISVVPCGVDLDLFTPDGPRAERGARHRIVSVGRLLPRKGFDVVVRALTAIPEAELILVGGPERSEVEADPEARRLRELAERLGVGDRVVFQGAVARADMPALLRSADVVACTPWYEPFGIVPLEAMASGVPVVAAAVGAMLDTVVQDVTGRLVAARRPGEVADAINTLLHDEFLGQSLGAAGRDRARARYSWDRIAADTLRIYERLVPAASRPRAARTSVSSV

SEQ ID NO: 5084 - protein, 242 aa, Physcomitrella patens subsp. patens
MAARTLSRVVTSPAKSFLSTFKDALIEQGRSPLPRQAPYAVVQRMGVSGSAQTTSHGDYDSQSQLEKPQNEGKSPQRRNQGGLRRGVPRDLASAFLDVWDPYPGNRTLKQMLNTVDRLFDDPFFSAAPSRPTSVALDFRTPWDVKEDESAFRLRFDMPGLQKDEVRVCVEDGDLVIKGEHKVEEKNEYNWSSRSFGSYNTRMTLPENIKIDEVKAELKNGVLHVFVPKSKEEPKKNVNINIE

SEQ ID NO: 5085 - protein, 853 aa, Clostridium difficile 630
MVEFILNGEKVVAKEGKKLLDFLREDMNITSVKNGCSEGACGTCMVIIDGKATKACVFKTDKLAGKNITTIEGLSERERDVFAYSFASQGAVQCGFCIPGMVISSKALIDVNNNPTEDDIKKALKGNICRCTGYVKIIKAVDLAAKIFRENIDVPKVNCKGLVGENLPRVDAVGKALGYSEYVDDMRIEGMIYGSAVRAKYPRALVKKIDIEEAKAYPGVVAVLTAKDIPGTIKVGHLKKDWDTLIPEGEITRYLGDGIVLVAAETREALEEAKKLVKIDYEELTPLSTTADALREDAPKIHETGNILVKEHLVRGNAKEKIENSKYVVTKRYTTPATEHAFLEPECAVAGPYEDDGVIIYSTDQGVFATQHECADMLGLPYEKVRVINKMVGGGFGGKEDMSVQHHAALLAYHTKRFVKVQLTRKESIIVHPKRHATEMEFTTACDENGYLTGMKATIISDTGAYASLGGPVLQRLCTHAAGPYNYQDIDITGTAVYTNNPPGGAFRGFGVTQSCFATECNLNLLAEMVGISPWEIRYKNAIRPGQVLPNGQFADEGTAMAETLEAVKEEYEKHPRAGIACAMKNSGVGVGIPDVGRCRLVIKDGKVHIRTSASCIGQGLGTVMTQVVCETASLLPENIVHEVPDTHLTPDSGNTTASRQTVFTGEATKVASNKLKEALDSGKTLLDLEGEEFYGEYESITDKMGCDKENPVSHVAYGYATQVVILDENGKLEKVVAAHDVGRAINPISLEGQIEGGVVMGLGYALTEDYPVVNSVPTAKFGTLGLFKSTDIPEIQALIVEKNKDLLAYGAKGVGEICTVPTAPAVQNAYYVFDKEFRTELPLQNTPYSKKK

SEQ ID NO: 5086 - protein, 385 aa, Cyanothece sp. PCC 8801
MHIAWLGKKSPFCGNVTYGREVTNELLDRGYQVSFLHFAQEETSEAPWPDCPEVVLPFIYKSQVYTIPTPKSSKILMDSLEKLQPDLVHASLTLSPLDFRLPEICEELGIPLVATFHPPFDSKLRNLKSSTQFLTYQLYAPFLANYDKTIVFSDLQRDLLIKLGVPPEKLAVIPNGVNLDKYSPGVSPLKFHPQFRGKRLFVYVGRIATEKNVEALLKAWKQAEMGYDNKLLIVGDGPLKPSLEPFYGREYGIYWLGFVADEQQRIDILRAAEVFILPSLVEGLSLSLLEAMACGIACVATDAGADGEVLSNGAGIVMNTQGVTTQLKTLLPLLRDHPEITQLLGQKARQRVLEKYSLSQNITCLERLYSQLLEKPRFSAYPLFS

SEQ ID NO: 5087 - protein, 252 aa, Platanus x acerifolia
MHHSVSWMAMAAVAAAFLQLCSSVENVETSHLEADRINKLPGQPQVSFQQFSGYITVDERKQRALFYYFVEAEKDPASKPLVLWLNGGPGCSSIGVGAFSEHGPFRPSGEILIRNEYSWNKEANMLYLETPAGVGFSYSTNTSFYKAVDDEITAKDNLVFLQRWFIKFPLYKDRDLFLAGESYAGHYVPQLAQLIVQFNKKEKLFNLKGIALGNPLLEFTTNLNSRAEYLWSHGRISDLTYRVLTSACNYSR

SEQ ID NO: 5088 - protein, 885 aa, Arabidopsis thaliana
MDLEANCKEKLSYFRIKELKDVLTQLGLSKQGKKQELVDRILTLLSDEQAARLLSKKNTVAKEAVAKLVDDTYRKMQVSGASDLASKGQVSSDTSNLKVKGEPEDPFQPEIKVRCVCGNSLETDSMIQCEDPRCHVWQHVGCVILPDKPMDGNPPLPESFYCEICRLTRADPFWVTVAHPLSPVRLTATTIPNDGASTMQSVERTFQITRADKDLLAKPEYDVQAWCMLLNDKVLFRMQWPQYADLQVNGVPVRAINRPGGQLLGVNGRDDGPIITSCIRDGVNRISLSGGDVRIFCFGVRLVKRRTLQQVLNLIPEEGKGETFEDALARVRRCSGGGGGDDNADSDSDIEVVADFFGVNLRCPMSGSRIKVAGRFLPCVHMGCFDLDVFVELNQRSRKWQCPICLKNYSVEHVIVDPYFNRITSKMKHCDEEVTDIEVKPDGSWRVKFKRESERRELGELSQWHAPDGSLCPSAVDIKRKMEMLPVKQEGYSDGPAPLKLGIRKNRNGIWEVSKPNTNGLSSSNRQEKVGYQEKNIIPMSSSATGSGRDGDDASVNQDAIGTFDFVANGMELDSISMNVDSGYNFPDRNQSGEGGNNEVIVLSDSDDENDLVITPGPAYSGCQTDGGLTFPLNPPGIINSYNEDPHSIAGGSSGLGLFNDDDEFDTPLWSFPSETPEAPGFQLFRSDADVSGGLVGLHHHSPLNCSPEINGGYTMAPETSMASVPVVPGSTGRSEANDGLVDNPLAFGRDDPSLQIFLPTKPDASAQSGFKNQADMSNGLRSEGWISLRLGDSASGNHGDPATTNGINSSHQMSTREGSMDTTTETASLLLGMNDSRQDKAKKQRSDNPFSFPRQKRSVRPRMYLSIDSDSETMNRIIRQDTGV

SEQ ID NO: 5089 - protein, 216 aa, Coprothermobacter proteolyticus DSM 5265
MFEEQTRMPLIGDKFPELEVKTTFGPMKLPDDFNGKWVVFFSHPGDFTPVCTTEFVAFQKRFDEFKALNTELIGLSVDQVPSHIKWVQWIKDNLGVEIQFPIIADELGRIAKALGLIHPAKGTNTVRAVYIVDPKGIIRAILYYPQEIGRNIDEIIRMIKAFQTADANHVAIPANWPNNELMGDEVIIPLPPDIKGAEERMNQPNCYDWWLCHKKI

SEQ ID NO: 5090 - protein, 372 aa, Desulfococcus oleovorans Hxd3
MKIGINALYLLPGKVGGSETYIRNLVKHLDLLGGDNTYFIFINKESIGVFPETSRIKTVLCPIHAASRPIRILWEQCILPFQIKKYNIDAVLSAGMTAPFFCPARSILTILDLQHINQPQNFSRFHLFFLRSIIYLSAKTADGIMTISEHVKQDIVKFYKIRPEKIAVGYLAVQHNIFTPAAGKDDLAIRAKYGLPERYILYAAALLPHKNHERLLTAFKAVKDKIPGKKLVFTGAWNQGYDKVANTISALDLKKDVIMLGWLPFEEISAVFRGAELFVYPTLHEGFGLPILEAMASGVPVVCSKIEPLIEVSGDASMFVDPLDPADIANGILSVLTQNHLREHLVEKGAKRARQFTWEATAQTTLVFLNRA

SEQ ID NO: 5091 - protein, 376 aa, Malus x domestica
MAALRSFLKKRSSVLCNGAMRRKLFSTEVSQPLTDSPSFAQRIRNLPKDLPGTQIKTQVSQLIGRTPIVYLNKVTEGCGAYIAVKQEMFQPTASIKDRPALSMINDAEEKGLITPGETILIEPTSGNMGISMAFMAAMRGYKMVLTMPSYTSLERRVCMRCFGADLILTDPTKGMGGTVKKAYDLLESTPNAYMLQQFSNPANTKVHFETTGPEIWEDTNGQVDIFVMGIGSGGTVSGVGQYLKSKNPNVQIYGVEPAESNVLNGGKPGPHSIMGNGVGFKPDILDLDMLERVIEVTSEDAVNMARQLALKEGLMVGISSGANTVAAMELAKKPENKGKLIVTVHPSFGERYLSSVLFQELRQEAENMQPVAVDYP

SEQ ID NO: 5092 - protein, 179 aa, Pseudomonas fluorescens PfO-1
MANRPLQLTLNGQSVGPVDIPDDLPMIDYLHEYKNLTGSRLGCGQGICHACVVIVDNPDGSSEEVRTCITGAHYFEGKKVRTIEGHAKRDEQGQVTELNPIQQRFVDEFAFQCSYCAPGFVNAATVLVEKLQRQPIVESKLEQVIEDSLGHHVCRCTGYVRYYNATRNVLTDLGLVKEG

SEQ ID NO: 5093 - protein, 152 aa, Brevundimonas diminuta
MIEFILNGQPVRVTEVPEDAPLLWVVREHLKLSGTKFGCGLGLCGACTVHINGEAARSCITPLSVVARQSVTTIEGLDPQHAHPLQRAWIAEQVPQCGYCQSGQIMQAAALLKKVPKPSDAQIVEAMDGNLCRCGTYQRIKIAIHRAAKEAA

SEQ ID NO: 5094 - protein, 148 aa, Brassica napus
MASSVASSTTLISSTQVSPAKSSLPSPSSLSFLRTVSSPLRSGSALRSSLSSCSRRSFAVKAQADDLPLVGNKAPDFEAEAVFDQEFIKVKLSEYIGKKYVILFFYPLDFTFVCPTEITAFSDRYAEFEKLNTEVLGVSVDSVFSHLA

SEQ ID NO: 5095 - protein, 154 aa, Solanum peruvianum
MSLIPRIFGDRRSSSMFDPFSIDVFDPFRELGFPGTNSRETSAFANTRIDWKETPEAHVFKADLPGLKKEEVKVEIEEDRVLQISGERNVEKEDKNDTWHRVERSSGKFMRRFRLPENAKMDQVKASMENGVLTVTVPKEEVKKPDVKSIEISG

SEQ ID NO: 5096 - protein, 374 aa, Rubrobacter xylanophilus DSM 9941
MRVAFFTETFLPATDGVVTRLRYTLRELARLGDEALVIAPRYPEGGPAAFAGHRIFRVPGVPFPPYPQIRLAPANPGVGRELRRFGPDLIHAVNPYILGMAAPFYARRLKVPLVASYHTNVAAYARFYRLGFLHRAARLYTRAVHNRAAVNLCTSSATLEYLRGEGIRALRLWPQGVDCELFGPHRASGRWRERLSGGHPDAGLLLFVGRLAPEKGIEQLRAALDKMPGVRLALVGDGPARPALQRVFAGTPTVFTGVLHGEELAAAYASADLFVFPSTTETLGMAMLEALASGVPVIAARSGASREVVDDGETGLLYEPGSVSSLAAAAHRLLADEPRRASMARRARAAAERRSWEAATRTLRGCYLEALGSR

SEQ ID NO: 5097 - protein, 276 aa, Oryza sativa Indica Group
MAACCSSLATAVSSSSAKPLAGIPPASPHSLSLPRSPAAAARPLRLSASSSRSARASSFVARAGGVDDAPLVGNKAPDFDAEAVFDQEFINVKLSDYIGKKYVILFFYPLDFTFVCPTEITAFSDRYDEFEKLNTEILGVSIDSVFSHLAWVQTDRKSGGLGDLKYPLISDVTKSISKSFGVLIPDQGIALRGLFIIDKEGVIQHSTINNLAIGRSVDETMRTLQASSLEYTLLSAHTALQYVQDNPDEVCPAGWKPGDKSMKPDPKGSKEYFAAI

SEQ ID NO: 5098 - protein, 196 aa, Debaryomyces hansenii CBS767
MVAQVQKPAPSFKKTAVVDGVFEDVSLEQYKGKWVLLAFFPLAFTFVCPTEIIAYSEAVKKFAEKDTEVLFASTDSEYSLLAWTNVARKDGGLGPINLPLIADTNHSLAKDYGVLLEDDGVALRGIFLIDPKGVLRQITVNDLPVGRSVEESLRLVEAFQFTEKYGEVCPANWQPGSETIKPEVSSSKEYFGKVNK

SEQ ID NO: 5099 - protein, 229 aa, Bradyrhizobium japonicum USDA 110
MRAASVPFSQRTTCKGRDGFDQFQIAFASAAERDHSCDQGRRQPGGRPPIQVAAVSGFMHRQGKTPMPTLTINGRSLSVDAANDTPLLWAIREQLQMTGTKFGCGAGLCGACTVHVNGEAVRSCQTMVGDVAGKKITTIEGLSAKGDHPLQKAWIAEQVPQCGYCQSGQIMQAASLLAKNANPTKEEVVAHMDGNLCRCMTYSRIQKAIMRAATEMRTASASGNERRPT

SEQ ID NO: 5100 - protein, 366 aa, Solenostemon scutellarioides
MVATIAPSPRVEELARRGLDTIPKDYIRPEEELKSIGDIFAEEKSIDGPEVPTIDLAEIDSSDEERRRKCHDELKKAAEDWGVMYVINHGIPEELISRVKAAGKEFFELPVEEKEKHANDQAAGNVQGYGSKLANNASGQLEWEDYFFHCVFPEEKRELSIWPQNPPDYIPATSEYAKQLRGLTTKILSVLSLGLGLEEGRLEKEVGGMEDLILQMKINFYPKCPQPELALGVEAHTDVSALTFILHNMVPGLQLFYEGKWVTAKCVPNSIIMHVGDTIEILSNGKYKSILHRGLVNKEKVRISWAVFCEPPKEKIVLQPLPETVSEAEPLRFPPRTFAQHLKHKLFRKSDTEVDEKKKPNEDESN

SEQ ID NO: 5101 - protein, 763 aa, Bradyrhizobium japonicum USDA 110
MNKHVNNVAPGTTDLSRRSFLVGAAATGLVLGYAGVPGVGEALAAPSNFEPSVWYAISPDGLVTVTCGKADMGQHIASTMAQIVCEELGAKWSDMRVQLASNDPKFNDPVLGAQITGGSWSTMMNFEAMSRAGAAGRIALTEAAAAAMGLPPYFKDQLVVRDSMVSHPKSKKQMSFADIVKSGKATKTFTPDELKAIKLKTPDQYTMIGVSVPQLDIPSKTNGTAKYGIDVMLPGMVYGKVVTPPVRFGATVKSVDDSEAKKVPGFIKAIILDDKTGTTSGWVVAVAGTYANARKAADALKIAYDGGPNAKLSSQSLLDEAKRLQGLEDSGQFFVKDGDPNAAFGSAAKVVEAEYTTSINIHAPLEPMNATAEFKGDILHIYSGNQFATRSGAIAAGAAGIDPKFVVMHQHWLGGGFGRRLDADMMIPAVQAAKAVGKPVKVIYSRENDMTMDFSRPLTYQKVKAGVDGDGKLIALSHDVVSAWPTARWGIPDFLTPSVDKKGPLDSFTVNGADFFYTVPNHYVRAIKNELAHNATPSGQLRSVAPGWTFWAVESMIDEIAAATGKDPAQFRISLLDGAGKNDGGAQRLRNTLLAAMGLSGYGTRQLPKGEGMGVACVSSQERATASWTACVAHVAVAPSGEVTVKKLTVATDVGTQVHPDNIRAQVEGAALWGLSLAMYEKATLKGGGIEQTNFDSYTPLRMSQMPEVAVTVIANGEKATGVGEPAVTVIAPAIGNAIFNASGARVRALPITAEAVKGAMKA

SEQ ID NO: 5102 - protein, 502 aa, Arabidopsis thaliana; identical to SEQ ID NO: 4069

SEQ ID NO: 5103 - protein, 602 aa, Arabidopsis thaliana; identical to SEQ ID NO: 3072

SEQ ID NO: 5104 - protein, 192 aa, Synechococcus sp. CC9311
MGQQAPDFTATAVVDQEFQEISLSQYRGKYVVLFFYPLDFTFVCPTEITAFSDRYSDFSSKNTEVLGISVDSQFSHLAWIQTARNQGGIGDINYPLVSDLKKEISTAYNVLDDAEGVALRGLFIIDPEGVIMHATINNLPVGRNVDETLRVLQAFQYVQSNPDEVCPANWTPGEKTMKPDPKGSKEFFAAIG

SEQ ID NO: 5105 - protein, 245 aa, Triticum aestivum
LACASRRPSPAARQLWRGQHQPVLTEEWTSGPSSPPRQLTAPRPGLPWKERRTAGRSPWRTVPALPLLPGAVGLGETFGTSRHSASSTVHSGYSVRTSFQTVAHAVPPAVVDVGVHAGLGSALSHVAETLSRPLERWRPLFGKVREDEERYRLRFEVPGLGKDDVRVTVEDGALVIRGEKRVEDEHGGDGEWWSASSYGYYHASLLLPEDARVDGIAAEVKDGVLYVTVPRVPGRERSVTEVKVQ

SEQ ID NO: 5106 - protein, 455 aa, Myxococcus xanthus DK 1622
MDIHENILTAIGNTPLVKLNKLVGPNDATVLVKCEFMNPGASIKDRMALYILEKAEREGKLKPGGTIVENTSGNTGMGVALAAAVKGYKCIFTMPDKMSLEKINRLKALGAQVVVTPTNVPAEDPRSYYETAKRLHRETPGAFMLNQYHNPDNIEAHYNTTGPEIYKQTEGKFDYFVAGLGTGGTMSGAGKFLKEKIPGLKNVGVDPEGSVYEGYFKTGKLTEPHVYKVEGIGEDMLCGAMDFTHLDDVRQVDDRQCFIAARRLAREEGIFAGGSSGAAIHVAVQLAKEVGKGKTIVVVLPDSGSSYISKFHSDEWMRDNGFLEEKGAGTIRDILGDKRKDVKTARRGDKVDQVVETMRGHGISQMPVVGDDGRTVGMVHEYDLLNALVAGKAKFSDTIDSIIAPLQGALSLDTSIARLREVFAQDNVAVVKDGEKVVGIVTKIDLIDYLHRTAA

SEQ ID NO: 5107 - protein, 202 aa, Ajellomyces capsulatus
MTEERAAPLRLGSIAPNFKAVTTKGEIDFHEFIGDHYVILFSHPDDFTPTCTTELGAFAKLEPEFTARRVKLIGLSANALKSHFEWIKDIDEVTGSNLQFPIIADADRKISYLYDMLDYQDTTNVDEKEVAMTIRSVFIIDPNKKIRLILSYPATTGRNAAEVLRVIDALQTTDKNGVNTPINWTLGEDVIIPPDCEDRGRD

SEQ ID NO: 5108 - protein, 297 aa, Alkalilimnicola ehrlichei MLHE-1
MSYPTVEAFVGNTPLVRLQRMVPPERNNRILAKLEGNNPAGSVKDRPAVHMIRRAEERGRIRPGDTLIEATSGNTGIALAMAAAIKGYRMVLIMPENMSTERRASMAAYGAELVLVSQEEGMEGARDLAARMAEEGRGLVLDQFANPDNSAAHYESTGPEIWRDTEGTITHFVSSMGTTGTIMGCSRFFKEQSEAVQIVGVQPEDGSSIPGIRRWPEAYLPKIYEPARVDRILDVSSDDAITTTRRLAAEEGIMAGMSSGGCLHAALRLEREVENATIVVIICDRGDRYLSTGLFEG

SEQ ID NO: 5109 - protein, 361 aa, Azoarcus sp. EbN1
MKVLVISNMYPTHENPGYGVFVKNFVDALNVQGEQIDLAVVRGRGKGKLSKLLKYLTFGAAVLVKGFTRRYDCIYVHYVAHSMLPVRALMGLKRTVLICNAHGEDLLPASRGEKLIFGMVRPAIEKARLIVVPSSYFQSIAKDLFPSNEVFISPSAGVDLEVFKPHEPKQERSHGTPLRIGFVSRIDSGKGWDVLLDAVALLRKQSPSLELEVALVGEGSETAALTRRIKELGLEGVATHIGAMPQRRLPSFYSSLDVFVFPTLRAAESLGLVGIEALACGIPAICSDIGGIQSYMRDGVNGYLFPPGDSSALAQRIIAFSQLSAEEMCAMRSAALATAQQYGREKVGAELHAKLVEVIGH

SEQ ID NO: 5110 - protein, 781 aa, Bradyrhizobium sp. BTAi1
MGMEGIGASVVRKEDKRFITGKGRYVDDIKLLGMTYAHFIRSPHAHAKVKSIDSSAAEAMPGVVAVLTGRQIVDDKVGNLICGWAVTSKDGSPMRMGAWPAMAPETVRFVGQAVAVVIAESKNLARDAAEAVVVEYEELPAVADMPSALKPGAPQLHPEAPGNVVYDWHIGDEAAVNAAFSKAANVVSLELTNNRLAPNAMEPRAAIADYDAAEEHFTLYTTSQNPHVARLVLSAFYNIAPEHKLRVIAPDVGGGFGSKIFIYPEEMVALWASKKVGRPVKWTGDRTEAFLTDAHGRDHISKAEMAFDADNKILGLRVKTHANFGAYMSLFSSSVPTYLYATLLSGQYNIPAIYAEVMGVYTNTTPVDAYRGAGRPEASYLLERLVETAARQLKVDPAELRRKNFITQFPHQTPVIMAYDTGDFNASLDAAMKAIDYAGFPARKAAAKAQGKLRGIGLSCYIEACGIAPSKAVGSLGAGVGLWESAEIRVNPVGTIEVLTGSHSHGQGHETTFCQLIAERLGVPISQVSIVHGDTDKVQFGMGTYGSRSAAVGLTAILKAMEKVEAKAKKIAAHALEASEGDIIIENGEFKVTGTDKSIALPMVALAAYTAHNLPDGMEPGLKESAFYDPTNFTFPAGTYICELEVDQATGKTSFVNFVAADDFGRLINPMIVEGQVHGGLVQGIGQALLEHAVYDSNGQPVTASFMDYAMPRADDVPSFKLSHTTTLCPGNPLGVKGCGEAGAIGASAAVINAITDAIGNNKLEMPATPDRVWHAIHGNA

SEQ ID NO: 5111 - protein, 161 aa, Bradyrhizobium sp. BTAi1
MSTVKLTVNGKAVSVEVEDRTLLVHLLRDHLNLTGTHVGCDTSQCGACVVHIDGRSVKSCTVLAAQAAGANVTTIEGIAKGDELHPMQAAFRDNHGLQCGYCTPGMIMSAIDIVHRHGGELDEATVREELEGNICRCTGYHNIVKAVLDAAGRMKVAQAAE

SEQ ID NO: 5112 - protein, 428 aa, uncultured bacterium
GGFGNKVGAYPGYICAIVASIVTGRPVKWTEDRIDNLSTTAFARDFHMETEIACTKDGKVTGLRCYTIADHGAFDACANATKWPAGLFSIITGSYDFPAAHVSVDGVYTNKAPGGVAYRCSFRVTEAAFAVERAVDIMAQKLNMDPAEFRMKNLIRREQFPYTSAMGWQYDSGDYHTAMTKAMESVDYKKLRAEQKAKQEAFKRGETRDLMGIGVAFFTEIVGAGPSRNCDILGIAMFDSAEIRIHPTGTGICRLGTKSQGQGHETTYAQIIATELGLPADNIAVEEGNTDTAPYGLGTYGSRSTPVSGAATAMACRKIKAKAQMIAAYMLEVHDDDLEWDVDRFRVKGNPERFKTMTELAWAAYHEVPPGMEPGLEAVNYYDPPNFTYPFGAYICVVDVDVDTGVTKVRRFYALDDCGTRINPMIIE

SEQ ID NO: 5113 - protein, 375 aa, Malus x domestica
MAALRSFLKKRSSVLCNGGAVRHRLFSAQVSQPIPDSPSFAQRIGNLPKDLPATQIKTQVSQLIGRTPIVYLNKVTEGCGAFIAVKQEMFQPTASIKDRPALSMINDAEEKGLITPGETTLIEPTSGNMGISMAFMAAMKGYKMVLTMPSYTSLERRVCMRCFGADLILTDPTKGMGGTVKKAYDLLESTPNAFMLQQFSNPANTKVHFETTGPEIWEDTNGQVDIFVMGIGSGGTVSGVGQYLKSKNPNVQIYGVEPAESNVLNGGKPGPHSITGNGVGFKPDILDMDMMERVIEVRSEDAVNMARQLALKEGLMVGISSGANTVAAMELAKKPENKGKLIVTVHASFGERYLSSVLFQDLRQEAENMQPVAVD

SEQ ID NO: 5114 - protein, 378 aa, Bacillus licheniformis ATCC 14580
MKIAIFTDTFTPDVNGCARTLKRYTDYLEKNGMPYKVFAPESTHETQFSSRIRRFTSMPFFLYPECRIALPNLIKMKSELREFHPDLIHIATPFNIGLAGLKLAKKWNIPVVGSYHTDFDQYLSYYDLQMFSKLLWKYMLWFHKDFRKVFVPSRETFMQLKAKQFRNLSIWKRGVDCSQFSPAHQTEHIRRRYGIKETYILSYVGRLAPEKDLETLLKIASHPALKDDVHWLIAGDGPLKKELEKRAPLNMTFAGYVKGEELASIYASSDLFVFPSPTETFGNSALEALACGTPVIGADSGGLKDFIQNGRNGFLSEPRNPEAFTANILRVLSNPSLKKRMAYEARSYALTQSWDVIFDNLLSECESVLADLSAEKPA

SEQ ID NO: 5115 - protein, 428 aa, uncultured bacterium
GGFGKKVGAYSGYICAIVASIVTGRPVKWTEDRIENLSTTAFARDFHMETELACTRDGRVTALRCYTIADHGAFDACANASKWPAGLFSIITGSYDFPAAHVSVDGVYTNKAPGGVAYRCSFRVTEAAYCIERAMDIMAQKLGMDPAEFRMKNLIRREQFPYTSAMGWQYDSGDYHTAMSKAMETVNYKKLREEQKAQQAAFKRGDTRELMGIGVAFFTEIVGAGPSRNCDILGIAMFDSAEIRIHPTGTGICRLGTKSQGQGHETTYAQIIATELGLPADNIIVEEGNTDTAPYGLGTYGSRSTPVSGAATAMACRKIKAKAQMIAAYMLEVHDDDLEWDVDRFRVKGNPERFKTMTELAWAAYHEVPPGMEPGLEAVNYYDPPNFTFPFGAYICVLDVDVDTGMTKIRRFYALDDCGTRINPMIIE

SEQ ID NO: 5116 - protein, 226 aa, Triticum aestivum; identical to SEQ ID NO: 4164

SEQ ID NO: 5117 - protein, 305 aa, Bacillus cereus G9241
MKLCENVTELIGDTPVVRLSKFIPEDAADVYVKLEMFNPSRSVKDRAAYNLLHVAEENGLIKPGDTIIEPTSGNTGIGLAMNAAAKGYKAILIMPDNMSKERINLLKAYGAEVVLTPAEQRMPGAIAKALELQKQIPNSFIPQQFENPANPNIHRYTTALEIYEQMDGELDAFVATAGTGGTITGTGETLKEKLPNLYVAVVEPKGSPVLSGGVPGPHKLVGTSPGFIPKNLNTEVYNEIIQIADEEALTTMRNLARQEGLLVGPSSGASVYAAIMIAKRLGAGKKVLCIAPDTGERYLSMGLFE

SEQ ID NO: 5118 - protein, 322 aa, Prochlorococcus marinus str. AS9601
MEIANDITSLVGNTPLVKLNRIRKYFDCYPEIIAKLESFNPSASVKDRIAYSMLCKAEEEGLITPDKTTLIEATSGNTGIALAMVAAAKGYKLILTMPDTMSIERRAMLRAYGAELQLTPGKDGMKGALDLANELSSTIANSYQFNQFENFANPDIHERTTAQEIWSQSNNNLDGLVTGVGTGGTITGCARFLKKVNPNCKIYAVEPKKSAVISGEKAGSHSIQGIGAGFVPKVLNTKLIDEIIKIDDDEAFYFGRLLARLEGLLSGISSGAALAATIKIGKRKELMKKRLIVILPSFGERYLSTAMFESNTSIQARKDGYL

SEQ ID NO: 5119 - protein, 189 aa, Shewanella oneidensis MR-1
MTQSIINSTIKPFKATAYHNGEFVPVTEQDLLGKWSVVFFYPADFTFVCPTELGDMADHYAKLQGMGVEVYSVSTDTHFTHKAWHDTSDTIKKINFPMLADPTGTISRNFGVMIEEEGLALRGTFVINPEGQIKVAEIHDLGIGRSAQELVRKIQAAQYVATHDGEVCPAKWQPGDETLAPSLDLVGKI

SEQ ID NO: 5120 - protein, 255 aa, Oryza sativa Indica Group
MDGHGDGGGQHDSQRYSRRRGCHETSAKAAQSFVAMPGLTIGDTVPNLELDSTHGKIRIHDFVGDTYIILFSHPGDFTPVCTTELAAMAGYAKEFDKRGVKLLGISCDDVQSHKDWIKDIEAYKPGNRVTYPIMADPSREAIKQLNMVDPDEKDSNGGHLPSRALHIVGPDKKVKLSFLYPSCVGRNMDEVVRAVDALQTAAKHAVATPVNWKPGERVVIPPGVSDDEAKEKFPQGFDTADLPSGKGYLRFTKVG

SEQ ID NO: 5121 - protein, 201 aa, Idiomarina loihiensis L2TR
MSVLVGRKAPDFTAAAVLGSGEIVEDFKLSDAIKGKKAVVFFYPLDFTFVCPSELIAFDKRLDEFKKRGVEVIGVSIDSQFTHSAWRNTSTDAGGIGQVKYPLVADVRHSICKAYDVEHPQAGVAFRGSFLIDEEGMVRHQVVNDLPLGRNIDEMLRMVDALNFHEKHGEVCPAGWEEGKEGMKENAEGVASYLSKNADKL

SEQ ID NO: 5122 - protein, 177 aa, Prochlorococcus marinus str. MIT 9301
MRSLVVSILIPFIILFNCYSALSFDFAPEVGDYAPNFKLEGFNKNIKTKKTWELSDFEGQWLVMYFYPKDFTAGCTLEAKGFSELKKDFSKYNAEIVGISADNEDSHESFCSERSINYTLLSDPDGIISDKYGSWIPPFSDRNTFLISPDGKISYRWISVLPLNHAKEVLNVLKKKI

SEQ ID NO: 5123 - protein, 166 aa, Psychrobacter arcticus 273-4
MMAKPTTETITLPDFPVTIVRELDGHFIHDDISLKELVANTSKGLILYFYPKDNTPGCTTQATEFTAHLNEFDDLGYDIIGVSRDSVESHESFITKYNLQIPLISDADEKLCHHFDVIKEKNMYGNITLGLVRSAFVFDKNGTLTHAQRNLKAKDYTERLLTTLAP

SEQ ID NO: 5124 - protein, 180 aa, Bacillus sp. SG-1
MAERMVGKQAPRFKMDAVLPNKEFGKVSLEENMKNDKWTVLFFYPMDFSFLCPTEITAMSDRYDEFEDLDAEVIGVSTDTIHTHLAWINTDRKENGVGDLRYALAADTNHMVSREYGVLIEEEGVALRGLYIISPEGELQYQTVFHNNIGRDVEETLRVLQALQTGGLCPANWKPGQGTL

SEQ ID NO: 5125 - protein, 185 aa, Oryza sativa Japonica Group
MEENPRNEPTFAPPGAGNMTLYGHTMLYDEHQMVSDSTRILTAYVREGSNKIVLSRSDSRTFCLVVRITKRRSIEQVLSLVPKEQDGENFNDALVRVCCCVGGGTETGNADSDSDIEVVADSVSVNLRFPMTGSRIKITGQFKPCVHMGCFELEAFVELNQRSRWWQCPTCLKNYSLDNIIIDPS

SEQ ID NO: 5126 - protein, 777 aa, Sinorhizobium meliloti 1021
MNVMQPVDRVRGAVHDKERHESGHKHVSGTAEYIDDIPEPAGTLHGYLGLSQRAHAEILSVDFEAVRNSPGVVGVLTAEDIPGENDISPAHKHDDPVFAAGKVEFHGQPIFAVIATSREAARRAAAKVKIDYRDLPHVTDVLEAAAANYPLVIDPLKLERGDIDAGFAKAKNTVSGEMRIGGQDHFYLEGQISFAIPGEDDEVTVFSSTQHPSETQLMVAHVLGVPSNAVTVNIRRMGGGFGGKETQANLFAAVAAVAARKYRRAIKVRPDRDDDMTATGKRHDFHVDYKVGFDDDGRIEAVDAVFAARCGFSADLSGPVTDRALFHADNCYFYPNVRLRSRPLKTNTVSNTAFRGFGGPQGMVGGERMVEDVAYALGKDPLEIRKLNFYGGEGRNLTPYHQTVEDNIIGRIIEELEVSSDYAARRQAAIAFNRESPVIKRGIALTPVKFGISFTKTEYNQAGALVHVYTDGSIQLNHGGTEMGQGLYTKVAQVVADEFQVDLDHIKVTATSTGKVPNTSATAASSGSDLNGMAAANACQQIKERLVRFAAERYGVGEADIAFEPNTVRIGAERIAFADLIKAAYAARVQLSAAGFYKTPKIHWSRAEGRGRPFYYFAYGASCSEVSVDTLTGEYQVERTDIIHDVGKSLNPALDLGQVEGAFVQGMGWLTTEELWWDAKGRLRTHAPSTYKIPLASDRPRVFNVRLAEWSINREETIRRSKAVGEPPFMLGISVLEAISMAAASVADYRIPPRIDAPATPERVLMAVERLRAARAG

SEQ ID NO: 5127 - protein, 299 aa, Alcanivorax sp. DG881
MNHKTIEQTVGNTPLVRLQRMPGKTSNTILVKLEGNNPAGSVKDRPALNMILKAEQRGQIQPGDTLIEATSGNTGIALAMAAAMRGYRMKLIMPANQSQERRDAMAAYGAELISVSKEEGMEGARDLAQAMQARGEGTVLDQFANPDNPLAHYESTGPEIWRDTDGGITHFVSSMGTTGTIMGCSMYLKEQNPAIQIVGLQPTDGASIPGIRRWPKEYLPSIYDDSRVDRVVDMDQDLAERTMRRLAREEGISCGVSSGGAVAGALRLSEELENAVIVAIICDRGDRYLSTGVFNAVDS

SEQ ID NO: 5128 - protein, 322 aa, Moritella sp. PE36
MSQILQDNSFSIGNTPLVRLNRVTTGNVFAKVESRNPSASVKCRIGANMIWQAEKDGLLKEGIDIVEPTSGNTGIALAFVAAARGYKLTLTMPNTMSLERRKLLKALGANLVLTDGAKGMKGAIDKATEIRDANPETTILLQQFENPANPAIHEQTTGPEIWEATDGQIDVLVSGVGTGGTITGVSRYIKLNKGKDLVSVAVEPTNSPVITQAKAGEALTPGPHKIQGIGAGFIPGNLDLEMVDRVELVSNEDSIEMAQRLMKEEGILAGISSGAAVVAAARLAALPEFADKNIVVILPSSGERYLTTALFDGVFTEQELQQ

SEQ ID NO: 5129 - protein, 273 aa, Vitis vinifera
MACSAPSTPTTLLSSNPRAFPSKSLSTVASFSKPLSPQTLTIPNSFNPLRKPFQSPVPRSISSRGSHSRRSLVVRASEAPLVGNKAPDFEAEAVFDQEFIKVTLSEYIGKKYVILFFYPLDFTFVCPTEITAFSDRYEEFEKLNTEILGVSIDSVFSHLAWVQTDRKSGGLGDLKYPLVSDVTKSISKSYDVLIPDQGVALRGLFIIDKEGIIQHATINNLAIGRSVDETMRTLQALQYVQENPDEVCPAGWKPGEKSMKPDPKLSKEYFAAI

SEQ ID NO: 5130 - protein, 316 aa, Mannheimia succiniciproducens MBEL55E
MTIFADNSYSIGNTPLVRLHNFGHNGNLVVKIESRNPSFSVKCRIGANMVWQAEKDGVLTKDKEIVDATSGNTGIALAYVAAARGYKITLTMPETMSLERKRLLRGLGVNLVLTEGAKGMKGAIAKAEEIVASDPNRYIMLKQFENPANPAIHQQTTGVEIWQATEGKVDVVVAGVGTGGTITGISRAIKLDQGKQITSVAVEPAESPVITQILAGEEIKPGPHKIQGIGAGFIPKNLDLSLIDRVETVDSDTAIKTARRLMAEEGILAGISSGAAVAAADRLAKLPEFQDKLIVAILPSASERYLSTALFEGIEG

SEQ ID NO: 5131 - protein, 200 aa, Synechococcus sp. CC9605
MTDTGCLRVGQLAPDFTATAVVDQEFKEVTLSQYRGKYVVLFFYPLDFTFVCPTEITAFSDRYADFSSKNTEVLGVSVDSQFSHLAWIQTPRNQGGLGDINYPLVADLKKEISTAYNVLDDAEGVALRGLFIIDPDGVIMHATINNLPVGRNVDETLRVLQAFQYVQSNPDEVCPANWTPGEKTMKPDPKGSKEYFSAIG

SEQ ID NO: 5132 - protein, 213 aa, Synechococcus sp. PCC 7335
MTLQLGDVAPDFTQKSSMGDINFHEWAGDSWVVLFSHPADYTPVCTTELGLVGSLQDEFKKRNVKTIALSVDGVESHQGWIKDIDETQNTSVNYPILADDDKKVATLYGMLHPESSTGNTLTVRSVFVIDPNKKIRLTITYPASTGRNFDEILRVIDSLQLTDYHQVATPGNWQDGGDCVVVPSISTEDAKKQFPKGVTEVKPYLRMTPQPNK

SEQ ID NO: 5133 - protein, 187 aa, Burkholderia vietnamiensis G4
MPIINTQIKPFKATAYHNGDFVPVTEENFKGKWSVVVFYPADFTFVCPTELGDLADRYAEFQKLGVEIYGVSTDTHFTHKAWHDTSETIGKIKYPMIGDPTLTLSRNFDVLIEEEGMALRGTFVINPEGEIKLCEIHDNGIGRDAGELLRKVQAAQYIAAHPGEVCPAKWTPGAETLTPSLDLIGKI

SEQ ID NO: 5134 - protein, 321 aa, Roseovarius nubinhibens ISM
MILPSVIDAIGDTPLVSLDRVVTELGLSGRILAKLDYLLPGFSKKDRAARTIIEAARASGELRDGQPVIELTSGNMGTGLAIVCGVLGHPFIAVMSEGNSPERARMMRALGAEVVLVPQAKGSRPGEVSGADLARVEEAAQRITRERAAFRADQFARPGNPAAHFHGTAPEIWAQSGETVSVFADFAGSGGTLAGCAAYLAPRGVRCYAVEPTGAEAIGGGDRSTPAHPIQGGGYDMDALAHLKSTDSAGTVTVSGNEARDHARLLARREGIFGGFSSGANLAAAVQLLRGPERGGTIAIVICDSGLKYLSTDLWDDPPPQ

SEQ ID NO: 5135 - protein, 219 aa, Methanosarcina acetivorans C2A
MPLIGDDAPSFTAVTTQGMINFPEDYKGKWVILFSHPADFTPVCTTEFMTFASMQEEFREMNTELIGLSIDSVFSHIAWLRRIEEKIEYKGMKNLEVKFPVIEDLKMEVAKKYGMLQPKTSTTQAVRAVFIIDPEAKIRTILYYPQSTGRNMQEIKRIVIALQKNSAEKVATPANWQPGDDVIIPPPNSMEAVKERLGTEEEGKCCLDWFLCLKKDSKK

SEQ ID NO: 5136 - protein, 382 aa, Prochlorococcus marinus str. NATL1A
MKIAFFTETFLPKVDGIVTRLTKTIQNLVASGDEVTVFCPEGCPSSYMGAKVVGVPAMPLPLYPELKLGLPGPGVSDELENFKPDLIHVVNPAVLGLGGIWLAKTNNIPLVASYHTHLPKYLEHYGMGMLEPLLWELLKAAHNQATLNLCTSTAMVQELSEKGIQNTALWQRGVDTDIFKPELRDEEMRKRLLGSFSDEGSLLIYVGRLSAEKQIERIKPVLEALPSTRLALVGDGPYRQQLEKIFQGTSTTFVGYLSGNELASAYASGDAFLFPSSTETLGLVLLEAMAAGCPVVGANKGGIPDIISDGENGCLYNPDGENDGALSLIEATKKLLGNETERTSMRKAARSEAERWGWAGATKQLKSYYEDVLDKKRSNIAA

SEQ ID NO: 5137 - protein, 385 aa, Bacteroides fragilis YCH46
MKIVYYLPALYAPGGLERIITFKANYFADHLEGYEIYILTSEQIGRPIYYNLSPKVKHIDLNVPFDWPFNQSRINKLLKYPYHYWLFKNRFSKTLKKLHPDFTISTLRRELNFISSIHDGSIKIGEFHVTRHSYGVGSKEYGKSIVGKLRRYWEKSFLNHLQQLSKIIILTHEEKELWPELTNLCVIPNPIIIPSDRQSDCTLKQVIAAGRYAPQKGFDLLIESWSIVTRQHPDWKLHIYGDGVLRTSLQQQIDQAGIGQTCFLEPTTEHIADKYCESSIFVLSSRFEGFGMVITEAMACGVPPVAFACPCGPRDIIEHGKNGVLVQPEDINDLAAQINDLIENEDKRKKMGREAQIRSRRFLMKNIAKEWKTLFETLKNDEKVV

SEQ ID NO: 5138 - protein, 179 aa, Alkaliphilus metalliredigens QYMF
MAERMVGLKAPYFEMKTVDGEGMEFGKVSLDDYKGQWLVLFFYPLDFTFVCPTEITGINERLVDFGRLNASVLGASTDSEHSHKAWINAAQDQGGLGKLSFPLASDMTQKVARDYGILIEEEGIALRGLFIIDPEGILRYSVVHDLNVGRSVEETLRVLQGLQSGGLCPFNWSPGEDML

SEQ ID NO: 5139 - protein, 238 aa, Triticum aestivum
MAAANAPFALSRLSPAARLPIRAWRAARPAPVWTGRTRPLSVASAAQENRDNSVDVQVSQAQNGGNQQGNAVQRRPRRAGFDISPFGLVDPMSPMRTMRQMLDTMDRLFDDAVGFPTARRSPAAASEMPRMPWDIMEDDKEVKMRFDMPGLSRKEVKVMVEGDALVIRGEHKKEAGEGQVEGGDGWWKERSVSSYDMRLALPDECDKSQVRAELKNGVLLVSVPKRETERKVIDVQVQ

SEQ ID NO: 5140 - protein, 392 aa, Dianthus caryophyllus
MAIDCMRSISSITPKPHQMGTINDQNNNNKPFVFDASFLNHQSNIPDQFIWPDGDKPSNNIYLEDLPVPMLDLQGFLTGNPEAVMEASRVVGEACVKHGFFLVVNHGVSNELVRNAHKMMDEFFEEPLAQKQKAQRKLGEHCGYASSFTGRFSSNLPWKETLSFQFSSEESCSSKIVQDYFTNTLGHNFDHLGTVYQDYCEAMSQLSLGIMELLGLSLGVGRRYFKEFFQGHESVMRLNYYPPCQRPDLTLGTGPHCDPTSLTILHQDQVGGLQVFVDDKWRPISPNFNAFVVNIGDTFTALSNGRYKSCLHRAVTNIEKPRKSLAFFLCPSKDRLVKPPQALVNDENDRVYPDFTWPMLLEFTQKHYRADMNTLNAFSKWVQLHRRDDQEK

SEQ ID NO: 5141 - protein, 243 aa, Triticum aestivum; identical to SEQ ID NO: 3508

SEQ ID NO: 5142 - protein, 306 aa, Oceanicola granulosus HTCC2516
MCSKGVLAAVGNTPLIRLERLEPAGGAEVWLKLEAGNPTGSYKDRMAVSVLGRAMERGELAPGNRVVEYTGGSTGTALAFVSAALGVTFTAVFSDAFSASKRLAMEAFGAEVLVEESDGTITPELIQRMKARAYALAEEPGSFYADQFGSADVRAGYEPMGHEIAADLGQVDVLVAAVGTGAALMGTADGLAARGIDPRLIALEPAQSPLLTTGKGGPHRVEGIGVGFAPPFLDRGRLAEVRAIDQDRAFEMCRTLARQAGVFCGGSTGLNVVAAIELSRELGRGRKVVTLGCDSGAKYLGGHIYG

SEQ ID NO: 5143 - protein, 492 aa, Ashbya gossypii ATCC 10895
MYDNRHHVIDLVGNTPLVELSKLPKALGIKPQVYAKLELYNPGGSIKDRIAKTMIERAEESGIIHPSRSTLIEPTSGNTGIGLALIGAIKGYRTIITLPEKMSNEKVSVLKALGAEIIRTPTAAAWDSPESHIGVARKLEKEIPGAIILDQYNNEMNPYAHYFGTGREIHHQLRNLGKFDQLHGLVAGAGTGGTISGTAKYLKEQKPDVKVVGADPMGSILAQPASLNDTDISEYKVEGIGYDFIPEVLDRSLVDQWIKTEDKASFKYARQLISNEGTLVGGSSGSAFAALVEYCNAHPELTEDDVLVVIFPDSIRSYLTKFVDNEWLKSNNLWDDEIVAPLAKNEEDAFNGATVKDLQLRPVVAVSETAAVSEVVKILKDNGFDQLPVLAENSKKLGGLVTLSQLLKKLSSGAEVSSIKSLFLDFRKLNNFDDISSYNDNKTGKKKFVTFTVDSKLSELNRFFEKNSSAIITDGFTPVHVVTKVDLLSYLA

SEQ ID NO: 5144 - protein, 266 aa, Cicer arietinum
AEEKGLITPGQSVLIEPTSGNTGIGLAFMAAAKGYKLIITMPASMSLERRIILLAFGAELVLTDPAKGMKGAVQKAEEILAKTPNAYILQQFENPANPKVHYETTGPEIWKGTEGKVDAFVSGIGTGGTITGAGKYLKEQNPNIKLVGVEPVESPVLSGGKPGPHKIQGIGAGFVPGVLEVNLIDEVIQISSDEAIETAKLLALKEGLFVGISSGAAAAAAIKIAKRPENAGKLIVVVFPSFGERYLSSVLFESVRRQAETMTFEP

SEQ ID NO: 5145 - protein, 181 aa, Helicobacter pylori
LVTKLAPDFKAPAVLGNNEVDEHFELSKNLGKNGVILFFWPKDFTFVCPTEIIAFDKRVKDFQEKGFNVIGVSIDSEQVHFAWKNTPVEKGGIGQVSFPMVADITKSISRDYDVLFEEAIALRGAFLIDKNMKVRHAVINDLPLGRNADEMLRMVDALLHFEEHGEVCPAGWRKGDKGMKA

SEQ ID NO: 5146 - protein, 356 aa, Ralstonia solanacearum GMI1000
MPQGAPVKVMIVTDAWEPQVNGVVRTLTSTRRELEAMGHIVDMITPLEFTTVPCPTYPEIRLSILPAKRVRRRIEAFAPQALHIATEGPLGLAARAYALRHKLPFTTAYHTRFPEYVQARFAIPLAWTYRFLHWFHSPAQAVMAPTPVVLRDLEAYGITNGVLWTRGVDLDVFTMQRPNALNTAHPIFLYVGRVAVEKNVEAFLELDLPGSKWVVGEGPALAGLKAKYPNANYLGVLRQPELAKVYASADVFVFPSRTDTFGLVLLEALASGLPVAAYPVTGPIDVLGDAPAGVMREDLREACLEALRIDRATARAHAERFSWRAASEQFLAHLRPLPAAQAADTQAPQPSTATGA

SEQ ID NO: 5147 - protein, 181 aa, Helicobacter pylori
LVTKLAPDFKAPAVLGNNEVDEHFELSKNLGKNGAILFFWPKDFTFVCPTEIIAFDKRVKDFHEKGFNVIGVSIDSEQVHFAWKNTPVEKGGIGQVSFPMVADITKSISRDYDVLFEEAIALRGAFLIDKNMKVRHAVINDLPLGRNADEMLRMVDALLHFEEHGEVCPAGWRKGDKGMKA

SEQ ID NO: 5148 - protein, 414 aa, uncultured bacterium
GGFGKKVPIYPGYVVATAASLLIGRPVKWIEERTDNLISTGFARDYYMDGSIAIDENGKFIGLRVNLLSDNGAFFADAQPTKFKAGLFHIVTGSYDIPAAHIVANGAYTNKAPGGVAYRCSFRVTEASYFIERLVESASVELGQDPVTTRLNNFIQPEDFPYKSASGFEYDSGDYPAAMKVALDMLGYDELRKEQAEKRARGELMGIGVASFTEVVGAGKGKDYDIAGLRMFDSAELRVHPTGKAILKLGVKSQGQGHETTFAQIVAEELGIPASDIEVREGDTDNTPFGLGTYASRSTPVGGAATAVVARKLRDKGKIIAAHLFEADVADIEFSHGKYNVKGSPDNIKTIQDIAFAAYTNIPDGIEAGLEGVTYYDPPNMTFPFGTYLVVVDIDKGTGQVKVRRMVAVDDCGV

SEQ ID NO: 5149 - protein, 181 aa, Helicobacter pylori
LVTKLAPDFKAPAVLGNNEVDEHFELSKNLGKNGVILFFWPKDFTFVCPTEIIAFDKRVKDFHEKGFNVIGVSIDSEQVHFAWKNTPVEKGGIGQVTFPMVADITKSISRDYDVLFEEAIALRGAFLIDKNMKVRHAVINDLPLGRNADEMLRMVDALLHFEEHGEVCPAGWRKGDKGMKA

SEQ ID NO: 5150 - protein, 142 aa, Bacteroides thetaiotaomicron VPI-5482
MVPVKTNQNWLPSIFNDFFDNEWMARANATAPAINVIENEKDYKVELAAPGMTKNDFKVSVDESNNLVICMEKKDEKKEEKKDGKYLRREFSYSRFQQSILLPDNVEKDKISAKVEHGVLFIDIPKVVDKKVQETTKTIDVK

SEQ ID NO: 5151 - protein, 324 aa, Pseudomonas putida GB-1
MSRIFADNAHSIGNTPLVQINRIAPRGVTILAKIEGRNPGYSVKCRIGANMVWDAESSGKLKPGMTIVEPTSGNTGIGLAFVAAARGYKLMLTMPASMSLERRKVLKALGAELVLTDPAKGMKGAIEKANEIVASDPAQYFLPGQFENPANPAIHEKTTGPEIWNDTDGAVDVLVAGVGTGGTITGVSRYIKHTQGKAILSVAVEPVSSPLITQTLAGEELKPSPHKIQGIGAGFVPKNLDLSIVDQVATVTDEESKAMAIRLMQEEGILCGISCGAAMAAAVRLAEKPEMQGKTIVVILPDSGERYLSSMLFSDLFSEQENQQ

SEQ ID NO: 5152 - protein, 309 aa, Methanococcoides burtonii DSM 6242
MENIYEDITKTVGKTPLVRLNRITVGCYATVLVKVEAFNPLGSIKDRIALNMIETAEKDGMLKKGAIVIEPTSGNTGIGLAFVCATKGYRLILTMPETMSVERRNILKVLGAEIVLTPGPNGMKGAIEEAERIGKETPDSFIPHQFMNPANPDIHRCTTAGEIWDDTGGKVDILVAGVGTGGTITGVSEELKSRKPGFKAIAVEPKDSAVLSGGSPGPHMIQGIGAGFVPDVLNVDIIDEIITVSNEDAFETTRELAKKEGILAGISSGAALFAALDVARRKENEGKMIVVVLPDTGERYLSTTIVEKE

SEQ ID NO: 5153 - protein, 181 aa, Helicobacter pylori
LVTKLAPDFKAPAVLGNNEVDEHFELSKNLGKSGAILFFWPKDFTFVCPTEIIAFDKRVKDFQEKGFNVIGVSIDSEQVHFAWKNTPVEKGGIGQVTFPMVADITKSISRDYDVLFEEAIALRGAFLIDKNMKVRHAVINDLPLGRNADEMLRMVDALLHFEEHGEVCPAGWRKGDKGMKA

SEQ ID NO: 5154 - protein, 377 aa, Bacillus subtilis subsp. subtilis str. 168
MRKLKIGITCYPSVGGSGIIATELGKQLAEKGHEIHFITSSIPFRLNTYHPNIHFHEVEVNQYAVFKYPPYDLTLASKIAEVAERENLDIIHAHYALPHAVCAYLAKQMLKRNIGIVTTLHGTDITVLGYDPSLKDLIRFAIESSDRVTAVSSALAAETYDLIKPEKKIETIYNFIDERVYLKKNTAAIKEKHGILPDEKVVIHVSNFRKVKRVQDVIRVFRNIAGKTKAKLLLVGDGPEKSTACELIRKYGLEDQVLMLGNQDRVEDLYSISDLKLLLSEKESFGLVLLEAMACGVPCIGTNIGGIPEVIKNNVSGFLVDVGDVTAATARAMSILEDEQLSNRFTKAAIEMLENEFSSKKIVSQYEQIYADLAEPE

SEQ ID NO: 5155 - protein, 181 aa, Helicobacter pylori
LVTKLAPDFKAPAVLGNNEVDEHFELSKNLGKNGAILFFWPKDFTFVCPTEIIAFDKRVKDFQEKGFNVIGVSIDSEQVHFAWKNTPVEKGGIGQVTFPMVADITKSISRDYDVLFEEAIALRGAFLIDKNMKVRHAVINDLPLGRNADEMLRMVDALLHFEEHGEVCPAGWRKGDKGMKA

SEQ ID NO: 5156 - protein, 328 aa, Synechococcus sp. WH 5701
MASIFADSSLSIGRTPLVKLNRVVGDSRATVLAKIEGRNPAYSVKCRIGAAMIWQAEKDGRLGPGKELIEPTSGNTGIALAFVAASRGIPLTLTMPESMSLERRKLLTAYGAKLVLTEGKLGMTGAVGRAHEIAASDPERYVLLQQFANPANPQIHHDTTGPEIWNDTDGQVDVLVAGVGTGGTITGVSRYFKTTRGQKLLSVAVEPVNSPVIAQARAGEPPQPGPHKIQGIGAGFVPENLDLDLVDRVEAVSDQEAVAMARRLMREEGILAGISCGAATVAALRLAAEEEFAGKTIVVVLPDSGERYLSSVLFEGVFDAAGLAPVER

SEQ ID NO: 5157 - protein, 199 aa, Synechococcus sp. PCC 7335
MSEQGCLRVGQVAPDFTATAVVDQEFKTIKLSDYRGKYVVLFFYPLDFTFVCPTEITAFSDGYDSFKDIKTEVLGVSIDSEFSHLAWIQTDRKMGGVGDLNYPLVSDIKKEISSAYNVLDTEVGVALRGLFIIDREGIVQHATINNLSFGRSVDETLRVLQAVQHVQSHPDEVCPAGWQPGDSTMIPDPVKSREFFAAV

SEQ ID NO: 5158 - protein, 168 aa, Sinorhizobium meliloti 1021
MNVRDLIPWGRAQGQVPASYRDNDRNPFLALHREMNRLFDDAFRSFETRLPISGFSGFAGGWPSVEVSDRDKEIKVTAELPGLDEKVVELSLSDGVLSLRGEKRAETEDQENQFSERYYGRFERRIALGYEVDESKVNATFRNGVLTVTLPKTEQAQSKAKRIAINGR

SEQ ID NO: 5159 - protein, 213 aa, Glycine max
FGSSFSVYGKNPEKFRCLLNSYMSSVRKMACEILELMAEGLKIQQKDVFSKLLMDKQSDSIFRVNHYAACPEMTLNDQNLIGFGEHTDPQIISLLRSNNTSGLQIYLRDGNWISVPPDDKSFFINVGDSLQVMTNGRFRSVRHRVLANGFKSRLSMIYFGGPPLSEKIAPLSSLMKGKESLYKEFTWFEYKKSIYGSRLSKNRLEHFERIAAS

SEQ ID NO: 5160 - protein, 491 aa, Debaryomyces hansenii CBS767
MPVPPIAEDALDLIGNTPLIKLNRIPQSFGIKAKVYAKVELFNAGGSIKDRISKNMVLEAEKQGRIKPGYTLIEPTSGNTGIGLALVGAVRGYRTIITLPEKMSNEKVSVLKALGAEIIRTPTEAAWDAPESHIGVARKLEKEIPNSVILDQYSNEANPNAHYYGTGYEIWEQTNGKVTHLIAGAGTGGTITGISKYLKEKNSNIKIIGADPKGSILAVPESLNDTSEGYLVEGIGYDFIPDVLKRDRVDSWIKTDDSESFKLARRIIREEGILVGGSSGSALQAALEVAKDLTEDDTVVVVFPDSIRSYLTKFADDEWMTTNGFPIEENESASHKSDEVLNTTTIKDLVSGKAPVVTVTLSDTVGKTFDLLQTNGFDQLPVLNNSGKLVGLITLSKILKSLSTKKVQITNSISSIIIDFRKLADFEKSFTITKKSGFTKRSYEPITMDTSLALLNKFFETNSNAIVTDADYKPVQIVTKVDLISYLTKIL

SEQ ID NO: 5161 - protein, 186 aa, Streptococcus pyogenes M1 GAS
MSLIGKEIAEFSAQAYHDGKFITVTNEDVKGKWAVFCFYPADFSFVCPTELGDLQEQYETLKSLGVEVYSVSTDTHFVHKAWHDDSDVVGTITYPMIGDPSHLISQAFEVLGEDGLAQRGTFIVDPDGIIQMMEINADGIGRDASTLIDKIHAAQYVRKHPGEVCPAKWKEGAETLTPSLDLVGKI

SEQ ID NO: 5162 - protein, 310 aa, Arabidopsis thaliana; identical to SEQ ID NO: 4773

SEQ ID NO: 5163 - protein, 318 aa, Glycine max
DARDSLTDAAPLLGVNDVRPKASRQRSDAQVAIPVDPRVRGDAQVIILSDSEEDNDVLMSHTRITGYKNNQTSDAVDVYSVLQPGIIDPYREDHNPGVFNNPSEDDFGMPSLWPLQSGTPAVPGFQLFSSEVEDDVSDALIDLHHGNINCSSSLNGYTLAPDTLGSGTLIPDSSAGRPDDDLNGGLVDNPLAFPREDPSLQIFLPTKPAESSMQHELRDHADGSNGVFTEDWISLSLGGGASGSNGDTSSANELNLRPQITPREDARDSLTDAAPLLPGMNDVRSEKASRQRSDIPFSFPRQKRSVRPRPYLPGSDSE

SEQ ID NO: 5164 - protein, 396 aa, Carboxydothermus hydrogenoformans Z-2901
MGGDSIYTIAKLHWAFPPIIGGVETHLTLLCPELIRRGYNLHLLTGAVNGEPEEFDFHGMRVRRHRFLDLNSLSPQIIKENRRQIKDLLHSFLDEVNPEIIHLHNMHYFSPDHLEFLVEYKNHRKKPLVLTAHNVWEDELWQEMLTFKDEWDYVIAVSDFIKKELIRFGFDGEKIITVHHGIDTEKFKPGISPDNPYAKMEFFAGKKVIFHPARMSFAKGSDYAVKAFAEVQKLFPDTVLVMAGTKKTVDWGGVQQKEVQEIMKLVEEYGLSDKVYVQFFNWQEIHWMYEIADICIYPSSFEEPFGLVMLEAMASGKPIIVTNSGGMPEVVQDGVNGFVIPKKDASALARKLILLLEDDELRRRMGESGRKLAEEKFTVKVMTDNTEKVYQKLLKH

SEQ ID NO: 5165 - protein, 760 aa, Bradyrhizobium sp. BTAi1
MNQHVKAAPSMAPDLSRRSFLVGTAATGLVLGYAGLADGALAATTPASFEPSVWYSIAPDGLVTVTCGKADMGQHIASTMAQIICEELGAAWKDMRVQLASNDPKFNDPVLGAQITGGSWSTMMNFDAMSRAGAAGRIALTEAAASVMGVTAKELVVRDGVVMHPKSKKQMSYAEIVKSGKITKSFTADELKALTLKTPDQYTMIGVSVPQLDIPAKTNGTAKYGIDTMLPGMVYGKVVTPPVRFGATVKSVDDSEAKKVPGFIKAVVLDDKTGSTSGWVVAVASTFANAKKAADALKISYDKGPYANVSTDSIITEAMRLQAQDDAGQFFVKDGDANAALAGAAKVLEAEYTTSINIHAPMEPMNATAEFKGDILHIYSGNQFATRSGAIAAGAAGIDPKYVVMHQAWLGGGFGRRLDADMMVPAVQAAKAVGKPVKVIYSRENDMTMDYSRPLTYQKVKAGLDSNGKLIALSHDVVSAWPTARWGIPDFLTPSVDKKGPLDSFTVNGADFFYTVPNHHVRAIKNELAHNATPSGQLRSVAPGWTFWAVESMIDEIAAASGQDPAQFRIALLDGKGKNDGGAQRLRNTLLAAMGLSGYGSKKLPKGEGMGVACVSSQERASASWTACVAHVAVADNGAVTVKKLTVATDVGTQVHPDNIRAQVEGAALWGLSLAMYEKATLKDGGIEQTNFDSYTPLRMSQVPEVAIAVIANGEKATGVGEPAVTVVAPALGNAIYNACGARLRSLPITAEAVKANMKA

SEQ ID NO: 5166 - protein, 304 aa, Staphylococcus aureus subsp. aureus COL
MITYDLIGNTPLVLLEHYSDDKVKIYAKLEQWNPGGSVKDRLGKYLVEKAIQEGRVRAGQTIVEATAGNTGIGLAIAANRHHLKCKIFAPYGFSEEKINIMIALGAEVSRTSQSEGMHGAQLAARSYAEKYGAVYMNQFESEHNPDTYFHTLGPELTSALQQIDYFVAGIGSGGTFTGTARYLKQHHVQCYAVEPEGSVLNGGPAHAHDTEGIGSEKWPIFLERRLVDGIFTIKDQDAFRNVKSLAINEGLLVGSSSGAALQGALNLKAQLSEGTIVVVFPDGSDRYMSKQIFNYEENNNEQEN

SEQ ID NO: 5167 - protein, 162 aa, Bradyrhizobium sp. BTAi1
MPNLTINGRTMSVDAANDTPLLWVIREQLQMTGTKFGCGAGLCGACTVHVNGEAVRSCQTMVGDVTNKKITTIEGLSQKGDHPLQKAWIAEQVPQCGYCQSGQIMQAASLLAKTTSPTKEEIVAHMDGNLCRCMTYSRIQKAIQRAASEMRTASNTSDRRAT

SEQ ID NO: 5168 - protein, 200 aa, Coxiella burnetii RSA 493
MAVLVGREAPDFTVPAVLANGDIVENFNLAEAIQNKYGLVFFYPLDFTFVCPSELIALDKAIADFQKRRVEVIGVSIDSQFTHNAWRNTPVEKGGIGPVRYPLASDVTHSICRSYGVEHVAGVALRGAFLIDKQGIVRSQIVNDLPLGRSIPELLRLVDALQFTEEHGEVCPANWKKGDPAMQASPDGVAKYLAENADNL

SEQ ID NO: 5169 - protein, 304 aa, Clostridium sticklandii
MIYENIMQTIGKTPIVKLKNLTDENMAELYVKLEFFNPGGSVKDRAALNMIENMEKEGKLKLGDIIVEPTSGNTGIGIAMVGSAKGYKVILCMPETMSIERRKILKAYGAELVLTEGAKGMKGAIAKAEEMAQEDGYIILRQFDNSYNVDAHYKNTAKEIISDLPDLDALVVGVGTGGTLTGVAKAFKESSINAEIVAVEPVDSAVLSGNAPGPHKLQGIGAGFVPSILDTEYISKIEQIQTQEAFNASRLMASKEGILLGISGGAALEAAIRTAKRLGKGKKVCLLLPDNGERYLSTALYGDE

SEQ ID NO: 5170 - protein, 193 aa, Lentisphaera araneosa HTCC2155
MAVLVGKQAPDFSEKAVKGQEVIENFSLSQFKGKYVVLFFYPLDFTFVCPTELHAFEAKRAEFEAKGVEVVGVSTDSWFSHLAWLNTPKNQGGIEGVGYPIVSDFNKTISADYDVLLGGGMALRGLFLIDKEGVVQHQVVNNLPLGRNVDEAIRMVDALQFFEANGEVCPANWNEGDKAMKPNDAGLKEYFAE

SEQ ID NO: 5171 - protein, 344 aa, Burkholderia cenocepacia J2315
MKIMIVTDAWEPQVNGVVRTLKSTSRELTALGHRVELLTPLEFRTVPCPTYPEIRLSILPYRKLRARIDAFAPDALHIATEGPLGLAARRYARARKLPYTTAYHTRFPEYVQARFGIPLAATYRFLHWFHGPSLAVMAPTPVVKQDLEKFGFTNVVLWTRGVDLDIFRPMESKVLNTARPIFLYVGRVAIEKNVEAFLRLDLPGSKWVAGEGPALAELKSRYPEANYLGVLSQAELAKVYAAADVFVFPSRTDTFGLVLLEALACGTPVAAYPVTGPIDVLGEGNAGAMHEDLQEACLEALKIERTTARAWAERFSWRAASEQFASHLKPLPKTAYSPAEGAAV

SEQ ID NO: 5172 - protein, 200 aa, Synechococcus sp. WH 8102
MTETGCLRVGQQAPDFTATAVVDQEFKEISLSQYRGKYVVLFFYPLDFTFVCPTEITAFSDRYADFSSKNTEVLGVSVDSQFSHLAWIQTPRNQGGLGDINYPLVADLKKEIATAYNVLDDAEGVALRGLFIIDPDGVIMHSTINNLPVGRNVDETLRVLQAFQYVQSNPDEVCPANWTPGEKTMKPDPKGSKEYFSAIG

SEQ ID NO: 5173 - protein, 194 aa, Prochlorococcus marinus str. MIT 9312
MSLRVGQEAPDFTATAVYDQEFKEITLSGLRGKWVVLFFYPLDFTFVCPTEITAFSDRYQDFSSIDAEILGVSVDSKHCHLAWIQTPRNEGGIGDINYPLVSDLKREICQAYNVLNDDGEADRGLFLINPEGIVMHTTVNKAPVGRNVDETLRILQGYQYVAANPDEVCPANWTPGEKTMLEDPKGSKEYFSAL

SEQ ID NO: 5174 - protein, 240 aa, Triticum aestivum
MAAANAPFALVSRLSPAARLPIRAWRAARPAPLSTGGRTRPLSVASAAQENRDNSVDVQVSQAQNAGNQQGNAVQRRPRRAGFDISPFGLVDPMSPMRTMRQMLDTMDRLFDDAVGFPTARRSPAAASETPRMPWDIMEDEKEVKMRFDMPGLSREEVRVMVEDDALVIRGEHKKEAGEGQGEGGDGWWKERSVSSYDMRLALPDECDKSQVRAELKNGVLLVSVPKRETERKVIDVQVQ

SEQ ID NO: 5175 - protein, 533 aa, Emericella nidulans
MSSKTTPTVPPVALDSITQHIGNTPLVRLNKLPQNLGINATVYAKLEYFNAGGSVKDRIALRMIEEAERSGRIKPGDTLIEPTSGNTGIGLALVAAVKGYKTIITLPEKMSAEKVSVLRALNATIIRTPNEAAYDSPESHIGVAKRLEKELPNAHILDQYGNENNPLAHELGTAQEIWSQTKGQIKAIVAGAGTGGTITGLSRGLKKHNSNVQVIAADPQGSILALPAALNEEHANEPYKVEGIGYDFIPQVLDQHAVDKWYKTDDKESFQYARRLIAEEGLLVGGSSGSAIAALVKAARDNMFKEGDVVVVILPDSIRSYLTKFADDDWLAANDLLPSLPTEVILQSSNKQTQGQDDAFAGSKVSSLRLKPVTTVHSNVPCETAIEVMRDKGFDQLPVLAPSGRKLVGLVTLGNVLSRLTHNRATGRSPVADVMFDFRTISEVVTDPRDMGLASLEPNQNGRDAPKPQTRSRKFVEITMDTSLSVLNRFFEWNSAAIVTERDEGGTLRPVAVVTKVDLLTWMLHHKKNGASE

SEQ ID NO: 5176 - protein, 177 aa, Prochlorococcus marinus subsp. pastoris str. CCMP1986
MKSLFGLFVILISLIFNLKSAIAFDYAPEIGDSAPSFHLEGINKSIKSKKIWDSNELIGKWIVLYFYPKDFTAGCTLEAKGFSQLKNDFSKYNAEIIGISADNQDSHDSFCSEKSINYTLLSDPNGTISAKYGSWIPPYSDRNTFLISPEGKITYRWISVLPINHAKEVLNILKKNI

SEQ ID NO: 5177 - protein, 441 aa, Streptococcus pneumoniae R6
MRIGLFTDTYFPQVSGVATSIRTLKTELEKQGHAVFIFTTTDKDVNRYEDWQIIRIPSVPFFAFKDRRFAYRGFSKALEIAKQYQLDIIHTQTEFSLGLLGIWIARELKIPVIHTYHTQYEDYVHYIAKGMLIRPSMVKYLVRGFLHDVDGVICPSEIVRDLLSDYKVKVEKRVIPTGIELAKFERPEIKQENLKELRSKLGIQDGEKTLLSLSRISYEKNIQAVLVAFADVLKEEDKVKLVVAGDGPYLNDLKEQAQNLEIQDSVIFTGMIAPSETALYYKAADFFISASTSETQGLTYLESLASGTPVIAHGNPYLNNLISDKMFGALYYGEHDLAGAILEALIATPDMNEHTLSEKLYEISAENFGKRVHEFYLDAIISNNFQKDLAKDDTVSQRIFKTVLYLPQQVVAVPVKGSRRMLKASKTQLISMRDYWKDHEE

SEQ ID NO: 5178 - protein, 238 aa, Triticum aestivum; identical to SEQ ID NO: 3135

SEQ ID NO: 5179 - protein, 910 aa, Desulfitobacterium hafniense DCB-2
MINKSIIINGVRQTLIVDEEVTLANVLRGQLHLTGTKIGCGKAQCGACSVIMDGKVIRSCVTKMKRVPDEAQITTIEGVGTQKELHPLQLAWMIHGGAQCGFCSPGFIVSAKGLLDENTNPTREEVRDWFQRHRNACRCTGYKPLIDAVMTAARLIRGEVKVEELWEKLPQDGSIWGSNYIRPSALAKVTGTCDYGADLGIKMPCGTLQLKLVQAKVSHANILSIDTSEAEKMPGVYKVITHKDVKGKNRITGLITFPNNKGDGWDRPILCDEKVFQFGDAIAIVAADTEEHAQAAVEKVKVELEILPAYMSAPAAMADDAIEIHPGTPNIYWETKVIKGEETAPIMEDSEVVVVQDDFYVGRQPHLPMEPDVGFAYIDDQERVVVHSKSIGIHLHHAMIAPGLGLEPDKLVLVQNPAGGTFGYKFSPTIEALLGVAAMATGKPVFLNFDYYQQITYTGKRSPFFINLKYGATKEGKLLAMEADWSVDHGPYSEFGDLVTLRGSQFIGASYMIPNIRSNGRTVCTNHAWGSAFRAYGSPQSLFATEVLMDELAEKLGMDPFELRYKNIYRPGDTTPTGCQPDVYSLVEMMDKLRPLYDAAKKKARAESTADKKRGVGISLGAYGAGLDNPDGSEAWADYTETGVTIFNAWEDHGQGADMGTLATAHQALLPLGIKPEQIKLVMNDTSITPASGPAGGSRSQVMVGNAIKIACEELLKGIQKPDGTYRTYAEQVEAGLPTHFIGKYGTPAGYNGCDLETGQGAPFTTYMYAAFMSEVEVDVQTGKTKVLGMTGIFDVGTLANKLVVDGQMYGGMIQGLGLALSEDFEDLNKHIDLISCGLPYPKDIPEKLVVDYVMTPREHGPFGASGVGEAPLTSPHASIINGITDACGVRITRLPALPEKVLAGLKAKQ

SEQ ID NO: 5180 - protein, 217 aa, Triticum aestivum
MAFAASTACCKPSALLAPRASSSSPPSQARLCRPSTSAAFHGLRAPASAFALAPAPRRRAASTGIVCGKVSKGSVPPNFTLKDQDGKTVSLSKFKGKPVVLYFYPADETPGCTKQACAFRDSYEKYKKAGAEVIGISGDDAASHKAFAKKYRLPFTLLSDEGNKVRKEWGVPSDLFGTLPGRQTYVLDKKGVVQYIYNNQFQPEKHIGETLKIIQNL

SEQ ID NO: 5181 - protein, 735 aa, Rhizobium sp. NGR234
MSVSFIGKPVTRVDGRAKVTGTARYAADFNQPGQLYAVIVSATVGLGRVTEVASTEVERMPGVVAVITHRNAQKLPYLPHKGVIDPAVGERLHVLQDDRVQFYGQPVAIVVADNLDHAERAAAALRITYVAKRPIVDHADQTMERIAPKSADGSRGDADAAVTQAPVMIDETYEIARENHNPMEPHATIAAWSGDRLTLWSKSQYLVNEQAEIAAVFGLPVDNVEVICPFIGGAFGTSLRTWPHVTLAALAARQTGRAVKLVLTRKQMFFTTGHRPRTLQRIALGATPDGKLTGVIHEGTGETSRYEQFTEALTAVTAYLYSCPNVRTQYRLAQLDTSTPNHMRGPGEASGIFALESAMDELSYKLGVDPIELRRRNEPRRDEAENKPFSSRSLMQCYELGSERFGWARRTPEPRSMRDGRLLIGMGAATATYPAYHAPASARVRLLADGLAEVEAAASDMGPGTYTSMTQVAAEFLGLQQEQVRFRLGRSHFPQTPSHGGSWTMASVGSAIRAACVEAQAQAARRAVADPDSPIFAASVDDLEWSEGRLRRRGEASGGLSYQDIVARTGAPVEAEGSAQRDPEAAELYSMHSFGAVFAEVAIDPDVGTIRIRRIVGAYGIGRVVNPLLARSQCTGGMIGGMGMAMMERTVLDRRDGRPVNAHMADYLMPVNLDIPKLEALFVDEVDPHVNPLGVKGLGEIALVGTAPAIANAVFHATGKRVRSLPIHIEDVLTA

SEQ ID NO: 5182 - protein, 344 aa, Ipomoea trifida
IERIPKEYIRPEEERPSIGDIFAEEKMDGGPQVPTVDLKGINSDDLEVREKCREELRKAAVDWGVMHLVNHGIPEELTGRVKAAGEGFFGQPIEEKEKYANDQAAGNVQGYGSKLANNASGQLEWEDYFFHCVFPEDKTDLSIWPKTPSDYIAATREYAKQLRALTTTVLAVLSLGLGLEEGRLEKEVGGMEELLLQMKINYYPKCPQPELALGVEAHTDVSALTFILHNMVPGLQLFYEGKWVTAKCVPNSIIMHVGDTVEILSNGKYKSILHRGVVNREKVRVSWAVFCEPPKEKIILQPLPETVSEADPPRFPPRTFAQHIKHKLFRQTDQEGADTPKPDE

SEQ ID NO: 5183 - protein, 181 aa, Helicobacter pylori
LVTKLAPDFKAPAVLGNNEVDEHFELSKNLGKNGAILFFWPKDFTFVCPTEIIAFDKRVKDFHEKGFNVIGVSIDSEQVHFAWKNTPVEKGGIGQVTFPMVADITKSISRDYDVLFEEAIALRGAFLIDKNMKVRHAVINDLPLGRNADEMLRMVDALLHFEEHGEVCPAGWRKGDKGMKA

SEQ ID NO: 5184 - protein, 516 aa, Ralstonia solanacearum GMI1000
MVQLQTRDRRKIPMETQSIRFFHRGQVRTVTHAPITRTVLQYLREDAHCTGTKEGCAEGDCGACTVVLGELQPDGSIGLKAVNACIQFLPTLDGKALFTVEDVRGQNGTLHPVQQALVECHGSQCGFCTPGFVMSLYALYENTGHAPPPSREAICDALTGNLCRCTGYRPIIDAGQRMYALPAPAGIDRTQLAETLRAIQRTETFCYAPAGVENAPRFYAPRTVSAFAALKAAHPDIRVLAGSTDLGLWVTKQLRELGDLLYVGQVADLCALDKRDGWLEIGAAATLEQAYAFLAEDYPELTEMWRRFGSLPIRNAGTLGGNIANGSPIGDSAPALIALGARVVLQRGDAHRELPLEDLYLAYMKHAMVPGEFVASLRVPARAGRDALRFRTYKLSKRFDEDISAVCAALAIELDGGIVRSARIAYGGMAATSKRAPETEAAITGKPWDEATARAAMAAMSRDYAPLTDMRATEHYRRTSAANTVYRFWLETRPDAPLPAAQINVRAVEPDIPTVA

SEQ ID NO: 5185 - protein, 200 aa, Rhizobium sp. NGR234
MAENPSALHLSGPRISRREALQATAAAAALAALPPGSAAATNAPAAAAVTLTLTVNGRGHTLTVDPRQSVLDVLRETLDLTGTKKGCNQGACGACTVLVNGKRIVSCLTLASMYDGARIETIEGVEKDGALHPLQEAFVEHDGLQCGFCTPGQIMSGLGCIAEGHAGSPEEIQFWMSGNICRCGAYPGIVAAVADAAGRS

SEQ ID NO: 5186 - protein, 344 aa, Ipomoea trifida
IERIPKEYIRPEEERPSIGDIFAEEKMDGGPQVPTVDLKGINSEDLEVREKCREELRKAAVDWGVMHLVNHGIPEELTGRVKAAGEGFFGQPIEEKEKYANDQAAGNVQGYGSKLANNASGQLEWEDYFFHCVFPEDKADLSIWPKTPSDYIAATREYAKQLRALTTTVLAVLSLGLGLEEGRLEKEVGGMEELLLQMKINYYPKCPQPELALGVEAHTDVSALTFILHNMVPGLQLFYEGKWVTAKCVPNSIIMHVGDTVEILSNGKYKSILHRGVVNREKVRLSWAVFCEPPKEKIILQPLPETVSEADPPRFPPRTFAQHIKHKLFRLTDQEGADTPKPDE

SEQ ID NO: 5187 - protein, 162 aa, Pyrobaculum aerophilum str. IM2
MVLKVGDKAPDFELLNEELKPVRLSEVLKRGRPVVLLFFPGAFTSVCTKELCTFRDKMALLNKANAEVLAISVDSPFALKAFKDANRLNFPLLSDYNRIVIGMYDVVQANLLGLPLYHLAKRAVYIIDPTGTIRYVWYSDDPRDEPPYDEVIKEAEKIGAQK

SEQ ID NO: 5188 - protein, 792 aa, Ralstonia solanacearum GMI1000
MNKQTESFLLAQADIAAAAQAGRGAVVGVSRPHESAHLHVAGTATYTDDIPELAGTLHAALGMSTQPHARIAHLDLARVKQAPGVIAVFTAADIPGTNDCGPILHDDPILAAGTVHYVGQPVFLVVATSHDAARRAARLGAIEYEALPPLLTPEDARAAGRAVLPPMHLKRGDPDARIAAAPHAQAGRLSLGGQEQFYLEGQISYAVPKEDNGMHVWCSTQHPTEMQHAVSHMLGWHANQVLVECRRMGGGFGGKESQSALFACCAALAAWKLACPVKLRPDRDDDMMITGKRHDFRFAYEAGYDDDGRILGVKVDMTARAGFSADLSGPVMTRAICHFDNAYWLPEVQIDGFCARTNTQSNTAFRGFGGPQGAFAIETILDNIARALGRDPLDVRRANLYGKDRNNVTPYGQTVEDNVIHELLDELEASSDYRARREAVRAFNATSPVLKRGLALTPVKFGISFNVRHFNQAGALVHVYNDGSILVNHGGTEMGQGLNTKVAQVVAHELGVAFGRVRVTATDTSKVANTSATAASTGSDLNGKAAQDAARQIRERLTAFAAQHYDVPIETVAFADDHAEIGAQQGQRSVPFDELVRLAYMARVQLWSDGFYATPKLHWDQARLHGRPFYYFAYGAAVSEVVVDTLTGEWRLLRADVLHDAGRSINPAIDIGQVEGAFIQGMGWLTTEELWWDPSGRLMTHAPSTYKIPTVNDCPADFRVRLFDNANAEDSIHRSKALGEPPLLLPFSVFFAIRDAVAAVGDGRTSPPLNAPATCEAILKAVDALRSAPLSA

SEQ ID NO: 5189 - protein, 775 aa, Alkaliphilus metalliredigens QYMF
MSLSIGKSIFRKESLEKVTGAAKYTDDYSTNDMLHIKLVISPHAHAKIVTIDSSKALEVSGVRTIIVGQPFPLTGEEIKDRPPIAYDKVRYHGEPVAAVVADTALQAKKAAELMKITYEPLPVVNSPQDALLPDATLVHENLAVYEKIEHVYPEANTNIADRTKIRKGCIEEGWKNSDVTIETDFSFSQSDHIAMETRCVIAEIRPDGYVVFTSATQSPYMIKKLMQDYFQIEEGKVIVTTPFVGGAYGGKVPIQLELIAYMASAAVGGRPVKLLNSREEDMITSPVHIGLDAHIKLGATKDGQLTAAEILYAFDTGAYSDKGATISRAAAVTCTGPYHIDHLKCDSLCVYTNHPYATAYRGFGHSELLFVFERAMDMLAKELKMDPIELRMKNTILPGHTTPTQIRLNESTVGNLPNCISTLKQLMQWNEGQVIEIDERKVRTKGVSCIWKTSTIDSDASSGIILTFNGDGSINIESGVVEMGMGTKTVLAQLLAEKLSMDINKIHVKMEVDTQIIPEHWKTVASRSTLMAGRALLKAADDAIVQLKDTASRVLMCSPDDLEVGNEMVYVKDEPDIFIKVEDICLGYKYPHGYSIGGQVIGRGQYTLRHLTHLDHETGIGRPGPEYTVGAQGVEIEFDTRDYTYKILKAYAVIDVGKVLNMKLAEGQVMGAMEMGLNLGSSETFVFSENGNVLNPRLRTYTPFRYGDHPEYIVHFIETPHIDSAYGARGLGEHGLIGMPAALANALSIASGVELNRLPLTPESIWLEKRGVNEN

SEQ ID NO: 5190 - protein, 344 aa, Ipomoea trifida
IERIPKEYIRPEEERPSIGDIFAEEKMDRGPQVPTVDLKGINSDDLEVREKCREELRKAAVDWGVMHLVNHGIPEELTGRVKAAGEGFFGQPIEEKEKYANDQAAGNVQGYGSKLANNASGQLEWEDYFFHCVFPEDKADLSIWPKTPSDYIDATREYAKQLRALTTTVLAVLSQGLGLEEGRLEKEVGGMEELLLQMKINYYPKCPQPELALGVEAHTDVSALTFILHNMVPGLQLFYEGKWVTAKCVPNSIIMHVGDTVEILSNGKYKSILHRGVVNRENVRVSWAVFCEPPKEKIILQPLPETVCEADPPRFPPRTFAQHIKHKLFRLTDQEGADTPKPDE

SEQ ID NO: 5191 - protein, 343 aa, Vibrio salmonicida LFI1238
MMKIYHVNLARGFSGGEQQTLALIQQHLKEKQNIAVIALTNSPFYNAISDLGCEVITVRHYLLGHTISLPKDAVLHVHEGHAIYWAALQHKVSQTPYIITRRLDNPIKKKWLTTFAYSNAAAIVGISTCVSEVVRQRLPQQHIMTIPDSPVTYPINHSEVANIRERFKDKFLVIQAGNMIPHKGFDVTVNAAMLLKDPRVHICLLGDGKQRCELEKQASGLTNISFMGRQHNMGDWFAAADLLIHPSYTEGLGSVILEGMSTGLPAIGSRAGGIPNIIEHEKSGLLIEPGNSTELAEHIEKIANNATLKEHLIEGGWEKLTAFMIEHTAALYFKVYQRALQHD

SEQ ID NO: 5192 - protein, 360 aa, Pyrobaculum aerophilum str. IM2
MRVLWINHRCPKHPQAGGAEEYVFQISRRLVKMGHEVTLLAEKPSSLPEHEVIDGVEIVRKGGFLTLHLWAPLYVAKHSREYDVIIDNVAHVFPFYSSKFTFKPTIAVVHHVNGKAINRVMPQPLHFLGIAAEKSLPHMYRSFIAVSRSTEEDLINLGVNPDRISVVYNGVDHEVYKPGEKSERPLVLWLNRFVKYKNPDHAVRAFSIVKKKIPEALFVMAGDGPERPRAERLAKQLGVEVEFVGKISVRRKVELLQRAWVCVYTSEIEGWGLVALEAAASGTPCVGYAVGGLRESIIDGVTGFLARPGDIGDLANKIVRILNNAELLKRLTENAFRYAQNFDWNNSAERFLEVINSVTQ

SEQ ID NO: 5193 - protein, 612 aa, Triticum aestivum
  misc_feature (26)..(26): Xaa can be any naturally occurring amino acid
  misc_feature (398)..(398): Xaa can be any naturally occurring amino acid
  misc_feature (596)..(597): Xaa can be any naturally occurring amino acid
SADAWADAWETVEKTFQLSRADRETXQRSEYDLQVWCILMNDKVQFRMQWPQYAELEVNGFAVRVVTRPGSQLLGINGRDDGPLITTCSREGTNKICLRRVDNRTFCFGVRVAKRRSVPQVLNLVPKEAEGESFEDALTRVRRCLGGGDTAENADSDSDLEVVTESVTVNLRCPNSGSRMKTAGSLPPGFLLGCFDLDTFVELNQRSRKWQCPICLKNYSLENLMIDPYFNRITSLLRDCSEDVNEIDIKPDGSWRVKGDVPTRELSQWHMPDGTLCISKEDNKPGVENFNELKIEGTSDGHKSLKIGIKRKNGIWEVSNKADDKKPSVVGNITQNNITFRTPNTFPMSSSPTGSYRDGEDTSVNQEGSMHIDLSLNNGHEFESFPLNFRQTYKNNDXPALSCCDVIVLSDSDEENDTIVCPPTVYDNTTANDSGFPFATSGAGFTGRYQEDAGVGTSGLGLLSNNADDFEMTNWQMPYSQPEQGYQFFGDGTADTYVGSHNSFSITPNDYSLDCNVGIEEASVAHDLPVYRSNNEMHGSLVDNPLAFGGDDPSLQLFLPSQPSSAPLQEEPSERVNASNGVQSDDWSPYARSCGXXMKAATQWLNFKTIRQ

SEQ ID NO: 5194 - protein, 154 aa, Alkaliphilus metalliredigens QYMF
MYKSEITLNVNGEERSVYVRHADTLLHVLRGQLGLTGAKPGCLNGDCGACTIDVDGEAMKSCLMLAIEAVGKKVITVEGVQNTSIKTAFIEKFAFQCGYCTPGFIMNSNSLITKYPQADDTQIKDCLESNICRCTGYKEIEDAVKSVLSNNSTG

SEQ ID NO: 5195 - protein, 344 aa, Ipomoea trifida
IERIPKEYIRPEEERPSIGDIFAEEKMDGGPQVPTVDLKGINSEDLEVREKCREELRKAAVDWGVMHLVNHGIPEELTGRVKAAGEGFFGQPIEEKEKYANDQAAGNVQGYGSKLANNASGQLEWEDYFFHCVFPEDKADLSIWPKTPSDYIAATREYAKQLRALTTTVLAVLSLGLGLEEGRLEKEVGGMEELLLQMKINYYPKCPQPELALGVEAHTDVSALTFILHNMVPGLQLFYEGKWVTAKCVPNSIIMHVGDTVEILSNGKYKSILHRGVVNREKVRVSWAVFCEPPKEKIILQPLPETVCEADPPRFPPRTFAQHIKHKLFRLTDQEGADTPKPDE

SEQ ID NO: 5196 - protein, 670 aa, Vitis vinifera
MTCCCLLGAPCDALYKELWHACAGPLVTVPREGERVYYFPQGHMEQLEASTTHQGLDQQMPSFNLPSKILCKVVHVQLRAEPETDEVYAQVTLLPEPDQSEITSPDPPLPEPQRCTVHSFCKTLTASDTSTHGGFSVLRRHADDCLPPLDMSQQPPWQELVAADLHGNEWHFRHIFRGQPRRHLLTTGWSVFVSSKKLVAGDAFIFLRGENGELRVGVRRLMRQLSNMPSSVISSHSMHLGVLATASHAISTGTLFSVFYKPRTSRSEFIVSLNKYLEARNHKLSVGMRFKMRFEGEEVPERRFSGTIVGVGDKNTSSGWADSEWRSLKVQWDEPASIFRPERVSAWELEPLVAAAAPTNLQPAQRNKRARPPVLPSATPDLSVLGMWKSSVESPSGFPYCDPHRGRDLYPSPKFSSITKTNSFSFSGNSSPAAVSSNSMYWSNRMETATESFAPAVNKESGEKRRDTGSGCRLFGFQLLDNSTLEETLPVLTVGEDQPVPSLDVESDQHSEPSNINRSDIPSVSCEPDKLSLRSPQESQSRQIRSCTKVHMQGIAVGRAVDLTRFDRYEDLLKKLEEMFDIQGELCGLTSIWQVVYTDDEDDMMMVGDDPWLEFCSMVRKIFIYTAEEVKRLSPKIKLPAMEEIKPGKLDSDVAVAGTDDQSSVVGPGC

SEQ ID NO: 5197 - protein, 181 aa, Helicobacter pylori
LVTKLAPDFKAPAVLGNNEVDEHFELSKNLGKNGAILFFWPKDFTFVCPTEIIAFDKRVKDFHEKGFNVIGVSIDSEQVHFAWKNTPVEKGGIGQVSFPMVADITKSISRDYDVLFEEAIALRGAFLIDKNMKVRHTVINDLPLGRNADEMLRMVDALLHFEEHGEVCPAGWRKGDKGMKA

SEQ ID NO: 5198 - protein, 195 aa, Mycobacterium avium subsp. paratuberculosis
MPLLTIGDQFPAYELDRVIAGDLSKVDAKQPGDYFTTVTSEDHAGKWRVVFFWPKDFTFVCPTEIATFGKLNDEFEDRDAQVLGVSIDSEFVHFNWRAQHEDLKNLPFPMLSDIKRELSLATGVLNADGVADRATFIVDPNNEIQFVSVTAGSVGRNVEEVLRVLDALQSDELCACNWRKGDPTLNATELLKASA

SEQ ID NO: 5199 - protein, 344 aa, Ipomoea trifida
IERIPKEYIRPEEERPSIGDIFAEEKMDGGPQVPTVDLKGINSEDLEVREKCREELRKAAVDWGVMHLVNHGIPEELTGRVKAAGEGFFGQPIEEKEKYANDQAAGNVQGYGSKLANNASGQLEWEDYFFHCVFPEDKADLSIWPKTPSDYIAATREYAKQLRALTTTVLAVLSLGLGLEEGRLEKEVGGIEELLLQMKINYYPKCPQPELALGVEAHTDVSALTFILHNMVPGLQLFYEGKWVTAKCVPNSIIMHVGDTVEILSNGKYKSILHRGLVNREKVRVSWAVFCEPPKEKIILQPLPETVSEADPPRFPPRTFAQHIKHKLFRQTDQEGADTPKPDE

SEQ ID NO: 5200 - protein, 197 aa, Synechococcus sp. WH 5701
EIADSNPSKFFMPGQFDNPANPEIHFKTTGPEIWNDCDGAIDVFVAGVGTGGTITGVSRYIKNEAGKAIESVAVEPTNSPVITQTMNGEAVKPGPHKIQGIGAGFIPKNLDLSVVDKVEQVTNEESIAMALRLAEEEGLLVGISCGAAAAAAIRLAEQDAYAGKTIVVVLPDLAERYLSSVMFAEVPTGIIEQPVAV

SEQ ID NO: 5201 - protein, 158 aa, Thermus thermophilus HB8
MPAMEVGTLAPDFALPDQEGRTHRLSDYRGRWVVLYFYPKDDTPGCTKEACGFRDQMGSLKALDAVVLGVSADDVESHKRFAEKYGLNFPLLADPERKVIGAYGAWGKKNLYGKEVEGVLRQTFLIDPEGRIAKVWRKVSPEGHALEVAEALKALRGA

SEQ ID NO: 5202 - protein, 353 aa, Moorella thermoacetica ATCC 39073
MDVHVLTRAPGDRRVSTVQEGVYLHYVPTYQQPDKEINFLSWVLQFNLALADAGQEVLAAYPGRNWILHAHDWLVAYGARELQESARVPLVATIHATEAGRNHGLHNRIQQAIHHIESGLVNGADRLICCSRYMEEEIRRLFQPRSEITVIPNGVRPIPPVPPCRDSQTILFVGRLVVEKGVQVLLAALARLKRLYPGARLIVAGAGPYAGELQTMANNLGLADRVEFTGFVSEEVRNRLLARSRVAVFPSLYEPFGIVALEAMAAGIPVIVSRTGGLAEVVEDNRTGLTFNPGDVADLERRLVTIFQNPDLAAELGRSGQARVYRDYTWEAVARQTLALYRGVLRENSLIAS

SEQ ID NO: 5203 - protein, 992 aa, Kluyveromyces lactis NRRL Y-1140
MGVPSFFRWLSRKYPKIISPVLEEYPVIEDGVQLPLDYSSANPNGELDNLYLDMNGIVHPCSHPENKPPPETEDEMLLAVFEYTNRVLNMARPRKVLMIAVDGVAPRAKMNQQRARRFRSARDAKLQNEAREQVLREREDYGETIDENVKSKKTWDSNAITPGTPFMDKLATALRYWTSFKLATDPGWKNLQIIISDATVPGEGEHKIMNFIRSQRADTQYNPNTTHCIYGLDADLIFLGLATHEPHFKILREDVFANNNYKKPKPQDMINLSEEEKQQLIQQDSEKPFLWLHISVLREYLSAELAIPHLSFQFDFERAIDDWVFMCFFCGNDFLPHLPCLDVRENSIDILVDIWKTVLPKTKTYLTCDGTLNLEPVEALLEQLGDRETDLFKKKYIQEVRKQEAHDRRKKLKSNPNVSQGKVDRNFMIPLENMPVYDVDGNAAEGSLNLSNKDFANMRKEINLANEGDGEAAKALKLKSEKNSGVVEFSSEELKNSVQLSKTANYDAATSLQEKLIAKKMAMRDEENAEELSLKRKSEDVDSAEKETSNEPEDDEADYDEDEGSTVPPAVIHTGIVKSGFIDTDESVRLYEPGYHDRYYQHKFHVPAKDIPALQKDVIRCYVEGISWVLLYYYQGCASWTWYYPYHYAPFAQDFKNIKNLDIHFDLGEPFLPYEQLMSVLPAASGHALPEIFRPLMSDPNSEIIDFYPEEFPVDMNGKKMAWQGIALLPFIDETRLLKTVREQYSKLSDSEKARNVRKKDALLISNKNVNYDLFMKNLYGENPVNVIEFRHFKSGLSGFVTQAEEGFELNSKLICPINGGGLPDLSTNLFLKLSYTQPVVAGRCKSLVLNGYIPPQPMLTPQDRDCIIYKYSNRWNPSMMKYNIVPVGPSGITQYQPRVGGYRSFFFHKEQTAYAQQPQQNREYMHSQQRQPQGSRYQQSRYNNGNYNNSNNGYSDNNNGNTGKYNRHYNNSRGNSNRYSNSNDRRREFRR

SEQ ID NO: 5204 - protein, 189 aa, Pseudoalteromonas tunicata D2
MNTTLINTKLKTFKATAYHNGDFKALTEQDLLGKWSVVFFYPADFTFVCPTELGDLADNYAKFQELGVEIYSVSTDTHFAHKAWHDSSDTIGKVQFPMIGDPTGTITRNFGVMIEEDGLALRGTFVMNPEGEIKIVETHDLGIGRSATELLRKIQAAQYVASHDGEVCPAAWQPGEETLAPSLDLVGKI

SEQ ID NO: 5205 - protein, 390 aa, Parvularcula bermudensis HTCC2503
MVETADVDQVSHAKIAPVHVLIVAPQGVAGRGGIGRIMSYLVRELEQTSNGFKVSTQQSRYSEAKILKHLTVPFALAIFTLRLIFTKVDVVHINVAPRGSTWRKRLFAIVARGLGKPVVLHLHGSGYNEFFAQCSPAQQKRIQAFFENADAVVALSAYWRNWLVSELCLDSRTVVEIANGVPSPKVPRTPPAVPAEIPVIVFLGLVGHRKGVDVLLEALAQLKAQGVAFEALIGGNGEVEQARDRAAHLGLTSTDVTFLGWVGEEEVARLLQKADIFVLPSRAENQPVSILEAMAHGVPVVSTTVGAIPEQVDHETTGLLVPPGDSDALAEAITRLLNEPALRHDMGEAGRRRFFDFYSVKSYAERFSTLYGRLGRGGRAADRIEASSGS

SEQ ID NO: 5206 - protein, 367 aa, Polaromonas sp. JS666
MKIALVTDAWGPQVNGVVTTLVELVRELEQLGHVVEVIHPGLFKTRPCPGYAGIDLAIRPGRGLTEKLDAFQPDAIHVATEGPLGWAARSYCDKRGLKFTTAFHTKFPEILHAALRIPLSWGYALFRYFHKPSSGVMVPTQGVLRMLERRGFRNLRGWTHGVDTQLFEFQDAPRVYPPVGTLVRPVSLFVGRLSYEKNIEAFLKLDIPGTKVVCGVGPLEVALRERYPHVRWMGVMPRSELAKVYAAADVFVFPSRSETFGLVMLEAMAAGTPVAAYPVDGPLEVLGSEEGNCHGGVMNTDLQQACYSALAVPRHQARRRALDFSWEQATQQFESYLVLAVKSTSCKPVSGGIASVKSTVTPLSSNR

SEQ ID NO: 5207 - protein, 387 aa, Synechococcus sp. PCC 7002
MHVAWLGKKSPFCGNVTYGREVTNHLLDRGYQVSFLHFAQQEECDQKWRDCPEVFLPFLYKSQIYTIPSPKSSQVLMRSLQKFQPDLVHASLTLSPLDFRLPDICRELDLPLVATFHPPFDSKLRNLKSSTQYLTYQLYAPCLANYDRVIVFSEIQKEMLVKLGVPRDTVRIIPNGVDEQKYAPALSAYRHTFQAKRVFIYQGRIAPEKNVEALLKAWRLANMGKDCVLLMVGDGPLKASLELLYTEDQGVRWLGFVGDETQRIDLLRAADVFVLPSLVEGLSLSLLEAMACGLACIATDAGADGEVLNQGAGVVLDTQGVTGQLKTLLPLFREQPELVTILGHKARQRVLERYTLQNNISQLEQTYQELCSTAASAPHPAPVQSFP

SEQ ID NO: 5208 - protein, 197 aa, Cryptococcus neoformans var. grubii
MATYALPQIQKPAPNFAGTAVKEGSFEEIKLDDFKGKWTVLVFYPMDFTFVCPTEILAFNKALDQFAAIGAEVICVSTDSEFTHLAWSQTKRSEGGLGPDLKLTLLADRNHAAAKAYGVLLPEEGVALRGTFFIDPKGTLRAMHVHDLPVGRSVEETIRVIKAFQFTDEHGEVCPAGWEEGKDTIDTSAPSAYFSKQ

SEQ ID NO: 5209 - protein, 301 aa, Arabidopsis thaliana
MVCSTIIKAVLISTGIITAMSMFLKVFLPVTLYFSLSFSTLWSSFLPWLKPPYLFVFVNVMITIIIASSRYYRSIGDHDGKDEKNLHGRGYYRIQTEPIVNQTSPPRLEVKDMDLDVDFDFMATIQPPEVERSEVVYEEKEEEISELINGGDEFVVLEESENLPPVEKPLVSARFEHRKMVKVTPKGDDIRKKALKVVNPKRDNKWKTISEEGTSRPLSTSHYQRPDIFGLGAGGDSLRKSETFRDVTNYYHQSSLTVTPPVKMEKEMLPSLEDLNRRIEAFIKKVKEERLESLRLDKEVA

SEQ ID NO: 5210 - protein, 220 aa, Alkalilimnicola ehrlichei MLHE-1
MTEEVNEQQEPVLAMPQLNKPAPDFEAQTTHGPKKLSDYRGKWVVLFSHPADFTPVCTTEFMAFAQRSEDFKALNTELLGLSIDGIHAHVAWVRNIKENFGVEINFPIIADLNMKVANAYGMVQPGASDTSAVRATFFIDPEGILRAMIYYPMTNGRSIDEALRLVKSLQTSQEHGVATPEAWQPGDPVIVPPPATVEEAEARKDQGYDYVDWYFCKKTL

SEQ ID NO: 5211 - protein, 233 aa, Cryptococcus neoformans var. grubii
MSLRLGDIAPDFEADTTHGRIKFHDWLDGSWAILFSHPDDYTPVCTTELSAVALSYADFASRGVKLIGLSANNVASHEGWIKDINALNPDGPGLEFPIIGDEDRTVSELYGMLDKLDKTNVDKKGIPFTVRTVFVIDPKKQIRLTLAYPASTGRNFPEILRVIDSLQLGDKHRITTPANWGIPDPKTGQVEERVIVHPSVQGEEVKQLFGDDVQIVYPYLRFTSNPSKKEVKA

SEQ ID NO: 5212 - protein, 313 aa, Pseudomonas fluorescens PfO-1
MIGAPAVRIAKNAMTLQYPTIADCVGNTPLVRLQRLPGVTSNTLLLKLEGNNPAGSVKDRPALSMITRAELRGQIHEGDTLIEATSGNTGIALAMAAAIKGYKMILIMPDNSSAERKAAMTAYGAELILVSQEEGMEGARDLAQRMEAEGRGKVLDQFANGDNPEAHYTTTGPEIWRQTQGSITHFVSSMGTTGTIMGVSRYLKEQNDNVQIVGLQPMEGSAIPGIRRWPQEYLPKIYQADRVDRIVDMAQSEAENVTRRLAREEGIFCGVSSGGAVAAMLRLSKEVENAVIVAIICDRGDRYLSTGIFDAPN

SEQ ID NO: 5213 - protein, 377 aa, Cyanothece sp. PCC 7424
MRIALFTETFLPKIDGIVTRLRHTVEHLQRNGDQVLVICPDGGLTEYKGAKIYGVSSIPFPLYPELKLAIPRPTLKGVLEKFKPDLIHVVNPAVLGVGGIYYSKVLGIPLVASYHTHLPQYLQHYGLGSLEGLLWELLKLAHNQAKLNLCTSTAMVEELINHGIERVDLWQRGVDTELFQPHLTSLSMRSRLSAGNPDSPLLLYVGRVSAEKQIDQIKPVLEAIPQAHLAIVGDGPHREALEEHFKGTNTHFIGYLQGLELASAYASADAFIFPSRTETLGLVLLEAMAAGCPVVAAASGGIPDIVTDGVNGYLFDPADADGAITATQRLLEATQEREKLRHNARLEAERWGWAAATRQLQNYYQTVVYPQSFPKAA

SEQ ID NO: 5214 - protein, 307 aa, Bacillus licheniformis ATCC 14580
MVRVANSVYDLIGNTPVVKLNRLVDEDSAEVYVKLEYMNPGSSVKDRIALAMIEDAEEKGLLKEGDTLIEPTSGNTGIGLAMVAAAKGIKAILVMPDTMSSERRNLLRAYGAELVLTPGAEGMKGAIKKAEELAEEHGYFMPQQFNNPANAEVHRRTTGKEIAEQFGDGLDAFIAGIGTGGTITGAGEVLKEKNPSIKIFAVEPTDSPVLSGGKPGPHKIQGIGAGFVPKILNTEIYDEIITVKNEEAFEFARKAAREEGILGGISSGAAICAALQVAKKLGKGKKVLAVLPSNGERYLSTPLYQFE

SEQ ID NO: 5215 - protein, 376 aa, Chlorobium tepidum TLS
MKVALYAGTYVKDKDGAVRSIYQLVSSMIKNGHQVVVWTPDFTPEANASVPVNLTPSVPIPLYPDYKLGFYNAVTERQLDEFAPDIVHISTPDIVGRKFLHYAKRKGLPVGSAYHTDFPSYLSYYRLGFAEPAVWRFLRKFYNACDVTLAPNESVRERLTGKGIERVELWSRGIDKELFDPSRRSAKLRRAWDAEGRTVIIYAGRFVLYKDIEVVMSLYQRFADEGLGDRVRFVMIGSGPEEAQMRARMPEAVFTGYLTGTTLPEAYASGDLFLFPSTTEAFCNVTLEALATGLPAVVSDVGGCQELVERSGGGFVAKAGDVGDFYACCTKLMQDGELFRSMRERGLAFAKDKSWAAVNGKLIDRYLELIAAKARR

SEQ ID NO: 5216 - protein, 243 aa, Hordeum vulgare
MAAATAPFALVSRLSQAARLPIRAWRAARPAPLWTGRTRPLSVASAAQEDRDNSVDVQVSQARNAGNQQGNAVQRRPRRAGFDISPFGLVDPMSPMRTMKQMSDTMDRLFDDAVGFPTARRSPAAAAGEMPRMPWDIMEDDKEVKMRFDMPGLSREEVKVMVEDDALVIRGEHKKEAGEGQGEAAGGGDGWWKERSVSSYDMRLALPDECDKSQVRAELKNGVLLVSVPKRETERKVIDVQVQ

SEQ ID NO: 5217 - protein, 244 aa, Hordeum vulgare
MAAATAPFALVSRLSPAARLPIRAWRAARPAPLWTGRTRPLSVASAAQENTDSSVDVQVSQDRNAGNQQGNAVQRRPRRAAGFDISPFGLVDPMSPMRTMKQMLDTMDRLFDDAVGFPTAGRSPAAAAGEMPRMPWDIMEDDKEVKMRFDMPGLSREEVKVMVEDDALVIRGEHKKEAGEGQGEAAGGGDGWWKERSVSSYDMRLALPDECDKSQVRAELKNGVLLVSVPKRETERKVIDVQVQ

SEQ ID NO: 5218 - protein, 346 aa, Mesorhizobium sp. BNC1
MYQTVIEAIGNTPLIRLKRASEETGCEIYGKAEFMNPGQSVKDRAGLFIIRDAEKRGLLRPGGVIVEGTAGNTGIGLTVVAKALGYRTVIVIPDTQSQEKKDALRILGAELIEVPAVPYKNPNNYVKVSGRLAEQLARTEASGAIWANQFDNVANRDGHIRTTAEEIWRQTGGKVDGFVSAVGTGGTLAGVSAGLKARNPDVKVALADPLGAALFSYYTAGELKSEGSSITEGIGQGRITANLEDFQPDFSFQIPDEEALPIIFSLVQEEGLCLGGSTGINIAGAIRMARELGPGHTIVTILADYGTRYQSKLFNPAFLREKKLPVPAWMEGRSEIPVPFEQVAAS

SEQ ID NO: 5219 - protein, 785 aa, Aeropyrum pernix K1
MSQGRRYIGKRVKRKEDPRFITGRGLYVDDIKLPGMVYAAFLRASYAHARIKSIDTSKAEKMPGVVGVYTGEYFKDKVAPLTTAWALANADLKPVFWPVVAHDKVRFTGDIVAVVVAEDPYTAYDALEAIDVEYEPLPVVVDVEEAIKPGAPQLHDEAPGNIAFKWRFSGGESFDKVAEKADVVIKQRMVNQRLIPSAMETRGAVASFNRGLEELTLWVTSQNPHVHRLVLSGVLGLPEHKIRVIAPDVGGGFGSKIPVYPGEVIVSRLAMDLGVPVKWVETRRENFVGTIHGRDHVEYVEAAATRDGRLLGVRVKTLANMGAYLSTAAPGVPTILFGLMLQGPYKIESVDVEVLGVLTNTTPVDAYRGAGRPEATYILERVMDLVARKLGLDPAEVRRRNLIEEAPYTTVTGLVYDSGRYKEVFEKALQIAEYEKWREEQMKARQEGRLIGIGISSYIEMCGLAPSRIARATGFGLGLYESVTIRVHPTGKVSVYTGSHPHGQGEETSFAQIVAEELGVPVEDVEIIHGDTDETPFGLGTYGSRTTPVGGGAVALAARRIREKARKIAAALLEAREEDVVFSEGKFHVKGHPEKSVSFQEVALEAYLADKLPEGLEPGLEATTFYDPENFVFPYGTHVCIVEVDRDTWKPKILRYVAVDDAGVIINPMLAEGQVHGGVVQGIAQALFEYAVYDESGNLLTAGFNDYMIPTAKDLPNIESYFVETPSPHNPLGAKGIGETGTIASTPAVVNAVLDALAHLGVEHIDMPLTPHNIWKALKDKGVVK

SEQ ID NO: 5220 - protein, 315 aa, Thermobifida fusca YX
MRFDSLLDSLGGTPLVGLPNLSPSPEVRLWAKLEDRNPTGSIKDRAAFYMIEQAEKDGLLTPGCTILEPTSGNTGISLAMVARLRGYKMVCVMPENTSAERSQLLRMWGAEIYYSPAEGGSNEAVRVAKRMAAENPDWVMLYQYGNPANARAHYETTGPELLADLPEITHFVAGLGTTGTLMGVGRYLREHRPDVQIVAAEPRYGELVYGLRNLDEGFVPELYDETILSSRYSVPSDAALRRTRELLDKEGIFAGISTGGVLHAALGVAQKAVKAGQRADIAFVVADAGWKYLSTGAYEGTLEEAAQRLEGQLWA

SEQ ID NO: 5221 - protein, 226 aa, Pseudomonas syringae pv. syringae B728a
MTEPKKHKETAGDSSTVQPSRRNFLKFGASGIAAATLSTWIPSDGMLQATPLAPAAPVVEDSDAPAAGEQRIQLKVNGQVHTLNVPANAVLLDVLRDRLQLTGTKKGCDHGQCGACTLLVNGVAINSCLSIAVQHQGDSITTIEGLAENGKLHPVQEAFWEHDAYQCGYCTSGQIMSAVAILKDPNIASDDASVREAMSGNICRCGAYKNILSAVQSARSKMGGAA

SEQ ID NO: 5222 - protein, 189 aa, Leuconostoc mesenteroides subsp. mesenteroides ATCC 8293
MTTNFIDSEITDFKVNAYHDGDFTEVTKQDTLGKWGVYFFYPADFSFVCPTELGDLADHYADFQNINAEIYSVSEDSEFVHKAWAEATDTIAKVKYPMLADPAGKLARFFNVLDEDAGLAFRATFIVDPEGKIQSYTINNMGIGRNAEEILRTLEAAQFVAEHGDRVCPANWHPGEDTIAPSLDLVGKI

SEQ ID NO: 5223 - protein, 547 aa, Burkholderia xenovorans LB400
MLDDALHHPRGKDGRAPDVFRRGAWVPMREYGNDDEVDFAIVGTGAGGGTLACRLAELGFRVVAFDAGAWWRPLEEFASDETHQAKLFWTDERICDGENPLQLGNNNSGKAVGGSTVHFAMVSLRFRPEWFKSRSALGYGADWPLDWREMWRYYAQVEDALKISGPVNYPWGPPRPRYPYRAHELNAAALVLARGAEAMGIPWTPTPLATLSAPRGLAHPCVYRGFCVSGCATNAKQSALVTWIPRALRAGAEIRDLAMVGRIATNALGRVNGVEYLREGRWQFQRAKHVVVAGYAIETPRLLLMSATSQYPDGLANRSGLVGKNLMAQSNQAVYGTMEEEIRWYKGPPSLAITEHWNYTDEGKDFFGGYSYMSQGPLPEVWAGAQNKRGLWGDALAREMRNYNHQAGLKIVGEMLPQERNRVTLADEKDQYGLPVARVTYSWGDNDKRLIAHSLDFMQQALAAAGGRDIWRETDDTCHLNGTARMGSDPATSVVDADCRSWDIPNLWICDGSVFPTVGGVNPSLTIQAIACRTAARIAELAARGEL

SEQ ID NO: 5224 - protein, 738 aa, Pseudomonas syringae pv. syringae B728a
MSENIIGVPQRRIDGGKKVSGQARYAADHPMGKMLYAYGVYSTIANGRVLAIKDQQAKAMPGVVDIFHHDNFPTLHRTPNTKLSFAKMLSASKADEHRLPFEDDRIYYPGQFVALVVAESFEQARAAAYRVTVDYDERPAVKDLAEGMRVNGARDGGAGHNRGNPDSAFDGAKVKVDQTYTTPVEVHNPMEMHASTAWWQDGKLFVYESTQGVVNHRNLLANVFDLSPDRVEVRAPFIGSGFGGKLWPWPHSVAACAAAKVTGRPVQLVLPRAQMFTTVGHRPETRQRLRLATDASGKLVSIRHESFNNTSMLDDYTENCGGVTKSLYACDNVLVSHKISPINRGTPTSMRAPGAAPGLFALESAIDEMALASGMDPLAFRKLNLSDKDQSAGLPWSSNHLPEAIDKAAERFGWQARKADVGSMREGDEIIGYGMGACNWEAYQVPTDARVILRSDGTALAQCGLQDIGTGTYTIVAQTVSQLTGIPMERVEVELGSSAFPAGPVSGGSWVTASVMPAIAGATREALQKLRQYAVSKDAVFAGQDAEAIKVENGQLVMGEQRASFVDVLNGQRLSRAEGTFQSGMPEAGKYSFRSFGVHFVEVRWDPGISSLRVSRVVSAIDVGKVVNPLAARNQVEGAIVMGIGMALFEAGEYDPRSGMPVNNNYAEYVVPVHADQPDIDVLLLDYPDYNLGEFGARGIGEIGVTGLAAAVANAVYHATGKRVRSLPISKEKLMAGL

SEQ ID NO: 5225 - protein, 308 aa, Listeria innocua Clip11262
MTIVNSITDLIGKTPIVKLNRLPEAGSADVYVKLEFQNPGGSVKDRIANAMIESAEKSGALKPGDTIIEPTSGNTGIGLAMVAAAKGYQAIFVMPETMSIERRKLLQAYGAKLVLTPGPDGMKGAIAKAEELAKENNYFVPQQFHNPANPAVHEETTGPEIVEAFGKDGLDAFIAGVGTGGTVTGVGHVLKKNYPDVKIYALEPEESPVLSGGSPSPHKIQGIGAGFVPDTLDTKVYDGILKVSSEDALETAREVAKKEGILVGISSGATIKAALDLAKELGAGKKVLAIVASNGERYLSTPLYNFED

SEQ ID NO: 5226 - protein, 364 aa, Thermus thermophilus HB8
MRLLYLITRAEPGGAQVHLLELLRGFRDRAELHLGVGEDQDGFLVEEARALGVRVHLLRHLVQPVRPVKDFLGLFEVMALIRKVRPHLLHAHSSKAGFLGRLAGRVLGVKSVFTAHGWAFTDGVPEGRKRLALAMERLAGRLGDLVLAVSEYDRALALRHKAVPPERIRVVHNGVPDTPFRADPRKEPPRLAMVARFAPQKDHALLLKALSGLKELPWSLDLVGEGPLLPQAKALAEALGLGERVRFLGKRLDVDRVLAEAQVFVLATNWEGLPLSVLEAMRAGLPVVATGMGGVGEAVVEGKTGFLVGRGDEEALRARLRTLLLSPELRARLGEAGRRRYEEAFTLDGMLARVWAAYEEVLRL

SEQ ID NO: 5227 - protein, 344 aa, Ipomoea trifida
IERIPKEYIRPEEERPSIGDIFAEEKMDGGPQVPTVDLKGINSEDLEVREKCREELRKAAVDWGVMHLVNHGIPEELTGRVKAAGEGFFGQPIEEKEKYANDQAAGNVQGYGSKLANNASGQLEWEDYFFHCVFPEDKADLSIWPKTPSDYIDATREYAKHLRALTTTVLAVLSQGLGLEEGRLEKEVGGMEELLLQMKINYYPKCPQPELALGVEAHTDVSALTFILHNMVPGLQLFYEGKWVTAKCVPNSIIMHVGDTVEILSNGKYKSILHRGVVNREKVRVSWAVFCEPPKEKIILQPLPETVSEADPPRFPPRTFAQHIKHKLFRLTDQEGADTPKPDE

SEQ ID NO: 5228 - protein, 310 aa, Verrucomicrobium spinosum DSM 4136
MVLIGWYHALRERPDCIICFHLNFMPAVLPLARLLRSPYVGVLHGIEAWNPLPASRRRALASADWLYAVSRFTLRSSAARHGLDLAKASLLPCSFDESRFSPGPKPDNLLSRYGLHIDQPIALTVARVDRSERYKGHETMLAAMPGILNRCPNMRYIVAGTGDDLGYLKSEALRLGVADSVIFTGFIPTEELPDLYRLCDIFVMPSKAEGFGIVFLEAMASGRPVIAGNQDGSTDALDQGRLGVLVDPDDKVALADAVLSILDQKYPNKLLFQPMALSAAVKAAFGFEAFKARLAAPLQKLMPKNRPPYA

SEQ ID NO: 5229 - protein, 344 aa, Ipomoea trifida
IERIPKEYIRPEEERPSIGDIFAEEKMDGGPQVPTVDLKGINSEDLEVREKCREELRKAAVDWGVMHLVNHGIPEELTGRVKAAGEGFFGQPIEEKEKYANDQATGNVQGYGSKLANNASGQLEWEDYFFHCVFPEDKADLSIWPKTPSDYIAATREYAKQLRALTTTVLAVLSLGLGLEEGRLEKEVGGMEELLLQMKINYYPKCPQPELALGVEAHTDVSALTFILHNMVPGLQLFYEGKWVTAKCVPNSIIMHVGDTVEILSNGKYKSILHRGVVNREKVRVSWAVFCEPPKEKIILQPLPETVSEADPPRFPPRTFAQHIKHKLFRQTDQEGADTPKPDE

SEQ ID NO: 5230 - protein, 309 aa, Thermoplasma volcanium GSS1
MMHAELGPDMVSKILDHMKAAHIGNTPVEEIDANGNIYAKIEWENRFGSIKDRPAFFIMDYLKSKGVLEGKAIVEASSGNTGLAISTISSMLGLQSCIVLPENASQATKKIIVENGSQLILTPPDLGTEGSIEKARSLASSGSFYWINQHSNPLNSDVHYYSTAPELLDQEGMPEAIVAGVGTGGTITGIARYFKERDPSVKVIGVQPSLYSHIPGLRDIKKTSNKGLIDLYGSYIDDFLYVKESDAIAEVFDHYVNTGELIGISSGANLYASKQLSSKFKKIFTVFPDSGRKYLDILKPYDKNNVLNY

SEQ ID NO: 5231 - protein, 181 aa, Helicobacter pylori
LVTKLAPDFKAPAVLGNNEVDEHFELSKNLGKNGVILFFWPKDFTFVCPTEIIAFDKRVKDFQEKGFNVIGVSIDSEQVHFAWKNTPVEKGGIGQVTFPMVADITKSISRDYDVLFEEAIALRGAFLIDKNMKVRHAVINDLPLGRNADEMLRMVDALLHFEEHGEVCPAGWRKGDKGMKA

SEQ ID NO: 5232 - protein, 344 aa, Ipomoea trifida
IERIPKEYIRPEEERPSIGDIFAEEKMDGGPQVPTVDLKGINSEDLEVREKCREELRKAAVDWGVMHLVNHGIPEELTGRVKAAGEGFFGQPIEEKEKYANDQAAGNVQGYGSKLANNASGQLEWEDYFFHCVFPEDKADLSIWPKTPSDYIAATREYAKQLRALTTTVLAVLSLGLGLEEGRLEKEVGGMEELLLQMKINYYPKCPQPELALGVEAHTDVSALTFILHNMVPGLQLFYEGKWVTAKCVPNSIIMHVGDTVEILSNGKYKSILHRGLVNREKVRVSWAVFCEPPKEKIILQPLPETVSEADPPRFPPRTFAQHIKHKLFRQTDQERADTPKPDE

SEQ ID NO: 5233 - protein, 315 aa, Frankia sp. EAN1pec
MRYDSLVDSVGRTPLVGLPRLSPSAEVRLWAKLEQDNPTGSIKDRAALWMIADGEKRGLLTPGATVLEPTSGNTGISLAMVCSQRGYRLICVMPENTSVERRQLLQMWGAEIVSSPAAGGSNEAVAVAKRLAAENPDWVMLYQYGNPANAQAHYETTGPEILEDLPGITHFVAGLGTTGTLMGTGRYLRERKPDVVIVAAEPRYGELVYGLRNIDEGFVPELYDASVLTSRYSVGPRDALRRTRELVQQEGIFAGISTGAILHAALAQADRAVREGRRADIAFIVCDGGWKYLSTGAYAGTLAEAEAALEGQLWA

SEQ ID NO: 5234 - protein, 344 aa, Ipomoea trifida
IERIPKEYIRPEEERPSIGDIFAEEKMDGGPQVPTVDLKGINSEDLEVREKCREELRKAAVDWGVMHLVNHGIPEELTGRVKAAGEGFFGQPIEEKEKYANDQAAGNVQGYGSKLANNASGQLEWEDYFFHCVFPEDKTDLSIWPKTPSDYIAATREYAKQLRALTTTVLAVLSQGLGLEEERLEKEVGGMEELLLQMKINYYPKCPQPELALGVEAHTDVSALTFILHNMVPGLQLFYEGKWVTAKCVPNSIIMHVGDTVEILSNGKYKSILHRGVVNREKVRVSWAVFCEPPKEKIILQPLPETVSEADPPRFPPRTFAQHIKHKLFRQTDQEGADTPKPDE

SEQ ID NO: 5235 - protein, 181 aa, Helicobacter pylori
LVTKLAPDFKAPAVLGNNEVDEHFELSKNLGKNGVILFFWPKDFTFVCPTEIIAFDKRVKDFHEKGFNVIGVSIDSEQVHFAWKNTPVEKGGIGQVSFPMVADITKSISRDYDVLFEEAIALRGAFLIDKNMKVRHAVINDLPLGRNADEMLRMVDALLHFEEHGEVCPAGWRKGDKGMKA

SEQ ID NO: 5236 - protein, 344 aa, Ipomoea trifida
IERIPKEYIRPEEERPSIGDIFAEEKMDGGPQVPTVDLKGINSEDLEVREKCREELRKAAVDWGVMHLVNHGIPEELTGRVKAAGEGFFGQPIEEKEKYANDQAAGNVQGYGSKLANNASGQLEWEDYFFHCVFPEDKTDLSIWPKTPSDYIAATREYAKQLRALTTTVLAVLSLGLGLEEGRLEKEVGGMEELLLQMKINYYPKCPQPELALGVEAHTDVSALTFILHNMVPGLQLFYEGKWVTAKCVPNSIIMHVGDTVEILSNGKYKSILHRGVVNREKVRVSWAVFCEPPKEKIILQPLPETVSEADPPRFPPRTFAQHIKHKLFRQTDQEGADTPKPDE

SEQ ID NO: 5237 - protein, 835 aa, uncultured bacterium
MPAEPVHKDPVLPLTDMRHSIDIDAKGDGKWVGQRLRRKEDARLIRGRGYFVDDKQSSDMLHVTFVRSPYAHAKIVKIDTSAADAMAGVSLTMTGKQVIEQAQPLMQIGSAPGNLIKDYGIAVDRVRYQGEPVVLVVADSMRLAQDAAELIEVEYDVLPALVVSEESLQSDQPIHEEVGSNLVWEGTWDHGDVDKAFAEAAHVVKIGKLHFHRFSSTPIETAGAVVSWSRTGEIDIFANSGLPPINSQMISAFLGVSTEQIRSRTHDVGGNFGTKTVTYPFVALTALASKNLGGRELKWVETRTDNLQSFHGGERSFFDTEVALDKDGVITGLRSRHLDDCGAYARYEPLGAVIWSQVYCHTFTVKNLHIDFSQVVSNKPPCTPNRGYSRLQHMWFMERVMDICAHELNIPAEDMRARNLIQPEEFPYTTPNGCVYDSGNYPLMMEKAKELIGWDEWRKKQEEAKKEGRLIGLGMGMTLDSGTNNFGQSYIVNPDSIFSGNTETARIKIGLDGSIVVMLGSVPQGQGHETVAAQVIADDLNISPDMVNVRIGFDSNWNAYSGLSGTIASQFVVTGLSAVHGAAEKLKAELKKIAAFSLEASEEELELGVGEMGPQVSVKGQPEKAINYWMLSNLVSQNTAKLPEELRDIDFNVKYTYRPPFELPDTEKKYGNLTLTYAALLNAAVVEIDPVTYQPKILEYVYVDDCGVAINPQIVEGQVTGGVAHGIGAAMQEAFQFDKSGNMITATFTDYAPLTSLNMPDLKHADIESPSPFSYNGAKGCGESGGTALQTINAAIQDALHSKGVIINDSHSAPSILMEAVKHPNRDTFVDVEHR

SEQ ID NO: 5238 - protein, 195 aa, Chlamydia trachomatis
MGSLIGRQAPDFSGKAVVCGEEKEISLADFRGKYVVLFFYPKDFTYVCPTELHAFQDRLVDFEERGAVVLGCSVDDIETHSRWLAVARNAGGIEGTEYPLLADPSFKISEAFGVLNPEGSLALRATFLIDKHGVVRHAVINDLPLGRSIDEELRILDSLIFFENHGMVCPANWRSGERGMVPSEEGLKEYFQTMD

SEQ ID NO: 5239 - protein, 884 aa, Arabidopsis thaliana
MDLEANCKEKLSYFRIKELKDVLTQLGLSKQGKKQELVDRILTLLSDEQAARLLSKKNTVAKEAVAKLVDDTYRKMQVSGASDLASKGQVSSDTSNLKVKGEPEDPFQPEIKVRCVCGNSLETDSMIQCEDPRCHVWQHVGCVILPDKPMDGNPPLPESFYCEICRLTRADPFWVTVAHPLSPVRLTATTIPNDGASTMQSVERTFQITRADKDLLAKPEYDVQAWCMLLNDKVLFRMQWPQYADLQVNGVPVRAINRPGGQLLGVNGRDDGPIITSCIRDGVNRISLSGGDVRIFCFGVRLVKRRTLQQVLNLIPEEGKGETFEDALARVRRCIGGGGGDDNADSDSDIEVVADFFGVNLRCPMSGSRIKVAGRFLPCVHMGCFDLDVFVELNQRSRKWQCPICLKNYSVEHVIVDPYFNRITSKMKHCDEEVTEIEVKPDGSWRVKFKRESERRELGELSQWHAPDGSLCPSAVDIKRKMEMLPVKQEGYSDGPAPLKLGIRKNRNGIWEVSKPNTNGLSSSNRQEKVGYQEKNIIPMSSSATGSGRDGDDASVNQDAIGTFDFVANGMELDSISMNVDSGYNFPDRNQSGEGGNNEVIVLSDSDDENDLVITPGPAYSGCQTDGGLTFPLNPPGIINSYNEDPHSIAGGSSGLGLFNDDDEFDTPLWSFPSETPEAPGFQLFRSDADVSGGLVGLHHHSPLNCSPEINGGYTMAPETSMASVPVVPGSTGRSEANDGLVDNPLAFGRDDPSLQIFLPTKPDASAQSGFKNQADMSNGLRSEDWISLRLGDSASGNHGDPATTNGINSSHQMSTREGSMDTTTETASLLLGMNDSRQDKAKKQRSDNPFSFPRQKRSNNEQDHQTRHRSLNKICIILCAGKN

SEQ ID NO: 5240 - protein, 322 aa, Solanum lycopersicum
MVILSKQTSFFNGVPLIDLSKPDSKNLIVNACEEFGFFKIINHDVPMEFISKLESEAIKFFSSPLSEKLKAGPADPFGYGNKQIGTNGDCGRVEHILVSTNSEFNYQKFASILGVNPENIRAAVNDYVSAVKKMSCDILEMLAEGLKIYPTNVFSKLLMDENSDSVFRLNHYPPCSEIERLNDNNNDLIGFGEHTDPQIISILRSNNTSGLQILLKDGHWISVPPDENSFFVNVGDSLQVMTNGRFKSVKHRVLANSVKSRLSMIYFGGPPLSEKIAPLASLMEGEDSSLYKEFTWFEYKKSAYKTRLADNRLILFEKIAAS

SEQ ID NO: 5241 - protein, 301 aa, Staphylococcus aureus subsp. aureus MRSA252
MITYDLIGNTPLVLLEHYSDDKVKIYAKLEQWNPGGSVKDRLGKYLVEMAIQEGRVRAGQTIVEATAGNTGIGLAIAANRHHLKCKIFAPYGFSEEKINIMIALGADVSRTSQSEGMHGAQLAARSYAEKYGAVYMNQFESEHNPDTYFHTLGPELTSALQHIDYFVAGIGSGGTYTGTARYLKQHHVQCYAVEPEGSVLNGGPAHAHDTEGIGSEKWPIFLERSLVDGIFTIKDQDAFRNVKSLAKHEGLLVGSSSGAALQGALNLKAQLSEGTIVVVFPDGSDRYMSKEIFNYEENDYE

SEQ ID NO: 5242 - protein, 187 aa, Thauera sp. MZ1T
MSLINTQVQPFKAQAFHNGKFVEVSDASMKGKWSVVIFMPAAFTFNCPTEIEDAAEHYAEFQKAGAEVYIVTTDTHFSHKVWHETSPAVGKAKFPLVGDPTHQLTRAFGVHIEEAGLALRGTFVIDPEGVIKTMEVHDNAIARDVTETVRKLKAAQYVASHPNEVCPAKWKEGEATLAPSIDLVGKI

SEQ ID NO: 5243 - protein, 320 aa, Microcoleus chthonoplastes PCC 7420
MRIAHNITEVIGHTPLIQLNRIPQAEGCVGRIVVKLEGMNPAASVKDRIGMSMIQAAEEAGQIHPGKTVLVEPTSGNTGIALAMVAAAKGYQLILTMPDTMSMERRSMLKAYGAKLELTPGSEGMKGAIRRANEITESTPEAFMLQQFQNPANPKIHRETTAEEIWADTEGQVDILISGVGTGGTITGIAEVLKQRKPDFTAIAVEPTSSPVLSGGQAGPHKIQGIGAGFVPQVLRTDLIDEVVQVSDEDAIAFGRRLAREEGLLSGISSGAALCAAIQVAKRPENAGKLIVMVQPSFGERYLSTPLFRELDQSETPVLV

SEQ ID NO: 5244 - protein, 302 aa, Thermodesulfovibrio yellowstonii DSM 11347
MSVIDIIGNTPLIRLDRINPNPKVILYGKFEGANPGGSIKDRTALYLIKEAEEKGFLTKDKIILEPTSGNTGIGLAMIAAAKGYRIKLVMPKCVSVERRRVLEALSAELILTPAEESTDGAIRLAHQIYEDAPELYFMPNQFDNEANVIAHYETTAKEIIEQTKGEVTHFVAGMGTTGTVMGVSKRLKEFNSNIQIIGVEPVPGHRIQGLKNMSESIVPKIFDPSKLDERIYVNDEEAFDTTRKLAFKEGVFVGMSSGAAMHIALKKASEIRSGVIVVILPDRGDRYLSTSLFASICSKCPP

SEQ ID NO: 5245 - protein, 217 aa, Methanococcus maripaludis S2
MVVIGEKFPEVEVTTTHGKLKLPEHYIESGKWFVLFSHPGDFTPVCTTEFVAFQKRYDQFRELNTELIGLSIDQVFSHIKWVEWIKEKLDVDIEFPIIADDRGELAVKLGMISPYKGNNTVRAVFVVDATGTIRAIIYYPQEVGRNMDEIVRLVKALQTADKGYATPANWPNNDFLNEKVIVPPANNMDARKKRLEACKSGELEGYDWWFCYTDLKE

SEQ ID NO: 5246 - protein, 158 aa, Rickettsia monacensis
MEVLMAFNLSRIRNKSELQHHTNKRSYVDDIFNNFFNEIASFSYPVSYNDRMLSPRTDITENESEYHLELELPGVTQDNIDLKIDSNILTIEGKNEQSTEKKDHNYHMQERYYGSFSRSISLPSNVDEEHVEANFKDGILSIKIPKKEQSKAKKIKIS

SEQ ID NO: 5247 - protein, 916 aa, Kineococcus radiotolerans SRS30216
MKLTVDGVAAEVEPRPGQCLRTLLRENAGTTVKKGCDTGDCGACTVLVDGSPVHSCLYPALRAGDREVTTAAGLAPAGSLHPVQQRFVDAAGFQCGFCTPGMVVTAAALDEEQRADLDEHLKGNLCRCTGYRAVREAAGGQTLPALARSGGIGEAVAAPAAHRVVTGTEPYTLDLAEGDVPAGLLHAAVLRSPHAHARVTAIDTRAAAALPGVHLVLTHHDAPPVLFSTGRHQNRLDDPDDTLVLDPVLRHHGQRVAVAVAESVALAEEALGLIAVEYEVLPAVLDPHRATAPGAPLLHADKDADSRIADPARNLVAELHSEVGDVEEALASAHAVVEGTWRTQRVAHVALETHAAVGWLDEEGRLVVRSSTQVPFLVRDELARVLGLDRARVRVLAARVGGGFGGKQEMLTEDLVALAVLRTGRPVQYETTRREALTALPTRHPMDVRVRLGATADGTLTALAVDLLSDAGAYGNHSPGVMFHSVHESVATYRCANKRVDARAVYTNSVPSGAFRGYGLGQVVFALESALDDLARELGIDPFTVRRRNVVVPGDRFVATSDPAVTGEDDGLRFGSYGLDQCLDLVERELPRGGDPVPDGPGWRTGSGIALSMIATVPPRGHFAEASARLLADGTWELNVGTAEFGNGTTTVHTQIGVHALSTTADRLRLRQADTDVTGHDTGAFGSAGSVVAGKALLIACERLAGQVRALGADLLGADPATVVLEPEGVRCGPRSVPLSDVHAHAVRTAGAAPRADGADDAALRSVAFNVQGFRVAVDTSTGEVRILRSVHAVDAGVVLNPVQLRGQVEGGVAQAIGSALFEEVHRADDGSPLTVSLREYHAPRAADLGTTEVLFADTVDAVGPLGAKSMSEAPYNPVAPALANAVRDAVGVRLRRLPMRPDRVWRALAEAADRA

SEQ ID NO: 5248 - protein, 322 aa, Synechococcus sp. RS9917
MPIADDITALVGRTPLVRLNRLPAACGCQAEILAKLESFNPTASVKDRIAGAMVQAAEASGTIQPGRTVLVEPTSGNTGIALAMVAAARGYRLILTMPDTMSTERRSMLRAYGAELQLTPGVEGMQGAIALARQLVAEIPGAYLLQQFDNPANPAVHAATTAEEIWADTGRALDAFVAGVGTGGTLTGCAQVLKRRCPGLQVVAVEPAASQVLAGGAPGPHRIQGIGAGFVPPVLEAGLIDEILAISDEEAMAMGRRLAREEGLLSGVSSGAAVAAALRIGQRPAMAGRRIVVILASFGERYLSTPMFSSAPAPPARGDGQL

SEQ ID NO: 5249 - protein, 194 aa, Oryza sativa
  misc_feature (164)..(164): Xaa can be any naturally occurring amino acid
MSAKIGKPAPEFKATAVVDGNFKDVSLKDFKGKYVVLFFYPLDFTFVCPTEIISFSDRIEEFRQINCEVLACSTDSHFSHLAWVNTNRKQGGLGKMNIPLIADKNLEISTKYGVLKDDEGIAFRGLFIIDPNGTLRQITINDLPVGRSVDETLRLVQAFQFTDXHGEVCPANWKPGKKTINPDVSKSKEYFEHA

SEQ ID NO: 5250 - protein, 368 aa, Escherichia coli
MMKILFTESSSDIGGQELQALAQMTALQKQGHSVLLACREKSKIAPEARKRGHDVTFIPFRNSLHLPSILRFRRIIGEFKPDLVICHSGHDSNIAGLSRLICCHRFSIVRQKTYITRKTRTFSLNYLCDFIVVPSSAMMAHLMAEGVRTPVTVIPPGFDWPALHNEAMRPLPLHIHAWAASADNVPLIVQVGMLRPEKGHEFMLRVLYQLKMEGKSFRWLVVGAGREEYEASLRQQTEHLGMSGDVLMAGALFPALPVYRIASVVVMPSENEAFGMVLAEASVSGVPVIASETGGIPDVIQKNVTGTLLPVGDVSAWTGALRDFLSRPERFRMMAASAREDIEYRFDINRTAQIIVSLASQAKGKCNR

SEQ ID NO: 5251 - protein, 265 aa, Oryza sativa Indica Group; identical to SEQ ID NO: 4904

SEQ ID NO: 5252 - protein, 777 aa, Frankia sp. EAN1pec
MRFVGERVARVEDPRLLTGRGKFVDDVTLPRMLHVAFVRSPMAHARINSIDTTAARAVPGVVAVFTGADLVAGCNPLTGLRNGPNWPTFRALPTDKARFVGDPLVMVVADSRYIAEDACELVDIDYEPLPAVTGYEAALDPASPAIFDELGDNIVATSPPVTLGDIDAAFAEADQVVRATLRQHRVANVPLETRGGIADYDPASGELTFIASTQTPHGLRQALAQALDHPLERLRVLAGDVGGGFGLKGVVGREDFCIALASKRLGRPVKWVEDRNEHLLASGHAREEKIDAELALKADGTLLGLKVKLVLDGGAYPAVPFSCTIYPEMICTSLPGPYHIKAYKYESAVVASNKATYVAYRGPWEMEVWTRERLLDIAAHELGLDPADIRRRNLVAGEPGDQIITGRGLEGITSRRSLEQALDLVDYDGFRKEQVAARAAGRYLGIGFAIFMEAAPGPPELRGKGAPFGGEQAKAALQADGHLLVTTGQAPHGQGHETTLAQVAADQMGIPLDHVRVVHGDTRQTPFNLIGTGGSRAGTWATGAVIVTTRRLKEKVLDIAAHRLQIDPGDLDIVDGMVTPKGAPDKAIPLADVAKLAMMAPMFLPPGTDVSLTAQERFDGSAVTSSGWSGGAHVCTVEVDIATGQVRILRYVVVEDCGRVVNPAIVEGQICGGIAQGIGEVLYENAAYDADGNFLAATFMDYLLPTAAEIPHIEIEHIDSAGLGDFDFHGVGEGGALAAPATLTNAVADALLPFGARVVDQYLPPAKILELAGVISA

SEQ ID NO: 5253 - protein, 297 aa, Marinobacter sp. ELB17
MYFPTIEDYVGKTPLVRLQRLPGDTSNVILAKLEGNNPAGSVKDRPAISMIQQAEIRGDIKPGDTLIEATSGNTGIALAMAAAIKGYRMVLIMPSNMSEERRASMRAYGAEIIAVSKEDGMEGARDLAERMQAEGKGKVLDQFANADNPLAHYRTTGPEIWQQTNGRVTHFVASMGTTGTVMGVSRYLKERNPDVRIVGLQPSEGAAIPGIRRWPEAYMPKIFDAKAVDQVMDIGQVEAETTMRALAEKEGIFCGVSSGGSIAAALRLSQTLENAVIVGIICDRGDRYLSTGVFPGA

SEQ ID NO: 5254 - protein, 428 aa, Microcoleus chthonoplastes PCC 7420
MYQPRISIVQATSSPFSRNAALALSEADLLHEVITTIAYDPKGSIPKHLNFLPKRIRNRLHQELGRRTWTVPKRGIIRTHIGQEVVRLALVQTGLYRYLGLSRRGLVDWVYTSLDRHAAKHHLQNIDAVYAYEDEAATTFQAAKQQGILCLYDLAIIFYHLSRDIQIQEAERFPDLAPALIAAKEPAWKIERKEQEVQLADHIFVASSITRKSLLGVGVNPKKISIIPYGAPIDYFQPQPKADKNFRALFVGRVSPRKGVHYLLQAWQELQLPDAELLFVGSNLFPDGWLDQYQDLFSHIPSVPHVSLNKYYSSGSVLVFPSLVEGFGLVLLEAMACGIPVITTPNTAGPDILTDGIEGFIVPIRDVEALKEKLEWCYRHPQELAEMGQAARRKAEQLTWDLYRQKLSSRVREIVEHQRSQSVELLYS

SEQ ID NO: 5255 - protein, 104 aa, Triticum aestivum
LENLIIDPYFNRITSLIKSCGDDLSEIDVKPDGSWRAKGGAELKDLMQWHLPDGTLCMSTASVLMSGNDDDDFAGDRSGGTSSLSGQPRSVRPKSVLAIESDSD

SEQ ID NO: 5256 - protein, 523 aa, Bradyrhizobium sp. ORS278
MLELRKDIFADERDDNLNEVGKGTQRQDMLGHVTGTSTYFNDHKLQGMLHLRVVRSTQPHARLRRIDTSEAERSEGVRRIIRGADVPRNLNTLLSLINFGKDDEPTLAVDKVRYRGEPIVAVVAETPRLAAEAAAKVRVDYETLPAVFDVEEALKPGAPTVNETYPKNTFTYHERYDHQKLRFGDVERGFAQADHVLEQRYQMSPIEHAPVETNGSIAAPDTNGRYVVYTSTQALFFSLDTCAKILDLPSNTFHFIGGTVGGGFGGKVDTLTEPLAILAAMLTGRPVRYVFGREEEMQFGPPRGAERIYIKDGVMRDGRIVARQIRGYFDSGAYTRLSSYAVVKCAAHLPGPYTIPNVHGDIYCVFTNRTPATAMRGFGITGMDFALECQMDKLAHLIGMDPMEFRILNAYRDGDMKAHRREAKNTALIECVQVAAEKAKWPIREEFRRMSSRRDGGGARAAVPSTPREPAQPRSVPAQQRTSYDRGLPISPQPEPPPPPPPSAPSSGHGATRFSSVFGTRRR

SEQ ID NO: 5257 - protein, 158 aa, Bradyrhizobium sp. ORS278
MAKTPLQFRHNGRDVALFVDGGTNLLVVLREMLGDVTPKFGCGQGGCGACTVLIDGEAHLSCLTLAEAVEGRAVETLDGIKTGPNLHPLQRAFAEGFAAQCGYCTPGMLMAAKALLDRNPQPSREQVVEAISGNICRCTGYEPIINAVLAAAASRASA

SEQ ID NO: 5258 - protein, 379 aa, Bacillus pumilus SAFR-032
MKKKVLFCATVDYHFQAFHLPYFRWFQEQGWEVHTAANGQLELPYVDQAHSIPIQRSPFHVHNRLAYVELKKLLAKEHYDFIHCHTPMGSVIGRLAAKSARRKGTKVLYTAHGFHFWQGAPLQNWLLYYPIERWLARHTDALITINGEDFKRADRLSKERASVYYVPGMGVDMKRFAPVNEKEKQRLRAVHGFSSADFIVLCAGELNANKNQGMLIKACAKLYRKIPNVKIVFAGEGAMRPTYEKLVHELHLEKQVQFAGFCKQIEEWMHLSDVCVSTSLREGLGMNLLEAMSAEKPVIATENRGHCELIRHGVNGFLVKTHDVNDLAEYLHQLYHKRDQLPLMGKAGRSLAHAFAQEQTVSAMEEIYTTYMDQAEKVM

SEQ ID NO: 5259 - protein, 238 aa, Funaria hygrometrica
MASSTAKSGFHTFMEALTGAGREPVTAVSCRPPCYGFRRLAVVSSSQQENASENSDRSLTQLPRQDGGSRSPGPRRPMGLRRGDTRRDLTSSLFDIWDPFIGDRSLKQMLNTVDRLFADPFFGSPPSATALDLRTPWDVKEDADAYKLRFDMPGLSKEEVKVSVEDGDLVIRGEHNAEDQKEDSWSSRSYGSYNTRMALPEDALFEDIKAELKNGVLYVVVPKSKKDAQKKVLDINVQ

SEQ ID NO: 5260 - protein, 208 aa, Brassica napus
  misc_feature (49)..(49): Xaa can be any naturally occurring amino acid
VSEVEFTLTDEEKRRNSRMCDMLFIATSHHLAELIFSLDNHCRQLSARXERIDLKVQIKPGLSDGMNGYLTPCSGETHPPIFRSPMEGMEDILANQVICCIYRLPDVHSHITRPPPGVIFPKKIVNIGDLKPPPALWHEDNGRRPMHNNNYNNNNNHYNNNNNHYNNNQGRQNPPGSLSGLHLGDAAHRLVTNSLQTRTDRHGYQAAD

SEQ ID NO: 5261 - protein, 366 aa, Verrucomicrobium spinosum DSM 4136
MDIEVVYRTLGAVEGYFDHGFNQEIVWDVPLLAGYPYTSLPSNLGFRSTLQYFNQAFQDRKPQATWIHGWGSAYARAAWLAARHLRIPVLMRGDSQLAAFKGSSLKRILHRWVFSRLFRTVSHFLAVGSANKAFYLHYGVPEDRITTMPYAVDNQFFRQRAMDSSARRQDFRDALNLPPNRPVVLYVGKLHPDKSPETLIRAVSQLVSAQTSSSPPILLMVGDGEMRHTLETQAAGLPPDTVRFLGFRNQTELPAFYDLCDIFVLPSVFEPWGLVVNEVMNASKPVIVSDRVGAADDLVKNGVNGFVFPAGSVDALAGLLSKLIADPALREASGRQSAAIIRNWGFEQDLTALQSALQHLSIFKEG

SEQ ID NO: 5262 - protein, 243 aa, Funaria hygrometrica
MAARTLSRVVASPARSFLSTFRDTFLMQGRSPLPRQAPFSVAQRMAVSGSAQTVSDDDYESRSQLEKMQNESNASQKRSQGGLRRVVPRDLAASFFDVWDPFLGNKSLRQMLNTVDRLFDDPFFSAAPSRPTGIALDFRTPWDVKEDNESFRLRFDMPGLGKDEVKVYVEDGDLVIKGAHRAEEQKENNWSSRSYGSYNTRMTLPENVKIDEVKAELKNGVLQVVVPKSKEEPKKNVIDINVE

SEQ ID NO: 5263 - protein, 374 aa, Rhodopirellula baltica SH 1
MKIALVIPTMDRGGAEKQVVLLAKGLHELGHDVRVFLLTRDGHRSEDLRAAGVPVVLIGKRFKMDPTALFRLKKQLVDFAPDIVHTWLFAANSFGRVAAKWAGVPVIIASERCVDPWKTGWHFLIDRRLQKISQAITTNSSGVQDFYAANGLDPAQFVVIPNGVESIDSTKTQAIDREEAFRRLEVASERRLIVAVGRLWPQKRIRDLIWAGELLATARGDTTLVVIGDGPQREELLRHRDSVSAPLHVRFAGQREDVGELLPHADQFWIASEYEGQSNAVIEAMLAGVPVIASNIPGNRDLVIDKETGWLFDVGDEADLVRLSLAAFNDPDGSQRIAEQARQHIVDEFSLDAMIRRHVMLYEKLLVGHDQTRS

SEQ ID NO: 5264 - protein, 344 aa, Ipomoea trifida
IERIPKEYIRPEEERPSIGDIFAEEKMDGGPQVPTVDLKGINSEDLEVREKCREELRKAAVDWGVMHLVNHGIPEELTGRVKAAGEGFFGQPIEEKEKYANDQAAGNVQGYGSKLANNASGQLEWEDYFFHCVFPEDKTDLSIWPKTPSDYIAATREYAKQLRALTTTVLAVLSQGLGLEEERLEKEVGGMEELLLQMKINYYPKCPQPELALGVEAHTDVSALTFILHNMVPGLQLFYEGKWVTAKCVPNSIIMHVGDTVEILSNGKYKSILHRGVVNREKVRVSWAVFCEPPKEKIILQPLPETVSEADPPRFPPRTFAQHIKHKLFRLTDQEGADTPKPDE

SEQ ID NO: 5265 - protein, 368 aa, Leptospira interrogans serovar Lai str. 56601
MILHIDTETGWRGGERQLLLLAEGLKKRKIPQLILGRPGSALESRCSDQGLPFQAVDMRGEWDLTSIQTIRAIVLEKKIKLIHTHTAKAHTLALLAKSKLPNTKLIVSRRVDFSIRKNLFSIWKYKSKRNDLFLTVSDKIREILLRDGVDPAKTVTVHSGIDFAFAKKLPNSTLYKKEFSLKKDTIVIGNVAALVDHKDQKTLLKAVSKIDPSKNFKVFIVGEGELRKELEDFANTLEISDKLIFTGYRTDVPDILSLFDIFTLTSKEEGLGTSILDAMAVGLPIVATKGGGIGEMLTHEKGAFLTEVGDSESLAKYYEILIDDLKLRRTFGNFNKESVKRFSIKNTIRKTELAYYSFLGEDLFGEKV

SEQ ID NO: 5266 - protein, 344 aa, Ipomoea trifida
IERIPKEYIRPEEERPSIGDIFAEEKMDGGPQVPTVDLKGINSEDLEVREKCREELRKAAVDWGVMHLVNHGIPEELTGRVKAAGEGFFGQPIEEKEKYANDQAAGNVQGYGSKLANNASGQLEWEDYFFHCVFPEDKTDLSIWPKTPSDYIAATREYAKQLRALTTTVLAVLSQGLGLEEERLEKEVGGMEELLLQMKINYYPKCPQPELALGVEAHTDVSALTFILHNMVPGLQLFYEGKWVTAKCVPNSIIMHVGDTVEILSNGKYKSIPHRGVVNREKVRVSWAVFCEPPKEKIILQPLPETVSEADPPRFPPRTFAQHIKHKLFRLTDQEGADTPKPDE

SEQ ID NO: 5267 - protein, 748 aa, Arabidopsis thaliana
MEDVRRRNRGHPLLRSKKRGEGYNHGFSPSQIQSLAVICQTFLPPETTSEQQAVNSFHVASSTQPPFTDEVAEMIVKNGRSEAVKVLRIILMILSFRFGTLLLCGSLCLDKSWPFVLKFSQLPLDKREAILRNWSRQSGFLLPFRITFFLAKFYTLFYFFSQTDENLKNPALEAIGYCIDGTERSSNKKSEADEKRRPLEKGIIETMHESDLTITQSLTEKGVHVARDDGDNVYRIRCDAVVVGSGSGGGVAAANLAKAGLKVLVLEKGNYFTAHDYSGLEVPSMLELYEKGGLLTTVDGKFMLLAGSAVGGGTAVNWSASIRTPDHVLQEWSEGSKIKFFGSQEYQSAMDEVTIRIGVTERCVKHGFQNQVLRKGCERLGLQVESVPRNSPEDHYCGLCGYGCRAGAKNGTDQTWLVDAVENGAVILTGIKAERFVLVDNTSSSNERKKRCVGVFASSVGGKIGKKFIIEARVTVSSAGSLLTPPLMLSSGLKNPNIGRNLKLHPVLMTWGYFPEKDSEFSGKMYEGGIITSVHHMNDTESGCKAILENPLIGPASYAGLSPWVSGPDLKERMIKYGRTAHLFALVRDLGSGEVMMENEVTYRTTKKDRENLRAGLRQALRVSVAAGAVEVGTYRSDGQKMKCEAITKEAMEEFLDEVDAVGGVGTKGEYWTTYFSAHQMGSCRMGVTAEEGALDENGESWEAEGLFVCDGSILPSAVGVNPMITIQSTAYCISSKIVDSLQNKTKV

SEQ ID NO: 5268 - protein, 307 aa, Bacillus cereus ATCC 14579
MNVYRGVHELIGHTPIVEITRFSLPIGVRLFAKLEFYNPGGSVKDRLGRELIEDALEKGLVTQGGTIIEPTAGNTGIGLALAALEHDLRVIVCVPEKFSIEKQELMKALGATVVHTPTEQGMTGAIAKAKELVNEIPNSYSPSQFANEANPRAYFKTLGPELWDALNGEINIFVAGAGTGGTFMGTASYLKEKNIDIKTVIVEPEGSILNGGKAGSHETEGIGLEFIPPFLKTSYFDEIHTISDRNAFLRVKELAQKEGLLVGSSSGAAFHASLLEAEKAAPGTNIVTIFPDSSERYLSKDIYKGWE

SEQ ID NO: 5269 - protein, 344 aa, Ipomoea trifida
IERIPKEYIRPEEERPSIGDIFEEEKMDGGPQVPTVDLKGINSEDLEVREKCREELRKAAVDWGVMHLVNHGIPEELTGRVKAAGEGFFGQPIEEKEKYANDQAAGNVQGYGSKLANNASGQLEWEDYFFHCVFPEDKTDLSIWPKTPSDYIDATREYAKQLRALTTTVLAVLSQGLGLEEGRLEKEVGGMEELLLQMKINYYPKCPQPELALGVEAHTDVSALTFILHNMVPGLQLFYEGKWVTAKCVPNSIIMHVGDTVEILSNGKYKSILHRGVVNREKVRVSWAVFCEPPKEKIILQPLPETVSEADPPRFPPRTFAQHIKHKLFRLTDQEGADTPKPDE

SEQ ID NO: 5270 - protein, 446 aa, Lactococcus lactis subsp. lactis Il1403
MRVGLFTDSYFPQISGVATSIRTLALELEKLGHEVFIFTTTDPNADVDHERNIIRLQSIPFVSLAERKIVLKGVFAAYLIAKEYDLDIIHTQTEFGMGILGKMVAAQLRIPVIHTLHTKYEDYVYYIAKGRLIRPSMVKYIIRNFLRGTEAIICPSEMVLETVNSYGVTLPKRVIPTGIEIDRFKRDDIEPEETAKLRVELGLAENEIMLLSLSRIAAEKNIQAVIHALPDILEEFPVKLVIVGHGPYAENLKELVKELELTDKVVFTGPVENEKTAYYYKAADFFISASTSETQGLTYLEAMAAGTRVLAAKNPYLSELINDDEFGQLFIGDDDLAEVTKKAIRDLHPIDKDKFEKKLYEISAENFAKKVYLFYIDTIIEYNNLKSIEAERFPMKMEDTIRQMPVTVKRSLKREQIRAKYFARKASKLAKNLQSYVKIDKDKEQD

SEQ ID NO: 5271 - protein, 344 aa, Ipomoea trifida
IERIPKEYIRPEEERPSIGDIFAEEKMDGGPQVPTVDLKGINSEDLEVREKCREELRKAAVDWGVMHLVNHGIPEELTGRVKAAGEGFFGQPIEEKEKYANDQAAGNVQGYGSKLANNASGQLEWEDYFFHCVFPEDKTDLSIWPKTPSDYIDATREYAKQLRALTTTVLAVLSLGLGLEEGRLEKEVGGMEELLLQMKINYYPKCPQPELALGVEAHTDVSALTFILHNMVPGLQLFYEGKWVTAKCVPNSIIMHVGDTVEILSNGKYKSILHRGVVNREKVRVSWAVFCEPPKEKIILQPLPETVSEADPPRFPPRTFAQHIKHKLFRLTDQEGADTPKPDE

SEQ ID NO: 5272 - protein, 344 aa, Ipomoea trifida
IERIPKEYIRPEEERPSIGDIFAEEKMGGGPQVPTVDLKGINSEDLEEREKCREELRKAAVDWGVMHLVNHGIPEELTGRVKAAGEGFFGQPIEEKEKYANDQAAGNVQGYGSKLANNASGQLEWEDYFFHCVFPEDKTDLSIWPKTPSDYIDATREYAKQLRALTTTVLAVLSQGLGLEEGRLEKEVGGMEELLLQMKINYYPKCPQPELALGVEAHTDVSALTFILHNMVPGLQLFYEGKWVTAKCVPNSIIMHVGDTVEILSNGKYKSILHRGVVNREKVRVSWAVFCEPPKEKIILQPLPETVSEADPPRFPPRTFAQHIKHKLFRLTDQEGADTPKPDE

SEQ ID NO: 5273 - protein, 413 aa, Streptomyces coelicolor A3(2)
MHVLVVHNRYNSAQPSGENNVVDQEVALLRAAGHRVGLFERRSDDIASRSLLGKVAVPLLVPWNPAVRRELADRLRTERPDVVHVHNVFPLLSPAVLAACADAGVPAVATLHNYTQVCPPGTLQRDGRPCTECVGAAPLPAVRHGCYRNSRLATVPLAVGLSVNRRRWWSGVERFFCISAAQREVLVGAGLPAERLAVKHNFVPDPEARRAGPGEHLLYLGRLAEAKGVRLLMEAWDELAADGGVGVPLVVAGTGPLEREVTAWAAGRDDVRYVGLYDPEQCRRALARSVAVVAPSTWLEAFGLVVVEAMAAGVPAVAAGHGAFAELVDDGVTGLLHRPGEAASLASRIRRIAAEPEGNQEMGRAARRRYEQGFSPAVGLERLLEGYRTAIAGRSALARDGDVRAGRGDGGSR

SEQ ID NO: 5274 - protein, 189 aa, Staphylococcus aureus subsp. aureus Mu50
MSLINKEILPFTAQAFDPKKDQFKEVTQEDLKGSWSVVCFYPADFSFVCPTELEDLQNQYEELQKLGVNVFSVSTDTHFVHKAWHDHSDAISKITYTMIGDPSQTITRNFDVLDEATGLAQRGTFIIDPDGVVQASEINADGIGRDASTLAHKIKAAQYVRKNPGEVCPAKWEEGAKTLQPGLDLVGKI

SEQ ID NO: 5275 - protein, 320 aa, Dehalococcoides sp. CBDB1
MENRTSKYNIHNGRGIASNITELIGNTPLVRLNKIGSGLKAEIILKLESFNPTHSAKDRPALYMIKKAEQEGKLIPGSIVIESTSGNTGIALAAVCAAKGYRLMLTMPENFSVERRRLLRLLGAELVLTPAELGMQGAIEKAAELKAKLPQAFIPNQFENPANPESHYKTTAEEIWRDTDGKVDILVAGVGTGGTISGIARGLKAAKPSIRIIAVEPAESPVISGGEPQPHLIQGIGAGFIPRILSLELIDKVIRVPGKEAVNMALRLAREEGIMAGISSGAALWAALETAKQAENSGKLIVAIMPDSGERYLSSLPLGD

SEQ ID NO: 5276 - protein, 310 aa, Lactococcus lactis subsp. lactis Il1403
MTKIYDNITELIGQTPIVKLQHVPAESADVYVKLEAFNPGGSVKDRIALAMIRAAEADGHLKPGGTIVEPTSGNTGIGLAFVGSALGYKVVIVMPESFSLERRKLIQAYGAQLVLTPASGGMKAAIAKAKELSETEGYFLAMQFENPANPEIHEKTTGAEIIDAFGPTGLDAFVAGAGTGGTITGVSHALKKANPTIKTYVVEADESAILSGEAAGPHKIQGISAGFIPGNLDTKSYDEIIRVKGDDAILTARHLGGKEGFLVGISSGAAIYAALEVAKKLGKGKKVLAIAPDNGERYLSTALYDFESEK

SEQ ID NO: 5277 - protein, 323 aa, Mycobacterium tuberculosis H37Rv
MTRYDSLLQALGNTPLVGLQRLSPRWDDGRDGPHVRLWAKLEDRNPTGSIKDRPAVRMIEQAEADGLLRPGATILEPTSGNTGISLAMAARLKGYRLICVMPENTSVERRQLLELYGAQIIFSAAEGGSNTAVATAKELAATNPSWVMLYQYGNPANTDSHYCGTGPELLADLPEITHFVAGLGTTGTLMGTGRFLREHVANVKIVAAEPRYGEGVYALRNMDEGFVPELYDPEILTARYSVGAVDAVRRTRELVHTEGIFAGISTGAVLHAALGVGAGALAAGERADIALVVADAGWKYLSTGAYAGSLDDAETALEGQLWA

SEQ ID NO: 5278 - protein, 438 aa, Corynebacterium glutamicum
MGSSHHHHHHSSGLVPRGSHMRVAMISMHTSPLQQPGTGDSGGMNVYILSTATELAKQGIEVDIYTRATRPSQGEIVRVAENLRVINIAAGPYEGLSKEELPTQLAAFTGGMLSFTRREKVTYDLIHSHYWLSGQVGWLLRDLWRIPLIHTAHTLAAVKNSYRDDSDTPESEARRICEQQLVDNADVLAVNTQEEMQDLMHHYDADPDRISVVSPGADVELYSPGNDRATERSRRELGIPLHTKVVAFVGRLQPFKGPQVLIKAVAALFDRDPDRNLRVIICGGPSGPNATPDTYRHMAEELGVEKRIRFLDPRPPSELVAVYRAADIVAVPSFNESFGLVAMEAQASGTPVIAARVGGLPIAVAEGETGLLVDGHSPHAWADALATLLDDDETRIRMGEDAVEHARTFSWAATAAQLSSLYNDAIANENVDGETHHG

SEQ ID NO: 5279 - protein, 188 aa, Treponema pallidum subsp. pallidum str. Nichols
MESLIGKRVIDFKLPAYVGGKFTEVSNASIKGSWAVFMFYPADFTFVCPTELADLARVYPSFVEIGCKVYSVSTDSEYVHKAWADATDTIKNLPYEMISDKAGKLAGFFGVLLPDTWHALRGTFVVDPEGLVKAFEVHDMGIGRDADELLRKVQSAQFVAKHGDQVCPARWKPGAKTLKPGIDLIGKI

SEQ ID NO: 5280 - protein, 352 aa, Sulfolobus tokodaii str. 7
MKLLITNHRDIFHPQAGGAERVIYEVSRRLVKKGFDITWLSEDVGNFNDELDGIKFLHAGNKYTLHLHSLSYAKRGYDVVIDSVAHAVPFFSYIVNKKSIALVHHVHQDVVKYELNPFLAFIVRQLEKTIRNYPYIISVSNTTKYELIKRFRIDESKITVIYNGIDHEIYKPGEKSPIPTVLWIGRLKNYKNPLDAVKIFKKVKNNKAIFYIAGGGDLEENVKRVISGQKNIIFLGKVNESQKIKLYQQAWAVISTSFIEGWGMTIVEANSCGTPAVAYSTGSIPEIIEDGVNGFLVEYKNIDMFAERLNYILEDENVMKYLSKRSYESSLKYDWNKTADEYYKYIWRIAES

SEQ ID NO: 5281 - protein, 1528 aa, Saccharomyces cerevisiae
MGIPKFFRYISERWPMILQLIEGTQIPEFDNLYLDMNSILHNCTHGNDDDVTKRLTEEEVFAKICTYIDHLFQTIKPKKIFYMAIDGVAPRAKMNQQRARRFRTAMDAEKALKKAIENGDEIPKGEPFDSNSITPGTEFMAKLTKNLQYFIHDKISNDSKWREVQIIFSGHEVPGEGEHKIMNFIRHLKSQKDFNQNTRHCIYGLDADLIMLGLSTHGPHFALLREEVTFGRRNSEKKSLEHQNFYLLHLSLLREYMELEFKEIADEMQFEYNFERILDDFILVMFVIGNDFLPNLPDLHLNKGAFPVLLQTFKEALLHTDGYINEHGKINLKRLGVWLNYLSQFELLNFEKDDIDVEWFNKQLENISLEGERKRQRVGKKLLVKQQKKLIGSIKPWLMEQLQEKLSPDLPDEEIPTLELPKDLDMKDHLEFLKEFAFDLGLFITHSKSKGSYSLKMDLDSINPDETEEEFQNRVNSIRKTIKKYQNAIIVEDKEELETEKTIYNERFERWKHEYYHDKLKFTTDSEEKVRDLAKDYVEGLQWVLYYYYRGCPSWSWYYPHHYAPRISDLAKGLDQDIEFDLSKPFTPFQQLMAVLPERSKNLIPPAFRPLMYDEQSPIHDFYPAEVQLDKNGKTADWEAVVLISFVDEKRLIEAMQPYLRKLSPEEKTRNQFGKDLIYSFNPQVDNLYKSPLGGIFSDIEHNHCVEKEYITIPLDSSEIRYGLLPNAKLGAEMLAGFPTLLSLPFTSSLEYNETMVFQQPSKQQSMVLQITDIYKTNNVTLEDFSKRHLNKVIYTRWPYLRESKLVSLTDGKTIYEYQESNDKKKFGFITKPAETQDKKLFNSLKNSMLRMYAKQKAVKIGPMEAIATVFPVTGLVRDSDGGYIKTFSPTPDYYPLQLVVESVVNEDERYKERGPIPIEEEFPLNSKVIFLGDYAYGGETTIDGYSSDRRLKITVEKKFLDSEPTIGKERLQMDHQAVKYYPSYIVSKNMHLHPLFLSKITSKFMITDATGKHINVGIPVKFEARHQKVLGYARRNPRGWEYSNLTLNLLKEYRQTFPDFFFRLSKVGNDIPVLEDLFPDTSTKDAMNLLDGIKQWLKYVSSKFIAVSLESDSLTKTSIAAVEDHIMKYAANIEGHERKQLAKVPREAVLNPRSSFALLRSQKFDLGDRVVYIQDSGKVPIFSKGTVVGYTTLSSSLSIQVLFDHEIVAGNNFGGRLRTNRGLGLDASFLLNITNRQFIYHSKASKKALEKKKQSNNRNNNTKTAHKTPSKQQSEEKLRKERAHDLLNFIKKDTNEKNSESVDNKSMGSQKDSKPAKKVLLKRPAQKSSENVQVDLANFEKAPLDNPTVAGSIFNAVANQYSDGIGSNLNIPTPPHPMNVVGGPIPGANDVADVGLPYNIPPGFMTHPNGLHPLHPHQMPYPNMNGMSIPPPAPHGFGQPISFPPPPPMTNVSDQGSRIVVNEKESQDLKKFINGKQHSNGSTIGGETKNSRKGEIKPSSGTNSTECQSPKSQSNAADRDNKKDEST

SEQ ID NO: 5282 - protein, 328 aa, Prochlorococcus marinus subsp. marinus str. CCMP1375
MTPIYEDNSLAIGNTPLVKLHSVTKNCKATVLAKIEGRNPAYSVKCRIGANMIWDAEKKGLLNKQQTIIEPTSGNTGIALAFTAAAKGYKLTLTMPESMSLERRRVMAVLGAELILTEAAKGMPGAIAKAKEIAESDPNKYFMPGQFDNPANPEIHFKTTGPEIWNDCNGNIDVLVAGVGTGGTITGVSKFLKQEKRKQVLSVAVEPSHSPVISQTINGQEVKPGPHKIQGIGAGFIPKNLDLSLVDQVEQVSNEESIAMALRLAKEEGLLVGISCGAAATAAIRLAEQEQFAGKTIVVVLPDLAERYLSSVMFAEVPTGIIEQPKTN

SEQ ID NO: 5283 - protein, 165 aa, Frankia sp. EAN1pec
MTEMDVNLIVNGERCRARVEPRKTLADLLREDLGLTGTHLGCEHGVCGSCTVLLDGLAVRSCLMFGVQADGSEVTSVEGLAGDPESLSLVQRAFQETHGLQCGFCTPGFVISVTAFLEDVPDPTDEQIRDGLSGNLCRCTGYQGIVHAVRLAARLRREERAETSG

SEQ ID NO: 5284 - protein, 284 aa, Oryza sativa
MAAWNTSILLPPPPPLLSRAAVATPALNPYPLRLHRRHPQKPLCLPSESYPADTDADASSASLDSRPRRIALFVEPSPFAYVSGYKNRFLNFIKYLREMGDEVIVITTHEGVPQEFYGAKLIGSWSFPCPWYQKVPLSLALSPRIIGEVARFKPDIIHASSPGIMVFGALIIAKLLCVPLVMSYHTHVPIYIPRYTFSWLVKPMWLIIKFLHRAADLTLVPSVAIGKDLQAARVTAANKIRLWNKGVDSESFHPRFRNDEMRARLTYVISSVLSCLFAVQMQWC

SEQ ID NO: 5285 - protein, 796 aa, Colwellia psychrerythraea 34H
MRSLIDVKKAVTNKVQTNTDKSVVNGQKNVGLGGVGRSKKHESADKQVAGEAIYVDDRPSLRGELHAAVGQSTMAHANIISMDLSAVKAATGVISVITVEDVPGHTDIGPVFPGDPVLAIGKVEFIGQPIFAVAATSFDLARKAVKLAKIEYQELEAVLTVKDALAKQNFVRPPFTMKRGDSDSAITAADHQLSGEILVGGQEHMYLEGQVSTAEPTEDGGMNIFTSSQHPSEVQKLVAEVLDIPLNKVLVDMRRMGGGFGGKETQAAPWACIAALLANVTKRPVKFKLARMDDMVMTGKRHPFENNYTVGFDKDGQIKGINIEVNGNCGYSPDLSDAIVDRAMFHSDNAYYLDQATVTGNRCKLNTVSHTAYRGFGGPQGMMTIEMVMDDIARHLGKDPLDIRKVNLYGTDDRNETHYHQKVEHNNLSEVIESLEESSDYQARRKAITEFNATSPILKKGIALTPVKFGISFTVQHLNQAGALVHVYTDGTIHLSHGGSEMGQGLNTKVAQIVAEEFQVDVDTVACSSARTDKVPNSSPTAASSGTDLNGKAAEAAAKAIKQRLIDFACEKYQVEAEQVQFENNNVIVGEQTFSFAEFSQIAYMGRVSLSSTGFYKTPKIHFDRATGKGRPFFYYATGAAVSEVIIDTLTGEYKTLRTDILQDVGHSINPAIDIGQIEGAFVQGMGWLTTEELVWNEQGRLLSNNPATYKIPAINDAPKDFRVALVPDAPNREHTIYNSKAVGEPPFMLGMAVWSALKDAIASVNDYKTNPKLDTPATPERVLFAVEAIKAVTAK

SEQ ID NO: 5286 - protein, 200 aa, Rickettsia prowazekii str. Madrid E
MSVFVGKTAPDFTAKAIMPNNNIDDKFKLSDYAAGDNIVLFFYPLDFTFVCPSEIIAFHNKLGEFTERRTKVIAVSVDSHFSHLAWKNTPHNKGGLGQVQFPMVSDITKDISSKYNVLNEDGIALRGTFLIDKDFIVRHMLVNDLPIGRDINYTLKVIDALTHHQKHGEVCPAGWHKGEEAITPSHEGIAHYLSSHAEKL

SEQ ID NO: 5287 - protein, 179 aa, Thermosynechococcus elongatus BP-1
MFLRSVLVALLSLILFLSPSAPSWALGGELPPLNAPAPDFSLPSSVNGQLISLKDYRGKWVVLYFYPKDFTSGCTLEAQRFQRDIEQFHAHNAEVIGVSADSVDSHQDFCDSEGLTFPLLSDPDGQVSKAYGSWLGFVSLRHSFIIDPEGILRERYRKVNPAIHSQEVLARLEELQQQG

SEQ ID NO: 5288 - protein, 153 aa, Magnetospirillum magnetotacticum MS-1
MTTALGTSAPDFIMECDDGKAALADYKGKVLVLYFYPKDDTSGCTSEAKAFRDAMPEYQAAGVEILGVSKDSVASHAKFRTKHSLPFRLGSDPEGTVCEAYGVWKKKSMYGREYMGIERSTFLIDQNGVLRAEWRKVKVTGHVDAVLKAAKEL

SEQ ID NO: 5289 - protein, 180 aa, Bacillus pumilus SAFR-032
MAERFVGKQAPRFEMEAVLANKEFGKVSLEENMKNDKWTVLFFYPMDFTFVCPTEITAMSDRYDEFEDLDAEIIGVSTDTIHTHLAWINTDRKDNGLGELKYPLAADTNHTVSREYGVLIEEEGIALRGLFIINPEGELQYQTVFHNNIGRDVDETLRVLQALQTGGLCPANWKPGQKTL

SEQ ID NO: 5290 - protein, 367 aa, Acidovorax sp. JS42
MQAKLKVMQVITKGERGGAQTHVRTLCQALASRIHFSAVIGGTGRSPLESDLHTLGLPIYHLPSLRNSLAPWHLFRSVLQLRALIREHEPDMLHAHSAVSGVVARLAGRLCRKPVIYTVHGFAFKPEVPPVRRTVAWCCEWLLARWTEHMVCVSQHERQLARGLPIRADRLTVVPNALENNSQRAQPGLEPVRVAMVARLAAPKRPDLLLHALVRLRDGLGHEVAASIIGDGPDRTALQALASGLGLFQVSFVGDVDDVPQRLAHHHLFVLLSDHEGLPISVIEAMRAGLPVVVSRLPGMAELLPSEQYGFLVSNDVEAIAQAMERLIRSPALREQMGRMARRHYEEHHAPERMASAILAIYTQVRA

SEQ ID NO: 5291 - protein, 381 aa, Synechococcus sp. RS9916
MKVAFFTETFLPKVDGIVTRLTKTVKHLVDAGDEVMVFCPEGCPDNYMGAKLVGVPAMPLPLYPELKLALPRPAVSDAIDAFQPDLIHVVNPAVLGLGGIWLAKTKGIPLVASYHTHLPKYLEHYGMGMLEPLLWEMLKAAHNQALLNLCTSTAMVKELSEKGIQHTDLWQRGVDTDLFRPELRSETMRQRLLGRHDDRGSLLLYVGRLSAEKQIERIKPVLEALPDTRLALVGDGPHRQQLEKHFEGTATTFVGYLAGEELASAYASGDAFLFPSSTETLGLVLLEAMAAGCPVVGANRGGIPDIISDGINGCLYEPDGADEGAASLINAARKLLGNDIERQGLRTAARSEAERWGWAGATEQLRGYYRQVLQKELSSVA

SEQ ID NO: 5292 - protein, 699 aa, Debaryomyces hansenii CBS767
MISYVVEDKHVEVFMFLADAIVHETTPENIEPFLDENFDKSKLEEYCQSFTKPSEVPGFRDCVKECVNCTPVSSSRTFVLLMNVLDSRVLAPILTGSITLIRDMGYKEREELLRSWQNSNLESFRRLFKLLYSLSITTFIKLCPDLHNQVIGYPGKEMRDEIYENIEIDPFRYLMLEHPTGDELYAPNIDVLIIGSGSGAGVVAHTLSNDGHKCLVLEKGKYFHPTELVFDEKDGNKNLYESRGVLTTVNQQTMILAGSTFGGGSTVNWSACLKTPFKVRKEWYDDYGVDWAANELYDKCADYVWNKMGATLDSVKHSFSNQVILNGAEKLGYTAKPVEQNNGNHPNHSCGFCHLGCKFNVKQGSSACWFRDASEKGCQFMDQVKVVKVLHSGGKAVGALCQDTQTGHEFTIKGPKKFVVCGGSLNTPVVLQNSGFKNKNIGANLKLHPVTVIFGDFGKDNNTKPFNESILTTVCTEVDDLDGKAHGAKIETVLHTPLLESVFMPWQSSDKARQDLLRYNHLAAMLIITRDKSSGTIRADATKPDSLIIDYSINKYDRNALLQAILVSADMLYVEGAKEIIHPQRWVPNFQSNKPKEERSVKDRDYVQWRESVSKTKLDTFGCPYGSAHQMSSCRISGKGPKYGACDNKGRLYECKNVYVADASAMPTASGANPMISTMSIARLIALGISKDLQPQARL

SEQ ID NO: 5293 - protein, 797 aa, Azotobacter vinelandii
MSELISHSQEELAALFRAELLTGVGRSVRHESAAKHASGAALYIDDRLEFPNQLHVYARLSERAHARIVRIDSTPCYAVPGVAIVITSADVPGKLDIGPVFPGDPLLADGSVQYLGQPVLAVAADSLENARRAALAALIEYEDLEPVLTVDEALRRRQFVLDSHSHRRGDAAAALAEAPHRLAGSLRIGGQEHFYLETQIASVLPTEDGGMLVHSSTQHPSEVQKLVAEVLGVPLNKVEVDMRRMGGGFGGKETQAAAPACLCAVIARLTGRPTKMRLPRNEDMRITGKRHPFQVEYEVGFDDDGRLHGVHIQLAANCGYSPDLSGAIVDRAMFHADNAYYLGDALVEGHRCKTNLASNTAFRGFGGPQGMLAIEEIMDAIARHLGKDPLAVRKLNYYGKTERNLTHYHQTVEHNLLEEMTAELEASCDYAARREEIRAFNARSPVLKKGLALTPVKFGISFTSSFLNQAGALVHVYTDGSIHLNHGGTEMGQGLNTKVAQVVAEVFQVDVSRIQISPANTGKVPNTSPTAASSGADLNGKAAKEAAQTIRQRLVDFAARHWQVGAEDVQFKNGQVRIRDRYLSFEELVQAAYLGQVSLSSTGFYRTPKIYYDRTQARGRPFYYYAFGMACAEVLVDTLTGEYRLLRADILHDVGASLNPAIDIGQVEGGFVQGMGWLTCEELVWDDKGRLLTAGPASYKIPTVADVPADLRVKLLENRRNPEDTVFHSKAVGEPPFMLGISVWCAIKDAVASLADYHLQPAIDAPATPERVLWGVEQMKKLQQPQGAVHEHAGEST

SEQ ID NO: 5294 - protein, 197 aa, Vibrio vulnificus YJ016
MPNLTNLKEIKNMINTTIKPFSATAYKDGKFVDITEQDVLGKWSVFFFYPADFTFVCPTELGDLADHYEELQSRGVEVFSVSTDTHFTHKAWHDSSDTIGKIKYFMVGDQTGNITNNFGVMRPGQGLADRATFVIDPQGVIQAVEITAEGIGRNAEDLLRKIKAAQYVAAHPGEVCPAKWKEGEQTLAPSLDLVGKI

SEQ ID NO: 5295 - protein, 209 aa, Brassica napus
QVSSDISNVKAKGELEDSFQPDVKVRCICGSSLETESMIQCEDPRCHVWEHVGCVIIPEKPMGGNPPLPDSFYCEICRLTRADPFWLTVAHPLFPVRLTATNIPTDGTNPMQSVDRTFQITRTDRDLLVKQEYDVQAWCMLLNDKVLFRMQWPQYADLQVNGVPLRAINRPGSQLLGANGRDDGPIITPCIRDGINKIPLSGCDSRSFR

SEQ ID NO: 5296 - protein, 496 aa, Azotobacter vinelandii
MCPTCATVESPEDAVIQFFLNRELRSERALDPNLTVLRYLREHLRRTGTKEGCGSGDCGACTVVVGELVEEDGRERLRYRSLNACLTFVAALHGKQLLVVEDLEQRGRLHAVQQAVVDRHASQCGFCTPGVVMSLFALQKNADGPDRERACEALAGNLCRCTGYRPILAAAEQACGAPEPDQFDAAEAETVAALKAIARGGTELAGNDRRCLLPASVDELAALYAAHPEARLFAGGTDLALEVTQQHRALPLTIHLGGIEELKRLTPGSEAIEIGAATPLADCQAALAAEYPDFGALLKRFASLQIRNQGTLGGNIGNASPIGDTPPLLIALGARLLLRKGGTSRTLALEDFFLDYKVTALEPGEFIEKILVPRARPGQAFRAYKLSKRLDDDISAVCAAFNLLIEDGRVREARIAFGGMAAIPRRATACERALLGQPFEAAVIERACTALAGDFDPLGDFRASREYRLLAAQNLLRKAFLELHAPALPTRVTDHV

SEQ ID NO: 5297 - protein, 154 aa, Castanea sativa
MALSLFGGRRSNVFDPFSLDIWDPFEGFSAVANVPPSARETTAFATARIDWKETPEAHIFKADLPGLKKEEVKVEVEDGNVLQISGERSKEHEEKNDKWHRVERSCGKFLRRFRLPENAKVEQVKANMENGVLTVIVPKEEQKKTEVKSIEISG

SEQ ID NO: 5298 - protein, 162 aa, Dehalococcoides sp. VS
MTLERWQPGWSLRPWRPFREVLSPGLWNMLTNERDWLPATEMLELKDKYLIKAEMPGINEEDIEVSVSDNVLTIKGEKKCTSEISEENYYFSERSYGSFSRSMTLPNNTSLQNIAATLDNGILEISIPKISEAKAKKVSVTKTAKSKKADINTKPAKPKTKS

SEQ ID NO: 5299 - protein, 365 aa, Cyanothece sp. PCC 8801
MANKILGQPLKRREDPALLTGQAQFIDDITLPNMLHMAILYSTEAHALIKNINTSIAEQMPGVVKVITGADTESILPLPCIMNPGGDRSKFPPHPYGVPGAQTVLAREKVRYVGEFVAVVVANTRQQAYDALAGIQVDYELLPVVINAEDALKTDAPQLHEAVPGNLNQYNSYGDKDATEQAIANAEIVVQQRICFPRLIHNAVETRGTIAAYDPQTEEYTLWTNTQIPHGNRFLLSQLVMGIPYNKLRVIVPEIGGSFGSKGYLYAETALTLFLAKALGRPIKWIDTRTGLARSTVHARGPIMYATIAGTKEGKITAFSSTIYGNLGAYPATNGPAAPTALTGRCVTGAYAIEHPFSYEIRLNG

SEQ ID NO: 5300 - protein, 344 aa, Ipomoea trifida
IERIPKEYIRPEEERPSIGDIFAEEKMDGGPQVPTVDLKGINSEDLEVREKCREELRKAAVDWGVMHLVNHGIPEELTGRVKAAGEGFFGQPIEEKEKYANDQAAGNVQGYGSKLANNASGQLEWEDYFFHCVFPEDKTDLSIWPKTPSDYIDATREYAKQLRALTTMVLAVLSQGLGLEEGRLEKEVGGMEELLLQMKINYYPKCPQPELALGVEAHTDVSALTFILHNMVPGLQLFYEGKWVTAKCVPDSIIMHVGDTVEILSNGKYKSILHRGVVNREKVRVSWAVFCEPPKEKIILQPLPETVSEADPPRFPPRTFAQHIKHKLFRLTDQEGADTPKPDE

SEQ ID NO: 5301 - protein, 696 aa, Mycobacterium sp. MCS
MTLLDPQAIGAPMARLDGRAKVTGAAPYAFEQRVDDPAYLHPIQSTIARGRVAAVDTDAARAIDGVLDVLTVFDAPELADTSDGELSILQDDRVHFRGQIIGGVVAETAEIARHAAGLVQVRYTEESHDVELTADHPGLYTPEQVNAGYPSDTDEGDVEAALASAEVTVDQTYSTPIEHNNPMEPHAAIAIWTADGVTMFDSTQGVHAARKALAPLFGLEPDQLRVIAPHVGGGFGSKGAPHAHDVLALLAAQRSGGRPVKLALTRQQMFALVGYRTPTIQRIRLGANQDGTLTALAHEVVEQTSAVKEYAEQTAVTSRKMYAAPNRRTAHRLAALDVPVPFWFRAPGECPGAYAAEVAMDELAAACGVDPIELRVRNDPEVDPETGNPWSGRHLVECLRLGAERFGWSSRDPVPAQRFSGDWYVGLGVASATYPAMQMPGNSARITYADEGRYLVQIGAADIGTGTWTTLTQIAADALGCDVAAVDLQIGDSALPEASVAGGSSGINSWGRAIVTAARQFRRDHGDPPAIGATTVAEAPENPESEKFTMQSFGAHFVEARVNRDTGEIRVPRMLGVFSIGRAINARTLRSQLIGGMTMGLSMALHEESVRDPRFGHVVTQDFATYHISAHADVADIDAIWLDEADEHANPMGSRGAGEIGIVGSAAAVVNAVYNATGVRVRDLPVTLDKVLSGLP

SEQ ID NO: 5302 - protein, 344 aa, Ipomoea trifida
IERIPKEYIRPEEERPSIGDIFAEEKMGGGPQVPTVDLKGINSEDLEVREKCREELRKAAVDWGVMHLVNHGIPEELTGRVKAAGEGFFGQPIEEKEKYANDQAAGNVQGYGSKLANNASGQLEWEDYFFHCVFPEDKTDLSIWPKTPSDYIAATREYAKQLRALTTTVLAVLSQGLGLEEGRLEKEVGGMEELLLQMKINYYPKCPQPELALGVEAHTDVSALTFILHNMVPGLQLFYEGKWVTAKCVPNSIIMHVGDTVEILSNGKYKSILHRGVVNREKVRVSWAVFCEPPKEKIILQPLPETVSEADPPRFPPRTFAQHIKHKLFRLTDQEGADTPKPDE

SEQ ID NO: 5303 - protein, 922 aa, Desulfotalea psychrophila LSv54
MVVTCKAMKHLGGIQFMIKLNLQVNGIAKSVVCDKDESLANVLRDNLGLTSVKIGCGTGQCGTCTIILDGKLVRSCTMKMKRMQNDAVITTVEGIGTPNHLHPIQVAWIAHSGAQCGFCTPGFIVSTYALIESNPNPSRDDVRDWFQKNRNACRCTGYKQLVDAVRDAAAVMRGDKDINDLYFKIPEDGRIWGTRYPRPSSVSKVTGTLDFGADLGLKMPAGTLQLALVQAEVSHAKILSIDTSEAEKMPGVEKIVTHKDVKGKNRITGLITFPTNKGDGWDRPILCDEKVFQYGDAIAIVCADTDKHAKAAAAKVKVELERLPEYMSAPAAMADDAIEIHPGTPNIYFEQHVAKGAETAPIFEAAAHVVEDDFYVGRQPHMPLEPDVGFAFMNDEGKLCIHTKSIGLHLHLYMIAPGLGVEPENIVMVQNATGGTFGYKFSPTMEALVGAACLATGKAVFLNYTWKQQQTYTGKRSPFFTNVRMAADNDGKLLGMETDWTVDHGPYSEFGDLLTLRGAQYIGAGYDIANIRGDGRCVATNHAWGSAFRGYGAPETEFPSEVLMDELAEKIGMDPFDLRYKNIYRKGSTTPTGQEPEVYSLPEIFDTMRPKYEAAKKRVAANSTDEIKRGVGISLGIYGSGLDGPDTAEIDVELNENGTVTVFACWHDHGQGADMGVLGTAHEALRPLGLTPDQIKLVMNDTSTCGNGGPAGGSRSQVIIGRAIKAGCDALVEAMRKTADTFSTYAEMVEAEKPVRYNGKWTAPATECDANGQGNPFACYMYGMFLAEMAVDMKTGKASAEKMTLIADVGKINNRLIVDGQMYGGLAQGIGLALTEDYEDIKKHSTMKGAGFPYIKDIPDDIEVEYIETARPEGPFGASGCGELPLTAPHAAIINGIYNACGVRITKLPALPEKILAGLQAK

SEQ ID NO: 5304 - protein, 173 aa, Mycobacterium sp. MCS
MTQPTGHREVTLEVDGRPHTLHLDNRVTLLDALREHLGVTAPKKGCDHGQCGSCTVLRDGRRVTTCLTFAVAADGAHITTAAGLGDGDDLHPVAQAFSDEDGFQCGYCTPGQICSAVGMLDEVKSGAPSFVSDDLEAVPELTDDEIRERMSGNLCRCAAYPNIVAAIERASVQ

SEQ ID NO: 5305 - protein, 365 aa, Gypsophila paniculata
MVADRPKTLTSLEGDNKLNPNFIRDEDERPKVAYNTFSNDIPVISLAGLDGENRAEICRKIVEACEDWGIFQVVDHGVGDDLIADMTRLAREFFALPPDEKLQYDMSGGKKGGFIVSSHLQGEVVQDWREIVTYFSYPITSRDYTRWPDKPDGWKKVTEEYSNKLMGLACRLLGVLSEAMGLESEALTKACVDMDQKIVVNYYPKCPQPDLTLGLKRHTDPGTITLLLQDQVGGLQATRDGGRTWITVQPISGAFVVNLGDHGHFLSNGRFKNADHQAVVNSECSRLSIATFQNPAPEATVYPLAIREGEKSIMEEPITFAEMYRRKMSKDLEAARLKRLAKEELVIKEMDKAKLETKSIEQILA

SEQ ID NO: 5306 - protein, 344 aa, Ipomoea trifida
IERIPKEYIRPEEERPSIGDIFAEEKMDGGPQVPTVDLKGINSEDLEVREKCREELRKAAVDWGVMHLVNHGIPEELTGRVKAAGEGFFGQPIEEKEKYANDQAAGNVQGYGSKLANNASGQLEWEDYFFHCVFPEDKTDLSIWPKTPSDYIDATREYAKHLRALTTTVLAVLSQGLGLEEGRLEKEVGGMEELLLQMKINYYPKCPQPELALGVEAHTDVSALTFILHNMVPGLQLFYEGKWVTAKCVPNSIIMHVGDTVEILSNGKYKSILHRGVVNREKVRVSWAVFCEPPKEKIILQPLPETVSEADPPRFPPRTFAQHIKHKLFRLTDQEGADTPKPDE

SEQ ID NO: 5307 - protein, 198 aa, Helicobacter pylori
MLVTKLAPDFKAPAVLGNNEVDEHFELSKNLGKNGAILFFWPKDFTFVCPTEIIAFDKRVKDFHEKGFNVIGVSIDSEQVHFAWKNTPVEKGGIGQVSFPVVADITKSISRDYDVLFEEAIALRGAFLIDKNMKVRHAVINDLPLGRNADEMLRMVDALLHFEEHGEVCPAGWRKGDKGMKATHQGVAEYLKENSIKL

SEQ ID NO: 5308 - protein, 380 aa, Staphylococcus aureus subsp. aureus MRSA252
MKIGITCYPSMGGSGIIATELGIKLAERGHEVHFITSNIPFRIRKPLPNMIFHQVEVNQYAVFQYPPYDITLSTKIAEVIKEYDLDLLHMHYAVPHAICGILAREMSGKDIKIMTTLHGTDITVLGYDHSLQGAIKFGIEKSDIVTSVSKSLAQETHEIIETNKEIIPIYNFVRENEFPTKHNTALKSQFGIAPDEKVLIHVSNFRQVKRIDTIIETFAKVREKIPSKLILLGDGPELVPMRQKTKELNVEEDVLFLGKQDCVSEFYQLSDLVLLLSEKESFGLTLLEAMKTGVVPIGSNAGGIKEVIKHGETGFVVDVGDSDSASDYAIRLLEDKVLYNKLQKNMLADIAERFGSELITDQYEYYYQKMLNEHNKSKGE

SEQ ID NO: 5309 - protein, 344 aa, Ipomoea trifida
IERIPKEYIRPEEERPSIGDIFAEEKMGGGPQVPTVDLKGINSEDLEVREKCREELRKAAVDWGVMHLVNHGIPEELTGRVKAAGEGFFGQPIEEKEKYANDQAAGNVQGYGSKLANNASGQLEWEDYFFHCVFPEDKTDLSIWPKTPSDYIDATREYAKQVRALTTTVLAVLSLGLGLEEGRLEKEVGGMEELLLQMKINYYPKCPQPELALGVEAHTDVSALTFILHNMVPGLQLLYEGKWVTAKCVPNSIIMHVGDTVEILSNGKYKSILHRGVVNREKVRVSWAVFCEPPKEKIILQPLPETVSEADPPRFPPRTFAQHIKHKLFRLTDQEGADTPKPDE

SEQ ID NO: 5310 - protein, 196 aa, Oryza sativa
MSQTQIGRPAPDFKGVAVVDGAFKEISLSDYKGKYLVIFFYPLDFTFVCPTEIIAFSDRVEEFRSIGCEVVTASTDSEFSHLAWVNTPRKQGGLGKMNIPILADKTHDISRRYGVLKEDEGIAFRGLFIIDDKGNLRQITINDLPVGRSVDETLRLVQAFQFTDKHGEVCPANWKPGKKTMKADPSESKEYFDSVN

SEQ ID NO: 5311 - protein, 212 aa, Pseudomonas aeruginosa UCBPP-PA14
MSLRLGDIAPDFEQDSSEGRIRLHEWLGDSWGVLFSHPADFTPVCTTELGFTAKLKDQFAQRGVKVLALSVDPVDSHLKWIDDINETQDTRVNFPIIADADRKVSELYDLIHPNANDTLTVRSLFIIDPNKKVRLIITYPASTGRNFNEILRVIDSLQLTDEHKVATPANWEDGDEVVIVPSLKDEEEIKRRFPKGYRAVKPYLRLTPQPNR

SEQ ID NO: 5312 - protein, 318 aa, Corynebacterium glutamicum ATCC 13032
MIGAPPDMGNVYNNITETIGHTPLVKLNKLTEGLDATVLVKLESFNPANSVKDRIGLAIVEDAEKSGALKPGGTIVEATSGNTGIALAMVGAARGYNVVLTMPETMSNERRVLLRAYGAEIVLTPGAAGMQGAKDKADEIVAERENAVLARQFENEANPRVHRDTTAKEILEDTDGNVDIFVASFGTGGTVTGVGQVLKENNADVQVYTVEPEASPLLTAGKAGPHKIQGIGANFIPEVLDRKVLDDVLTVSNEDAIAFSRKLATEEGILGGISTGANIKAALDLAAKPENAGKTIVTVVTDFGERYVSTVLYEDIRD

SEQ ID NO: 5313 - protein, 303 aa, Streptococcus thermophilus LMG 18311
MLIHSISELIGHTPLIDLQINIPNHSHIYAKLEMFNPGGSIKDRLGQYMIQDAINRGQVTEGVTTIIEPTAGNTGIGIALAAQQHHLPTILVVPEKFSFEKQQLMKALGAKIINTPSDQGIKGAIEKAEALHNQTPNSFVPMQFKNPANPDTYYHTLAQELLDDLNDPIDAFVAGAGSGGTFAGVARYLKEHNPATQTIVVEPEGSILNGGPAHPHRTEGIGVEFVPPFFKDVQIDKTLTIADADAFHQVKELAKKQGLFIGSSSGAALAASLKVAKALPENSTIVTIFPDSSERYMSENIYD

SEQ ID NO: 5314 - protein, 243 aa, Candida albicans SC5314
MRDKKQTKKKKSFFFATHTTMSQQPHLRLGSTAPDFKADTTNGPISFHEYIGDSWAILFSHPAAHTSVCSTELSAFARLEPEFTKRGVKLLAISADPVEANSDWIDDMEDFSGSRVKFPIIADPERKVATLYDMIDHQDATNLDDKGLQLTIRAVFIIDPSKKIRLIMTYPASTGRNTAEVLRVLDSLQLVDKQKVITPINWVPGDDVLVHMGVPDDEARVLFPKYRAIKPYIRLTPLEKEDK

SEQ ID NO: 5315 - protein, 145 aa, Thermosynechococcus elongatus BP-1
MALAVGTPAPPFTAKDTQGNTISLSDFAGKTVVLYFYPKDDTPGCTKEACSFRDNYAAYQGKNIVVLGVSADDETSHQKFTAKFNLPFPLLADVDRSIIKAYDVDGGGYAKRVTYVIDGNGIISHVYTSVKTDTHATDILADLGL

SEQ ID NO: 5316 - protein, 204 aa, Wolbachia endosymbiont strain TRS of Brugia malayi
MNRLIMNLVTKSAINFTAPAVLPNGEIVDDFCLSEHIKGKYAILLFYPLDFTFVCPTELISLNNRISEFAKRDVEVIGISVDSKFSHYQWRKTSVSNGGIGEISYTLVSDIKKSISRDYGVLYDDSIALRATFVIDDKFIVRHQSINDMPLGRNMDEFIRIVDAIKHNEEHGEVCPAGWKKGKPAMQASDEGVTDYLNSYSEEL

SEQ ID NO: 5317 - protein, 169 aa, Bradyrhizobium sp. BTAi1
MSPPRESVAPLTKPAPLSVTLRINGERRTLSVAPWTTLLDLLRNHLDLTGTKKGCDHGQCGACTVLIDGRRALSCLALAVMKDGAEITTIEGLAKGDELHPLQQAFIDHDAFQCGYCTPGQICSAAGLIAEGRANSKDEIRELMSGNICRCGAYPNIISAIEQAMGGGR

SEQ ID NO: 5318 - protein, 305 aa, Halobacillus halophilus
MSYVRNVQSLIGHTPMIELTHSDIPNQARIFAKLEFMNPGGSIKDRLGLKLIEDALNRGLLKPGGTIIEATAGNTGIGVALAAVGKGYRVVFVTPEKFSQEKQTLMRALGAEVINTPTEEGMRGAIKKADELVNDIPDSFNLQQFNNQANPDAYYETLGPEIHTDLNGEIDIFLAGAGTGGTFMGTSRYLKEQNPAIKTVIVEPEGSVINGGKAGPHDTEGIGMEFLPFYMDTSYFDAIHTIPDSIAFQRVKELALNEGLLVASSSGAAFEAALREAEQAEPGARIVTVFPDSSERYLSQGIYEE

SEQ ID NO: 5319 - protein, 461 aa, Rhodococcus erythropolis
MRIAEHVVDLIGNTPLVKLTSVTGENFGTVAAKVEYLNPGGSSKDRIAVKMIDAAEASGELKPGGTIVEPTSGNTGIGLALVAQKRGYKCVFVCPDKVSEDKRNVLRAYGAEVVVCPTAVAPDNPNSYYSVSDRLTREIPGAWKPNQYSNPGGPESHYETTGPEIWADTDGKITHFVAGVGTGGTITGTGRYLKEVSGGKVKVIGADPEGSVYSGGTGRPYLVEGVGEDFWPSAYDPSIPDEIIAVSDADSFEMTRRLAREEGLLVGGSCGMAVVAALEVAKREGPDALIVVLLPDGGRGYLSKIFNDQWMASYGFLRTPLDGKTNVPTVGDVLRGKSGELPDLVHTHPSETLRDAIEILREYGVSQMPVVGAEPPVMAGEVAGSVSERDLLSAVFEGRAHLADSVEKHMSKPFPLIGSGEPVSAATKALGDTDALMVVDDGKPVGVITRHDLLGFLSSDS

SEQ ID NO: 5320 - protein, 513 aa, Zea mays
MHSQPNIHVLLLWFSKTDYSLENLMIDPYLNILGIATCVSVDSICLNNYSLENLMIDPYFNRITSLLHNCSEDVNELDVKPDGSWRVMGDAATRDLSQWHMPDGTLCDSKEDTNPGVASVNEFKREGASDEHRTLKLGIKKNPIGLWQVSSKADDMKPVVRNHIQNNTGFSTPNIVPMISSPTGSYRDGEDVSVNQEGGGIQFDISLNQEFDSFAHNFGQTYNTEDRPQHPHHNAADVIVLSDSDEENDPTVQPPAVYENTPTNDDSFPFVTDAAGSGYPERYQEDASVGTSGLGLLRQNTGEFEINNWQMLSYPQPEQGFQFFVTDTDVGNPFVAPHNSFTIAPEDYSLGCNVGIEDPSAAHDVSICRNSNDVHGSLVDNPLALTGDDPSLQIFLPSQPSTVPLQQELSERSDTPNGVHPNDWRISLTLAAGGGGNEESTSVGGLKSQPKVSSKEAGVEPLLDAASALGSMNNDRCTGSNLNPKRIENIFSHPRQPRSVRPRLCLSLDTDSE

SEQ ID NO: 5321 - protein, 157 aa, Haloarcula marismortui ATCC 43049
MVSTGDTAPDISATIANGEVEDFELSDHLGDGPVVLAFFPGAFTPPCSNEMVALQEHLGDFHDAGATVLGLSADSAFSLNSFRDEHGLEFDLLSDMGRSAIQDYGLEIDIEDLGLLGVANRAVFVVDDDGEVAYSWVADDPTNEPDYDELLDAAESA

SEQ ID NO: 5322 - protein, 351 aa, Bradyrhizobium sp. BTAi1
MRILIATDAWHPQVNGVVRTLTSLSRAAAGLGADITFLTPEGFPSFGVPTYPGLRLAIPKFSEIARRIEAAAPDAIHIATEGTIGWAVRRYCLRHGLPFTTSYTTRFPEYVSVRTGIPDAVGYWVMRRFHDAAAMTMVATNSLKQDLASRGFKKLGFWTRGVDTKLFNPDEPAALDLPRPVFMTVGRVAVEKNLEAFLSLDLPGSKVVVGGGPQKAELERRFPKAHFLGEKTGKDLTGHMAAADVFVFPSLTDTFGVVQLESLACGTPVAAFPVTGPLDVIADHPIGAIDWDLRAACLKALTMSRETCRAFALDRSWENSARQFIGNLAVLQPSRAVRPTPVLVGQSAVRG

SEQ ID NO: 5323 - protein, 394 aa, Frankia sp. CcI3
MKIVQAANFVAPASGGIRTTLRHLAAGYTAAGHEVVQIIPGEQDAELVRPDARVLQLRAPRLPGTGYRIITEPWRVADLLDRERPDRLEVHDRATLRPLARWARRRGVPSLVVSHERLDRLLGTWTPAPLRGVLPVSTAADRANASLAAAFDSVVATTAWAAAEFVRIGAGNLRHVPLGVELDRFSSAHHDLTLRRAFARDQEALLVVASRLAPEKRVDLAVDAAAELVRRRVPARLVIAGDGAHRGRLERHAAGLPVTFLGFVADRERLAGLLATADLALAPGPVETFGLAALEALASGTPAVVHHASALAELIVPGVGTIAAGSGFTFADAVVDLLSASPAQIHARRIAARARAEQFPWSATVAGFLACHDSPGPAAPGTAFPQPPAPPLAA

SEQ ID NO: 5324 - protein, 175 aa, Oceanobacter sp. RED65
MITFSLNGQSIEVDAAPDTPLLWVVRDHLKMKGTKFGCGMGLCGACSMLIDGNSSRTCITPISSVAGKDVVTIEGIGDQQTLSILQEAWVEAGVPQCGYCQSGQIISATALLKQNPNPSDDDINNAMSGNICRCGTYPNIKKAIKQAASSLKQGKGQLQAVRIFDPQSNSQGVQA

SEQ ID NO: 5325 - protein, 426 aa, Frankia sp. CcI3
MPCHRARVRIAVITESFLPHVDGVTNTVCRVLEHLRDRQHEAMVIAPAPAPAARRAAARSHAGAPVLWAPSAPLPGYPAFRFAVPWPGLPAALREFNPDIVHLAAPAGLGAQAVFAARRLGIPSIAVYQTDIAAFAARYGLATAERTIWHWLAIVHRLAARTLAPSWDAVDTLLSQGVQRVARWSRGVDLERFHPAHRDDELRRRLAPNGEVLVGYVGRLAREKRVELLGAVSDIPNTRLVVVGDGPSRPTLARSMPNAAFLGFRAGQELSAAVASLDVFVHTGIHETFCQAAQEAKASGVPVVAPAAGGLLDVVEHGRTGLHYTPGDPAALRAQVAALTDDLPRRVAMGAAARESVAGCGWSAIGDELLGHYRDVLGTGGGAGRFGRLRHPGPVIEGRSGRRGGRRDGWDARKRPGTGNDDGWSA

SEQ ID NO: 5326 - protein, 188 aa, Taiwanofungus camphoratus
MVAIVQKPAPGFKATAVVDGQFQDISLSDYFGQWVVLFFYPLDFTFVCPTEILAFNDALPQFKELNTTVLSVSTDSHYAHLAWATQDRKQGGLGPNLKLPMIADKNTQISRDYGVLIEEEGVALRGLFLIDPKGTLRQITINDLPVGRSVDETIRLIKAFQFTVCRSTVISIDINTGSHTDRLKGRTW

SEQ ID NO: 5327 - protein, 355 aa, Gerbera hybrid cultivar
MVIQATTRVESLSTSGIHQIPKEYIRPQEELRSITNIFDEETNKQKPQVPTVDLTDIESDDPEKRHKCSEELKKAAMEWGVMHVVNHGVSGDLIGRVKAAGEGFFGLPVEEKEKYGNDPDGGRIQGYGSKLANNASGQLEWEDYFFHLVFPEEKRDLTIWPTTPSDYTDATTEYAKQLRALATKILSALSLGLGLEEGRLEKEVGGIEELILQLKINYYPKCPQPELALGVEAHTDVSALTFILHNMVPGLQLIYDGQWVSAQCVPDSIILRIGDTLEILSNGKYKSILHRGLVNKEKVRISWAVFCEPPKEKIVLKPLPETVSEAEPPLFPPRTFQQHMEHKLFRKNKDEVMQN

SEQ ID NO: 5328 - protein, 428 aa, Chlamydomonas reinhardtii
YVTVDEEAGRALFYVLAEAGAGAATKPLLLWLNGGPGCSSLGGGFMTELGPFYPQPGGRSLEANPHAWNAFASVLWIESPAFVGFSYSNSSADAIVGDARTAADSRQFLLGFLERFPRFRDTPFYISGESYAGHYVPNLAADIVDGNKAAAATGEPRINLQGFLVGNPWTDAAIDNLGAVDYWWSHALVSDQTAQGIRANCNFTRIGERHPSTTAAARARDGKRWAFDELGNINIYEIYADMCTEPRAGGGWRPNGGSAATAVSAGPLGASGDGADPGYDPCVDDEAEAYLNLPEVQAALHANQTVKLPWRWTDCTRSIVYSREDLLASMLPTYQKLLTAGLRMLVFSGDVDGIVPVVGTRRWVASLRLKEKSPWRPWTAGGQVGGYVVEYAQGLTFATVRGAGHMVPYVQPARAAKLARSFLEGKPL

SEQ ID NO: 5329 - protein, 187 aa, Bacillus cereus ATCC 14579
MLLIGTEVKPFKANAYHNGEFIQVTDESLKGKWSVVCFYPADFTFVCPTELEDLQNQYATLKDLGVEVYSVSTDTHFTHKAWHDSSETIGKIEYIMIGDPTRTITTNFNVLMEEEGLAARGTFIIDPDGVIQSMEINADGIGRDASILVNKIKAAQYVRNNPGEVCPAKWQEGSATLKPSLDLVGKI

SEQ ID NO: 5330 - protein, 180 aa, Cupriavidus taiwanensis
MALEDPLAPPAAEAGALQQIPTTLHINGITHELLLAPWVILLDLLREQLQLTGTKKGCDHGQCGACTVLIGGKRMKSCLCLAVSYDGADITTVEGLADRDSGVLHPLQQAFIDHDAFQCGYCTPGQLCSAVGLLNEHPPASRQEIRERMSGNLCRCGAYAQIVAAIAEVARLPDSDQEPS

SEQ ID NO: 5331 - protein, 320 aa, Nostoc punctiforme PCC 73102
MRIARNITELVGRTPLVQLNRIPQTEGCVAEIVVKLESLNPSASVKDRIGVSMINAAEEEALITPEKTILVEPTSGNTGIALAMTAAAKGYRLILTMPETMSGERRAMLRAYGAELELTPGMEGMSGAIRRAQQIVNSTPNTYMLQQFRNPANAKVHRETTALEIWEDTDGQVDIVVAGVGTGGTITGVAEVIKARKPSSKAIAVEPANSPVLSGGQPGPHKIQGIGAGFIPQVLKLKLIDEVITITDEEAITYSRRLAKEEGLLSGISSGAALCAAIRVAQREENKERLIVMIQPSFGERYLSTPLFQDLEARLPASVG

SEQ ID NO: 5332 - protein, 351 aa, Rhodopseudomonas palustris CGA009
MRILIATDAWHPQVNGVVRTLTMMAEAAKSLGVDVVFLTPETFPTVALPSYPDLRVAIPNPIRVAHLINAAHADCIHIATEGPIGLAARRYCRKRGLRFTTSFHTRFPEYVSARAPIPESWVWSLLRRFHGASHAVMAATPALADELRGRGFRNVVLWPRGVDGHLFHPREDADLGLPRPVFLSVGRVAVEKNLEAFLSLDLPGSKVVVGDGPARAALERDFPNAVFLGAKQGEALAKVYSAADVFVFPSKTDTYGLVLLEALASGVPVAAFPVTGPRDVIGDSPVGVLSEDLRAACLGALEISREACLEFAADHTWEASAHAFIDNVRRVSMLEPARLDPHAAKPHRLVA

SEQ ID NO: 5333 - protein, 465 aa, Rhodopseudomonas palustris CGA009
MSLARLATPKDRTPKGLIDLIGNTPLVQLTRLDAGPCRLFAKLEGQNPGGSIKDRPALAMIEAFERSGELRPGGTLVEATAGNTGLGLALIAALKGYRLVLVIPDKMSREKVLHLKAMGAEVVMTRSDVGKGHPAYYQDLAQKITSETPGAVFVNQFANPANPLAHEYGTAPEIWEQMDRRVDAVVCGIGSGGTLTGIARFFQRASPSTEIILADPKGSVLVDVVEGREPGPVGSWLVEGIGEDFVPSNAELKLVTRGYTVTDAESFHAARELLRREGILAGSSSGTLLAAALRYCREQTRPKRVVTLLPDGGNKYLSKMFNDTWMADQGFVPRRHDGDLRDLIVRRHDEGASITVAPEDTLNFAYSRMKLYEVSQLPVLVDDRVVGIIDESDLLMATIGDPAKFAEPVHSAMSKRVETVEASAPFESLMPVFDRGLVVVVVDGSRFLGLITRIDLINHLRSKVH

SEQ ID NO: 5334 - protein, 344 aa, Ipomoea trifida
IERIPKEYIRPEEERPSIGDIFAEEKMGGGPQVPTVDLKGINSEDLEVREKCREELRKAAVDWGVMHLVNHGIPEELTARVKAAGEGFFGQPIEEKEKYANDQAAGNVQGYGSKLANNASGQLEWEDYFFHCVFPEDKTDLSIWPKTPSDYIDATREYAKQLRALTTTVLAVLSLGLGLEEGRLEKEVGGMEELLLQMKINYYPKCPQPELALGVEAHTDVSALTFILHNMVPGLQLFYEGKWVTAKCVPNSIIMHVGDTVEILSNGKYKSILHRGVVNREKVRVSWAVFCEPPKEKIILQPLPETVSEADPPRFPPRTFAQHIKHKLFRLTDQEGADTPKPDE

SEQ ID NO: 5335 - protein, 356 aa, Synechococcus sp. PCC 7335
MTNLKGLNIVMVGASLEQNGGIATVEKLILENISEIEIQHITSHDEGTITHRILVFSRAASQLALLLFRGKVDLVHIHLSDGGSLLRKALIASIVRWFRKPVIVHAHGAEFHTTYFQLPHRLQRLLGIVFRQCSSFIVLSNTWKEFYMSQLGLKEKQMVVLPNPTKLPLEIPDRSQSPLVRFVFLGRVGARKGTFDLIKAFSKLSADAQAQAQLLIAGDGDLVQAKELVAQLEISDRVTLLGWIGAQQRETLLSDADVFVLPSYNEGLPMALLEAMGWGLPTIVTPVGGIPEVIQSEQNGLLINAGDVTRLTAAMQTLVDHPQQRLELGKAARSTASLYDIHVYCDRLSALYAALV

SEQ ID NO: 5336 - protein, 344 aa, Ipomoea trifida
IERIPKEYIRPEEERPSIGDIFAEEKMGGGPQVPTVDLKGINSEDLEVREKCREELRKAAVDWGVMHLVNHGIPEELTARVKAAGEGFFGQPIEEKEKYANDQAAGNVQGYGSKLANNASGQLEWEDYFFHCVFPEDKTDLSIWPKTPSDYIDATREYAKQLRALTTTVLAVLSQGLGLEEGRLEKEVGGMEELLLQMKINYYPKCPQPELALGVEAHTDVSALTFILHNMVPGLQLFYEGKWVTAKCVPNSIIMHVGDTVEILSNGKYKSILHRGVVNREKVRVSWAVFCEPPKEKIILQPLPETVSEADPPRFPPRTFAQHIKHKLFRQTDQEAADTPKPDE

SEQ ID NO: 5337 - protein, 327 aa, Pisum sativum
MVLLSKPTSEQYTYVRNNMPITFSSSIPLVDLSKPDAKTLIVKACEDFGFFKVINHGIPLDAISQLESEAFKFFSLPQTEKEKAGPANPFGYGNKRIGLNGDIGWIEYLLLTTNQDHNFSLYGEDIDKFRGLLKDYKCAMRNMACEILDLMAEGLKIQPKNVFSKLVMDKQSDCLFRVNHYPACPELAINGENLIGFGEHTDPQIISILRSNNTSGFQISLRDGSWISVPPDHSSFFINVGDSLQVMTNGRFKSVRHRVLANGIDPRLSMIYFCGPPLSEKIAPLPSLMKGKESLYKEFTWFEYKSSTYGSRLADNRLGNYERIAAT

SEQ ID NO: 5338 - protein, 791 aa, Frankia sp. EAN1pec
MGMTGRARGVGGSVLRPDGSAKAGGTFVYAGDLSAPGMLHARTLRSPHPRARIRRVDTAAALRIPGVAAVVTAVDVPGVATYGLIVADQPVFAATETRYAGEPVAAVAAVDAPTARRALAAVEVEYEPLPPLVDPEVAAGPGAEPLHPDGNVFREITLRHGDPDAAGPVVVEDSYLVGMQDQAFLAPEAALVVPAADGGVDMWLATQWLHSDREQIAACLGLPEELVRLELAGVGGAFGGREDVTLQVHGALLARATGTPVRIAYDRVESFLGHPHRHPARMWFRHTATAAGDLVSVHARIIMDGGAYASSSPAVIANAVTHAAGPYRVPNARLDGLVVRTNNPPCGAMRGFGVPQVTIGHEAQMDRLADRLRMDPVELRVRNALRPGDVLPTGQVLGPPLPAREAIEAVAARPLPAALTAASPVTARPGGRGAHADLARVRRGVGYALAYKNLLFSEGFDDSSTARARLELDADGRPVATIHSACAEVGQGFVTVAGQIARTELGVDEVVLRPADTGVGSAGSTSASRQTWMSGGAVRGACVAVVDRLLARVARRLGLPPEVVEAPRRALVITGGEIVGAETGTRLTLAEALAEGPVEAEHTFHHRRTTALDAHGQGDPHVAFAAAAHRAVVDVDLDLGLVRVVSMALAQDCGTVLNPLSLRGQVEGGTAQGLGLAVMEELVTVDGVVTNPTLHDYLLPTAADVPALDFVALTYPQPDAPYGVKGVGETPTCTATAAVLAAVRAAVGRDLRRVPVRPVDLVDLADPVDPLGGAPYLGNKAARGDGTRMSG

SEQ ID NO: 5339 - protein, 344 aa, Ipomoea trifida
IERIPKEYIRPEEERPSIGDIFEEEKMGGGPQVPTVDLKGINSEDLEVREKCREELRKAAVDWGVMHLVNHGIPEELTGRVKAAGEGFFGQPIEEKEKYANDQAAGNVQGYGSKLANNASGQLEWEDYFFHCVFPEDKTDLSIWPKTPSDYIAATREYAEQLRALTTTVLAVLSQGLGLEEGRLEKEVGGMEELLLQMKINYYPKCPEPELALGVEAHTDVSALTFILHNMVPGLQLFYEGKWVTAKCVPNSIIMHVGDTVEILSNGKYKSILHRGVVNREKVRVSWAVFCEPPKEKIILQPLPETVSEADPPRFPPRTFAQHIKHKLFRQTDQEGADTPKPDE

SEQ ID NO: 5340 - protein, 337 aa, Zymomonas mobilis subsp. mobilis ZM4
MNIASSSVPKKAENILSMIGNTSLVRLKGPSELTGCNIYAKCEFTNPGGSIKDRAALSIIEDAEEQGIIEPGGVIVEGTTGNTGIGLTLVGAAKGYHTIIVMPETQSSEKIATLQALGAELVLVPETSYSNSAHYVHMSRRLAQETDNAIWANQFDNLANRMAHIKTTSQEIWAQTEGHIDGFICAAGTGGTFAGTGLGLKEHNPDIVVALADPYGAALYNYYTSGELRAEGHSIAEGIGQSRITGNLDGAPVDNQFLISDQEGLAQIYQLLQKEGLSVGLSSGINIAGAIKLAKELGPGKTIVTILADSGLRYLSTLYNRHWLIAHDLPVPEWLAK

SEQ ID NO: 5341 - protein, 760 aa, Bacillus halodurans C-125
MRLTRHECGKRWRIRPDGKEKITGQLSYLTDRTLPDMLYGKVLRSKYPHGKLQNIDCSEALALPGVVAVITHKDVPGLNGYGISEPDHPVFCHEYVRYTGDAIAAVAAETKAVAEQALSLIHVDYEPLPVLDTPEKALAPDAPMLHPKGNILHKTAYKKGDVKQAFLDCAYIVEETYITPRQMHTYLETEGGLFVPGTDGRLTVYSATQHGYKDRMQLSRILGMAEENIRVISSPIGGSFGGKDELNVQPYGALLALHTGRPVNIHHSRRESVKAGIKRHPMTIRMKTGTDKEGRLLAHEVNILSDTGAYSTLGGPVLNFATEHAVGPYQFPHVEINGKAVFTNNGVSGEFRGFGGNQVIFAVEGQLDRLAEKMNIDPWELRRRNLKQTMEVGPLGQRMAPTTGAIDVWQAIKRSKLWSKKGSAENQQTPWLRRGVGMSLAMHGFGLGYGIPDPAGGRLRLNEEGKIEVAFGHEEFGQGLLGTIELMLQDLFHCEREDLKIVIGDTDCVPVSGSSTASRSTSMAWQTLQRLQAPFVEALLKKAATVSGWTPDQLRTGPGGIWTTVGQPKRVVTYQELIFDGTEDFTFETSFHFPVTPDPVVGGHYLYGFTAVMAEVEVNVLTGHVRVTHVDHEVAAGPVMNPMGYLGQIEGGSIMALGFTLTEDAMMVDGNYTTNNLDTYLIPTIMDVPEEQGVGAIESLVPGDEYGPRGVGEIGSVALAPAIASAVHQATGKWRSRLPLEPEALLEKHPLLELHSKGGV

SEQ ID NO: 5342 - protein, 170 aa, Frankia sp. EAN1pec
MPGHLGGERRLSYHLSIDGSRRAVTGARLEESLLTVLRERLDVTSVKDACEQGRCGACSVLLDGRLVTACTVLAADAADARVVTVAGLGPGGPAAAVRAAFVAHGAVQCGFCTPGLVVAVTDLLARRPGADEDEIQETLAGNICRCTGYGRILAAVRAVQAGRGGPPGWA

SEQ ID NO: 5343 - protein, 167 aa, Bacillus halodurans C-125
MSSDVKPIVPGRAEKAPTNFFLNGVETKLTHDPAKRLIDLLRDDLTLTGTKRSCEIGRCGGCMVLVDGKAHNACLMMAYQCEGKEVVTIEGIAENELDPIQKAFLEEGGFQCGYCTPGMVVSLKAVFMEHEKPTFEQMKQGLSGNLCRCTGYGGIIRVLKHLCDGCE

SEQ ID NO: 5344 - protein, 151 aa, Pseudomonas putida KT2440
MELRINQKTYQVEADADTPLLWVIRDDLGLTGTKYGCGLAQCGACSVLVDGNVVRACVTPVAGVVGREVTTIEAIEADPVGKRVVAAWVEHQVAQCGYCQSGQVMAATALLKHTPKPSDAQIDAAMVNLCRCGTYNAIHAAVHDLAQGEQA

SEQ ID NO: 5345 - protein, 174 aa, Erythrobacter sp. SD-21
MKEASLAEPITVNGTPQPIPDDPRVTLLDFLRHDLGLTGTKKGCDHGQCGACTVIVNGIRINSCLTLAAMHEGDSVTTIEGLGTPDEPSPLQRAFLEHDGFQCGYCTPGQICSATALLQELAENWPSDASEKLEGSIAITSEEIRERMSGNLCRCGAYANIVAAIEEIAAGETA

SEQ ID NO: 5346 - protein, 186 aa, Salmonella typhimurium
SLINTKIKPFKNQAFKNGEFIEVTEKDTEGRWSVFFFYPADFTFVCPTELGDVADHYEELQKLGVDVYSVSTDTHFTHKAWHSSSETIAKIKYAMIGDPTGALTRNFDNMREDEGLADRATFVVDPQGIIQAIEVTAEGIGRDASDLLRKIKAAQYVAAHPGEVCPAKWKEGEATLAPSLDLVGKI

SEQ ID NO: 5347 - protein, 225 aa, Glycine max
  misc_feature (47)..(47): Xaa can be any naturally occurring amino acid
  misc_feature (72)..(72): Xaa can be any naturally occurring amino acid
  misc_feature (179)..(179): Xaa can be any naturally occurring amino acid
MDLVPSVKEKLNYFRIKELKDVLTQLHLSKQGKMIWYLTIRSGLSRXIVLHICCNLLSLTLLSFIHILVFPXCRKMQISGATDLASKGQGASDSSSVKVKSEFDDAFQPDVKIRCLCGSRLETENLVKCDDARCHVWQHISCVIIPEKPTEGIPLVPDKFYCELCRLTRADPFWVSVAXPLHPVKLTTTSNPTDGNNPVQSVERTFQLTRADKDLVSKPEFDVEA

SEQ ID NO: 5348 - protein, 426 aa, Microcoleus chthonoplastes PCC 7420
MKNQIKVLLLIEQCNPAWQSVPLEGYKYFQEISKLVDVTLVTHDRNKEYLKFDNTEIVCIEEMHLFKAYYSLVEGLVYKHKVNWPLYNSLTYPIYAEFNHKVYHKFKSKILNGDYDIVHAITPMIPRYPYKIVKACHSTPFLLGPVNGGITFPPGFREKAREEFAYLNFLRAIGRFLIPGYRETYKKADRILAGSTYTLNLLKRLFNLPDSRISLFFENGIDSNFVLTQKPPKQDSKVHLLFVGRLVPYKCADIVIKSLSRLNQTIQNKIDLTIVGDGSEKVLLEKLVQKLGLNDIVQFIGWVPQSQTLDYYRQADIFCFPSIREFGGAVVLEAMANGLPCIVANYGGIGEYVTEETGFKIEPISPEYLTQELTHKIQILVEDDQLRESMSVKSIERARQFTWERKAIELVKIYEQMISEKRSLDK

SEQ ID NO: 5349 - protein, 488 aa, Rhizobium leguminosarum bv. viciae 3841
MNDSIRFILNGEDIALTDVRPTETLLDFLRLKRRLTGTKEGCAEGDCGACTVLVGRLADGKLAYESVNACIRFIGSLHATHVVTVEHLAGRDGALHPVQQALVDCHGSQCGFCTPGFVMSLYGLWLAKEKPSRQEIEKALQGNLCRCTGYEPIVKAAEQVSLMRPSTLFDPLERTRSEIVARLWAMQASGTIRIANGEDRLIVPASIQALAEVLSQEPDAIIVAGATDVGLWVTKQMRWLSPVVFINHLSELQSVTEGEDGVTIGAGVSYTKAFEAISQKIPAFGRLIDRIGGEQVRNMGTIGGNIANGSPIGDSPPPLIALGATLTLRSLEGQRRMPLEDFFIAYGKQDRKPGEFVESVFVPYPAAASRFAAYKITKRRDEDITAVLGAFLLTLDEAEMITGIRIAFGGMAATPKRARTVEAALIGKPWTEATIEAARPAFDADYQPLTDWRASAEYRQLTAKNLLTRFYLETVGAPAELKRFEEVA

SEQ ID NO: 5350 - protein, 214 aa, Taiwanofungus camphoratus
MVAIVQKPAPGFKAMAVVDGQFQDISLSDYFGQWVVLFFYPLDFTFVCPTEILAFNDALPQFKELSTTVLSVSTDSHYAHLAWATQDRKQGGLGPNLKLPMIADKNTQISRDYGVLIEEEGVALRGLFLIDPKGTLRQITINDLPVGRSVDETIRLIKAFQFTDEHGEVCPANWTEGGKTIKADPKGSLEYFSTAGANGHTDAKGTTKKRARVD

SEQ ID NO: 5351 - protein, 779 aa, Rhizobium leguminosarum bv. viciae 3841
MDKSTFEDRKAIIAGPMHGSLRHDSAHKHVTGTADYIDDIPEPAGLLHGALGLSDRAHAEILGIDLSAVAAYPGVVWVFTGKDVPGVNDVSSNGSHDEPLLAETLVQFHGQPIFAVIAETRDAARRAALLAKIDYRDLPHWSDIDGALANGSPLVITPMTLHRGEPETEMTNAAMHLKGQMRIGGQEHFYLEGHIAVAIPGEDDEVTVWSSTQHPSEIQHIVGHVLDIPSNAVTVNVRRMGGGFGGKETQGNQFAALAAIAAKKLGRAIKFRPDRDEDMSATGKRHDFLVDYELGFDAEGRIHAVDATYAARCGFSSDLSGPVTDRALFHADSSYFYPHVHLTSKPLKTHTVSNTAFRGFGGPQGMLGAERFIEEIAYALGKDPLDVRKLNFYGQPGSERTLTPYHQEIEDNIIDRIVEELEETAEYRARRNAIIAFNRDSRYIRKGIALTPVKFGISFTMTAFNQAGALVHIYQDGSIHLNHGGTEMGQGLYTKVAQVLADSFQVDIDRVKITATTTAKVPNTSATAASSGSDLNGMAAYDAARQIKERLVAFAAEKWDVGPADVVFLPNRVRVGEIEIPFPDFIKQAYFARVQLSAAGFYKTPKIHWDRKAGRGTPFYYFAYGASCTEVSIDTLTGEYLIDRTDILHDVGRSLNPAIDLGQVEGAFVQGLGWLTTEELWWDDKGRLRTHAPSTYKIPLASDRPKIFNVRLAEWSENTEATIGRSKAVGEPPFMLAISVLEALSMAVASVADYKVCPRLDAPATPERVLMAVERMKRV

SEQ ID NO: 5352 - protein, 965 aa, Arabidopsis thaliana
MGVPAFYRWLADRYPKSISDVVEEEPTDGGRGDLIPVDITRPNPNGFEFDNLYLDMNGIIHPCFHPEGKPAPATYDDVFKSMFEYIDHLFTLVRPRKILYLAIDGVAPRAKMNQQRSRRFRAAKDAAEAEAEEERLRKDFEMEGQILSAKEKAETCDSNVITPGTPFMAILSVALQYYIQSRLNHNPGWRYVKVILSDSNVPGEGEHKIMSYIRLQRNLPGFDPNTRHCLYGLDADLIMLSLATHEVHFSILREVITYPGQQEKCFVCGQTGHFASDCPGKSGSNNAAADIPIHKKKYQFLNIWVLREYLQYELAIPDPPFMINFERIIDDFVFLCFFVGNDFLPHMPTLEIREGAINLLMHVYRKEFTAMGGYLTDSGEVNRVEHFIQAVAVNEDKIFQKRTRIKQQRSRRDPSEVPPEPIDDKIKLGEPGYKERYYAEKFSTTNPEETEQIKQDMVLKYVEGLCWVCRYYYQGVCSWQWFYPYHYAPFASDLKNLPDLEITFFIGEPFKPFDQLMGTLPAASSNALPGEYRKLMTDPSSPILKFYPADFELDMNGKRFAWQGIAKLPFIEEKLLLAATRKLEETLTVEEQQRNSVMLDLLYVHPAHPLGQRILQYYHFYQHMPPHECLPWMIDPNSSQGMNGFLWFSERNGFQTRVDSPVNGLPCIEQNRALCVSCTSQVSVHEIDEVLIYSLIFSSTFSRNVTYLCPAKHSHISEPPRGAIIPDKILTSVDIKPFPPLWHEDNSNRRRQARDRPQVVGAIAGPSLGEAAHRLIKNTLNMKSSTGAASGLIDPNGYYRNVPGNYSYGGVNRPRAPGPSPYRKAYDDDSSYYYGKYNNSTQGTFNNGPRYPYPSNGSQDYNRNYNSKIVAEQHNRGGLGAGMSGLSIEDNGRSKQLYSSYTEAANANLNPLPSPPTQWIGTQPGGNFVGGYYRDGVGYSETNGKSVKKVIYQAKTQPSHRGANL

SEQ ID NO: 5353 - protein, 884 aa, Arabidopsis thaliana; identical to SEQ ID NO: 5239

SEQ ID NO: 5354 - protein, 152 aa, Bordetella bronchiseptica RB50
MPTLNINGKDTVLDAPGEMPLLWALRDVADLTGTKYGCGMALCGACTVHADGQPIRACITPVQAVAGRRIVTIEGVAADRAGQAVQQAWRELDVAQCGYCQSGQIMSAAALLRANPAPTDRDIDDAMNGNICRCATYVRIRAAIHAAAAALA

SEQ ID NO: 5355 - protein, 165 aa, Polaromonas sp. JS666
MTSRVVTLGVNQVRRTLAVSAQVSLLEVLRNDLELNSPKYGCGLGECGACTVLVDGVAARACVIPACGVAGREITTLEGLGSLSALHPVQQAFIDEQAAQCGYCLSGMIMMTVALLARNPDPSEDEIRRELSGNLCRCGTHLEIVKAVRRAAELMAQNLSRGGAT

SEQ ID NO: 5356 - protein, 250 aa, Aeropyrum pernix
  misc_feature (1)..(1): Xaa can be any naturally occurring amino acid
  misc_feature (15)..(15): Xaa can be any naturally occurring amino acid
  misc_feature (50)..(50): Xaa can be any naturally occurring amino acid
  misc_feature (140)..(140): Xaa can be any naturally occurring amino acid
  misc_feature (145)..(145): Xaa can be any naturally occurring amino acid
  misc_feature (200)..(200): Xaa can be any naturally occurring amino acid
XPGSIPLIGERFPEXEVTTDHGVIKLPDHYVSQGKWFVLFSHPADFTPVXTTEFVSFARRYEDFQRLGVDLIGLSVDSVFSHIKWKEWIERHIGVRIPFPIIADPQGTVARRLGLLHAESATHTVRGVFIVDARGVIRTXLYYPXELGRLVDEILRIVKALKLGDSLKRAVPADWPNNEIIGEGLIVPPPTTEDQARARXESGQYRCLDWWFCWDTPASRDDVEEARRYLRRAAEKPAKLLYEEARTHLH

SEQ ID NO: 5357 - protein, 315 aa, Pasteurella multocida subsp. multocida str. Pm70
MTIYSDNSYSIGNTPLVRLKHFGQGNIVVKVEGRNPSFSVKCRIGANMVWQAEKDGILTKEKEIVDATSGNTGIALAYVAAARGYKITLTMPETMSAERKRLLRGLGVNLVLTEGALGMKGAIAKAEEIVASDPQRYVMLKQFENPANPAIHQQTTGPEIWRDTDGQIDVLVAGVGTGGTITGISRYIKQDKGKAILSVAVEPAESPVISQTLAGEEIKPAPHKIQGIGAGFIPKNLDLALVDRVETVSSEEAMQTARRLMAEEGILGGISSGAAVAAADRLAKLPEFAEKLIVVILPSASERYLSTALFEGIEA

SEQ ID NO: 5358 - protein, 211 aa, Synechococcus elongatus PCC 6301
MSLRLGDTVPNFTQQSSEGEINSYDWAGDSWVILFSHPADYTPVCTTELGTVAKLEEEFAKRNVKPIALSVDDVESHKGWIGDINETQGTQVNYPILADPDRKVSDLYDMIHPNANNTLTVRSVFIIDPNKKLRLTLTYPASAGRNFDELLRVIDSLQLTDNYSVATPANWNDGDDVVVVPSIPTEQAREQFPKGVTEVKPYLRLTPQPNR

SEQ ID NO: 5359 - protein, 462 aa, Oryza sativa Japonica Group
PENRALWLWLSVAIVFSVQSCRALAAGEGSKEADKIAALPGQPPDVKLQQYSGYINVNETSGKSLFYYFVEASVDAAHKPLLLWLNGGPGCSSMGIGAFQEIGPFRVDTDGKTLCRNPHSWITAANLLFLESPVGVGFSYAAVKPQEVYSTIGDNMTAHDSHTFLLRWLDRFPEYKTRDLFIVGESYAGHYVPELAVTILDNNLLPHATPIKLKGIAIGNGILEFAAEQTQLYEYLWQHAFISDSAHALITQSCKYPDDHPSALCESARKAAYSRIGNIDIYNIYSSTCHEQKVRPSASKCMDLADPCSQYFVEAYMNQPQVQKTIHANTELKYPWTRCRVYNLDHFGDSPKSMLPYIKAVITGRIRIWIFSGDLDAMVPVTATRQSMERLQLRVAADWRPWSADGKDVAGYVIAYDGLVFATVRGSGHMAPIDQPERALVLVSSFIRGQPLPPPQPDQHDA

SEQ ID NO: 5360 - protein, 531 aa, Ralstonia metallidurans CH34
MAINDIYSAGIASGWKVLDAATFTAPRTFEADVAIVGSGAGGGIAAEMLTEAGFKVLLIEEGALRTSDSFKDMDEARAYRELYQEAAARATSDGAISILQGRSVGGSTTVNWTSSFRTPPKTLAHWATEHAVTGHSEAEMAPWFEKIEARLNMAPWAMDPNPNNTVLKRGCEKLGWEWHVIPRNVKGCWNSGYCGLGCPVNAKQSMLVSTIPNALAHGATLVHRLRVRTIDHDGKTVRGLTGDALGIDGYTATGVTVTVRAKHVIAAGGAINTPALLLRSRVPDPHGRIGLRTFIHPVNLTIAEMPEKIDPYYGAPQSIASDYFQWRDGATGPMGYKLEVPPMFPGISSGVFNALGDDLRRQMAALPHTNAMLALLRDGFVPESPGGRVRIADDGSPVLDYDVSDYVWDGVRRAYLSMAEAQFAAGAKRVRPAHLDGQDYTSWTQAREAIGQLPLKKFRALLFTAHLMGGCGMSDDPKRGVVNSTGRHHQLENLSVFDGSVFPTSIGANPQLSVFALTAQNVSALSRSIKP

SEQ ID NO: 5361 - protein, 319 aa, Xylella fastidiosa Dixon
MTIYNTILDTIGHTPVVKLNRIAPAHVDLYIKVESFNPSGSVKDRLALAIILDAEQQGLLKPGDTIVEATSGNTGVALAMIAAARGYTFVATMVETFSIERRKLMRAYGAKVILTPATERGSGMVRKAKELAEQHGWFLASQFSNPANPAYHRNTTAAEILRDFAGRRLDHFVSGWGTGGTLTGVGEVLKIARPDIKITASEPANAALLQGKEWQPHKIQGWTPDFVPEVLNRSVPHHILSVTDDDAITVARRLAAEEGVFSGISGGASVATALQIAQQAEPGAVILAMLPDTGERYFSTPLFADINEHSDDAWLASLG

SEQ ID NO: 5362 - protein, 235 aa, Glycine max
MAHTLSTNLALNLPTSRYVRPSRPTQVKPMKVMMGDAREKLEHVHVPKHNKHHQPLPKNKVAPTPPVGLWDRFPTARTVQEMMETMERMMEDPFAFSTLEWPSSPLPSEGVGGYRRRGRAPWEIKECESEYKMRFDMPGMNKEDVKVWVEEKMLVVKAEKAQKKKQENEIVELQQEKQQEEEEWSAKSYGRYSSRIALPDNVQFENIKAEVKDGVLYITIPKAISYSCILDIQVQ

SEQ ID NO: 5363 - protein, 201 aa, Picrophilus torridus DSM 9790
MPVYLGKRAPDFTANTTRGVISLSDYKNKWVLLFSHPADFTPICTTEFIEFSRRYNDFKELNVELIGLSVDSLQSHIEWLKDIYEKFGIEIQFPVIADINKEIAREYNLIDENAGNTVRGVFIIDPNQTVRWMIYYPAETGRNIDEILRSVKALQANWSRKIATPVNWRPGDKGILPPPSTLEDALQRIREGNKTWYIKTE

SEQ ID NO: 5364 - protein, 307 aa, Bacillus cereus G9241
MNVYRGVHELIGHTPIVEITRFSLPEGVRLFAKLEFYNPGGSVKDRLGRELIEDALEKGLVTQGGTIIEPTAGNTGIGLALAALQHDLRVIVCVPEKFSIEKQELMKALGATVVHTPTEQGMTGAIAKAKELVNEIPNSYSPSQFANEANPRAYFKTLGPELWDALNGEIDIFVAGAGTGGTFMGTASYLKEKNIDIKTVIVEPEGSILNGGKAGSHETEGIGLEFIPPFLKTSYFDEIHTISDRNAFLRVKELAQKEGLLVGSSSGAAFHASLLEAEKAAPGTNIVTIFPDSSERYLSKDIYKGWE

SEQ ID NO: 5365 - protein, 322 aa, Prochlorococcus marinus str. MIT 9215
MEIANDITSLVGNTPLVKLNRIRNYFNCYPEIIAKLESFNPSASVKDRIAYSMLCKAEEEGLINPDKTTLIEATSGNTGIALAMVAAAKGYKLILTMPDTMSIERRAMLRAYGAELQLTPGKDGMKGALDLANELSSTIVNSYQFNQFENFANPDIHERTTAQEIWSQSNNNLDGLVTGVGTGGTITGCARFLKKVNPNCKIYAVEPKKSAVISGEKAGSHSIQGIGAGFIPKVLNTKLIDEIIKIDDDEAFYYGRLLARLEGLLSGISSGAALAATIKIGKRKELMNKRLIVILPSFGERYLSTAMFESNTSIQARKDGYL

SEQ ID NO: 5366 - protein, 424 aa, Prochlorococcus marinus str. NATL1A
MTHIAWLGKKTPFCGNVCYGLTTTEELRERGYQTSFIHFDNPMRDGNNKTSLLANDPDVSLPYLIKSQVYTIPSLNAQRELRESLSRLKPDLVHASLTLSPLDFRLPELCHQLNLPLIATFHPAFDSKLRNLTANTQQLTYQLYAPSLAKYDKVIVFSDLQAEVLAKLGVKESRLEVIPNGIDIKKWNTLKPNNSQNELHFEIKKKLGSERIFIYMGRIASEKNVEALLRAWRFVQPKGCRLVIVGDGPLRPTLENHSIFNKEDNVFWWGYEADQNKRVALLQIAEVFLLPSLVEGLSIALLEAMATGTACVATDAGADGEVLENGAGIILNTEGVTSQLRTLLPVLHDQPVLTHELGRRARLRVEEKYTLQQNIDSLENLYANVLRSSRSKLPQPIDDSSALPKQLLQLRRISSQKVQGVEEH

SEQ ID NO: 5367 - protein, 328 aa, Synechococcus sp. WH 7805
MSRVYADNSQAIGNTPLVRLNHVTKGCKATVLAKVEGRNPAYSVKCRIGANMIWDAEKRGELTDGKVIVEPTSGNTGIALAFTAAARGYKLVLTMPESMSIERRRVMAVLGAEIVLTEAAKGMPGAIAKAKEIADSDPAKYFMPGQFDNPANPDIHFKTTGPEIWNDCDGAIDVLVSGVGTGGTITGVSRYIKNEAGKAIESVAVEPSHSPVITQTLNGEEVKPGPHKIQGIGAGFIPKNLDLSIVDKVEQVTNEESIAMALRLAKEEGLLVGISCGAAAAAAIRLAQQDDYAGKTIVVVLPDLAERYLSSVMFAEVPAGIIEQPVPA

SEQ ID NO: 5368 - protein, 773 aa, Rhodopseudomonas palustris CGA009
MVPTKLAPAKFGVGQSVLRKEDDPLIRGKGRYTDDVAPASTAYALMLRSPHAHATFKLDATAARALPGVLTILTADDVADLGGLPCLFNLPDTPFKGPDYPILARDEVRHVGDAIAFVVADTIAHARDALEAIAVEWSPLPAVIGAARAVEPGAPQVWPDHAGNVLFDAGIGNKKATEEAFAKAHAIAEIRIVNPRIVTNYMETRAAVCEYDAKRDHFTLTVGSQGSHRLRDILCQTVLKIPVEKMRVICPDVGGGFGTKLFPYREYALLAVAAKKLRKTVKWTADRGDHFVGDSQGRDNVTTARMALAEDGKFLGMDVDLIGDVGAYLSTFGPYIPYGGAGMLPGLYDIQAFYCRIRTVFTHTVPVDAYRGAGRPEAAYVVERLVDACARKLAMSPDAIRRKNFIPPRKLPYKTATGKVYDSGDFTAHLKRAMEIGDWKDFGKRAKAAKKHGLVRGIGLASYVEVCGTMGEETAKVVLDPDGDITVLIGTQSSGQGHQTAYAQIVAEQFGVPQERVRVVQGDTDRIATGLGTGGSASIPSGGVSVQRATHQLGEQLRDIAADALETSTADLEISDGTIRIAGTDRSITFADLAKRSGVDPAKLNASAAFSSADGTFPNGTHLVEIELDPATGKIRIVNYVIVDDFGVTLNPLLLAGQVHGGTIQGIGQALMEQAVYNAEDGQLITGSFMDYALPRAADGAPITFETHNVPCATNPMGVKGAGEAGAIGSCPAVMNAIIDALWREYRIDHIDMPATPERVWMAIREHERRHRL

SEQ ID NO: 5369 - protein, 129 aa, Brassica napus
  misc_feature (120)..(120): Xaa can be any naturally occurring amino acid
MSLVFAINGQRFELALSSVDPSTTLLEFLRYQSPFKSVKLSCGEGGCGACVVLLSRYDPVLQNVEDFTVSSCLTLLCSINHCSITTSEGLGNSRDGFHTIHNRLSGFHASQCGFCTPGMXCSLFSALLD

SEQ ID NO: 5370 - protein, 420 aa, Cyanothece sp. PCC 7424
MKVVFDMALIELVGQSGIGRVTKNLSLQLAKAPECELSFCASLPTVEHWLEVYKYLKKSELLDPKLLIKFQNSIINKKGILLKTIESLDNLHQWGFAGAKSFKKIIINTLLSNFDPLPQQELVDKQIYHSSFFAIPKKIQTMKHLQKVLTFHDLIPILFPQYVHEAIINNFEEILNSIHQETWLICVSESAKNDLCNHLSFIDSQRVHVIYSAASENFYPCQNRETIEAVKKKYKIPNNPYILALNNLEPRKNIEQLIRCFASLCQQEKLKDLSLVLAGSKGWLYNNIFTEIDKITELKERIIVTGYVDDVDLAALYSGAMMFVFPSLYEGFGLPPLEAMQCGTPVITSNTSSLPEVVGDAGIMIHPQDSDGLCQSILDLYHDSSLREKLSHQSIERAKLFSWEQCAKNVINLYQIAVGC

SEQ ID NO: 5371 - protein, 212 aa, Ralstonia metallidurans CH34
MALRLGDIAPDFEQESSEGRIRFHDWLGDGWGVLFSHPADYTPVCTTELGLTARLKEEFAKRNVKAIALSVDSVESHHGWIQDINDTQSTTVNFPILADGDRKVSELYDMIHPNANETLTVRSLFVIDPKKKVRLIITYPASTGRNFNEILRVIDSLQLTDNHSVATPGNWQDGDDVVIVPSLKDEEVIRQKFPKGYKAVRPYLRLTPQPNK

SEQ ID NO: 5372 - protein, 583 aa, Podospora anserina
MTQLTHFGAARWRCVHCGVWSVHARVRVPAFRLAAPERHEISERRLDVLQCGNDIGFGIPVCHSLDNMDIWSFLSSCPGQGALLTTADPYHEQEILTAWFTFQKTVDMASLFGLLLLLSAALPCSFAVSQWNEEVVNGIPYRTFYHADTNSKLSIVSNSGICETTPNVNQLSGYIRISEDINLFFWFFESRNSPATAPLALWLNGGPGCSSMLGLFVEHGPCRFPDGSPAGSDPVLNEESWNSYANMLYLDQPVGVGFSYGVGQVNATTQGSIYVWTFLQAFLAAKPELAKSQFGLFTESYGGHYGPDIVRFIQQQNKVVDQNVSNAVKIDIIALGINNGWVDPKLQFPAYLDFGLTNNYRQLVNQSQYSTGITLYQQRCVPALQNCTVTAGTAEDCNHAHNTCYDALGLFTVELQRFDLYDVRRVDTWTGIPGTDMYHEYLARSDVKDAIGAQRDYTECSDVAWGLFDSTGDPSRSFLGELSEVVQSGVRVLLWAGDADYLCNWMGNLAVANAIDYSGQLDFVKRGMSAYQVNGTSFGEFKTVENLSWLRVYSAGHLVSSDQPRAALQAFRQTMENRPLEAT

SEQ ID NO: 5373 - protein, 187 aa, Ralstonia solanacearum GMI1000
MSLINTQVQPFKAQAFHNGKFVEVTEQNLKGKWSVLIFMPAAFTFNCPTEVEDAADNYAEFQKAGAEVYIVTTDTHFSHKVWHETSPAVGKAQFPLVGDPTHVLTNAFGVHIPEEGLALRGTFVINPEGVVKTSEVHDNAIARDVKETLRKLKAAQYVASNPGQVCPAKWNEGAKTLKPSLDLVGKI

SEQ ID NO: 5374 - protein, 344 aa, Ipomoea trifida
IERIPKEYIRPEEERPSIGDIFAEEKMDGGPQVPTVDLKGINSEDLEVREKCREELRKAAVDWGVMHLVNHGIPEELTGRVKAAGEGFFGQPIEEKEKYANDQAAGNVQGYGSKLANNASGQLEWEDYFFHCVFPEDKADLSIWPKTPSDYIAATREYAKQLRALTTTVLAVLSLGLGLEEGRLEKEVGGMEELLLQMKINYYPKCPQPELALGVEAHTDVSALTFILHNMVPGLQLFYEGKWVTAKCVPNSIIMHVGDTVEILSNGKYKSILHRGVVNREKVRVSWAVFCEPPKEKIILQPLPETVSEADPPRFPPRTFAQHIKHKLFRQTDQEGADTPKPDE

SEQ ID NO: 5375 - protein, 420 aa, Cytophaga hutchinsonii ATCC 33406
MPIRKINLIHPVKNAFALQAANAFKKAGILNRLYTTYFYKESVVLKLLKKISPGIYTNIHNELKRRDWQVDASYIVSKPWIEYKRIFLLKSGLSKRLKLSSHTLNSRMYDDFDKTVSAMKWDTIDAVYAYEDCSLRSFRKAKKLGVVCLYDLPIVHHETAKEILGREVELFPEFKSCLATVNEPDWKIKKKEEELAMADLIFVPSDFVKNSVTRLGIPSEKVKVNVFGAPIEKFTPLEKTDNIFRPIFVGGIGPRKGVHYLIQAWKELNLPGAELLLVGIDLFPQGWLKEQIKDANIRFVASVPHHQLPQYYASADCFVFPSLAEGLALVQLEAMACGLPVITTPNAGAENIIKEGENGFLIPVRNIEALKEKILYLYEHPHEKQQMRLAARKTAEYFTWERYQNFLLQSIEQYDSSKRP

SEQ ID NO: 5376 - protein, 137 aa, Brassica napus
  misc_feature (90)..(90): Xaa can be any naturally occurring amino acid
  misc_feature (117)..(117): Xaa can be any naturally occurring amino acid
MPGLTIGDTVPNLELDSTHGKIWIHDYVGNGYVILFSHPGDFTPVCTTELAAMANYAKEFEKRGVKLLGISCDDVQSHKEWTKDIEAYKXPGSKVTYPIMADPDRSAIKQLNMVDPXDEKDAQGQLPSRTLHIVGPD

SEQ ID NO: 5377 - protein, 187 aa, Pseudomonas fluorescens PfO-1
MPIINSQVKPFKATAFKNGDFVQVSDADLKGKWSVVFFYPADFTFVCPTELEDLADNYAAFQKLGVEIYSVSTDTHFAHAAWHNTSPAIGKIQYTMIGDPTQVISRNFDVLIEEAGLADRGTFVINPEGQIKIVELNDGGVGRDASELLRKIKAAQYVAAHPGEVCPAKWKEGEATLAPSLDLVGKI

SEQ ID NO: 5378 - protein, 196 aa, Herminiimonas arsenicoxydans
MPIEFQNLEFSNLNIFIYCWFATADTKDAILVICVSSPHSFLKIMANLNINGKQHQIDLSDDTPLLWALRDHLGMTGTKFGCGMALCGACTVHLDGQPIRSCITPVSAAAGKRITTIEAMGEDSVGKRVQQAWTELGVPQCGYCQSGQIMSATALLKTTPHPTDAEIDSAMSGNICRCGTYTRIRAAIKQAAGKKG

SEQ ID NO: 5379 - protein, 344 aa, Ipomoea trifida
IERIPKEYIRPEEERPSIDDIFEEEKMGGGPQVPTVDLKGINSEDLEVREKCREELRKAAVDWGVMHLVNHGIPEELTGRVKAAGEGFFGQPIEEKEKYANDQAAGNVQGYGSKLANNASGQLEWEDYFFHCVFPEDKTDLSIWPKTPSDYIAATREYAKQLRALTTTVLAVLSQGLGLEEGRLEKEVGGMEELLLQMKINYYPKCPEPELALGVEAHTDVSALTFILHNMVPGLQLFYEGKWVTAKCVPNSIIMHVGDTVEILSNGKYKSILHRGVVNREKVRVSWAVFCEPPKEKIILQPLPETVSEADPPRFPPRTFAQHIKHKLFRQTDQEGADTPKPDE

SEQ ID NO: 5380 - protein, 415 aa, Micromonospora echinospora
MRVLRLTPFFHHDYVDHWPAEFDPVGGMQVQILALSRSLARAGVDQLVLTLGFPGLPPTKQIEPGLTVRIARVSLPQIRSEITGLVGLGQAWLIGTIRECLRLRRGDWRPDLVHVHADGQIWPLVAGRIAARILGVPYVLTLHCSRLSVYQPMSAVDAMAHRLVTQAERQALRSAARVSTLTARTADVVSAATGLDRSAIVVNPDAVDITPATPAEAAAFAQRYGLTGRRPLIGYIGRVAHEKGWPDLLRLAELLDDLSPTFLVVGDGPQRERMEREIAEAGRAHQFVVTGFLPHDQVPAALALVDTLVMPSIHEELGGSAIEAIMTGTPVAAYAVGGLRSTIGSACPDLLSEPGDVRGLADVVRHVLTDRDAVVAQIHAAQTSTASTFDVAATRDRMIDCYRAALAGAGAASGK

SEQ ID NO: 5381 - protein, 1370 aa, Gibberella zeae PH-1
MGVPKFFRWLSERYPAISQLIAENRIPEFDCLYLDMNGIIHNCTHKDAGEDVSFRLSEEEMFIRIFNYIEHLFGKIKPKQLFFMAIDGVAPRAKMNQQRSRRFRTALDAEKARDKAISEGVEIPKEEPFDSNCITPGTEFMAKLSQQLRYFVNKKVSEDTDWQGCEIVLSGHEVPGEGEHKIMEYIRNAKAQPNYNHNVRHCLYGLDADLIMLGLLSHDPHFCLLREEVTFGRASKSKSKELEHQNFYLLHLCIVREYLEMEFQELGEEGALSFPFDLERVIDDFILMAFFVGNDFLPNLPSLHINEGALANMFRIYKSILPKCDGYINENGVINMGRLQRLLGELSNTEIDAFESDVSDEKWYASKQMEKRLENKHAETKAPKGGQLVLTSAQRDLWKQKIRPYISKRSDEPLDLGTSLKAADRKFVQDLADSMHLQWSTKEDDEGHRHLIVSFPPKNNDDDDEDDEEEEGNLAAYRVMKTYDKALVIDLTAEDAQKQYDQLYQDKYQGWKTKYYLQKFEEWAPDSYDKELTALYVVKGVGADLNFKKGQPFLPYEQLMGVLPDRSKKIVPKVYHDLMTNPDSPIVDFYPRDFELDMNGKKMDWEAVIKIPFIDEKRLLDAMRPKNELLEPDEKARNGFGVPLKFTYSPEVDFVYPSPLPGVFPEIQNCRCIENIFDLPDVEGLEYLSGLTSGALLKVDALAGFPTLHTLPYTAQLVEGYGVNVFQADSRNPSVCVTLTGTENRTKIETWKAKLGQRCYVGYPFLQEAKVIKVQDELFSYELADNGDVMARDHNNREAADWAKEADYIENWHAKRLAITIGQVECLVYVHMLKGLIRTEEGALTKEYAENPSLRSTYAAQTIVDEVVNEDERFIEKEALPIEEEFPRGTRAFFLGDYSYGRPLEVAAHTGNKAEVVVSVLKNKEQDFAKQIIHQAERSNPYTPSFAVAKQLGIHPLVLSKITSSYQIINSAGLRLNLGLNLKFEGRKLKVLGYSRKSHTGWEFSGMAIKLIADYMVAFPDFFAAIQREPQKSDVLETDLWKDPAVASQRVKEIVAWLKKQETSKFERVPLEAEQLDSEIVKALAHVGEQVHAASQEIEIKKLRSVPRSALLKPSDAEMVLGSQNFTLGDRVTYVSAAGKVPIATRGTVVGISRTATALLLDVVWDTSFMSGTTLNERAPVFRGQTVASSSVLNTSNKQVVSTSSKSQQRKPVIAAHGGYANVGVTQYRDAPAPGPLRGGWSGALNGNNSQGRNSPGRGRGNGARGGAPNLMHSTLVYRNGPPNGAAQGHDANGNGTRGRGGRGRGRGSHHGSPAPDGAPQEQMYGNVPPPASLDQPRGRGRGRGRGGRGRGGPNRGRGNGGAGGNGSQG

SEQ ID NO: 5382 - protein, 303 aa, Salmonella enterica subsp. enterica serovar Paratyphi B str.
MNTLEQTIGNTPLVKLQRLAPDNGSEIWVKLEGNNPAGSVKDRAALSMIVEAEKRGEIKPGDVLIEATSGNTGIALAMIAALKGYRMKLLMPDNMSQERRAAMRAYGAELILVTKEQGMEGARDLALAMSERGEGKLLDQFNNPDNPYAHYTTTGPEIWRQTSGRITHFVSSMGTTGTITGVSRFLREQEKPVTIVGLQPEEGSSIPGIRRWPAEYMPGIFNASLVDEVLDIHQNDAENTMRELAVREGIFCGVSSGGAVAGALRVARATPGAIVVAIICDRGDRYLSTGVFGEEHFSQGAGI

SEQ ID NO: 5383 - protein, 197 aa, Rickettsiella grylli
MHYLNENEEENKAMSMLKVGDKLPEFKLTATVDTDISKAFTEITHASYPGNWLVLFFWPKDFTFVCPTEIVAFNELNDKFKESNAVLLGGSTDSEFVHRAWRQYNDELRALSFPMLSDIKRELCSHLGILDNDAGVAQRATFIIDPEGIIRFNMVTDLSVGRNPQEVLRILHALQNGGLCPCNWQKGQQTIDITEAA

SEQ ID NO: 5384 - protein, 153 aa, Acidobacteria bacterium Ellin345
MDPITLKVNGRDRQVTVAPDTPLLWVLRDTLELTGTKFGCGVGQCGACTVHVDGDAVRSCTTPVSQAVGKKITTIEGLSADSTHPLQVAWVAEDVPQCGYCQSGQIMQAAALLAQKPHPSETEVIEAMNGNLCRCGTYHRIRKAIARAAGGAR

SEQ ID NO: 5385 - protein, 774 aa, Ralstonia eutropha JMP134
MQHKTQEAGMSESIVGASTPQVTAREKVMGRAQYAGDIKLPGMLHAKVLRSPHPHARIVSIDTAAAKALPGVKLVVTGRDTPTRLWGPHRKEQRILAVGVVLHVGEEVAAVVAVSEEIARDALDLIRVAYEELPALLSPEAALADGAPEVHAGTRNIGHEMHIERGDVEAGFAEAAAVYEATYDMHSQYPGYLEPMASVATQDGNGRLTVYASTQSVFLARSRLAEALDRPASTIRVVQATTGGGFGAKIVEENNSLICAFLATKLDRPVRMVNNRLEDFQGARASVPAKVWLRIGLSANGMIVAKDVRITAECGAYAGLAGDVMHVSAMRSDNMHRVTNVRSHAVLAYTNNPPRGAFRGFGGQQMQFPLNCHLTVLAGMIGMDPIEVHKRNAIGRGETSVHGWQIGSTGMQECLEMTRKAIGWDAKREAPRGTGTRRRGVGIAAAMHVSGNRTLGNWDGSTILLKLNEDGRVMLQTSECDMGQGANTMLSQICAQEMGIPLSHVTVMAPDTDTSPFCLGSLASRVTIISGNAVLRAAREAKQKVMALAAEKFGVDADSLVFADGRISVPGQPDKSATLAEIARLHIFRHGGEGIHVRATYDAPTVMHDANYYGNIAPAYSFAAQAVEVEVDTCTGRVTVIDSFVADDCGKAINPLAVHGQTHGATVQAIGWTLYEHLRYEDGRLQNGNFADYTMATADALPMLRTDLVESNDPNGPFGAKGASETAILPGAAAIANAVYHAIGVRIHSLPITPEKVLAALREREEMEKESAHA

SEQ ID NO: 5386 - protein, 344 aa, Ipomoea trifida
IERIPKEYIRPEEERPSIGDIFEEEKMGGGPQVPTVDLKGINSEDLEVREKCREELRKAAVDWGVMHLVNHGIPEELTGRVKAAGEGFFGQPIEEKEKYANDQAAGNVQGYGSKLANNASGQLEWEDYFFHCVFPEDKTDLSIWPKTPSDYIDATREYAKQLRALTTTVLAVLSLGLGLEEGRLEKEVGGMEELLLQMKINYYPKCPQPELALGVEAHTDVSALTFILHNMVPGLQLFYEGKWVTAKCVPNSIIMHVGDTVEILSNGKYKSILHRGVVNREKVRVSWAVFCEPPKEKIILQPLPETVSEADPPRFPPRTFAQHIKHKLFRLTDQEGADTPKPDE

SEQ ID NO: 5387 - protein, 186 aa, Salmonella typhimurium
SLINTKIKPFKNQAFKNGEFIEVTEKDTEGRWSVFFFYPADFTFVCPTELGDVADHYEELQKLGVDVYSVSTDTHFDHKAWHSSSETIAKIKYAMIGDPTGALTRNFDNMREDEGLADRATFVVDPQGIIQAIEVTAEGIGRDASDLLRKIKAAQYVAAHPGEVCPAKWKEGEATLAPSLDLVGKI

SEQ ID NO: 5388 - protein, 120 aa, Arabidopsis thaliana
  misc_feature (49)..(49): Xaa can be any naturally occurring amino acid
  misc_feature (73)..(73): Xaa can be any naturally occurring amino acid
  misc_feature (107)..(107): Xaa can be any naturally occurring amino acid
MASVASSTTLIYSPSSRVFPAKSSLSSPSGSFLRTLPSPSFFAPVRSGXARRSSLRSTSHRSFAVKTHSYDLXPLVGNKAPDFDAEAVFDQEPIKAKLSHYIGKKNXIPFFYPLDLTFPL

SEQ ID NO: 5389 - protein, 344 aa, Ipomoea trifida
IERIPKEYIRPEEERPSIGDIFAEEKMGGGPKVPTVDLKGINSEDLEVREKCREELRKAAVDWGVMHLVNHGIPEELIGRVKAAGEGFFGQPIEEKEKYANDQAAGNVQGYGSKLANNASGQLEWEDYFFHCVFPEDKTDLSIWPKTPSDYIDATREYAKQLRALTTTVLAVLSLGLGLEEGRLEKEVGGMEELLLQMKINYYPKCPQPELALGVEAHTDVSALTFILHNMVPGLQLFYEGKWVTAKCVPNSIIMHVGDTVEILSNGKYKSILHRGVVNREKVRVSWAVFCEPPKEKIILQPLPETVSEADPPRFPPRTFAQHIKHKLFRLTDQEGADTPKPDE

SEQ ID NO: 5390 - protein, 327 aa, Pisum sativum
MVLLSKPTSEQYTYVRNNMPITFSSSIPLVDLSKPDAKTLIVKACEDFGFFKVINHGIPLDAISQLESEAFKFFSLPQTEKEKAGPANPFGYGNKRIGLNGDIGWIEYLLLTTNQDHNFSLYGEDIHKFRGLLKDYKCAMRNMACEILDLMAEGLKIQPKNVFSKLVMDKQSDCLFRVNHYPACPELAINGENLIGFGEHTDPQIISILRSNNTSGFQISLRDGSWISVPPDHSSFFINVGDSLQVMTNGRFKSVRHRVLANGIDPRLSMIYFCGPPLSEKIAPLPSLMKGKESLYKEFTWFEYKSSTYGSRLADNRLGNYERIAAT

SEQ ID NO: 5391 - protein, 45 aa, Zea mays
KTIRPLQALQNVQENPNKVCPPGWNPGERSIKPPPKGNKKYFPAI

SEQ ID NO: 5392 - protein, 124 aa, Glycine max
  misc_feature (85)..(85): Xaa can be any naturally occurring amino acid
  misc_feature (99)..(99): Xaa can be any naturally occurring amino acid
  misc_feature (101)..(101): Xaa can be any naturally occurring amino acid
EKDNDLLALPAIAYRNNRNDATDGYSVPPPVIVETYTEDQTLGGNRCWGLFPNDDDFGMEPIWPLTDGSKAGPGFQLLGSEAEVXDALDHLQDDSMNCXSXLNGYALATDTDMGSGGVLQETFA

SEQ ID NO: 5393 - protein, 186 aa, Salmonella typhimurium
SLINTKIKPFKNQAFKNGEFIEVTEKDTEGRWSVFFFYPADFTFVCPTELGDVADHYEELQKLGVDVYSVSTDTHFIHKAWHSSSETIAKIKYAMIGDPTGALTRNFDNMREDEGLADRATFVVDPQGIIQAIEVTAEGIGRDASDLLRKIKAAQYVAAHPGEVCPAKWKEGEATLAPSLDLVGKI

SEQ ID NO: 5394 - protein, 153 aa, Burkholderia mallei ATCC 23344
MSTSFVLNGKNLTLDADPAMPLLWAIREDAGLHGTKFGCGAAQCGACTVHLEGQAVRSCVLPLAAVAGKRVTTIEGLASRPAKAVQAAWVKLQVPQCGYCQSGQIMSATALLEQNPAPTDADIDAAMNDNICRCATYTRIRAAIHEAAATLKA

SEQ ID NO: 5395 - protein, 154 aa, Thiobacillus denitrificans ATCC 25259
MLKTGDRAPDFSNPDADMNEVELSQFRGKNLVLYFYVRDDTPGCTTEAIEFSELEKEFAKLQTSVVGVSRDDCIKHGEFRDKHGIGVRLLADKDETTSKAYGVLQDKEVDGVKRRSATRSTFIIDKQGVIRHALYGVSSRGHAAEVLQLVKELK

SEQ ID NO: 5396 - protein, 197 aa, Pseudomonas fluorescens Pf-5
MFSTTDGESTMPIINSQVKPFKATAFKNGAFVEVSDADLKGKWSVVFFYPADFTFVCPTELEDLADNYAEFQKLGVEIYSVSTDTHFAHAAWHNTSPAIGKIQYTMIGDPTLAISRNFDVLIEEAGLADRGTFVINPEGQIKIVEINDGGVGRDASELLRKIKAAQYVAAHPGEVCPAKWKEGEATLAPSLDLVGKI

SEQ ID NO: 5397 - protein, 196 aa, Prosthecochloris aestuarii DSM 271
MGVLVGREAPDFSLDAVVDGGKMVDSCKLSDYRGKYVVLFFYPLDFTFVCPTELHAFQDRIDEFRHKNVEVMACSVDSKFSHHAWLNTPRSQGGIQGVTYTLLSDINKEAAKAYDVLAEAEGVSYRGLFLIDREGIVRYQVVNDLGLGRNVDEVLRMVEALQFTEEFGEVCPANWHKGARTMKPTDEGLKEYFKSE

SEQ ID NO: 5398 - protein, 101 aa, Brassica napus
IPDIIPEEQEGKTGFLFNPGDVEDCVTKLRTLLHDKETREIIGKAAREETEKYDWRAATTKIRNEQYGAAIWFWRKKKAQVLGPINWLVKRLFPVPPEVNA

SEQ ID NO: 5399 - protein, 143 aa, Bradyrhizobium sp. ORS278
MWVIREDLQMTGTKFGCGAGLCGACTVHVEGEAVRSCQTMLGDVTNKKITTIEGLSDKGDHPLQKAWIAEQVPQCGYCQSGQIMQAASLLAKTTSPSKEEITAHMDGNLCRCMTYSRIQKAISRAAAEMRTASNTTSNERSPT

SEQ ID NO: 5400 - protein, 299 aa, Thermoplasma acidophilum DSM 1728
MIGSNARSQIDDLIDSMHSIGIGNTPFIEVDDGIYAKIEWMNRFGSIKDRPAFFIIYSLKESGDLDGKTLIEASSGNTGLAVSGIAKMLGVRSIIVLPENASPFTKRSIMENGSRVIETPASLGTEGSINRLKEMVSTDDFIWLNQHSNTKNSDSHYYTTAREMVDSMGVPSAIVAGIGTGGTITGIARYFKEIDPGVRVIGVQPAAGSHIHGLRNVSASKYRGIIDRYGHLIDEIVYVNEDQAISEIRRYYEKSGQLIGISAGANLYASRLFHERYRKIFTVFPDSGEKYREEIGPLI

SEQ ID NO: 5401 - protein, 498 aa, Triticum aestivum
MARAAPILAVSKPSPLPLIAPSSRPRAGWSLHLHRRRLLPLSSSSSCSTSASASSSPSSPVLLRDDELDHQEEPPPASEADSRPRRIALFVEPSPFAYVSGYKNRFQNFIKYLREMGDEVIVITTHEGVPDEFHGAKLIGSWSFPCPWYQKVPLSLALSPRIIGEVARFKPDIIHASSPGIMVFGALIIAKLLCVPLVMSYHTHVPIYIPRYTFSWLVKPMWLVIKFLHRAADLTLVPSVAIGRDLQAARVTAANKIRLWNKGVDSESFHPRFRNQEMRSRLTNGEPDKPLIIYVGRLGVEKSLDFHKRVMDRLPGSRIAFIGDGPFRPELEEMFSGMPAVFTGTLQGEELSQAYASGDVFVMPSESETLGFVVLEAMSSGVPVVAARAGGIPDIIPEDQEGKTSFLYTPGDVDDCVGKVELLLSCEELRETMGKAARKEMEKFGWKAATRKIRNEQYSAAIWFWRKKRSQLLRPLQWVFRRLFRPAPAPAPAITNQS

SEQ ID NO: 5402 - protein, 761 aa, Bradyrhizobium sp. ORS278
MKNAAGERIASHSPDLSRRSFLVGTAATGLVLGYAGLADSALAATTPSAFEPTVWYSIAPDGLVTVTCGKADMGQHIASTMAQIICEELGAAWKDMRVQLASNDPKFNDPVLGAQITGGSWSTMMNFDAMSRAGAAGRIALTEAAATAMGVPAKELVVRDGVVMHPKTKKQMSYAEIVKSGKITKSFTPDELKAITLKTPDQYTMIGVSVPQLDIPSKTNGTAKYGIDTMLPGMVYGKVVTPPVRFGATVKSVDDSEAKKVPGFIKAVTLDDKTGSTSGWVVAVANTYANARKAADALKISYDNGPYANVSTASILAEAKTLQAQDDSGQFFVKDGDATAALSGAAKVLEAEYTTSINIHAPLEPMNATAEFKGDILHIYSGNQFATRSGAIAAGAAGIDPKYVVMHQAWLGGGFGRRLDADMMVPAVQAAKAVGKPVKVIYSRENDMTMDYSRPLTYQKVKAGLDSDGKLIALSHDVVSAWPTARWGIPDFLTPSVDKKGPLDSFTVNGADFFYTVPNHHVRAIKNELAHNATPSGQLRSVAPGWTFWAVESMIDEIAAASGQDPAQFRIALLDGKGKNDGGAQRLCNTLLAAMGLSGYGAKKLPKGEGMGVACVSSQERATASWTACVAHVAVADNGAVTVKKLTVATDVGTQVHPDNIRAQVEGAALWGLSLAMYEKATLKDGGIEQTNFDSYTPLRMSQVPEVAIAVIANGEKATGVGEPAVTVVAPALGNAIYNACGARLRSLPITAEAVKAAMKA

SEQ ID NO: 5403 - protein, 315 aa, Exiguobacterium sibiricum 255-15
MRIANSVLDLVGRTPIVKLNHLTGPEDADVYLKLEYMNPGSSVKDRIALAMIESAESAGHLKAGDTIIEPTSGNTGIGLAMVAAAKGYRSILVMPETMSMERRTLLRAYGAELILTAGPEGMKGAIARATAEAEEHGYFMPQQFNNESNPVVHEKTTGPEIVEAFEGLTLDAFIAGIGTGGTITGAGKVLREAFPGIEIIAVEPTDSPVLSGGKPGPHKLQGIGAGFVPSILDTQIYDSVEQVTTEEAFDHARRAAKSNGVLGGISSGAAIAAALKTAKRLGKGKTVLAIIPSNGERYLSTPLYQVEEETDSSKL

SEQ ID NO: 5404 - protein, 258 aa, Glycine max
MLSWKVLLVSAAVLFAALGLRVSLPVAATNLPLLWSFFLLCFKPPYLFVVLNAIIISIVASSRFHHSSNPQSPEPTPPRVESMPAPTVPEPPLFQVKAVLEVEKKVIEEDVVALKRKDSTEIPSPEEKPLVSARFTHRKFLKSSSEGGRALRVVAKAKRDETLESTWKAITEGRSMPLSRHMKKSDMWHNRNVTPQPQETFNDALSVSSGRLRKEPSLSQDELNRRVEAFIQKFNQEMRLQRQQSLEQYMQMINRGAA

SEQ ID NO: 5405 - protein, 328 aa, Prochlorococcus marinus str. NATL1A
MSRIYEDNSFAIGHTPLVKLNSITKNAKATVLAKIEGRNPAYSVKCRIGANMIWDAEKKGLLNKDKVIIEPTSGNTGIALAYTAAARGYKLILTMPESMSIERRRMMAVLGAELILTEAAKGMPGAIAKAKEIADGDPQKYFMPGQFDNPANPEIHFKTTGPEIWDDTDGQIDVLVSGVGTGGTITGVSRFIKQEKNHSLLSVAVEPTHSPVITQTLNGEEVKPGPHKIQGIGAGFIPKNLDLSVVDQVEQVSNDESIAMALRLAQEEGLLVGISCGAAAAVALRLAEKEEFAGKTIVVVLPDLAERYISSVMFENVPTGVIKEPSLA

SEQ ID NO: 5406 - protein, 204 aa, Rhodospirillum rubrum ATCC 11170
MTESVGTLTGRPVPDFTAPAVLADNSIVEDFCLKDYLAGFYGLIFFYPLDFTFVCPSEILAHDHRLPAFAAKEAKVVAISVDSQYSHLAWKKTPIAEGGLGPIGFPMVADISKAIARSFGVLLETGVALRASFLVDRGGIVRHQTVNDLPLGRNVDETLRMIDALRFHDAHGQVCPAGWKTGDPGMTASPEGVAAYLSANAERL

SEQ ID NO: 5407 - protein, 373 aa, Pseudomonas putida GB-1
MLIVHIADITMFYAPASGGVRTYLDAKHHRLDAIHGVRHSLLIPGASAHQADGIYQVPAPPLPFGKGYRFPVRLAPWCNTLRTLKPDLIEVGDPYLTAWAALEARRQLDVPVIGFYHSDLPLLVSNRMGNWFTPNVEAYVSKLYGNFDRVLAPSQVMADKLRRLGVRDVHVQPLGVDLATFHPAQRDPHLRAELGIADTSRLLIYAGRGSREKNLPVLLDCMQQLGHPYHLLLVGSNMPASVPHNVSVIDHFCPAAEVARLMASADLLVHAGDQETFGLVILEAMASATPVVAVRAGAFTEIINEQCGRLCTPNEGRAMAMAVREAFEAGVRKLGMQARRHVEQHYSWDKVVAGLLQHYQAVLGHQPQVRAHA

SEQ ID NO: 5408 - protein, 722 aa, Deinococcus radiodurans R1
MGHPNFIMCSPGPGAWLLALLPVCRAASPDGQEVPMTVPDSSTPAPLAPAPLTPVQQATLRALADTVLPALPGRGDVPFWQLAASDLGVHLALEGYLNTQLPPEARAGLLGLLDALASLSFAAQSQAVRETLLRTVSGIAPEAAAGLGALRQLSLLFGYGMTDEQGQNPLWAQFEYAGFSSPAPQRNSAITPYVPQDGEVLEADAVVVGSGSGGGVIAARLAQAGKRVVVLEAGGHYHEAHFQGRELAAYQTLYYRGGYHPTADGNVTLVAGANLGGGSTVNWSNSVPPRDDIRQRWASEHGLSDVADPGYDRHIDAVLERMGVSEQCSDHNGPHQRLVEGADKLGYTFVKAALNLSPEHYDADKAGHAGFGDQTGAKQGTLNTFLKDAFEAGARILVGTRAQRVLVEDGRAAGVSAVTTMGDETRQITVRAPQVVVACGALETPALLLRSGIGGPAAGRYLRLHPAGLVAGIYGEDQRAWWGPPQSGILKQFADHENGHGFIIEGVQYGPALMASGLPWTGGEAHRDLMSKFHRMATFVSIVQDRGHGQVTVDDEGNAVHTYALTDDLDARNFRRGVTESIRLHEAAGAEEIVALAPGVAPWRRGDDLEAFIGQVAQVPLGAGGQTVFSAHQMGSARMGSDPQTSVADPDGQLHDVPGVWIGDTSAFPTCSGVNPMVSCMALASRTAEKLLAAMEGADGGTGSGLPHHHSAGLTAEAGAPQ

SEQ ID NO: 5409 - protein, 296 aa, Azoarcus sp. BH72
MEFKTLEDYVGKTPLVRMKRITAGHNNVILAKLEGNNPAGSVKDRPALSMVVRAEARGDIKPGDTLIEATSGNTGIALAMAAAMRGYRMILVMPENQSVERRQTMRAFGAELVLTPKEGGMEMARDVAEKMRDEGKGIILDQFANPDNPLAHYEGTGPELWEQTAGRITHFVSSMGTTGTIMGTSRFLKEMNPAIRIVGCQPEEGSQIPGIRKWPEAYLPAIYHRESVDSLEYVSQADAEEMTRRLAREEGLFAGISSGGAMHVALRIAAQVENAVIVSVICDRGDRYLSTGVFPA

SEQ ID NO: 5410 - protein, 197 aa, Prochlorococcus marinus subsp. marinus str. CCMP1375
MTEGCLRVGQMAPNFTAEAVVDQEFKQISLTDYRGKWVVLFFYPLDFTFVCPTEITAFSDRFSDFSSKSTEILGVSVDSKHCHLAWIQTPRNRGGIGDITYPLVSDLKREIATAYNVLNDDGEADRGLFLINPEGIIMHCTINKAPVGRNVDETLRILQGYQYVASNPDKVCPANWNPGDKTMLEDPKGSKEYFASL

SEQ ID NO: 5411 - protein, 238 aa, Physcomitrella patens subsp. patens
MASSTAKSGLCTFMDAFTGTRCPPSIAVSCRPPWSGVRRLAVVSSAQQDNVSENSDVSQTQMQKQNEGSRPPVSRRSTGLRRGDSLRDLASSFFDIWDPFVGDRSLRQMLNTVERLFADPIFGSPSPATALDLRTPWDVKEDDDAYKLRFDMPGLSKEEVKVSVEDGDLVIKGEHNAEEQKEENWSSRSYGSYNTRMALPENALFENIKAELKNGVLYVVVPKSKEDPQKKVIDINVQ

SEQ ID NO: 5412 - protein, 390 aa, Synechococcus sp. WH 7805
MGHIAWLGKKSPFCGNVTYGLSTTNALRERGHQISFIHFANPGVPGSDTSLLANDPDVSLPYLVKSQVYTIPSPGAQRELRESLERLQPDLVHASLTLSPLDFRLPDLCQQLEVPLVATFHPPFDAGLRNLTAGTQQLTYQLYAPALARFDRVIVFSDLQAELLARLGVREERIAVIPNGVDPDCWRPDDTNLSTIGSPLRSVRARIGDQRMFLYMGRVATEKNVEALLRAWRLVKPEGCRLVIVGDGPLRTTLQNAYSGNDVLWWGYESDLANRVALLQSAEVFVLPSLVEGLSLALLEAMASGCACVATDAGADGEVLDHGAGIVLSTQGVTTQLRTLLPVLRDQPVLTRELGRRARERVLERYTMNRNIDALERLYADVIRHEPMAA

SEQ ID NO: 5413 - protein, 158 aa, Ralstonia eutropha JMP134
MNKVTIDVTVNGEEHTVEVPARRMLSDLLRDDLNLTGTKRGCETGICGACTVLVDGEAVKSCLMLAAQVRGRHVMTVEGLAADGELHPLQQCFMECGGLQCGYCTPGFLMTSCALLANNPNPTEEEVRHGLNGNLCRCTGYVGIVESILSAAEKMRGN

SEQ ID NO: 5414 - protein, 684 aa, Sulfolobus solfataricus P2
MIREDLPKITGKGTYIDDIDPRNTVYLGIIRSPIARGIIKSISRPEKALLTLTWEDVKIYMPVRVDPETLKQSNIVKMPILADGKVNFVGQPVLAYVVEDRYAIEDIADEMSIEYEELKPIIDVEKAMNSDDEIHSGAKRNISVNKLLEGGELSAKKRAEVVVSRKINQARIISNPMEPKGIIAHWDGEYLNIYGSFQSSFRIKNDLRETLNLSPEKIRVYSPQNVGGGFGNKVPAHPEYVIASIASMKLGRPVKWIETRYEHLKNPTVGRGVLSDVKMYATKQGEILGIEGYVAVDLGAYNYTLNPTTPAFIAQLLTGPYKMRFASIRAYGIFTNLPPTGPYRGAGRPEAALIHETLVEDLAEELGVDSVEIRRRNLISDNGYVTPLGVRIDPAGYNEVLNEAEKYYRKAKEVYKDKGVSIVVFTDIIRLSPGEGARVRIENGKIKIFVGTGPHGQAHGDTFSKLASETLGIPQDLIEVVANTTDGVKEGIGSFGSRSATVGGSAVIEACRQLLSKVNMPIDKALKEMNGMEAEIFYKSDDIFSPGSHVAVVDVDRDTGFVKVLEYYAVDDVGRILIKEEVEGQIIGGVLQGVSQVLWEHAPYDENGNPLFSSIADCGVPTAVEASYKVYVSEVEYPSATSAKSRGVGEAGTTGGLPAVFLALEKITHRKFNKTPIYPWDITR

SEQ ID NO: 5415 - protein, 189 aa, Pyrococcus furiosus DSM 3638
MIRVGEVVPDFEADAYFPEKDEIGKLRISDYRGKWVVLAFYPADFTFVCPTELEELAEYYEEFKKEGAEIISVSTDTAYVHKAWHDTSPAIKKVRFPMLADPAGKICRLFGTYIEDEGISWRATFIIDPDGKVVHMEMHDNSIGRSAKEILRRLRAAKFVRENPGVVCPASWEPGKEALKVSLDLVGKI

SEQ ID NO: 5416 - protein, 200 aa, Rickettsia typhi str. Wilmington
MSVFVGKTAPDFTAKAIMPNNNIDDKFKLSDYAAGDNVVLFFYPLDFTFVCPSEIIAFHNKLGEFTERRTKVIAVSVDSHFSHLAWKNTPHNKGGLGQIQFPMISDITKDISSKYNVLNEDGIALRGTFLIDKDFIVRHMLVNDLPIGRDINYTLKVIDALTHHQKHGEVCPAGWHKGEEAITPSHEGIAHYLSSHAEKL

SEQ ID NO: 5417 - protein, 319 aa, Xanthomonas campestris pv. campestris str. ATCC 33913
MALYDNILDTIGRTPVVKLNRLAPDHVSLYVKVESFNPGGSVKDRLALAIILDAEQRGLLKPGDTIVEATSGNTGVALAMVAAARGYKFVATMVETFSIERRKLMRAYGAKVILTPAAERGSGMVRKAKELAEQHGWFLASQFANPANPAYHRNTTAAEILRDFAGHRLDHFVTGWGTGGTLTGVGEVLRVARPEVRITATEPAGAALLQGQDWKPHKIQGWTPDFVPEVLNREVAHEILSVEDTDAISVARRLAAEEGIFTGISGGGTVSTALRVAETAVPGAVILAMLPDTGERYFSTPLFADINEGSDDDWLAGLP

SEQ ID NO: 5418 - protein, 698 aa, Glycine max
MASTLKSGGIHTGAINDDLYKELWHACAGPLVTLPREGERVYYFPQGHMEQLEASMYEGLEQQMPSFNLPSKILCKVVNVHLRAEPETDEVYAQITLLPEADQSEVTSPDDPLPESPRVKIHSFCKTLTASDTSTHGGFSVLRRHADDCLPPLDMSQQPPWQELVATDLHGNEWHFRHIFRGQPKRHLLTTGWSVFVSSKKLAAGDAFIFLRGENGELRVGVRRVMRQQSNVPSSVISSHSMHLGVLATASHAIATGTLFSVFYKPRTSRSEFIVSVNKYLEVQSHKLSVGMRFKMRFEGDEIPERRFSGTIVGVGDNKSSSVWPDSEWRSLKVQWDEPSSILRPDRVSSWELEPLVSTTLANSQPTQRNKRARPLILPSTMPDSSLQGGFAGLVVQNFFVILLPILFFYIIIFLCAPGIWKSSVESTSFSYCDPQQGRGLYPSPKFNSSATNFIGFSGNSSVGSPSNKSIYWSNRMENNLESISAIALKEAGEKRQGTGNGCRLFGIQLLENSNAEGNLQTVTLSGRVGDDRSVPSLDAESDQHSEPSNANRSDIPSVSCDAEKSCLQSPQESQSKQVHMQGMAVGRAVDLTRFDGYEDLLRKLEDMFNIKTELCGSLKKWQVVYTDNEDDMMMVGDDPWDEFCSVVRKIFIYTAEEVKKLSPKIRLPMNEKVNPSKQDSEAIVNPEDQSSNMGPSC

SEQ ID NO: 5419 - protein, 186 aa, Salmonella typhimurium
SLINTKIKPFKNQAFKNGEFIEVTEKDTEGRWSVFFFYPADFTFVCPTELGDVADHYEELQKLGVDVYSVSTDTHFVHKAWHSSSETIAKIKYAMIGDPTGALTRNFDNMREDEGLADRATFVVDPQGIIQAIEVTAEGIGRDASDLLRKIKAAQYVAAHPGEVCPAKWKEGEATLAPSLDLVGKI

SEQ ID NO: 5420 - protein, 799 aa, Mycobacterium bovis AF2122/97
MTTIESRPPSPEDLADNAQQPCGHGRMMRKEDPRFIRGRGTYVDDVALPGMLHLAILRSPYAHARIVRIDVTAAQAHPKVKAVVTGADLAAKGLAWMPTLANDVQAVLATDKTRFQGQEVASVVAEDRYSARDACELVDVDYEPRDPVVDARTALDPSAPVIRTDLEGKSDNHIFDWETGDAAATEAVFAKADVVVQQEIVYPRVHPAPMETCGAVADLDPVTGKLTLWTTSQAPHAHRTLYALVAGLPEHKIRVISPDIGGGFGNKVPIYPGYVCAIVASLLLDKPVKWMEDRSENLTSTGFARDYIMVGEIAANRDGKILAIRSNVLADHGAFNAQAAPAKYPAGFFGVFTGSYDIEAAYCHMTAVYTNKAPGGVAYACSFRITEAVYFVERLVDCLAFELKMDPAELRLRNLLRPNQFPYQSKTGWVYDSGDYETTMRKAMNMIGYEALRAEQKQRRARGELMGIGMSFFTEAVGAGPRKDMDILGLGMADGCELRVHPTGKAVLRLSVQTQGQGHETTFAQIVAEELGIAPDDIEVVHGDTDQTPFGLGTYGSRSTPVSGGAAALVARKVRDKAKIIASGMLEVSVADLQWEKGKFHVKGDPSAAVTIADIAMRAHGAGDLPEGIEGGLDAEVCYNPSNLTYPYGAYFCVVDIDPGTAVVKVRRFLAVDDCGTRINPMIIEGQVHGGIVDGIGMALMEMIAFDEDGNCLGGSLMDYLIPTALEVPHLETGHTVTPSPHHPIGAKGIGESATVGSPPAVVNAVVDALAPFGVRHADMPLTPSRVWEAMQGRATPPI

SEQ ID NO: 5421 - protein, 803 aa, Geobacter metallireducens GS-15
MKTEYRCDLHVHSSHSNKPTYWALRKFKCPESFTSPRHIYDTAKAAGMDYVAITDHNTITGALEIAHLPGVIIGAELTSYFPEDGCKVHVVALGLRESVFQDLMQLRRNVFELASYLHEKRIAHFLAHPLYAQNDKLSADHIEKLLLLFNTIEVRNGARAKRFNGFTDELLNTLTPERIQRLAEKHGIVPTGPEPWIKGRVGGSDDHGGLFIGRAWTSAQRGETPAGFLDAVFNRETWADGEDGDALTLAHSLYGIAYNFYRERLDGGTNRSTPFVNALLNRMFETSRKMTLRERLRLLVRRNLPEIYEQRGGASFEEVLDREARRVLNDTGFMARISPETRNRKIFAITSYLANRMLYLYSEKLTKLSFSSGIFSIIQSLSTVGLVHLLISPYYLAFHHQHRGKELMRELADRFPLANQGNQREKIALFTDTLDEINGVAITIRRLIATARSRGIELTVITSSPRATGHADGVMNFTSIGDFVLPEYPEIRLHFPPILDVIDFVEREGFTSIHVSTPGTIGLLGLMAARLMDIPAAGTYHTDIPQYVRDLTNDEMLEKAAWNYMIWFYGQLSEVMVPSASTRRQLVEQGLPEEKTRPLPRWVDIDAYTPERRDPHYWKRHGIGEGVKFLYVGRVSREKNLELLADAFIRIVDYGAPAWLIVVGDGPYRAEMEARLAGYPVHFTGYREGEELQRCYASADAFVFPSTTDTFGNVVLEAQASGLPVIVSDEGGPHELMVEGETGLILRHMDEDGLAASLLTLVRDPDLMHTMGRNARAFAEQGASLTGDAYSTILRQPGKAANF

SEQ ID NO: 5422 - protein, 153 aa, Burkholderia sp. 383
MTDITINGQRHQFAGDPDMPLLWYLRDELGLTGTKFGCGMALCGACTVHVEGQPMRACVTPIGTLAGRNVTTIEAAHEKKVGQAVQKAWIDEQVPQCGYCQSGQVMSAVALLTVKPDPTDGDIDAAMSGNICRCATYQRIRVAIHKAAENLKA

SEQ ID NO: 5423 - protein, 414 aa, Zea mays
MSQTGEVQVPLLQTEEADGEWSSKPRRIALFVEPSPFAYISGYKNRFQNFIKHLREMGDEVLVVTTHKGAPEEFHGAKVIGSWSFPCPLYQNVPLSLALSPRIFSEVNKFKPDIIHATSPGIMVLGALAIAKMISVPILMSYHTHLPAYIPRYNLNWLLEPTWSFIRCLHRSADLTLVPSLAIAEDFETAKVVPANRIRLWNKGVDSESFHTKYRRHEMRVRLSGGEPEKPLVIHVGRFGREKNLDFLKRVMERLPGARIAFVGDGPYRAELEKMFMGMPAVFTGMLQGEELSQAYASADVFAMPSESETLGQVVLESMASGVPVVAARAGGIPDIIPKDKEGKTSFLFTPGDLDECVRKIEQVLSSKDLRETVGKAAREEMEKCDWRAASKKIRNEHYSTAISYWRKKMDKSN

SEQ ID NO: 5424 - protein, 342 aa, Magnetospirillum magnetotacticum MS-1
MTRLLQAMAGAPHGGAEAFFERLAPALGRAGITQRVLIRDNPKRAALLRGQGVDVVEAPFGGALDLVTHWRFRREVKAFKPDIVLTWMNRASRFVPKGPHVTVGRLGGYYDLKYYRQCDHLIGNTPDIRDWIIAQGRPSGQVHYVPNFVADSQGVPPLSRAGLDTPPGAKLIVAMGRLHPNKAFDVLLKAVEQVHDCYLWIAGEGPQRAELEALAAHLSVRPRVRFLGWRDDVAALYATGDLFVCPSRHEPLGNVVIEAWAAARPVIAAASQGPKQLITEGVDGLLVPVDDDQALAQAIRRLLTEPDTASTLAQGGRSAYERQFTEAAVVARYLDFFEKVKR

SEQ ID NO: 5425 - protein, 322 aa, Synechococcus sp. CC9605
MSIAPDITALIGGTPLVRLNRLPQACGCQAEILAKLESFNPSASVKDRIASAMVLEAEQSGTIIPGRTVLVEPTSGNTGIALAMVAAARGYRLILTMPDTMSTERRAMLRAYGAELQLTDGAQGMNGAIALAKELVDEIPNAYLLQQFDNPANPAVHERTTAEEIWRDTEGQIDAFVAGVGTGGTITGCARLLKQRQPQLQVIAVEPEASAVLSGKPPGAHRIQGIGAGFVPAVLELDRIDSILTVSDEEAMQVGRRLAREEGLLCGISSGAAMAAALRVGQDPAMVGKRLVVMLASYGERYLSTPMFSAASQLPARRDGQL

SEQ ID NO: 5426 - protein, 322 aa, Synechococcus sp. WH 8102
MAIASDITSLIGGTPLVRLNRLPLQSGCGADVIAKLESFNPSASVKDRIASAMVLAAEQEGTIQPGRTVLVEPTSGNTGIALAMVAAARGYRLILTMPDTMSTERRSMLRAYGAELQLTDGAQGMAGAIALANELVEEIPEAYLLQQFDNPANPAVHERTTAEEIWHDCDGHLDALVAGVGTGGTITGCARLLKQRNPQLQVVAVEPAGSAVLSGRPPGAHRIQGIGAGFVPAVLERDLIDEVMTVSDEEAMDVGRRLARQEGLLCGVSSGAAVAAALRLGQRSEWQGRRVLVMLASYGERYLSTPMFSGVASSPARQDPML

SEQ ID NO: 5427 - protein, 200 aa, Haemophilus somnus 2336
MVLVTRQAPDFTAAAVLGNGEIVEKFNLKQHIAGKAAVVFFYPMDFTFVCPSELIAFDHRYKEFQDRNVEIIGVSIDSEFTHNAWRNTPVDNGGIGQVQYALVADIKHDIAKAYGIEHPEAGVALRASFLIDKEGVVRHQVVNDLPLGRNIDEMLRMVDALQFHEEHGEVCPAQWEKGKEGMTGSPEGVAKYLKQNADKL

SEQ ID NO: 5428 - protein, 192 aa, Synechococcus sp. PCC 7002
MLQFFRTILITVVAIAFMWFPGEAAIALGGPQPELNQLAPEFTLLGNDGEGKIQEFSLQDYRGQWVVLYFYPQDFTPGCTLEARRFQQDLPKYLERNVQVLGVSVDDVDSHEAFCDAEGLKFPLLADSTGDVSKQYGSYLTGYSLRHTYLIDPEGILRKIYLGVNPAIHSQEVLTDLDSLMANSSAQLPPMG

SEQ ID NO: 5429 - protein, 238 aa, Triticum aestivum; identical to SEQ ID NO: 5139

SEQ ID NO: 5430 - protein, 472 aa, Candidatus Kuenenia stuttgartiensis
MVQEIRFLLNEKELHTAESSGIAVLDYLRINQRLTGTKEGCREGDCGACTVLVGELINNRVFYKSANSCLMPLEELHGKHLVTIEGLNMDNLSPIQQAVVDKGATQCGFCTPGIIVSLTGYAMECASHLTKDGFKKMLGGHLCRCTGYRSLKQSFGMIKEHIDTATGVKTLVEKGIIPDYFKDIPIRLNSISGKQYKKAASTPGFFISGGTDLYVQKGDILPDSLISLLNAHSEMKHIVCENGLLRIGALTTFEAFSNHPEVMKAIPGIQEYISLVASTQIRNRATVGGNIVNASPIADVTILLLAMESTLILKHGSDTRSLPISSFYKGYKKLDKAPSEILSEIVFPVPAPGTKINWEKVSKRKYLDVASINSAIKVREDGGVIRDIHITMGGVAEIPLFLKNTCDYLRGKQITKNTIEGAFPILQHEISPISDIRGSSCYKRLLARQLIIAHFTKLFPGTIKVKDFYESH

SEQ ID NO: 5431 - protein, 760 aa, Candidatus Kuenenia stuttgartiensis
MNRIDAAAHTRGESLFLDDMPLPSGMLYASVFSSPVMHGNIIRLQLQEARLAKGVVAVLSSKDIPGINQIGSIIQDEELLAQSKVNYIGQPVAVVVAESQRAARNAAKIILAEIEELPAVADPKEAFEKGYIIDAPRTFTLGDVDSLWQKCDLVVEGSCDTGGQEHVYLETQRARAVPLEGNNIRIYSSTQSPSAVQHHAAKVLGLSSHNVEVEVKRIGGGFGGKEDQATPWACMAALAAWITQRPVELVLQRGEDMKMTGKRHPYKSDFKMGVTKDGVILSYEVKHYQNSGAVADLSTAVLERTMFHSTNCYYIPNVRIFGVCCKTNLPPNTAFRGFGAPQGMFAIESAITKVAEKLNMPREEIQAKNLLAANNAFPYGQITEDCSIRTVWEKVETRYTLQKIRKRMLSFNKSHFETKKGIAVMPICFGISFTTTYMNQASALVHVFTDGSVSVSTGGVEMGQGLTTNITAIAAKALGINHNRIKVEATNTTRIANMSPSAASATTLLNGNALLLAVNQIIDRLKSLLAKELSISDKEKISIANEKVLCDAHDTGWTWDRLIHTAHQKRINLSAHGFFATPKIWFDKMKEKGSPFAYHVYGAAVIEVTLDCLRGVYTIDSVKIVHDLGRPLNETVDRAQIEGGLAQGLGWMALEDLRFNDKGQLLSRDLATYKVPDAYFMPDDIEIEFLANEESLPGPYGSKAVGEPPFMYGIGVFFALRDAMRAFMPGNDFDFATPLTPERVLLQLYPEYVKRISCKC

SEQ ID NO: 5432 - protein, 169 aa, Novosphingobium aromaticivorans DSM 12444
MARFTVNNQPVQYRLEDDTPLLWALRDAANLTGTKYGCGTGECGACMVIVDGQAMPSCTLLLGEAEGRSVTTIEGLSADRSHPVQQALVAEQAVQCGFCTPGIVMAAAALLTANASPSDEDIARAITNICRCGTYPRLTRAIQRAARVLRGEETISAAPPPAIVAPGAG

SEQ ID NO: 5433 - protein, 329 aa, Oryza sativa; identical to SEQ ID NO: 3816

SEQ ID NO: 5434 - protein, 344 aa, Yersinia enterocolitica
MYEAGHNVMIISLTGETLVRPNDGIQLNELKLDKAPFSLFKGLFEVKKIIKKFKPDIVHSHMFHANLFARILRVFTKIPALICTAHNTNEGSSLRMLAYKYTDKLASLSTNVSQDAVDSFIHKGASSTGRMIAVSNGIDASQFDFSMDERKVKRSELGIFNDTPIILSVGRLTEAKDYPNLLTAFSLLIKDNSLQSFPQLFIVGTGHLDGYLKNMSKEFGIDKYVTLFGQRDDILQLMCAADIFVLSSEWEGFPLVITEAMACKKIIVATDAGGITEALGDCGSIVPIKDPNSLSQAINKMIKLSDNEKEILGNKARERIIQTNSIEKIIELGCLFILNLKNNC

SEQ ID NO: 5435 - protein, 386 aa, uncultured Thermotogales bacterium
MMNIAMFSDTYSPQVNGVVTMIRMLEENLQKRGHNVYIFTVDHPEAGIQENVYRVPSLRFPWEKQHRIGLPTNFKELIQIVKSLDIDVVHSHTSLIVGYLSGLVISNLHIPGVTTYHTMMEEYVHYIPFMEPILRVYIRGQDRRFCDKNRAVIAPSIKIRKLLLSYGVSSHIEVIPNGVDLTPFMKEVDFDEIRSFRNKYNIGENEKVLIFVGRLGEEKSIDKLIENFARINTALQDSHLLLVGDGPLKAKLKELAGNLGVGERVHFTGFLKWPDEITLAYKSSNAFMIASHTETFGLVTLEAMASGLPVVAYKDDSIANMVLDGENGFMCPSKEELSTAAIELLRDRELMERMSKRSVEISRDFSAEANVDRTVSLYEKVVRNEI

SEQ ID NO: 5436 - protein, 1353 aa, Arabidopsis thaliana
MEQNEFMEAIMYVNGVRRVLPDGLAHMTLLEYLRDLGLTGTKLGCGEGGCGSCTVMVSSYDRESKTCVHYAVNACLAPLYSVEGMHVISIEGVGHRKLGLHPLQESLASSHGSQCGFCTPGFVMSMYALLRSSKNSPSEEEIEECLAGNLCRCTGYRPIIDAFRVFAKSDDALYSGLSSLSLQDGSNICPSTGKPCSCGSKTTSEAATCNEDRFQSISYSDIDGAKYTDKELIFPPELLLRKLAPLKLGGNEGITWYRPVSLQNLLELKANFPDAKLLVGNTEVGIEMRLKRLQYPVLISAAQVPELNALNVNDNGIEVGSALRLSELLRLFRKVVKERPAHETSACKAFIEQLKWFAGTQIRNVACIGGNICTASPISDLNPLWMASRAEFRIINCNGDVRSIPAKDFFLGYRKVDMGSNEILLSVFLPWTRPLEYVKEFKQAHRRDDDIAIVNGGMRVFLEEKGQQLFVSDASIVYGGVAPLSLRARNTEELLIGKNWNKCLLQDALKVIQSDVLIKEGAPGGMVEFRKSLTLSFFFKFFLWVTHHVNNVNPTIETFPPSHMSAVQLVPRFSRIGKQDYETVKQGTSVGLPEVHLSARMQVTGEAEYTDDTPLPPCTLHAALVLSKVPHARILSVDDSAAKSSSGFVGLFLAKDVPGNNMIGPIVADEELFATDVVTCVGQVIGVLVADTHENAKTAARKVDVRYQELPAILSIKEAINAKSFHPNTERRLRKGDVELCFQSGQCDRIIEGEVQMGGQEHFYLEPNGSLVWTIDGGNEVHMISSTQAPQQHQKYVSHVLGLPMSKVVCKTKRLGGGFGGKETRSAFIAAAASVPSYLLNRPVKLILDRDVDMMITGHRHSFVGKYKVGFTNEGKILALDLEIYNNGGNSMDLSLSNLERAMFHSDNVYEIPHVRIVGNVCFTNFPSNTAFRGFGGPQGMLITENWIQRIAAELDKIPEEIKEMNFQVEGSITHYFQSLQHCTLHQLWKELKVSSNFLKTRREADEFNSHNRWKKRGVAMVPTKFGISFTTKFMNQAGALVHVYTDGTVLVTHGGVEMGQGLHTKVAQVAATAFNILLSSVFVSETSTDKVPNASPTAASASSDMYGAAVLDACEQIIARMEPVASKHNFNTFSELASACYFQRIDLSAHGFHIVPELEFDWVSGKGNAYRYYTYGAAFAEVEIDTLTGDFHTRKADIMLDLGYSLNPTIDIGQIEGAFVQGLGWVALEELKWGDAAHKWIKPGSLLTCGPGSYKIPSINDMPFQLNVSLLKGNPNAKAIHSSKAVGEPPFFLAASAFFAIKEAIKAARSEVGLTNWFPLETPATPERIRMACFDEFSAPFANSDFCPKLSV

SEQ ID NO: 5437 - protein, 200 aa, Aeromonas hydrophila
MALVGRPAPDFTAAAVLGNGQIVDSFNLASHIKGKAAVLFFYPLDFTFVCPSELIAFDHRLEEFNKRGVEVIGVSIDSEFSHNAWRNTKIEDGGIGPVKYPLVADIKHEICKAYDVEHPEAGVAFRGSFLIDKNGVVRHQVVNDLPLGRNIDEMLRMVDALQFHEEHGEVCPAQWEKGKKGMTASPDGVAKYLSENAASL

SEQ ID NO: 5438 - protein, 809 aa, Oligotropha carboxidovorans
MNIQTTVEPTSAERAEKLQGMGCKRKRVEDIRFTQGKGNYVDDVKLPGMLFGDFVRSSHAHARIKSIDTSKAKALPGVFAVLTAADLKPLNLHYMPTLAGDVQAVLADEKVLFQNQEVAFVVAKDRYVAADAIELVEVDYEPLPVLVDPFKAMEPDAPLLREDIKDKMTGAHGARKHHNHIFRWEIGDKEGTDATFAKAEVVSKDMFTYHRVHPSPLETCQCVASMDKIKGELTLWGTFQAPHVIRTVVSLISGLPEHKIHVIAPDIGGGFGNKVGAYSGYVCAVVASIVLGVPVKWVEDRMENLSTTSFARDYHMTTELAATKDGKILAMRCHVLADHGAFDACADPSKWPAGFMNICTGSYDMPVAHLAVDGVYTNKASGGVAYRCSFRVTEAVYAIERAIETLAQRLEMDSADLRIKNFIQPEQFPYMAPLGWEYDSGNYPLAMKKAMDTVGYHQLRAEQKAKQEAFKRGETREIMGIGISFFTEIVGAGPSKNCDILGVSMFDSAEIRIHPTGSVIARMGTKSQGQGHETTYAQIIATELGIPADDIMIEEGNTDTAPYGLGTYGSRSTPTAGAATAVAARKIKAKAQMIAAHMLEVHEGDLEWDVDRFRVKGLPEKFKTMKELAWASYNSPPPNLEPGLEAVNYYDPPNMTYPFGAYFCIMDIDIDTGVAKTRRFYALDDCGTRINPMIIEGQVHGGLTEAFAVAMGQEIRYDEQGNVLGASFMDFFLPTAVETPKWETDYTVTPSPHHPIGAKGVGESPHVGGVPCFSNAVNDAYAFLNAGHIQMPHDAWRLWKVGEQLGLHV

SEQ ID NO: 5439 - protein, 322 aa, Buchnera aphidicola str. Sg (Schizaphis graminum)
MNKIYEDNSFTIGNTPLVRLNNIGNGNILAKIESRNPSFSVKCRIGANMIWDAEKKGRLNKNIEIIEATSGNTGIALAYVAAARNYSLTLIMPDSMSIERRKLLKSLGAHLILTNGKHGMKGAISKANEIVSLNTKRYLLLKQFENPANPEIHQKTTGPEIWKDTKGNIDILISGVGTGGTITGITKYIKIKEGKKDLISVAVEPLESPVITQFLSGKKIKPGLHKIQGIGAGFIPKNLDLSLIDRIITVSSEEAIFNAKKIMKKEGILSGISSGAAIAAALKIQKENDFKNKNIVVILPSSGERYLSTELFSRSFKNENNY

SEQ ID NO: 5440 - protein, 395 aa, Trichodesmium erythraeum IMS101
MKILLVCTEKLPVPCIRGGAIQTYIDGILPFLKRDHEVTVFSVADPELPDQEIRDNILYKRSSRKTSEEYYHAVTNFVAGREFDWIVIYNRPKYLPMVAEVAPNSRFILSMHNEMFHAKKIEPEEAILCLERVEKVVTVSKFIADGIAKLFPGYEHKLTPVYAGVDLKLFQPRWIEGLEGKRKEKLAALGLEDKQVILYVGRLTDKKGPHLLISAMTKVIKKHPSAVLLLVGSKWYGNNEENDYVREIKVKAEQLGGAVQMTGFIPPYEVADYFLLGDVFVCASQWEEPLARVHYEAMATGLCTITTGRGGNPEVIIPGKNGIVITDYENSGAFADCIDYLLSMPNKREEMGKRGRELAELYYSWSRVAWDILSIINDSTSMYSSSSLERFGQTG

SEQ ID NO: 5441 - protein, 149 aa, Prochlorococcus marinus str. MIT 9312
MQIGDKIPEFSLLDQNGIKRSNKGLKNPLVLFFYPKDDTPGCTIEVCGFRDKYDLFKVLGAQVWGVSNGSSSSHLAFANKNKLQYPLLCDTNNSLRKTFKVPNVLGFMDGRVTYVIDRNGIVRHIFRDLLNGPEHIKEAIRVLKEIQNK

SEQ ID NO: 5442 - protein, 349 aa, Yersinia enterocolitica
MKNIAFVITKSIIGGAQGWVLEQVKLLKDDCKIILITSEPGWLTETIVCDKIVIIPEIRKMASIKAIYVLYKILKENKIDIVVSSSANAGLYSRLARFISTFPWCVCSHGWSCIYNGNVLKFIFCYIEKLLSYITDVVWCVSQSDADKAIKIIGIKPEKIITQLNAITPLTERPDRPCQNKIIYVCRLAYPKRPDLILKVAAANHKFDLDIVGDGEYYQDLKKEYSSYNNIHFYGEIKGFDRFHEYDVFVLTSESEGLPMAAIEATSASLPVILSDVGGCSEVVDKNGILIDNTIEELYFALNTVFSNYDSFYKAAQKQKNKFDINNVKNKCRKIILDDRYVWFLKFNR

SEQ ID NO: 5443 - protein, 282 aa, Picea sitchensis
MASATSPFFPLLVSSTHERVKAGCSSSGRWRAPKGALEGLRRVPKGGFEGLGKAFSNRLAGPRTAAACTSNSKSSNLGRRLVVNAGELPLVGNKAPDFEAEAVFDQEFIKVKLSEYIGKKYVILFFYPLDFTFVCPTEITAFSDRHSEFEKLNTEILGVSIDSVFSHLAWVQTDRKAGGLGDLKYPLISDVTKGISKAYNVLIADQGIALRGLFIIDKEGVIQHSTINNLAIGRSVDETLRTLQALQYVQDNPDEVCPAGWKPGDKSMKPDPKLSKEYFEAI

SEQ ID NO: 5444 - protein, 379 aa, unidentified eubacterium SCB49
MKIAMVCYPTFGGSGVVATELGVALAERGHEVHFITYKQPVRLDLLSPNIYFHEVQVPQYPLFKYQPYELALSSKLVDMVRYYGIDLMHVHYAIPHAYAGYMAKKILEDEGVIIPMVTTLHGTDITLVGNHPHYKPAVTFSINNSDKVTSVSESLKKDTLRLFSIHNEINVVPNFIDMKKHENTFTDCQRDLMALPEERIITHVSNLRPVKRVIDIVNIFAKIQEEIPSKLLIVGEGPEKEPAQELVDSLGLTQKVVFLGNSNEVNKILCFTDLFLLPSEKESFGLAALEAMACGVPVISSNAGGLGEVNTHGVSGYLSEIGEVEDMAKNAMRILKDDETLQRFKEQAKKEAARFDTDNIVPFYEDIYEQAVKESLVKK

SEQ ID NO: 5445 - protein, 154 aa, Acidobacteria bacterium Ellin345
MPDLTLNINGKDLKVSSPNDEPLLSVLRNRLDLTGTKYGCGEGQCGACTVLINGRAMRSCLTPVSAAVGKKIVTVEGLAADGKLTKVQQAFVDEEAFQCAYCTSGMVMAATALLAINAKPSEEEIIRHMEGNVCRCGTYPRIIAAIQRAAGGAR

SEQ ID NO: 5446 - protein, 153 aa, Burkholderia sp. 383
MITLTVNGSEQHFDGNPDMPLLWYLRDVLGHTGTKFGCGMALCGACTVHLDGVAIRSCITPVAAASGKRVTTIEGLSTDLDHPLQQAWQELNVAQCGYCQSGQIMQAASLLKTNPHPTDADIDDAMSGNICRCGTYTRIRAAIRLAVRRGGAA

SEQ ID NO: 5447 - protein, 152 aa, Azotobacter vinelandii
MIKLNLNGKDHEFDAPGEMPLLWALRDVAGLTGTKYGCGMALCGACTVHVDGQPTRACVTPLAAVAGKQVVTIEGVAGQPAGKAVQEAWRKLDVVQCGYCQSGQIMAASALLSANKNPSDTDIDSAMSGNLCRCATYVRIRAAIHEAARSLA

SEQ ID NO: 5448 - protein, 153 aa, Xanthobacter autotrophicus Py2
MAVTLTVNGQARTVDADPDTPLLWVLRDELDLVGTKFGCGQALCGACTVHLDGTPVRSCQTALGDVGDGKVVTIEGIQGREAEAVRAAWVSLDVVQCGYCQSGQIMSAVALLAENKKPTDPDIDAAMDGNVCRCATYHRIRAAIHDAARRLEA

SEQ ID NO: 5449 - protein, 791 aa, Rhodococcus sp. RHA1
MTATAEPEIGKARKRKEDEHLVTGRTRWTDNLVLPGMQHLAILRSPFAHARITGVDASAARGMPGVVAVLTGADLADEQGSLPCAWPITPDMKSPPAPSLAVDAVNFAGEAVAVVVARSAYEAHDALEAIDVEYDDLPVVLDLAAAAADGADLVHPDLGTNVSATWTFDSAEAGTGGDVEQAIRDAEVLVERTFRQQRLIPAFMEPRSVVVDPTGAQITMWSATQIPHILRLMLAMTLGIPEHKLRVVAPDVGGGFGGKLQVTPEEVIALLVARRLGKPVKYTESRSESMVAAHHGRDQIQKLTLAARRDGTVTGMKVELLADMGAYLRLVTSGVPILGAFMFNGIYKFPAYHFTCTNVFTNKVPTDAYRGAGRPEATFAIERMMDELATELSLDPLELRAKNWITHEEFPFDTVAGLTYDSGNYEAATAHARELFDYDGLRREQAERRERKDPVQLGIGVSTFTEMCGLAPSRTLGALAYGAGGWEHAAIRMLPTGKVEVVTGSSAHGQGHETAWSQVVADQLGVPFEDVEVLHGDTQTSPRGMDTYGSRSLAVGAIAVVKAAEKVIAKARPIAAHLMECAEDDLEFTEGRFRVKGTEKAVGIADVALAVFAAHDLPEGVEPNLDSEAAYDPENFSFPHGTHLCAVEVDTETGKVGIRSYVCVDDIGHVVNPLIVEGQVHGGLAQGIAQALYEEALYDESGTLLSGSFAEYHVPSAADLPTFTTGRTETPATGNPLGVKGVGEAGTIASTPAVVNAVLDAVRQFGVRDVEMPCTPMRVWHAIHTAQGGAQ

SEQ ID NO: 5450 - protein, 188 aa, Psychrobacter arcticus 273-4
MASIINQEIPEFSAQAFVNGEFKTITSEDVKGSWAIFLFYPADFTFVCPTELEDMAAHYEELKGLGVEVYSVSTDTHFTHKAWHDSSEAIGKVTYPMIGDPTGRITRGFNVMIEEAGLAERGTFLVDPDGLIQVAEIHAGGIGRSAKDMLRKVKAAQYVRENDGEVCPAAWEAGQETLKPSLDLVGKI

SEQ ID NO: 5451 - protein, 436 aa, Oryza sativa Indica Group
MVIGAEIKDEMEEAPPLLLDEAARPRRVALFVEPSPFAYISGYKNRFQNFIKHLREMGDEVIVVTNHEGVPQEFHGAKVIGSWSFPCPMYGKVPLSLALSPRIISEVAKFKPDIIHASSPGIMVFGALAIAKLLGVPLVMSYHTHVPVYIPRYTFSWLVEPMWQVIRFLHRAADLTLVPSVAISKDFETAHVISANRIRLWNKGVDSASFHPKFRSHEMRVRLSDGEPEKPLIIHVGRFGREKNLDFLKTVMDRLPGVRIAFIGDGPYRSELEKMFEGMPAVFTGMMQGEELSQAYASGDVFVMPSESETLGQVVLESMSSGVPVVAARAGGVPDIIPEDQEGKTSFLFTPGDLEDCLGKIQLLLTDKEFRDNMGMTARAEMEKCDWRAASKKIRNEFYNAAIWYWRKKRAELIKPLQWLAQMFLPAPEANRITQH

SEQ ID NO: 5452 - protein, 356 aa, Archaeoglobus fulgidus DSM 4304
MKVVLLSSYFPPHIGGVEVHVERIAHHLHRRGFEVVVVTSTASGREKFPFRVEYVPSIPIPYSPITPFLGRFLEKIDGDIFHSHTPPPFFSCSLRKSPHVITYHCDIEIPEKYGRFPIPRALSKLIIRRTDDMLSEALDRADAIVATTKSYAETSRLLAGRDYHVIPNGIELSEFEGVEAEKEPTVLFLGRLAATKGVDVLLKAMKHVDVEARCVIIGDGEERSSLERLARELEVNAEFTGFLPRKKVIEYLSRASLLVLPSLSRLEAFGIVLLEAMACGTPVAASDLPGVRDVASEAGFVFPPGDYMRLSEIINEVLSDERKVKAIGESGRRIVREKYSWDVVVKSLIRLYESLI

SEQ ID NO: 5453 - protein, 177 aa, Rhodococcus sp. RHA1
MRITVTVDGTAYTDEVEPRLLLVHYLRDRLGKVGTVIGCDTGNCGACTVHLNGHSVKSCSVLAVQADGGDVLTVEGLSRDGTLHPVQQAFRDNHALQCGYCTPGMIMQTLDLLAEEPDPDERTVRLGLEGNLCRCTGYQNIVSAVQDAAQRLRGGGTTETPATADAPKTDSAQGGVR

SEQ ID NO: 5454 - protein, 733 aa, Cupriavidus taiwanensis
MSATGTPLDRVDGIAKVTGRARYTADHTLPGLVHAIMVTSTIARGEVVAIDTAACERMPGVRLVLTPFNAPHLPRGGKAAADIPTAGHVMSLLQDTAIHYNNQPIAVVVADTLEQARDAARCLPVRYRPADAVLDFARARARTRKPDDDADSRRGDPDAGLRGAAAVIDAVYTTPMESHNPMEPHATLAAWDGDQLTLYDATQYVTGVRKAVAAAFGLAADKVRVICPYVGGGFGCKGSVWSHVVLAAMAARQLSRPVRLVVERTQMFGPVGGRPLTEQHVIAAAAPDGELHALRHDVTTCTSRIEEWLESAALLTRRLYACPNVQTRHRLVELDIGTPTFMRAPGEAPGSFALECALDELAERLGLDPVALRLRNHADVDPDKQLPFSSKSLRECYRDAAERFGWARRDPAPRSMHADGKLVGMGMATATYPTYRSPASATVRLLPDGTALVRSGSQDLGTGTYTVMTQVAAEALGLPPARVRFELGDTAFPEAPVSGGSQSVASVAPAVQQAAAAARLRLIRQAVADTASPLAGAPVEDVEIVDGWLQRRSDPAQREAISAPIQRAGGHAIEARASTRPGKERQAYSMHAFGAVFAEVRVDPKLGEIRVHRVVATYGAGRLLNRKTAHSQLMGGIVWGIGMALHEKTELDLATGRVANANLAEYHVPVNADIGAIEIAVVDEDDPHINALGTKGIGEIGIVGVAAAIANAVYHATGRRVRDLPITLDQLLD

SEQ ID NO: 5455 - protein, 168 aa, Cupriavidus taiwanensis
MTLHVNGKPCTLQLEPRCTLLDALREILQLTGAKKGCDRGQCGACTVLVDGRRINACLTLAVMQEGRQITTIEGLASGDTLHPMQQAFVTHDALQCGFCTPGQICSAVGMLAEARAGHASAVRPLGPVTLPLGDDEIRERMSGNLCRCGAYPNIVAAVRSACGTGGGT

SEQ ID NO: 5456 - protein, 170 aa, Mycobacterium smegmatis str. MC2 155
MHELPVEVSVNGQTYQGQVEPRVTLADFLRENCGLTGTHLGCEHGACGACTVLLDGQAVRSCLIFAVQVDGQDVTTVEGIAEPDGCLSPVQAALKECHGLQCGFCTPGFVTSITALLRDNPAPTDEEIREGLSGNFCRCTGYQGIINAVHRAAELSTGEAQRDLEVHAQQ

SEQ ID NO: 5457 - protein, 802 aa, Ostreococcus tauri
MMLSCGALDAEVGGFKGVVRRFRPTRVRSGKSLFSWPGAAKTAVLTGVNADAADAKASLEAFLTHYLDFGKIPAKNVFVVVHDRLGKEESNAKVLEALLIERGVTYDVYVGSKLLHSELSTFWQRHLDGGKLDEEDWVILADLDEHLTVPPREDLGSEGHSIPLFLAQADELGYEVVNGIWIDRVTSDGSLTEANGQSLHKQFPKKCQVGPECDLRRKPPRGTAPHHERMVIAHKLKFAIRDVRSLHDFAIDDFARPKPLTVAQKRVFPVPVAVQHFQWTAGTEDRLRGLAESYEACGLKDANVALTELASSLERANHKMTTKTCPSLSCDDTLADNGNSSIRRIAIVTTVWEHVDGVSRTMKRFSEYLRGRGDTSVLVMSPDLAEQDYLRANVDDDIHELVAPVPAIEVPGRPEYKFAPPLRAQQRVVLSAYRPHVVHVAAPDMLGHSAVHWAAEVGVCSVCSYHTAFDTYMQYYHASVLSHPIEHLLKDFYGKCDVVALGVPGERMGFFPRGVNQTLYSPKMRDSKYRKEMFGADDDEIIILWVARIVREKGLQSFMNTVKALNRAAAKEPDLPKFRVVIAGDGPDLGWVRGTLSQYSNVVILGHKGGANLAKTYAAGDIFFFPSKTEVIPNNLIEAMASGLPVVTDDVGVNRAIVQDGVSGIIVKHTAVIPRDVSNYVHALKRLMKDKTLAKRMSQAAVESTVGLTWERTFESLLHAYDRCRPGLPYARHIPREKLDEPKAYPRTYEPTETTRDVIVDDGAPSYSLLYRISRGITGGYVRSLEDAKRDDEVFAKDGSFA

SEQ ID NO: 5458 - protein, 409 aa, Mycobacterium leprae
MNVYVLQSALHLARRGIEVEIFTRATASADPPIVWVAPGVLVRNVVAGPFEGLDKYDLPTQLCAFAAGVLRAEAAHEPGYYDIVHSHYWLSGQVGWLARDRWAVPLVHTAHTLAAVKNAALADGDAAEPPLRSVGEQQVVDEADRMIVNTDDEARQLISIHRADPAKIDVAHPGVDLDMFRPGDRRAARAALGLPLDGNVVAFVGRIQPLKAPDIVLRAAAKLPQVRIVVAGGPSGSGLASPDGLVRLADELGITARVTFLPPQSRTNLATVFQAADLVAVPSYSESFGLVAVEAQACGTPVVAAAVGGLPVAVRDGVTGTLVFGHNVGHWADAVDQLLRLSAGPQARAISRAAVVHAAQFSWDNTTDALLASYRRAIGDFTATRQHRVRDLVATRKPRRWISRRGMGA

SEQ ID NO: 5459 - protein, 162 aa, Bordetella bronchiseptica RB50
MLAATRDFTLEVNASRHTVTADPDTPLLYILRNDLCLNGPKFGCGLGECGACAVLIDGVAARACTIPVRGAAGHAITTLEGLGTPQAPGPVQQAFIDEQAAQCGYCLNGMIIATQALLLRNAAPTDEDIRRELQYHLCRCGTHIEIMAAVRRAARLWAARQA

SEQ ID NO: 5460 - protein, 168 aa, Gluconobacter oxydans 621H
MTDVSVASPCHLRINGKSCSADLPPSVTLLDLLRERLDLTGTKKGCDHGQCGACTVLVDGKRVKSCLILAVSIPNAEVTTIEGLAPDGHLHPMQQAFIDRDAFQCGYCTPGQIMSAVALLEEGHVRTREEIREFMSGNLCRCGAYNGIIEAIEQVVAQQQQDRAGEAA

SEQ ID NO: 5461 - protein, 186 aa, Frankia sp. EAN1pec
MLTVGDVFPAYDLTGVVSSDPDTAFIQETSTSRTGQWRVVFFWPKDFTFVCPTEIAAFGRLNSEFADRDAQILGVSTDNEYVHLAWRQNHSDLRELPFPMLSDIKRELAVACGVLGDDGVAQRATFVIDPDGVIQFVMVTAGSVGRNPAEVLRVLDALQTDELCPCNWQKGEATLGAAAAPAEVAA

SEQ ID NO: 5462 - protein, 158 aa, Geobacillus kaustophilus HTA426
MTIAIGQPAPDFTLPASNGKMVSLSDFRGRYVVLYFYPKDMTPGCTAEACDFRDRHAQFAELNAVILGVSTDPMNRHEAFIEKYELPFLLLSDERHEVAELYGVWKKKKNFGKEYMGIDRSTFIIAPDGTLVQEWRGVKVKGHVDEALAEVARLASSR

SEQ ID NO: 5463 - protein, 381 aa, Leptospira interrogans
MILGIDASNIKSGGGVTHLKELLGNAKPEKYGFDRVILWSVEETLCQIEDKSWLEKVNYSKFFKSRIYRWYWQKFKLPKLAQNSGCKLLFIPGGSFSGKFRPFITMSQNLLPFEWGELKRYGLSFHTLRLLLLYFFQGTSFRKSDGIIFLTKYAKDLISKKLNLKNSNIIIPHGINKKFFHNPRKQNILLGKKKRPIELLYVSFIGAYKHQWNVLEAVSDLNCAGIPIHLSLVGSHNEKASVNKLFQKINHLNSSEKIISLYPNVSYKKISEFYLNADLFIFASTCENLPNILIEAMASGLPILSSKYGPMPEVLDAAGLYCDPLSVEDIKTQLKKLIFSKELRENLSLKAYKKAKQYSWKRNADITFDFFYKIVKAYKEY

SEQ ID NO: 5464 - protein, 271 aa, Arabidopsis thaliana
MASIASSSSTTLLSSSRVLLPSKSSLLSPTVSFPRIIPSSSASSSSLCSGFSSLGSLTTNRSASRRNFAVKAQADDLPLVGNKAPDFEAEAVFDQEFIKVKLSEYIGKKYVILFFYPLDFTFVCPTEITAFSDRYEEFEKLNTEVLGVSVDSVFSHLAWVQTDRKSGGLGDLNYPLVSDITKSISKSFGVLIPDQGIALRGLFIIDKEGVIQHSPINNLGIGRSVDETMRTLQALQYVQENPDEVCPAGWKPGEKSMKPDPKLSKEYFSAI

SEQ ID NO: 5465 - protein, 133 aa, Kandelia candel
DPLDGFFSSAVANVPFNSANEAAAFANARFDWKETPEAHVFKADLPGLKKEEVKVEVEEGRILQISGERRKEQEEKNDKWHRLERSSGKFLRRFRLPENAKMYQVKASMENGVLTITVPKEEEKKPEVEAIEI

SEQ ID NO: 5466 - protein, 379 aa, Flavobacteria bacterium BBFL7
MKIAIVCYPTYGGSGVVATMLGTALAQRGHEIHFVTYKQPVRLELLAKNIFFHEVNVEEYPLFHYQPYDLALSSKLVNVVQEHDIELLHVHYAIPHAYAGYMAQQMLKDLGRQLPMVTTLHGTDITLVGNHPVYKPSVTFSINNSDVVTSVSDSLKRDTLELFDITKHIDVVPNFIDMSNYKTEFTDCDRTVMAFPEERIITHVSNMRPVKRIMDVVKIFEKIQEKIPAILIMVGDGPERFEAEEYAKSKKLQLQIKWVGNSTEIDRILCFTDLFLLPSEKESFGLAALEAMANKTPVISSNTGGLPEVNENGVTGYTSKVGDVEEMAQKAIHILEDDTRLLEFKNNAFAKAKEFDIQLIIPQYEKLYQNVLSTASHNK

SEQ ID NO: 5467 - protein, 307 aa, Acinetobacter sp. ADP1
MNTVEPNFLADEFLLDHYVGKTPLVRLQRLACHTQSVVLAKLEGNNPAGSVKDRPAYNMIMQAEKRGKIRPGDTLIEATSGNTGIALAMVAAMRGYKMKLIMPNNMSQERKDAMLAYGAELIEVTQQQGMEGARDLALKMQSEGQGLVLNQFGNPDNVEAHYLTTGPEIWQQTNGKITHFVSSMGTTGTIMGVSKYLKEQNPDIQIVGLQPSEGSSIAGIRRWPQEYLPTIFEPSRVDRIIDIPQIEAEKTMRRLAREEGISAGTSSGGAVWASLKIAEEQPDAVIVCIICDRGDRYLSTGLFSVQD

SEQ ID NO: 5468 - protein, 365 aa, Gemmata obscuriglobus UQM 2246
MTPTDPLPAARARAERPRVLFAATSLDAGSGGIQRVARLMGRVLLEDFADRATVSLLSLHDKAPAADVGAPVRCAGGSRLRMACHALRTRGTHLITDTCNLGQLRRLPGLKRPHLTALHGIEIWEGAKPAWVSSAKAATVQMFNSDYTRRRAELVHGRFDRADVCWLATETDRAPPARPRHSASAEVLVVGRMVADRDKGHRDLIAAWPSVVDAVPGATLRIVGRGPGQAALEALAAQSGAGRSIVFEGFATEERIDELYARATAFAMPSRGEGFGIVYIEAMRHGLPVVASVHDAAPEVVLDGGTGFTVDLDAPGQLANRVIRLLREPELAERFGAAARCRWAEHFRFSCFRKRFGDILGRFLR

SEQ ID NO: 5469 - protein, 403 aa, Gemmata obscuriglobus UQM 2246
MTKLAIVTTHPVQYYAPWFRHLAERSGLAVRVFYLWDFGVSGRVDPTFGVRVTWDLPLLDGYEHEFVPNRSRRPGTNSFWGIDNPGLLARLKPFAPDAVLCLGYNYATFAKLLLSRPRYPLILRGDSHRLVPRSGLKARLKRAALARVFRRFAAFLSVGQANREYYRLHGVPEDKLVFCPHAVDNDRFTRSRVTAEPEAREWKAALGIPGDHRVVLFAGKFEPKKRPLDLLEAFRRAAPGRASLLFVGNGPQEPELRRAAAGVPNVFFAPFQNQSRMPRTYAAADLVVLPSYGSGETWGLCVNEAMCLGRPVIVSSHVGCGPDLVRDDETGGTFPAGDVGALAARLRAALADPSTLAAWGRAGEARVGRYSYEHATAGLLTCLTRLKPSAGAAPEAGTIGHAR

SEQ ID NO: 5470 - protein, 506 aa, Saccharomyces cerevisiae
MAKSEQQTDSRHNVIDLVGNTPLIALKKLPKALGIKPQIYAKLELYNPGGSIKDRIAKSMVEAEASGRIHPSRSTLIEPTSGNTGIGLALIGAIKGYRTIITWPEKMSNEKVSVLKALGAEIIRTPTVAAWDSPESHIGVAKKLEKEIPGAVILDQYNNMMTPEAHYFGTGREIQRQLEDLNLFDNLRAVVAGAGTGGTISGISKYLKEQNDKIQIVGADPFGSILAQPENLNKTDITDYKVEGIGYDFVPQVLDRKLIDVWYKTDDKPSFKYARQLISNEGVLVGGSSGSAFTAVVKYCEDHPELTEDDVIVAIFPDSIRSYLTKFVDDEWLKKNNLWDDDVLARFDSSKLEASTTKYADVFGNATVKDLHLKPVVSVKETAKVTDVIKILKDNGFDQLPVLTEYGKLSGLVTLSELLRKLSINNSNNDNTIKVEYLDVKKLNNFNDVSSYNENKSGKKKFIKFDENSKLSDLNRFFEENSSAVITDGLKPIHIVTKMDLLSYLA

SEQ ID NO: 5471 - protein, 180 aa, Solibacter usitatus Ellin6076
MLGVGQKFPAFSVQATVSLEKGKAFQTITDQNFKDKWKIYFFWPKDFTFVCPTEIAAFGKLNRDFQDRDAQVLGGSTDSEFVHHAWRTHHADLKDLPFPMLADVKRDLCEALGILDPQEGVAQRATFIVDPHDIIRFVSVNDLSVGRNPQEVLRVLDALQTDELCPCNWQKGEEALTVAV

SEQ ID NO: 5472 - protein, 381 aa, Bacillus anthracis str. Ames
MKLKIGITCYPSVGGSGVVGTELGKQLAERGHEIHFITSGLPFRLNKVYPNIYFHEVTVNQYSVFQYPPYDLALASKMAEVAQRENLDILHVHYAIPHAICAYLAKQMIGERIKIVTTLHGTDITVLGSDPSLNNLIRFGIEQSDVVTAVSHSLINETHELVKPNKDIQTVYNFIDERVYFKRDMTQLKKEYGISESEKILIHISNFRKVKRVQDVVQAFAKIVTEVDAKLLLVGDGPEFCTILQLVKNLHIEDRVLFLGKQDNVAELLAMSDLMLLLSEKESFGLVLLEAMACGVPCIGTRVGGIPEVIQHGDTGYLCEVGDTTGVADQAIQLLKDEELHRNMGERARESVYEQFRSEKIVSQYETIYYDVLRDDKNGKI

SEQ ID NO: 5473 - protein, 345 aa, Rhizobium leguminosarum bv. viciae 3841
MTFHPSVLEAIGNTPLIKLKGASEATGCTILGKAEFLNPGQSVKDRAALYIIRDAERKGLLRPGGVIVEGTAGNTGIGLTLVAKALGYRTVIVIPETQSQEKKDALKLLGAELVEVPAVPYKNPNNYVKVSGRLAEQLAKTEPNGAIWANQFDNVANRQAHVETTAKEIWQDTDGKVDGFICSVGSGGTLAGVAAGLKAFKADVKIGIADPDGAALYEFYQNGALKSEGSSITEGIGQGRITANLEGFTPDYAYRIPDAEALPYLFDLVENEGLCLGGSTAINIAGAVNLARDLGPGHTVVTILCDYGNRYQSKLFNPDFLTSKGLPVPGWMAKSSDIHVPYEPV

SEQ ID NO: 5474 - protein, 291 aa, Thermotoga maritima MSB8
MMERLIGSTPIVRLDSIDSRIFLKLEKNNPGGSVKDRPALFMILDAEKRGLLKNGIVEPTSGNMGIAIAMIGAKRGHRVILTMPETMSVERRKVLKMLGAELVLTPGELGMKGAVEKALEISRETGAHMLNQFENPYNVYSHQFTTGPEILKQMDYQIDAFVAGVGTGGTISGVGRVLKGFFGNGVKIVAVEPAKSPVLSGGQPGKHAIQGIGAGFVPKILDRSVIDEVITVEDEEAYEMARYLAKKEGLLVGISSGANVAAALKVAQKLGPDARVVTVAPDHAERYLSIL

SEQ ID NO: 5475 - protein, 185 aa, Burkholderia xenovorans LB400
MNIELSKWNPFKFLRKAQNGREKPSSNPPTTKNWLTEWPDASRLFSSDPWRVMRELLHDPFAGGALERWFGDFSSSWFQPRIDVVDDGDVLRITAELPGMDRGDLQTSIEEGVLVLRGEKKQDTRSEENGCYRLERSYGAFTRTIPLPDGVDVDKVDAKFDKGVLTVRLPKTDSARPTIRKVEIK

SEQ ID NO: 5476 - protein, 204 aa, Triticum aestivum; identical to SEQ ID NO: 4946

SEQ ID NO: 5477 - protein, 763 aa, Silicibacter pomeroyi DSS-3
MEKFGKSQPVTRVEDHRFLTGQGRYIGDAAPGDALVAMFFRSPVAHGEILDLDLGAARQMAGVHLVLTLADLEAAGVKVGLSGTTMANRDGSQGAAPERPMLARDHVRFVGEPVAMVVAETADQARDAIEAMGMDIRDLPVVTKPVPGGPAIHPEAPDNRAFDWGLGDEAATEVAFASAAHVVSLRVDDNRIIANSMEPRGCYAEMAEGRLHFAYGGQGVWGMKAQLAEKLGIDPEALRVTTPDVGGGFGMKAMPYPEYFTVAHAARVLNRPVRWISDRTEAMLSDNHGRDLTSLAELAFDADLRITAYRVRTRCNLGAYNSHFGQAIQTQLFSRVLTGVYDIQTAWLQVEGYYTNTTQVDAYRGAGRPEAIYVLERVMDRAARDLGVSPWEIRRRNFIRAEAFPYQTATGETYDVGEFDRLLRLAEAEAQGFAARRAADAKRGLLRGIGLCYYIESILGDPSEGAEIAFNEDDTVDLMVGTQSNGQGHETVYARFLSDQTGLPMDRIRVVQGDSDRIAQGGGTGGSRSVTVQTNATLTTVDTMVAAFTPYLADKMGVAPEAVHFDHETFRAPGSNLTPSLLEAAAMARADGRSDLLRHAARAKLPGRSYPNGAHLAEIVIDPETGQAHVDRYRVWDDFGNLINPLLAEGQVHGGVAQGIGQALCEHVVHDGEGQLLTATFMDYALPRAHEVPIIGFTSVPVPSTANPMGMKGSGEAGTVGALAAVANAVQDAIWDRGVRQADMPFTPLRLWEMLNAEPVAAE

SEQ ID NO: 5478 - protein, 187 aa, Bacillus licheniformis ATCC 14580
MSLIGKEVQPFAAKAYKNGEFIDVTHEDLKGQWSIFCFYPADFSFVCPTELEDLQNHYEALKELGVEVYSVSTDTHFVHKGWHDSSEKIGKITYAMIGDPSQTISRNFEVLNEEEGLADRGTFIIDPDGVIQAVEINAGGIGRDASILINKVKAAQYVRQNPGEVCPAKWEEGSETLTPSLDLVGKI

SEQ ID NO: 5479 - protein, 1177 aa, Cyanothece sp. PCC 8801
MFQETDYIIHDKCPFCQSRDLDKYKQRADQLWVLLCHNCRLGFVEKYPKNLAQWYDLEYYEKSTGQANSGIGYDNYQDVAYDYFLWAIALVALTKTKGSLFDLGCSNGLFLDLAKSYGCTDLGGVELTPEYAEIAQQKGYSVYNQSFLDIQFDANQKYDIVTAWAVLEHIPELNETLAKIKSILKPEGLLFFEVPCIVFDERDDYWLNSSLEHIYYFTEESFKTILKRHFNNCYIGGVFSLDGYGASLAGFVSNSPEKTIDYQPINDYLKSMTRVDLSTLSEVEIICYFIIHFRYTQNIEACKTIVDYLSQKETNSDQAVSLNLYYWSYLASNFLKAHLDNQNYIEAKDYFLEQISGLESNLENHQLSIKTLQQQLAEEVAEEAANYRKLYQELIRSNNQLEQVNHDLAQTQEQLHQTQGELHHTQEQLHHKQGELVQTQEQLYEKYHQIDQITHERNYWKSRVEAIETSKFWKLRDQWFKVRSLVGARNENLSFLQSLVTPLPPEQSNKQELLLDNNLALEESESSPIEVMTQEELEPIQETPVQRMTQEKWDQNLPLVSVIIPCYNYGQYLEEAIDSVLQQTFQNFEIIVVDDGSTDSKTQEVLDNLNKPKTTLIRQKNQGVAIARNEGIFQAKGKYICCLDADDKLKPAYLEKCLIKLETENLDICYTWIQEFEESDLVWKTASFELSKLLEENCLEVSAVFRRDIWEKVGGYDPQMAYEDWDLWITMAKMGAIGDVIPEPLFLYRKHGISKHDLDFSNHEEIKQKIETKHQKLYQEPDRVRAIEQAKPKYGVQDGYKNLLIQSENSPNEKRKTLLYALPFTVMGGVDTVLLTLMKNFKQQGFDIYVLTTLRPLTPKEDTTERYEEIVDGIYHFPNLLTEDKWPELVNYLIESKQIDLVLMAGSSYFYSLIPDLKDRYPNLKIVDQLYNEYGHIANNRKYADYIDLNIVENERVKTCLLDEYEEKPEKISLITNGVDINHFNPDFIEASNLPSLVIPPEKFVISYIGRFSEEKCPEVFVEIVNHFKNDHRLCFIMAGYGPMEDQIKDQIKTYGLEFRIHFPGIVETKPYLAITDLMILPSKIDGRPNIVLESLAMGIPVIASAIGGLPQIIQDGDNGFLCDPDNTEEFIEKIEKITSDTNLYQQMKQNARKYAVKSLDMAVMKTQYLELINRLI

SEQ ID NO: 5480 - protein, 290 aa, Thermotoga sp. RQ2
MERLIGSTPIVRLDSIDSRIFLKLEKNNPGGSVKDRPALFMILDAERRDLLRNGIVEPTSGNMGIAIAMIGAKRGHRVILTMPETMSVERRKVLKMLGAELVLTPGELGMKGAVEKAIEISKETGAHMLNQFENPYNVYSHQFTTGPEILKQMDYRIDAFVAGVGTGGTISGVGRVLKGFFGNEVKIVAVEPAKSPVLSGGQPGKHAIQGIGAGFVPKILDRSVIDEVITVEDEEAYEMAKYLAKKEGILVGISSGANVAAALKVAQKLGPDARVVTVAPDHAERYLSIL

SEQ ID NO: 5481 - protein, 233 aa, Cryptococcus neoformans var. neoformans JEC21
MSLRLGDIAPDFEADTTHGRIKFHDWLDGSWAILFSHPDDFTPVCTTELSAVALSYADFASRGVKLIGLSANNIASHEGWIKDINALKPDAPALEFPIIGDEDRTVSELYGMLDKLDKTNVDKKGIPFTVRTVFVIDPKKQIRLTLAYPASTGRNFPELLRVIDSLQLGDKHRITTPANWGIPDPKTGQVEERVIVHPSVQGEEVKQLFGDDVETVYPYLRFTSNPSKKEVTA

SEQ ID NO: 5482 - protein, 322 aa, Prochlorococcus marinus str. MIT 9515
MEIASDITSLVGNTPLVKLDRIKDYCKCHTEIIAKLESFNPSASVKDRIAYSMLNSAEEDGLILPGKTTLIEATSGNTGIALAMVAAAKGYRLILTMPDTMSIERRAMLRAYGAELQLTPGTEGMRGALELANELSSSIPNSFQFNQFENLANPEIHERTTAKEIWDQSNQNIDGLVSGVGTGGTITGCARFLKKVNPNCKIYAVEPAKSAVISGEKPSSHSIQGIGAGFIPKVLNTQLIDEIIKIDDDDAFYYGRLLARLEGLLSGISSGAALAAAIKIGKRKEFIKKRLIVILPSFGERYLSTAMFESNTVVQARQDGYL

SEQ ID NO: 5483 - protein, 185 aa, Candidatus Protochlamydia amoebophila UWE25
MNGQIVNDFSLLHFRGQNVILFFYPLDFTFVCPTELHAFQEKLEEFEKRNAQIIGCSVDSCYSHLAWLNTPKSKGGIEGIDYPLISDLNKTIAHDYDVLIPHEGIAFRGLFLIDKEGIVRHQVINDLPLGRSVDEALRILDALLYFEKNGEVCPANWQHGQKAFKPSNEGLEEYFATVPVSRPKI

SEQ ID NO: 5484 - protein, 324 aa, Ralstonia solanacearum GMI1000
MAIRDGFSGSIGNTPLIRLARLSEETGCEILGKAEFLNPGGSVKDRAALYIIRDAERRGTLRAGGTVVEGTAGNTGIGLAHLCAARGYRCVIVIPETQSPEKMDLLRALGAEVRPVPAVPYKDPNNYQKIAGRLAQETANAIWANQFDNLVNRQAHYETTGPEIWRDTAGRVDAFVCATGTGGTLAGVARYLKEQNPAVRTVLADPHGSGLYSFVKTGSIQAEGSSITEGIGSTRVTANLEGTPIDDAVRIDDQTCVTMVYRLLREEGLFVGGSTGINVAAAVQLARELGPGHTIVTLLCDRGNLYFARLFNGAWLAQKGLVAG

SEQ ID NO: 5485 - protein, 315 aa, Buchnera aphidicola str. APS (Acyrthosiphon pisum)
MSKIYQDNSLTIGNTPLVRLNRIGNGNILVKIESRNPSFSVKCRIGANMIWHAEKNNNINKNVKLIEATSGNTGIALAYVAASRNYRLTLTMPETMSIERKKILKSLGAELILTDGRYGMKGAISKANDIISRNPSKYFLLKQFENPANPEIHQITTGPEIWNDTNGNLDILISAVGTGGTITGITRYIKKIKRKKNLISIAVEPSESPVITQFLAGKAIEPGPHKIQGIGPGFIPKNLDLTIIDQVITVSSEEAILTAKELMKKEGILAGISSGAALYAAIKIQQQKKFSDKKIVVILPSSGERYLSTELFSEL

SEQ ID NO: 5486 - protein, 314 aa, Mycobacterium marinum M
MTRYDSLLATLGDTPLVGLPRLSPGWDNSPHVRLWAKLEDRNPTGSIKDRPALRMIEQAEADGWLRPGATILEATSGNTGISLAMAAKLKGYRLICVIPENTSIERRRLLELYGTEIIFSPAEGGSNTAVALAKQLAAEHPEWVLLYQYGNPANSDSHYRGTGPELLADLPEITHFVAGLGSSGTLMGAGRFLREHVANIKIVAVEPRHNEKLCGMRNLDEGFVPELYDPTLGAVRYPVATADAEHRIRELAHTEGVLAGLSTGAALHAALEIGTQALQAGERADIAFVVADAAWKYLSSGVYEHPAPSKLLAP

SEQ ID NO: 5487 - protein, 371 aa, Gibberella zeae PH-1
MFRPTARRLAASAAKAAAAPTSHTLNVARAQGVSRGLTGAIGNTPLIRLNRLSDETGCEVLGKAEFMNPGGSVKDRAALYVVKDAEERGLLKPGGTVVEGTAGNTGIGLAHVCRSRGYKLVIYMPNTQSQGKIDLLRLLGAEVYPVPAVAFDNPENYNHQARRHAERLDNAVWTNQFDNTANRRAHIETTGPEIWAQTDGKVDAFTCATGTAGTLAGITRYLKDVSNGRVKSFLADPPGSVLHSYVSSGGKLNERTGSSITEGIGQGRITDNLQPDIGLVDGSLHISDEKSIKMVYRCLDEEGLYLGASSSLNVVAAKEVAEKLGKGHTVVTVLCDGAYRYADRLFSRKWLTDKKLLGAIPKHLEKYIVLP

SEQ ID NO: 5488 - protein, 342 aa, Photorhabdus luminescens subsp. laumondii TTO1
MNLSKNILQTIGNTPVVMLNGRYTKGINVFLKMENINPGGSIKDRIAVAMLERAEAQGELRPGMVVIEPSSGNTAIGLAMACAVKGYRFIAVLDRMVPAAKRDKIKAFGAEIIFLPEFEAGKDTVKYRIDLTKEIIKVYPNAFSPMQFENQVNPDEHYRSTGRELYEIFGNNLTACFATAGSCGTLTGISRYLKEKDPQVRIYGVEPVGSIIFGGEPGKYLVQGAGLAFIPSILDRTNIDITLKVADIDAFRVARKLARNEGILIGGTGGCAVSAALNRLDDFKPGDNIVVIIPDSGERYIDTIYNDAWLFENNFSELIEESKTEPQLEEIITNMGCVLNEF

SEQ ID NO: 5489 - protein, 195 aa, Chlamydia muridarum Nigg
MGSLVGKQAPDFSGKAIVCGEEKEISLSDFRGKYVILFFYPKDFTYVCPTELHAFQDRLGDFEERGAVVIGCSVDDIETHSRWLAVERRAGGIQGTQYPLLADDSLEISKAFGVLNPEGSVALRATFLIDKDGVIRHAVINDLPLGRSIEEELRVLDSQIFFENHGMVCPANWQSGERGMVPSEEGLKEYFQTID

SEQ ID NO: 5490 - protein, 312 aa, Synechocystis sp. PCC 6803
MKIASNITELIGRTPLVRLNRIPLLEGCGAKIVVKLEGMNPAASVKDRIGINMINRAEQEGLIEPGKTLLIEPTSGNTGIALAMVAAAKGYQLILTMPETMSQERRAMLKAYGAKLELTPGSEGMGGCIRRAQELAESLPNAYMLQQFDNPANPQIHQQTTALEIWQDTDGAIDFLVAGVGTGGTITGVASVLKEKKPSFQAIAVEPQNSPVLSGGKPGPHKIQGIGAGFIPEVLDVNLIDEVIAVTDEEAIAYGRRLAREEGILSGISTGAALAAAIKVAKRPANKDKLIVMIQPSFGERYLSTPLFQDLE

SEQ ID NO: 5491 - protein, 196 aa, Saccharomyces cerevisiae
MVAEVQKQAPPFKKTAVVDGIFEEISLEKYKGKYVVLAFVPLAFSFVCPTEIVAFSDAAKKFEDQGAQVLFASTDSEYSLLAWTNLPRKDGGLGPVKVPLLADKNHSLSRDYGVLIEKEGIALRGLFIIDPKGIIRHITINDLSVGRNVNEALRLVEGFQWTDKNGTVLPCNWTPGAATIKPDVKDSKEYFKNANN

SEQ ID NO: 5492 - protein, 458 aa, Nocardioides sp. JS614
MRADRPGHRSRGINPGPGMFTLVGPDERDDPEVAVDPIRRVAMISLHTSPLDQPGTGDAGGMNVYVIELSKRLAAQGIAVDIFTRATTSAVEPLVEAYDGVQVRHIHAGPFEGLTKAELPGQLCVFAREVLRAEAAQPVGHYDVVHSHYWLSGQVGALARDRWGVPLVHSMHTMAKVKNDALAEGDTPEPAARIIGEEQVVEAADMLVANTDIEAKQLVNMYDADPSRVEVVHPGVDLGVFRPQDRSTARARLGLPEDAAVLLFAGRIQPLKAPDVLLRAVAELLAQTPELRSRLVVPIVGGPSGSGLEHPESLAQLASELGLDGAGGTGPVVRFVPPVSQEELARWCAAATLVAVPSYNESFGLVAAEAQATGTPVVAAAVGGLTTVVRDGRSGLLVDTHDPRDWADALRRVVENDAFRDRLAAGALEQARLFSWEHTARQTLDVYRRARAEIREAV

SEQ ID NO: 5493 - protein, 212 aa, Sulfolobus tokodaii str. 7
MSEEKIPLIGEKFPEMEVITTHGKIKLPDYYQGKWFVLFSHPGDFTPVCTTEFYSFAKKYEEFKKLNTELIGLSVDSNISHIEWVMWIEKNLKVEIPFPIIADPMGNVAKRLGMIHAESSTSTVRAVFIVDDKGIVRLIMYYPMEIGRNIDEILRSIRALQLVDKSGVVIPANWPNNELIGNKVINPPPRTVKDAKLRINQPFDWWFTYKEI

SEQ ID NO: 5494 - protein, 155 aa, Staphylococcus haemolyticus
ELTTGPEIVEQFEGKQIDAFLAGVGTGGTLSGAGKVLKEKYPNIEIVAIEPEASPVLSGGEPGPHKLQGLGAGFVPDTLNTDIYDSIIQVGNDIAMETSRRVAKEEGILAGISSGAAIHAAIQKAKELGKGKTVLTVLPSNGERYLSTPLYSFDD

SEQ ID NO: 5495 - protein, 346 aa, Flavobacteria bacterium BBFL7
MNKDIKAYDSVLDLIGETPLIKLSTTTANFTGEFFAKVEAFNPGHSSKDRIALHIIEEAERKGILKPGDTIIETTSGNTGFSIAMVSRIKGYDCILAVSSKSSADKIDMLKSMGAKVYVCPAHVSADDPRSYYEVAKRLHEEIKNSIYINQYFNELNIEAHYKSTGPEIWEQTGGQITHLVACSGTGGTISGTARFLKEQNPDIEILGVDAYGSVLKKYHETKEFDSEEIYPYRIEGLGKNLIPTATDFDSIDYFVKVKDEDAAHMARKISQTEGLFVGYTSGAAMQAVKLLNDEGRFDENSKVVIIFPDHGSRYMSKIYNDQWMQDQGFFDSKSTATKQPIEYIK

SEQ ID NO: 5496 - protein, 741 aa, Vitis vinifera
MRRECDPLLRGGRREGKYTHGFSSAEMQSLASICEVLLPPLPLNSIEGQPSKAVQSFYQASGSQHPIPDEGAELFVKRALIEAVILVRVVLIILSTRLGTLLLCGSLSFSDKWPFINNFSSISLEKREKILQRWFKHRLLTPIRLAFVYIKFLCLYAFFTLADENSENAAWEAIGYHTDTDGNRSKVPKERPLQKGMVETMQETESTLVQSLNQKGLKVVKDPEQKLYKIKCDVVVVGSGCGGGVAAAVLASSGHKVVVLEKGTYFTATDYSSLEGPSMNQLFESGGILPTVDGKMMILAGSTVGGGSAINWSASIKTPKSVLHEWAEEHKLPLFGSSQYFSAMDAVCERIGVTETCVEEGFQNQVLQKGCENLGLKVDLVPRNSSEKHYCGSCSYGCRSGDKKGTDSTWLVDAVACGAVIITGCKAERFILETNEYGRVKRKKCLGVIAKTLNNNIKNRIQIEAKVTISACGSLLTPPLMISSGLKNQHIGQNLHLHPVAMVWGYFPDSNSEFEGKAYEGGIITSMHKVVSEDCQVRAIIETPALGPGSFAALCPWESGLDMKKRMVRYGRTVHLFAMVRDEGTGKVKVEGRISYNLSAIDKENLRAGVRQGLRILIAAGAVEVGTYRSDGQRLKSKGINEKELEEFLDSVSAAEGPQSFVDKWTITGTAHQMGSCRMGKSEKEGAVDENGESWEAAGLFVCDGSVLPTAVGVNPMITIQSTAYCLSKKIADSLEKRTDQ

SEQ ID NO: 5497 - protein, 212 aa, Glycine max
RWSPPTAPNFTAKTTQGDIEFHKWIGDSWAILFSHPADFTPVCTTELGAFAKLKPEFEKRGVKMVGLSADDLSSHDKWVADINEVSSTNLQFPIIADADRKVAFLYDMVTEDDMRDIATKGLPFTIRSVFIIDPAKKIRLMMIYPASTGRNSAEVLRVIDALQLADKKGIATPIDWTQGEDVIVPPSVSTADAKKKFGEVRELKPYLRYTKA

SEQ ID NO: 5498 - protein, 157 aa, Thermoplasma acidophilum DSM 1728
MAVKVGDKAPDFEAPDTNLKMRKLSDFKGQKVVLAFFPGAITSVCTKEMCTFRDSMANFNKVNAKVIGISVDSPFSLAEFAKKNNLTFDLLSDSNREISKKYGVLHENFVNVPGLTASKRSVFVIDKDGIVRYAWVSDDPGKEPNYKEVQDFVSKLN

SEQ ID NO: 5499 - protein, 204 aa, Euphorbia esula
MASSLAIKRLVSSNLIPSSLRVIRPCVAAQPSSRLFNTNAVRQVDDIDEDDRRIDGPLYGRGGDFLSDVVNPFWPSTNLSRMLNVMEPFIENPFVSRGMSAGIRRNWDARETEDALNLRVDMPGLDKKDVKVSVEKNTLIIKGEGEKESEDEESGRKYSGRIDLPEKMFKTDEIKAEMKNGVLKVVVPKVKEDERADVFHVKIE

SEQ ID NO: 5500 - protein, 215 aa, Treponema denticola ATCC 35405
MEQMTMNMPLLGDDFPQLAVSTTHGPMKLPCDLKGSWFVLFSHPADFTPVCTTEFVAFQKLMPEFEKLGVKLIGLSIDQIQSHLKWIEWIKEKLGVEITFPVIAANDSIANQIGLLHPGKGTNTVRAVFIVDPNGKVRLVLYYPQEIGRNMEEIVRAVKALQTSDKNKVALPADWPNNGLIKDRAIIPPPPTEAEAKKRLKEYDGYDFWFCHKSL

SEQ ID NO: 5501 - protein, 159 aa, Alkaliphilus metalliredigens QYMF
MDCVKYEIQFILNDEKIRHEVRSNQTLLHMLREDFDLTGSKEGCGQGECGACTILIDDKPVNACLLLALEADGRVITTIEGLSQGDSLDELQSTFITNGALQCGYCTPGVIMMAKGLLKENPSPTIEEVTEGISGNLCRCTGYKRIIEAIMEVVEGNQE

SEQ ID NO: 5502 - protein, 306 aa, Streptococcus pneumoniae R6
MSIYNNITELIGQTPIVKLNNIVPEGAADVYIKLEAFNPGSSVKDRIALSMIEKAEQDGILKLGSTIVEATSGNTGIGLSWVGAAKGYKVVIVMPETMSVERRKIIQAYGAELVLTPGSEGMKGAIAKAQEIAAERDGFLPLQFDNPANPEVHERTTGAEILAAFGKDGLDAFVAGVGTGGTISGVSHALKSENSNIQVFAVEADESAILSGEKPGPHKIQGISAGFIPDTLDTKAYDGIVRVTSDDALALGREIGGKEGFLVGISSAAAIYGAIEVAKKLGTGKKVLALAPDNGERYLSTALYEL

SEQ ID NO: 5503 - protein, 771 aa, Alkaliphilus metalliredigens QYMF
MMKYVGKNVPRVDGVKKATGDLKYVDDIKMSNMLYAAVKRSRYPHAKIINIDVSKAEALPGVKVVTTGKDFPKRVGLYLADKTFLAVDRVRYRGEAVAAVAAETEKIAKEAIELIEVEYEVLPTVSYVLDAMKKDAPLIHPELGEYKHVPIFRTIPGTNISEHFKLRKGNAAEAFEAADFVFKNEFYVPHIQHCPIENHVAIAQIDRSGHLTVWASCQSPYAVRMALADAFEIPLHKLRVISPAVGGGFGSKAGTTLEGIIIPLAMKTKGRPVKLSYSREDEFNSTYVRQAMHAKFKTGVKKDGQIVAIENQFAWDGGAYTEYGVNIAKSAGFAATGPYEVPNISCDSYAVYTNNPVGGPYRGFGMAEIHFGIEQNMDYIAHSLGMDPIELRKRNAHRPGGKTATNAEVDEACGLVECIDRVVKDMEYYTPSEQPKESYKVRAKGLACGMKSPSMPNDAASSAIVRINEDGTVYLSVSAQDIGQGSDTALTQIAAEVLSIPPEKIAITTGDTANNPYEWQTVASRITYSAGNAIIKACEDIEAQLIQLASIKLGIYPRDLKLEDECVVSRIYPERKILISHLALGLKMPDGSGVHGPLIGRGSFVPENIRNFDMETGLADNPVVFWTYGCYGVEIEVDIETGEIKVLQVAACFDVGKAINPDLVKAQIEGAIVQGLGSALLEEMQLQEGEFLNSSFMDYKIPTSGDMPQMKVSFIENPQSDGPFGARGMAEPAMIPAAPAIVNAFYHATGVRVNEIPLTPERVVKALKDSK

SEQ ID NO: 5504 - protein, 305 aa, Rubrobacter xylanophilus DSM 9941
MITRIKPGTGITELVGNTPLVELSKISAETPGVRIYGKAEWYNPGGSVKDRPALWMIRDGERSGALTPEKTILDATSGNTGIAYAWIGAALGYRVKLCMPSNASEERKKILRAYGVDIVLTDPGEGSDGAIREARRLYAEDPERYFYPDQYSNPANPRAHYESTGPEIWEQTGGEITHFVAGLGTSGTFVGTARRLKEFNPEIRAISFEPDSPFHGIEGMKHMESAIVPAIYDPGVADENRRASTEEAYAMVKRVAREEGILIGISAGAAVATALRVAREIESGTIVTILCDGADKYLSESFWEE

SEQ ID NO: 5505 - protein, 404 aa, Dehalococcoides sp. BAV1
MNILHLGSGSLQTPPVGYGGIERYVFESARGLAARGNRVVIFDIRLDRADLVSEQTGGIEIIRLHCLVAHRSSSLWLSNIYSVLNLLGFSLRARRYINKNSFEVIHIHRTLVGLVLVLVLPSQREKMIYTVHSPVWVMQRGSFKDRLSRKLDIFIMKRVHRVIAQSARIKNILERERAAPGRIRLLPCGVDTSAFNPASRCSFICRKYGIDDRLLVLFVGRIVPYKGVEYLVRAANLVVNKAGFRKCAFLLAGPMAEHGLDALEHAAYPKKVSSLIAEYNLGDFVFLSGSLPQDDLQMVFASADIFVLPSLAESSPAVVLQALASGCAVVASDISGIHEQVVEGVNGYLVKAGDETELAKRILELLQSPARRSAMGANGRELVKKEFDWGVICGRLEGIYREAT

SEQ ID NO: 5506 - protein, 216 aa, Pyrococcus furiosus DSM 3638
MIVIGEKFPEVEVKTTHGVIKLPDHFTKQGKWFMLFSHPADFTPVCTTEFYGLQIRLEKFRELGVEPIGLSVDQVFSHLKWMEWIKEKLGVEIEFPVIADDRGDLAEKLGMIPSGSTITARAVFIVDDKGIIRAIVYYPAEVGRDWDEILRLVKALKISTEKGVALPHKWPNNELIGDKVIVPPASSVEQIKEREEAKAKGEIECYDWWFCYKKLE

SEQ ID NO: 5507 - protein, 400 aa, Burkholderia fungorum
ALTWASKKIRRPVKWTAERSEAFVSDAHGRDHVTKAELALDADGRFLAMRIHTTANMGAYLSTFASSVPTILYATLLAGQYATPAIYAEVKAVFTNTVPVDAYRGAGRPEATYVVERLVETAARELKLDPAEIRRRNFIREFPYATPVGLTYDTGDYETILARSLELADVKGFAARRQESEKNGKLRGLGYSCYIEACGLAPSNIAGALGARAGLFEVGQIRVHPTGSVTVFTGSHSHGQGHETTFAQVVAERLGIALESVEIVHGDTGRIPFGMGTYGSRSIAVGGSAIMKALDKIETKAKKIAAHLLEAAAEDIEFKDGVFRVAGTDRTKAFAEISLAAYVPHNYPLDVLEPGLEESAFYDPTNFTYPSGAYICEIEVDPDTGVCRIQQFTAVDDSAT

SEQ ID NO: 5508 - protein, 319 aa, Nostoc punctiforme PCC 73102
MRIAQDITELIGRTPLVQLNKIPQAEGVVARIVVKLEGMNPAASVKDRIGLSMVLSAEAAGSIQPGKTILVEPTSGNTGIALAMVAAARGYRLILTMPETMSQERRAMLRAYGASLELTPGAEGMRGAIRKAEEIVANTPDAFMLQQFRNPANPKVHQETTAEEIWTDTDGEVDIVIAGVGTGGTITGIAEVLKGRKKTFKAIAVEPSNSPVLSGGEAGPHRIQGIGAGFIPDVLRLELVDEVIRVSDEQAIAYGRRLAKEEGLLSGISSGAALCAAIQVGKRPENAGRLIVMIQPSFGERYLSTPMFQDLSLETAGVR

SEQ ID NO: 5509 - protein, 398 aa, Physcomitrella patens subsp. patens
MDELDCELWHACAGPLTQLPPVDSHVMYWPQGHIEQVCAADVYQASKQFSNLPAHLLCKISKIELQADPHTDEVFAQMDLTPQYETEFTKEMKDAPPPTMQKNVRSFCKTLTASDTSTHGGFSVPRRAAEDCLPLLDHSMNPPCQELVAKDLHGKEWNFRHIYRGHPRRHLLTTGWSVFVSQKRLVAGDTVIFLRGENGQLRVGVRRASKQLPQTRSTHFSNANLHLGVLAAASHAATERLRFSVIYNPRTSPSEFVIPYHKYLKTKENNLTVGSRFKMKFESDESTERRYSGTIVEVSDADPLKWPNSAWRSMKVEWDESASERHERVSPWEIEPFVPISTLPTPSVGPRPKRRPPTFVTDSSPQGTSQSVLDPQQSNKLARILHSHDPRNEVEYRR

SEQ ID NO: 5510 - protein, 328 aa, Prochlorococcus marinus str. MIT 9313
MSRIYEDNSQAIGNTPLVKLHAVSKNAKATVLAKIEGRNPAYSVKCRIGANMIWDAEKRGLLSKERTIIEPTSGNTGIALAYTAAARGYKLILTMPESMSLERRRVMAVLGAELILTEAAKGMPGAIAKAKEIAESDPQKYFMPGQFENPANPDIHSKTTGPEIWNDCDGAIDVLVSGVGTGGTITGVSRYIKQEKGKAIISVAVEPTHSPVISQTLNGEEVKPGPHKIQGIGAGFIPKNLDLSLVDRVEQVSNDESIAMALRLANEEGLLVGISSGAAVAAAIRLAEQPEFAGKTIVVVLPDMAERYLSSVMFESVPTGIIQAPVAA

SEQ ID NO: 5511 - protein, 156 aa, Azotobacter vinelandii
MITLNLNGKDHSLDVPQDMPLLWAIRDVAGYSGTKFGCGMGLCGACTVHVDGQATRACVTPVSVAVGKKVTTLEALHADPVGQALQAAWLELGVAQCGYCQGGQLMTATALLKGNPNPDEAQIETAMAGNVCRCGTYNRIRAAIQVAAGKLRESRA

SEQ ID NO: 5512 - protein, 316 aa, Haemophilus influenzae R2846
MTIYADNSYSIGNTPLVRLKHFGHNGNVVVKIEGRNPSYSVKCRIGANMVWQAEKDGTLTKGKEIVDATSGNTGIALAYVAAARGYKITLTMPETMSLERKRLLCGLGVNLVLTEGAKGMKGAIAKAEEIVASDPSRYVMLKQFENPANPQIHRETTGPEIWKDTDGKVDVVVAGVGTGGSITGISRAIKLDFGKQITSVAVEPVESPVISQTLAGEEVKPGPHKIQGIGAGFIPKNLDLSIIDRVETVDSDTALATARRLMAEEGILAGISSGAAVAAADRLAKLPEFADKLIVVILPSASERYLSTALFEGIEG

SEQ ID NO: 5513 - protein, 363 aa, Propionibacterium acnes KPA171202
MTNSVLRVLEHLRAHDHDAIVLAPGDADTPHEYAGFPVIPLASLHWPGYQDVRVSTSPQWTMERYLSEFEPDVVHLAGPFMIGYKGAMAAASLGIPIVAIYQTDIPSYAGRYGLGKLEFYGWYRVRQIHSLAVATYAPSTFSRDQLVSHGVPRVDIWGRGVDKVRFHPSKRSQQLHDEWAPNGEVVIGYMGRLAAEKRVADMTNLADIPNTKLVIVGDGPARAEVEKQLPHAVFTGGLGGEDLPRALASMDVFCSTGELETFCQAVQEAKACGLPVISPRKGGPIDLIDSSRTGWLYEPGDMTDFRSRVIDLVGDDYKRHAMGIAARASIENRTWENLCAELVEHYKEAIRLAGRSTRIRAVL

SEQ ID NO: 5514 - protein, 307 aa, Geobacter sulfurreducens PCA
MPLLTNDKVIEQIGNTPLLRLAKLERKGSAAVFGKAEFFNPGGSIKDRICLAMIEAAERDGTLKPGATVVEPTSGNTGIGLSMICAVKGYKLILTMPDTMTVERRRLLAAYGAELILTPGAQGMRGAVMKAEELAAQPGHVMMHQFKNPANPDIHRRTTGPEIVETLSGTTIDAFVAGVGTGGTITGVGEVLRTHNSSVRVVAVEPADSPVLSGGQPGPHKIQGIGAGFVPDVLNTKVYDEIITVSNDDAYATVRDLAREEGILVGISSGANVFAALQVAAKLGPGKNVVTILCDTGERYLSTGVFD

SEQ ID NO: 5515 - protein, 215 aa, Desulfovibrio desulfuricans subsp. desulfuricans str. G20
MEEGKFVLIGDALPEMHVTTTRGPMTLPGDLKGKWFVLFSHPADYTPVCTTEFVAFQKRYDEFRKLNCELVGLSIDQVFSHIKWVDWIKEKIGVEIEFPIIADDMGQVASRLGMIHPGKGTNTVRAVFIVDDKGIVRIIFYYPQELGRNMDEILRAVKGMQVSDAQSVAIPAGWPENEIVRDHVIVPPPKSVQEAQKRLTEGHECYDWWFCHKKL

SEQ ID NO: 5516 - protein, 191 aa, Mycobacterium sp. MCS
MQVSMTVNGEQVSADVEPRMLLVHFLRDELRLTGTHWGCDTSNCGTCVVSLDGEPVKSCTMLAVMADGHDVRTVEGLEVDGKLDPVQEGFMQCHGLQCGFCTPGMMITARALLDRNPHPTEHEIREAISGQICRCTGYTTIVRSVQWAAGHARGRDVESGPSATDFAPQSQTDDTLGPVAGDHLIETGSPS

SEQ ID NO: 5517 - protein, 176 aa, Mesorhizobium loti MAFF303099
MTKVDTQGGFMSDVSLMVNGRRVSGTAEDRTLLVHFLRENLGLTGTHVGCDTSQCGACVVHVDGKAVKSCTMLAVQASGSSVVTIEGLANGADLHPVQAAFKEHHGLQCGFCTPGMIMTATDMINRHPEGLDEATVRAELEGNICRCTGYHNIVKAILAASKTMAKGAKGKAKQAA

SEQ ID NO: 5518 - protein, 796 aa, Mycobacterium sp. MCS
MTAVDERPDAQADNDRKPCGYGRMLRKEDPRFVRGRGNYVDDVTLPGMLHLAILRSPYAHARIANIDISAAEAHPKVKAVVTGADLAEKGLAWMPTLSNDVQAVLATDKVRFQGQEVAFVVAEDRYSARDGVELIDVDYEPLDPVIDVRRALDPDAAVIRTDLDGKTDNHCFDWETGDAAATDAAFAKADVVVKQEMVYPRVHPAPMETCGAVADLDPVSGKLTLWSTTQAPHAHRTLYALVAGLPEHKIRVISPDIGGGFGNKVPIYPGYVCAIVGSLLLGKPVKWMEDRSENLTSTGFARDYIMVGEIAATSDGKILAVRSNVLADHGAFNGVAAPTKYPAGFFGVFTGSYDLEAAYCHMTAVYTNKAPGGVAYACSFRITEAVYFVERLVDCLAYEMKMDPADLRLRNLLKPDQFPYHSKTGWTYDSGDYETTMRKAMDMIGYEQLRAEQAAKRERGELMGIGMAFFTEAVGAGPRKDMDILGLGMADGCELRVHPTGKAVVRLSVQTQGQGHETTFAQIVAEELGIPPDDIDVVHGDTDQTPFGLGTYGSRSTPVSGAAAALVARKVRDKAKIIASGMLEASVADLEWDKGAFHVKGDPAASVTIQDIAMRAHGAGDLPEGIEGGLDAQICYNPENLTYPYGAYFCVVDVDPGTAVVKVRRFLAVDDCGTRINPMIIEGQVHGGIVDGIGMALMEMIAFDEEGNCLGGSLMDYLIPTALEVPELETGHTVTPSPHHPIGAKGIGESATVGSPPAVVNAVVDALAPFGIRHADLPLTPSRVWEAMQGRPTPPI

SEQ ID NO: 5519 - protein, 307 aa, Brucella melitensis 16M
MRYLPADIVRVMIVHSITPGTYAAAQAIRDHVHATVGVSKRCRDDLVRGYGFDPSRTLVIPNGLTPDPHVRCAAPEIEGGRLRLLYLGRIDDSSKGVFWLPAILRRLQCDYHLTVAGDGPDLAVLRIKLAPFGNRISFTGWVAPSDVSWLVSQHDVMVMPSRYEGFGSTLIEAMSQGCPVVASRIPGVTDTIVTDGEDGFLFPIGNCRQAAQQIERLAADPRLRVAMGAAGVRKVIAEFDSEIVGRAYAGLLQHLRENRPPITPPLALSQWSMPNALHKNLRSRLPQPVKNWLRRVRERVHTVWSTA

SEQ ID NO: 5520 - protein, 723 aa, Pyrobaculum aerophilum str. IM2
MKYVGRPIPRFEDDVILSGRAQYVDDIVLPGMLYAGFVRSPYAHARVLRVDLSDAAKQKGVVAVFGPEEMGFAPGGKVRYQGEAVAMVVAGDRYLLYDALEKVVVDYEPLPAVLDVFEALRPGAPLVDENLGTNIAHEEVYEGGDVDSAMREAEVKIEERLTIQRVVPAAMEPRGVVAAYDGDMLTIWSSTQVPFDIRKEVAKALDIPLVKVRAVQPFVGGAFGSKLIVYPEEIWVSKAAYLLKRPVKWVATRSEDFKTTTHGRALILDYRVGATRDGRILAIEGTVYADAGAYYWGEGLADTAARMLPGPYDIRNGRVKAVAVLTNKTPLSAYRGAGRPEATFFIERIMDRLADELGIDRVEIRERNLIRQLPYTNVFGITYDTGDYLTTFKQGLERLGYSQLKQWAEEELKRGRVVGVGFSVYVEITTFGYETAILRAERDGTFTLYTALTPHGQGLATALAQIVAEELDVPIESVKVVWGDTALISDGIGTMGSRSITAGGSAAILAARRLKEELLKAARKVLGCDPEYSGGKFSCGGKSATVKDVVRAVYRGEAEAQLTVEAIYHADSTFPFGVHLAVVELDPETGFVKPMLYKSYDDVGVVVNPLLASGQITGGALQGIAQALYEEVVYDESGNLITSNLAFYYVPTAAEAPKYEVYFAESPHRSKHPTGTKGIGEAATIASTPAVIAAVEDAVRRIKPGVRINKTPVTPEFLWRLLR

SEQ ID NO: 5521 - protein, 365 aa, Nostoc sp. PCC 7120
MNYLAKYSYFESIFKPQSGNHSKWKNTTATDVTQALGNVPIVKLRNISPVCAIAECFLKLESCNPGGSIKEKNAVYLVTCAEEEGLLVPGGTIIESSSGNFGVGLAMVGAVRGYRVIIVVDAKTPPPFRRMLKAYGAELVDVPLHEADESGSMQKARMKRAKELAATIPDAWYPCQHLNPLNTEAHSYYTAREIEAHFADELDAVVVGVSTAGQIMGIARYLRPRFPKIRIIGVDVVGSVIMGTSAKPYKMTGIGLSFFPPNLDLSLLDRAYIVPEDLAYSVCHALARREGLLLGASTGAIVAGGLHLARELGRGARILMINPDRGDRYLETVYDSEWLERHGFTLKQDSHLDDAIASLSPVYFE

SEQ ID NO: 5522 - protein, 378 aa, Prosthecochloris aestuarii DSM 271
MKIAFYAGTYVRDKDGAVRSMYQLVASFVKDGHEVMVWSPDVTSGGSRGETVVQMPAVPIPMYPDYKLGFYSASTSKQLDLFQPDIIHISTPDIIGYNFLKYALKHKLPAGSVYHTDFPSYLSYYHLGFTENLVWKYLRKLYNSCNVLFAPTHEMVHKLQGKGITTVELWSRGIDRDLFRPSRRSSALRTSWGADGKAVIAYVGRFVWYKDIQVVIDVYNRFMMGPHAGKVVFVMIGSGPEEAELRERMPQAIFPGYLTGADLPEAYASSDLLLFPSTTESFGNVTLEAFACGLPAVVSDIGGCRELTEQADGGVIAPAKDADAFYEGCVRLIVDRAFYETMKSNALQFAAERSWDMINAAVIKRYRSLVEGGSGISS

SEQ ID NO: 5523 - protein, 209 aa, Erythrobacter sp. NAP1
MSLHIGETAPNFTVATTKGEIDLHEWSGDSWVFFFSHPADFTPVCTTEMGMTAKLAAEFEARNVKPLGLSTDTVEEHLEWVKDVDETQGVALDFPIVADPDLKIAKLYDMIHPDQSETAAVRSVFIIDPANKIRLVMTYPMSVGRNFDEILRVIDSLQLSDRCTIATPADWRPGDDVIIPPSINDDEAKAMFPQGFTTIKPYLRTTKVA

SEQ ID NO: 5524 - protein, 427 aa, Corynebacterium diphtheriae NCTC 13129
MMTMRIAMISIHTSPLQQPGSGDAGGMNVYIISIARELARRGVDVDIYTRATRPSQGDVVEVESGLRVINIVAGPYEGLSKEELPTQLAAFAGGVVQFAKCHHMRYDVIHSHYWLSGQVGWLLRDLWNIPLVHTAHTLAAVKNAHRSAGDTEESEARRICEQQLVDNADILVVNTPEETNDLVRHYDANPDSVAVIAPGANVELFTPGTQRNTEQSRRCLGIPLHTKVMAFVGRLQQFKGPEVLLRAVAEMLERDPDRDMRVIMCGGPSGAAATVEHYIELTRSLGIAHRVRFLDPRPPEELVSVYQAADVVAVPSYNESFGLVAMEAQASGTPVVAARVGGLPIAVVDGETGVLVDGHDPIMWADALEQLLDDDPTRQQMGVAAVEHAANFTWAAAAEKLESVYGDAAMLDVAQCHDRYAAGSDRA

SEQ ID NO: 5525 - protein, 472 aa, Physcomitrella patens subsp. patens
MSPTLTSLSLPGDGEAKFGLFSTVNSSFSLKGKQVANGNFLVSASSEAFVTTDVKSSEQEEFAKEWAHKPRRVVLFVEPSPFSYISGYKNRYQNFIRYLRQLGDEVLVVTTHHGVPDEFHGAKVIGSWSFPLPWYKAVPMSLALSPRIYNEVKNFKPDIIHASSPGIMVFGALIIAKLVGVPVVMAYHTHVPMYIPKYTFSWLVKPMWLVIKFLHRAADLTLVMSVALGKELKAAGASTAERIRIWRRGVDSDSFHPRFKSAEMRHRITDGKPDTPTIVHVGRLGVEKNLDFLVKVMERIPETRLVFVGDGPYKSDLEQMFEGKNVHFTGMLTGEELSQAYASGDIFITPSESETLGFVVLEAMASGIPVVCARAGGIPDIVNQNGVTGYLYTPGDVEDCVGKLKALIESPDLRERIGRAGREEVEKYDWLASTRQVRNEEYSAAIWFWRRRKQQLANRFSGWFKQTQPQAS

SEQ ID NO: 5526 - protein, 302 aa, Clostridium perfringens SM101
MKYYNDIRDLIGNTPILKLNNISTKEGVNIYAKIEGTSPGGSCKDRVGIYMIEKAEKEGKLKPGSTIIEATAGNTGIGIALAAINKGYKIIFIVPDKFSIEKQKIMKALGAEIINTPKEEGMEGAINLANSLLSEIPNSLSLNQFKNEANPLAHYETTGRELYDGLDGQIDYFVAGAGSGGTISGVLKFLKENISEVKGILADPVGSIIGGGQCGTYKIEGIGNNFIPETMDMSLVDDVIKINDEEAFDAVKLLAKKEGLIVGSSSGAAFAAALKLAEKIDKGNIVTIFPDRGDRYFSTDLF

SEQ ID NO: 5527 - protein, 198 aa, Paulinella chromatophora
MTSSLRVGQHAPDFTATAVINQEFEEITLSQYRGKYVILFFYPLDFTFVCPTEITAFSDSYTDFTNKNTEILGVSVDSQFSHLAWIQTPRNQGGLGDIKYPLVSDLKKDIASSYNVLDPESGIALRGLFIIDPEGVIMHATINNLPVGRSVSETLRVLQAFQYVQANPDEVCPANWTPGQNTMKPDPKGSKEFFAALG

SEQ ID NO: 5528 - protein, 1422 aa, Candida albicans SC5314
MAIDGVAPRAKMNQQRARRFRTAYEAEINLKKAIENGEEIPKEDPFDSNSITPGTEFMANLTNNLKYFIHKKITEDSSWANIEIILSGHEVPGEGEHKIMEYIRSIRSQDDYNPNLRHCIYGLDADLIMLGLVTHDPHFALLREEVTFGPQRKVGPKDLHDQKFYLLHLSLLREYLSLEFQEIENQLNFEYDFDRILDDFILIMYVIGNDFLPNLPDLFINKGAFPLLIAAFKQTLLESDGYINENGKINLVRLNIYIKILSKFEFENFEKHEVDVEWFNKKLDDISISGEKKRQRIGKLLILKEQKKLVGFIKPWLMEWASQPINEILNLDQQGKLPTLHLNKDDVEKNLEFIKEFAIEAGFLIIHSQSNDTYEAKLDIDGISPTESEEEHEERITELRKTIKQYQSANLIESEEVLNETKEVYSEKFQSWKNDYYQPKLHFSIDTEEGKGDLIEMTKHYIEGLQWVLYYYYRGCPSWNWYYRYHYAPRISDISLGLEELINEKTDLKFELSHPFKPFEQLMAVLPARSKKLMPVVYRPLMSDEKSPIINFYPHEVDIDMNGKTASWEAVVLLDFVDEKKLIEALKPIESKLTPEEKQRNSYGHAIKFIHNPQIDHVFSSPLPGFFHDIEHDQCYEEEFKLPKIENLKIGFIKGAKTGKDLLAGFPTLSTIPFTSELALNEVKIFNFPSRSESMILNVEDVWSDLTVAQFAQSFVNKLVYSKWPFLRECRVVKVVSEENKFESIKTNTGLKKVVTNELSVEDKKSFRSEVSNLKVTWDKFKGVKLGEINALVYVKPVNGLIRNHKGAYVKTYSKDVEVYPLQLIVKEVTNKDQRYLTRPPLPIDQEFPIDSQVVFLGDMAYGSPAKIVGYNEDKTKLGVKIFKIQSTAEPNIGKKRLTIEKNEIKYYPSFEVAKTLRLNPLLLSKITSQFMVQDSSKGKVNIGLELKFESKRQKVLGYTRKSSNGKFWEFSPLAINLINTYKTKFPGLFKKLVNNVSGSNFPTVDEISSLEELKEIRSWLKEVKSELIPVSLESESFTKFSYQAIEQYMDNYLSMNQIPTINKDIKGVPREAILNANESYQLLSDQRFELGDRIIYVQDFGKVSILSKGTVASILTVGSKTSLGVIFDQPLLSGNNMNGKLNSNRGLIIDSSLVLNLTNKQFVYHSHASKNRKKLTDEEKIAKLKAIEAKKNQKQQQQQKEQQTKQKQVEQQKQKGANELLSLLKKKSDMNSTTTTSTTDGDCKKTEEKDDDKNNGNEDERVDPNAIKQIYGHIYSNVMNQGNVRPPPPPPTGPGHPQQFPYGMPIPPPGAPMHPGYIPVVPGNPLPPSFYQQYPPNGQQFVNSQPPPPPPPPSQQQQPQVAESTSDEKSKNDNKHNVNGRGRGGSRGRGGYRGRGGVRGGRGGNKSSHQNQPKDKVKQES

SEQ ID NO: 5529 - protein, 333 aa, Leptospira interrogans serovar Lai str. 56601
MFDEISRSIDEFGNSFLSALNNIQKSFGRELSVAKPVKETILQMIGNTPLIRLNQIGSHIPNVEFYLKAEFCNPTGSVKDRTALSMLLSSERRGELKPAGQVIQPGYNTTAMSLAWICTIRQYKFRCLVAGDTDPLKIKDLQTFGAHVEIVPGAKGNWDDSLLKRAKEIKEKEKNTIILNEYKDMANTNAHYLFTGPEIWRDLGGNVDAFVAGGGSGGTLSGVGRFLKSKKSSVRVIMGVSQKSRFIRKMVQNESSIYLPESFDPKIVDEYVGVDREQALLYQSDLYQKEGIFAGQTTGTTLASAIRFAEGLSIKEDSKSQVYRIVVLSPDRF

SEQ ID NO: 5530 - protein, 308 aa, Methanosarcina acetivorans C2A
MGQIYSDITWTIGNTPLVRLNHITKGLHTDVLVKVESFNPMGSVKDRIGLAMLEEAEREGKIKEGTTIVEATSGNTGIALAGVCAARGYKLILVMPETMSIERRKLLKALGAELVLTPGPEGMKGAVNKAEQMASADPTLYYMPQQFQNPANPEAHRRTTAEEIWRDTDGKADVLVAGVGTGGTITGIAGVLKKRKTGFRAIAVEPTESPVLSGGSPGPHRIQGIGAGFIPDVLQLGLVDEIIKVSADEAISTGRRLAREEGILAGISSGAATCAALQVASRKEMSGKTIVVILPDTGERYLSTDLFS

SEQ ID NO: 5531 - protein, 229 aa, Zea mays
  misc_feature (55)..(55): Xaa can be any naturally occurring amino acid
MPGLTIGDTVPNLELDSTHGKIRIHDYVGDGYAIIFSHPADFTPVCTTEMAAMAXYAKEFEKRGVKLLGISCDDVESHRQWTKDVEAYGGKQQQQQHTTTKVTFPILADPARDAIRQLNMVDPDEKDAAGRSMPSRALHVVGPDKAVKLSFLYPATTGRNMDEVLRAVDSLLTAAKHGGKVATPANWKPGECAVIAPGVSDEEARKMFPQGFETADLPSKKGYLRFTKV

SEQ ID NO: 5532 - protein, 157 aa, Pseudomonas fluorescens PfO-1
MAVVIDQPVTDFEAPATSGQTVSLSALKGKQVVIYFYPKDSTPGCTTEGQGFRDQYTAFKAANTEIFGISRDSLKSHENFKCKQEFPFELISDKDEAVCQLFDVIKLKKLYGKEYLGVDRSTFLIDKNGVLRQEWRGVKVPGHVDAVLAAAQALNKA

SEQ ID NO: 5533 - protein, 311 aa, Magnetococcus sp. MC-1
MGRIYNDITETIGNTPLVRLNRISQGLDAEILVKLEYFNPMASLKDRIGLAMIQEAEAKGLITKDTLIIEPTSGNTGIALAFVCAARGYQLVLTMPESMSMERRKLFELLGAQVVLTSAMDGMKGAIDKAQELLAETDKGFMPNQFDNGANPAVHETTTAEEIWRDTDGQLDLFLAGVGTGGCLTGVARTLKKRIPQLRVVAVEPESSPVLSGGMPGPHKIQGIGAGFVPRVLDTQLMDEVVRVGDQEAFEVARRMAREEGIACGISSGAVVAAALQLARTPRYAGKRFVLVLASFAERYLSTELFPSQLP

SEQ ID NO: 5534 - protein, 200 aa, Methylobacillus flagellatus KT
MAVLVGKPAPDFTAAAVLGDNSIKEDFNLYEHIKGKPAVIFFYPLDFTFVCPSELIAFDHRLEEFKARGIEVIGVSIDSHFTHLAWKNTPVDKGGIGKVGYPLVADIRHEIAKAYDVESDGGVAYRGSFLINKEGIIVHQVVNDLPLGRDIDEMLRMVDALQFFEAHGEVCPAGWKKGKAGMSASPEGVAKYLAENAASL

SEQ ID NO: 5535 - protein, 375 aa, Mycobacterium sp. MCS
MSRVLLVTNDFPPRAGGIQNYLEAFVEHVVAAGVHEVTVYAPAWKNAADYDRAATFEVVRHPGTLMLPEPSVAGRMRGLIAAHDIDTVWFGAAAPLALLTPIARRAGAARVIASTHGHEVGWSMLPVARTALRRIGDDTDVVTFVSRYTRGRFASAFGPHAALEHLPPGVDTDRFAPDTLARAELRVRYGLGERPVVVCLSRLVPRKGQDMLIRAMPAIRRRVPGATLVIVGGGPYRTALQRLAHEHGVAEHVRMTGGVPGDELPAHHAMGDVFAMPCRTRGAGLDVEGLGIVYLEASASGVPVVAGRSGGAPETVRDGETGLVVDGTDIGAVATAVGDLLADPDRAAAMGAAGRQWAVENWQWPTRAARLGELL

SEQ ID NO: 5536 - protein, 207 aa, Oceanobacter sp. RED65
MSILVGKKAPDFTTAAVKGDGSIVDNFSLSDTIKGKYAVVFFYPLDFTFVCPSEIIAMDHRVEKLKELNTEVIGVSIDSHFTHNAWRNTPVNEGGIGQLQYTLAADMDHAICRAYGIESEGGESYYPAGVAMRATFVIDQNGVVRHQVVNDEPLGRNMDEVVRIVEALQFFEENGQVCPAGWNKGDSGMVNTPEGVAKYLSEEADKL

SEQ ID NO: 5537 - protein, 235 aa, Agrostis stolonifera var. palustris
MAAANAPFALVSRLSSPATRLPARAWRAARPAPVAAGRTRPLTTASASQENRDNSVDVQVSQNGGNQQGNAVQRRPRRAGFDISPFGLVDPMSPMRTMRQMLDTMDRLFDDTVGFPTTRRSPATASEAPRMPWDIMEDDKEVKMRFDMPGLSRDEVKVMVEDDTLVIRGEHKKEAGEGQGDGWWKERSVSSYDMRLSLPDECDKSQVRAELKNGVLLVTVPKTETERKVIDVQVQ

SEQ ID NO: 5538 - protein, 212 aa, Pseudomonas syringae pv. phaseolicola 1448A
MTLRLGDIAPDFEQESSEGRIRFHEWLGDSWGVLFSHPADFTPVCTTELGFTAKLKDEFAKRGVKAIALSVDPVDSHIKWIDDINTTQNTQVNFPILADADRKVSDLYDLIHPNASDTLTVRSLFVIDPKKKVRLTITYPASTGRNFHEILRVIDSLQLTDNYKVATPANWVDGDDVVIVPSIKDEAEIKERFPKGYKAVTPYLRLTPQPNR

SEQ ID NO: 5539 - protein, 362 aa, Mesorhizobium loti MAFF303099
MLNRQKIRTTAGRGRLFDSILDTVGDTPVIRVNNLGPAHATVYVKAEFFNPAASVKDRLALNIIEEGERSGALKPGQTVVEATSGNTGIGLAMVCAQKGYPLVVTMADSFSVERRKLMRMLGAKVVLTPRAEKGFGMYKKAVELAEANGWFLARQFETAANAAIHEATTAREIINDFAGSRLDCFVTGYGTGGTVVGVARVLRRERPDTRIVLSEPANAQLIGSGKAQQRGAHGAPAASHPAFEPHPIQGWTPDFIPNVLQEAIDASLYDEVMPIAGPEGIKWAKALAQKEGIFTGISGGATFAVARQVAEKAPAGSVILCMLPDTGERYMSTPLFDGIEAEMDAEEMALSRSTPGGQFPAA

SEQ ID NO: 5540 - protein, 406 aa, Mesorhizobium sp. NMB1
IYPEEIVCLWASKKTGVPVKWVADRTESFLADAHGRDHVSTVEMAFDKDNRITGFKVDTIANLGAYMSLFSSCVPTYLYATLLSGQYNIPAIHANVRTVYTNTAPVDAYRGAGRPEATYLLERTMETAARELGVSPAELRRKNFITSFPHQTPVIMNYDAGDYNASLDAAMKAADYAGFAKRKADAAKQGKLRGIGMSCYIEACGIAPSAAVGSLGAGVGLWESAEVRVNAVGTIEVLTGSHSHGQGHETTFAQLVTQRFGVPLDSVSIVHGDTDKVQMGMGTYGSRSGAVGMSAIVKALDKVEAKAKKIAAHLLEADEGDIVIENGEVKVAGTDKSLPWFQVALASYTAHNLPAGMEPGLKETAFYDPSNFTFPAGCYICEVEIDPETGTTEIVQFVAADDFGDI

SEQ ID NO: 5541 - protein, 839 aa, Pseudomonas syringae pv. phaseolicola 1448A
MSEHSPSITQAEMLAVFQQGLSTGVGRSVKHDSADKHVSGEAVYIDDRLEFPNQLHVYARLSDRAHARIISIDTSPCYAFDGVRIAITHQDIPGLKDIGPLLPGDPLLAIDTVEFVGQPVLAVAARDLDIARQAAMAAIIEYEDLEPVLDVVQALRQKHFVLDSHTHKRGDSAAALAGATHRLQGNLHIGGQEHFYLETQISSVMPTEDGGMIVYCSTQNPTEIQKLVAEVLGVPMNRIVVDMRRMGGGFGGKETQAASPACLCAVIARLTGQPTKMRLQRFEDMQMTGKRHPFYIEYDVGFDDEGRLQGIELDLAGNCGYSPDLSASIVDRAMFHADNAYYLGEATVNGHRCKTHTASNTAYRGFGGPQGMVAIEEVMDCIARFLGKDPLAVRKANYYGKTERNVTHYYQTVEHNLLEEMTADLEQSSQYAERREAIRTFNAGSSILKKGLVLTPVKFGISFTASFLNQAGALIHIYTDGSIHLNHGGTEMGQGLNTKVAQVVAEVFQVDIDRIQITATNTDKVPNTSPTAASSGTDLNGKAAQNAAETLKQRLVEFAARHYQVAETEVEFRNGHVRIGDIFLPFAELAQLAWMGQVSLSSTGYYKTPKIFYDRSQARGRPFYYYAFGAACVEVIVDTLTGEYKMLRTDILHDVGASLNPAIDIGQVEGGYIQGAGWLTTEELVWNDKGKLMTSGPASYKIPAVADMPLDLRIKLVENRKNPEDTVFHSKAVGEPPFMLGIAAWCAIKDAVASLGDYRHQPDIDAPATPEKVLWGCEQMRHKSAARRASGEGAEPIVSAPSRVSEASPGSPSPIQDAPVGASLLEKAPGLDHSVLEQK

SEQ ID NO: 5542 - protein, 316 aa, Legionella pneumophila str. Paris
MIYPNILATIGHTPVVKINRLGKDLECELYAKCEFFNPGGSVKDRIGYEMVVKAEKERRIKPGDTLIEPTSGNTGIGIALAGAVLGYKVIITMPEKMSQEKQSVLERLGAIIYRTPTEAAYNDPDSHISLAKKLQAEIPNSHILDQYANPNNPNAHYFGTAQEIIDDFGKDLHMVVAGVGTGGTITGIAKRLKEFNPAIKIIGADPEGSILGGGTEVKSYHVEGIGYDFFPDVLDNTLIDAYIKTNDADSFRTARRLIKEEGLLIGGSCGAAMWAALQAAKSLSKGQKCLVILPDSIRNYMSKFANDEWMKEMGFL

SEQ ID NO: 5543 - protein, 219 aa, Rhizobium leguminosarum bv. viciae 3841
MSLRINDIAPDFTADTTQGPISFHEWIGSGWAVLFSHPKNFTPVCTTELGAMAGLAAEFSKRGAKVIGISVDPVESHAKWKNDIKTATGFDVEYPLIGDKDLKVAKLYDMLPAGAGESSEGRTPADNATVRSVFIIGPDKKIKLILTYPMTTGRNFNEILRAIDSIQLTAKHQVATPANWNQGEDVIITAAVSNEDAITRFGSFDTVLPYLRKTKQPTA

SEQ ID NO: 5544 - protein, 452 aa, Diospyros kaki
MAMAASPSIVKFLPGFDGELPFKLETGYIGVGEIDEVQLFYYFVESQGDPSNDPLILWLTGGPGCSGFSALVYEIGPLLFKVQSWKPGTLPSLRASKNSWTKVANIIFIDQPVGTGFSYGTTAAAYNSSDTVAAAQVYKFLRKWLMYNPKFGANPLYVGGDLYSGITVPLLVQTILDGIGSGSLPRMQLKGYLLGNPLTDDFIDANSKIPYAFRVNLLSDELYEDAEVSCNGDFVNVDFNNTNCVAVLQGIKENLQLLNEAQNFGPLCALAKPKGEGIQWGAEEAEFTDSLILQDIIPQLTCRSSSWMLSYIYMNDEGVQRALGVKEGTMNSTWRRCAKSLPFYEEDVSSTVAYHKNFTRTALRALIYSGDQALSIPYLGTLEWINSLGVPIFDTWRPWFVDGQVAGYTQKYEKNSYSLTFATVKGAGETAPEYKRKEALAMVNRWFAGYPV

SEQ ID NO: 5545 - protein, 873 aa, Arabidopsis thaliana; identical to SEQ ID NO: 4261

SEQ ID NO: 5546 - protein, 406 aa, Burkholderia sp. LUP
  misc_feature (2)..(2): Xaa can be any naturally occurring amino acid
SXRGRVALTWASKKIRRPVKWTAERSEAFVSDAHGRDHVTRAELALDADGRFLAMRIHTTANMGAYLSTFASSVPTILYATLLAGQYATPAIYAEVKAVFTNTVPVDAYRGAGRPEATYVVERLVETAARELKLDPAEIRRRNFIREFPYATPVGLTYDTGDYETILARSLELADVKGFAARRQESEKNGKLRGLGYSCYIEACGLAPSNIAGALGARAGLFEVGQIRVHPTGSVTVFTGSHSHGQGHETTFAQVVAERLGIALESVEIVHGDTGRIPFGMGTYGSRSIAVGGSAIMKALDKIETKAKKIAAHLLEAAAEDIEFKDGVFRVAGTDRTKAFAEISLAAYVPHNYPLDVLEPGLEESAFYDPTNFTYPSGAYICEIEVDPDTGVCRIQQFTAVDDLAT

SEQ ID NO: 5547 - protein, 188 aa, Bdellovibrio bacteriovorus HD100
MQTIINTKVPDFKVQAFHHGDFKTVTQNDLKGKWSIFFFYPADFTFVCPTELGDMADKYAEFQKIGVEVYGVSTDTHFTHKAWHDASETIKKIKYPMLADPTFQLTRAFGVHIEEEGLAYRGTFLVNPEGKIVLAEVQDNGIGRNADELFRKTQAAQYIAANPGEVCPAKWTPGKSTLKPGLDLVGKI

SEQ ID NO: 5548 - protein, 376 aa, delta proteobacterium MLMS-1
MRILELCLSPGFGGLEIHVCRAVEAIARNHDVVTVTLPASPIRTRLLAGGHQVQSLRVRFPRFPMIAARRLAALIDRLAIDLVHVNWGPDLALAALAKRFSRRQPRLVFCRHMQITRSKNDFYHNFIYRQCDLMLAVTREMEQRLRHYLAPCHGERIRHLYSGVPAPTTLLDGASREALRREQGLPADAFVAGVFSRLEAAKGQHLLLEAIAMLRDLGIIVYGLIVGKSMNDDYARGLRQQVNDLGLAEQIVFCDFVDQPQLFMQICDCVVLPTNRETFGLVLVEAMRCGVAVIGSAAGGVPEIIEDGVSGLLFESGNSQDLATQIRLLHDDPDRLIALAVAGRKRAEEMFSAEKQLPKLDVLFQEIVNEGIVASN

SEQ ID NO: 5549 - protein, 147 aa, Pyrobaculum aerophilum str. IM2
MRVFLKINGVLYEVEVEPRRLLAHVLRELGFTSVRIGCDTATCGACTVIMNGRPVKSCNILAVQADGAEIFTIEHSDEVMDRLKEAFKRNHAAQCGFCTSGMLLTAYHLLKRGVKSEEEVIEGISGVLCRCTGYQNIINAIKEAAGL

SEQ ID NO: 5550 - protein, 397 aa, Aminobacter sp. COX
LPVGLQETGVPVKWVADRTESFLCDAHGRDHVTHAEMAFDENHKILGFKVDTMANLGAYMSLFSSATPTYLYATLLSGQYDIPAIHGNVKAIYTNTAPVDAYRGAGRPEAAFLVERMMEVSARQFGMSPAELRRKNFITSFPHQTPVIMNYDAGDFAASLDAAMKEADYAGFAKRKAEAAKRGKLRGIGMSCYIEACGIAPSAAVGSLGSGVGLWESAEVRVNAVGTIEVLTGSHSHGQGHETTFAQLVAGRLGVPLDSISIVHGDTDKVQMGMGTYGSRSGAVGMSAISKALDKVEAKAKKIAAHLMEADEGDIVIENGALKVAGTDKSVPWFQVALAAYTAHNLPGGMEPGLKETAFYDPANFTFPAGCYICEVEVDPDTGVTEIVQFVAAGDFG

SEQ ID NO: 5551 - protein, 320 aa, Nocardia farcinica IFM 10152
MARYESLIATLGDTPLVGLRTLSPKWDGDDHVRLWAKLEDRNPTGSVKDRPALRMIEQAEAEGRLRPGCTILEPTSGNTGISLAMAAKLKGYQLVCVMPENTSVERRQLLTMYGARIIDSPAAGGSNQAVALAKQIAAENPDWVMLYQYGNPANAQAHYDTTGPELLADLPEITHFVAGLGTTGTLMGTGRFLREQVPGIEIVAAEPRYGELVYGLRNIDEGFIPELYDETVLTTRYSVGPYDAVKRTRELVGEEGIFAGISTGAILHAALGIGRKALQAGRRADIAFIVADGGWKYLSTGAYDGTLEDAESRLEGQLWA

SEQ ID NO: 5552 - protein, 379 aa, Robiginitalea biformata HTCC2501
MKIAIVCYPTFGGSGVVATELGIALARRGHEIHFVTYSQPVRLELLSPNIHFHEVHVPEYPLFHYQPYELALSSKLVETIRSFGIELLHVHYAIPHAYAGYMTKKMLEDEGIYVPMVTTLHGTDITLLGNHPFYKPAVQFSINQSNVVTSVSQSLKEDTLEIFDIRREIHVIPNFIDKTKYNRAPEDCQRSLMAKDDEYILTHVSNFRKVKRVQDVVRIFHKVQQQVPAKLIMVGEGPEKEGAELLAEELGIEEKVLFLGNSNEVEHILCFSDVFLLPSEKESFGLAALEAMITKTAVISSNAGGIPELNQHGVSGYLSDVGDTEDMIRNTLKILKDDATLQAFKKRAYERACIFDIHNILPMYEEIYDLAYKSRLKQV

SEQ ID NO: 5553 - protein, 316 aa, Actinobacillus pleuropneumoniae serovar 1 str. 4074
MTIYADNSYTIGNTPIVRLKNFGQNGNLLVKIESRNPSFSVKCRIGANMVWQAEKDGILTKGKEIVDATSGNTGIALAYVAAARGYKITLTMPETMSTERKRLLRGLGVNLVLTEGSKGMKGAISKAEEIVASDPNRYVILKQFENPANPAIHQQTTGPEIWNATEGKVDVIVAGVGTGGTITGISRYIKQDQGKQIISVAVEPKESPVITQTLNGEEVKPGPHKIQGIGAGFIPKNLDLSLIDRVEQVSSEEAIATARRIMAEEGILVGISSGAAVAAADRLAKLPEFADKQIVAILPSASERYLSTLLFEGVEV

SEQ ID NO: 5554 - protein, 178 aa, Acidobacteria bacterium Ellin345
MLGVGQKFPAFNLKATVSLEKGKEFADIKDNDYAGKWKIYFFWPKDFTFVCPTEIAAFGKMNKEFAERDTQVLGGSTDSEFVHHAWRTHHDDLRNLPFPMLADVKRELTSDLGILDPEAGVAQRATYIVDPQGIIRFAYVTDLSVGRSPSEVLRVLDALQTDELCPCNWQKGQETLHV

SEQ ID NO: 5555 - protein, 163 aa, Pseudomonas aeruginosa UCBPP-PA14
MSDALALTVNGQSLRLDVAPDTPLLYVLRNDLQLNGPKFGCGLGECGACTVLMDGVATRSCITPVEAAVGRQVVTLEGLGDAAHPHPLQQAFIDEQAAQCGYCINGMVMTAKALLDRNPNPSDGEIRQELAYNLCRCGTHVEILKAVRRAAESLKERQEEHPA

SEQ ID NO: 5556 - protein, 380 aa, Streptomyces avermitilis MA-4680
MHKTLIVTNDFPPRPGGIQAFLHNMALRLDPERLVVYASTWKRGREGVEATAAFDAEQPFTVVRDRTTMLLPTPGATRRAVGLLREHGCTSVWFGAAAPLGLMAPALRRAGAERLVATTHGHEAGWAQLPASRQLLRRIGESTDTITYLGEYTRSRIAAALTPEAAGRMVQLPPGVDEKTFHPGSGGAEVRARLGLTDRPVVVCVSRLVPRKGQDTLILAMPHILAKEPEAVLLIVGGGPYEKELRRLADETGVAGSVRFTGAVPWSELPAHYGAGDVFAMPCRTRRGGLDVEGLGIVYLEASATGLPVVAGDSGGAPDAVLDGETGWVVRGGSPEAAADRVVTLLGDPELRRRMGERGREWVEEKWRWDLLAEKLKTLL

SEQ ID NO: 5557 - protein, 308 aa, Methanosarcina thermophila
MGRIFSDITWTIGNTPLVRLNRITKGLHADVLAKVESFNPMGSVKDRIGLAMIEEAEREGRIKEGTTIIEATSGNTGIALACVCAARGYNLILVMPETMTVERRKLLKALGAELVLTSGAEGMRGAVNKAEQMAADDSALYFIPQQFQNPANPEIHRRTTAEEIWRDTDGKADVIVAGVGTGGTITGIASAIKKRRPSFKAIAVEPAESPVLSGGSPGPHRIQGIGAGFVPDVLQLELIDEIIKVTGDEAAATARRLAKEEGILAGISSGAATWAALQVASREEMRGKTIVVILPDTGERYLSTDLFD

SEQ ID NO: 5558 - protein, 219 aa, Erythrobacter sp. NAP1
MDTEQHHSAAPCAGLRIGDAPPDFEARSTIGPVKLSTYRGRWLILFSHPADFTPVCTTEFVELAKEAKAFEKRKCQLMALSVDSLFSHFAWLRMIKERFDIEVRFPIVEDPTLVIGRAFGMVAPSDNDSATVRTTFFIDPEGIIRAMTCYPANVGRSIPEMLRTLDALQAIDAQDGLAPANWQAGDALLQSPTQDLDEVYRATEETTWFLREMPKGKSK

SEQ ID NO: 5559 - protein, 156 aa, Rickettsia conorii str. Malish 7
MTLELGKKLPDLSLHIGQDNVIKLSDLKGKFVILYFYPKDDTPGCTIEAQDFNKLKPEFDKLNTVIIGVSKDKLDSHDKFKEKYSLGFDLASDANSNLCEQLGVWIAKSMFGKKYMGIDRATFLLDKEGIVKHIWRSVNAKNHAQEVLEKLRTMLS

SEQ ID NO: 5560 - protein, 344 aa, Bradyrhizobium japonicum USDA 110
MTIRNDVVEAIGNTPLIKLKRASEATGCTILGKAEFMNPGQSVKDRAGKWMILEAEKRGELKPGGLVVEATAGNTGIGLAVVASARGYRTLIVIPETQSQEKKDFLKLCGAELIEVPALPYANPNNYQHVGRRLADELRKTEPNGVLFADQWNNLDNAKAHYESTGPEIWEQTGGKVDGFVCSVGSGGTLAGVSRLLKEKNKNVRIACADPHGAGMFDYFRTGEAKATPGGSITEGIGLNRATAIVESAKVDDAYLIPDTDAVTEIYDLLQHEGLCLGGSTGINIAGAIRLAKQLGPGKTIVTVLCDSGSRYQSKLFNADFMRAKNLPVPEWLEKRSNIKPPFV

SEQ ID NO: 5561 - protein, 350 aa, marine gamma proteobacterium HTCC2080
MSDIYQTQGRGQLYGDITRTVGDTPCVKLNRIAPDHVEVYVKVESFNPLGSVKDRLALNIIEAAERSGQLKPGQTVVEATSGNTGIGLAMVCAARGYPLVITMADSFSIERRRLMRFLGAKVVLTPKAEKGIGMYRKARQLAADNGWFFAAQFESNANADIHEATTGPEIVADFADSRLDYWVSGYGTGGTVSGVARVLRKERPECKIILSEPHTATLIGSGEAQVRNDDGSPNGSHPAWSPHLIQGWTPDFIPLVLQESIDHNGFDEILPVDAEDGMTWAKRLATEEGILTGVSGGSTLATAMEVAAGAEAGSVMLVMLPDTGERYLSTPLFEAIPAEMTPEEQALADS

SEQ ID NO: 5562 - protein, 229 aa, Zea mays
MPGLTIGDTVPNLELDSTHGKIRIHDYVGDGYAIIFSHPADFTPVCTTEMAAMAGYAKEFEKRGVKLLGISCDDVESHRQWTKDVEAYGGKQQQQQHTTTKVTFPILADPARDAIRQLNMVDPDEKDAAGRSMPSRALHVVGPDKAVKLSFLYPATTGRNMDEVLRAVDSLLTAAKHGGKVATPANWKPGECAVIAPGVSDEEARKMFPQGFETADLPSKKGYLRFTKV

SEQ ID NO: 5563 - protein, 333 aa, Cupriavidus taiwanensis
MEIRDGFAGTIGHTPLIRLAGLSAETGCDIYGKAEFLNPGGSVKDRAALYIIRDAERRGLLKPGGTVIEGTAGNTGIGLAHLCAARGYRCIVVIPDTQSPEKMERLRMLGAEVRAVPAKPYADPDNYQKIAGRLADETENAIWANQFDNLANRQAHYETTGPEIWHATTGHIDAFTCATGTGGSLAGIARCLKEHKPGVRIVLADPHGSGLYHFVKHREVKAEGSSITEGIGSSRVTANLQDTPIDDAVRIDDQTCVDMVYRLLREEGLFVGGSSGINVGAAVALAREMGPGHTIVTLLCDRGDLYMGRLFNEAWLQGKGLQPIPFRRASPAG

SEQ ID NO: 5564 - protein, 964 aa, Vitis vinifera
MGVPAFYRWLADRYPLAVMDVVEEEPPNPNGMEFDNLYLDMNGIIHPCFHPDGKPAPTTYDDVFKSIFDYIDHLFSLVRPRRLLYMAIDGVAPRAKMNQQRSRRFRAAKDAAEAEAEEERLRKEFEVEGKMLSPKEKPETSDSNVITPGTKFMAVLSVALQYYIHSRLNRNPGWCSTKVILSDSNVPGEGEHKIMSYIRSQRNLLGFNPNTRHCLYGLDADLIMLSLATHEVHFSILREMITPPGQQEKCYLCGQVGHLAAECRGIEVVDDTPIHKKKYQFLNIWVLREYLQYDLEILNPPFEINFERLLDDFVFLCFFVGNDFLPHMPTLEIREGAINLLMHVYRREFSAMGGYLTDAGEVLLDRVEHFIESVAVYEDQIFQKRTRIQQALENNEEMKLRTKREASEEPRAPVEDKVKLGEPGYKERYYTEKFNLSNPEEIDKVRKEIVMKYVEGLCWVCRYYYQGVCSWQWYYPFHYAPFASDLKDLVDLEITFFLGEPFKPFDQLMGTLPAASASSLPENYRKLMTDQSSPILDFYPSDFEIDMNGKRYAWQGVAKLPFIDEEKLLAETKKLEVTLTVEEQVRNSVMFDLLYVHAVHPLATQIIYYYHFYQSSPPLARVIWPIDINASGGMNGYLWLCERNGWRSEFPSSISGLQNIEHNQVFNVTYVNPPHHKHIPEPPMGVVMPEKVLRPFDIKPLPVLWHEDNGGRRQQGRERPQVPRAISGPLLGEAAHRLLKNTLNIKPNNTSSGMLLQTPYRNMPSNYVVNRPRPAGPSGYEKGFNGDSNYYYGHYDNPRGALSIPRFPPSPNNMQGNRQNFRVQDRSTFQDQYRNSRTGMSALTTEQNFRVQHRPPYQDQFSELSMGMSTLTIEEGVRTRQPIVRPSRMPSAADTLNTNNQFVQNKSPPAPPSKWIERQATGNAGMIVRQQDNVSAGTYEKPIKKVYQVKMQHLQDSSDPGSQQ

SEQ ID NO: 5565 - protein, 242 aa, Agrostis stolonifera var. palustris
MAAANAPFALVSRLSSPATRLPARAWRAARPAPVAAGRTRPLTTASASQENRDNSVDVQVSQNGGNQQGNAVQRRPRRAGFDISPFGLVDPMSPMRTMRQMLDTMDRLFDDTVGFPTTRRSPATASEVPRMPWDIMEDDKEVKMRFDMPGLSRDEVKVMVEDDTLVIRGEHKKEAGEGQGDGAEGQGDGWWKERSVSSYDMRLTLPDECDKSQVRAELKNGVLLVTVPKTETERKVIDVQVQ

SEQ ID NO: 5566 - protein, 777 aa, Rhodobacter capsulatus
MSVGKPLPHDSARAHVTGQARYLDDLPCPANTLHLAFGLSTEASAAITGLDLEPVRESPGVIAVFTAADLPHDNDASPAPSPEPVLATGEVHFVGQPIFLVAATSHRAARIAARKARITYAPRPAILTLDQALAADSRFEGGPVIWARGDVETALAGAAHLAEGCFEIGGQEHFYLEGQAALALPAEGGVVIHCSSQHPSEIQHKVAHALGLAFHDVRVEMRRMGGGFGGKESQGNHLAIACAVAARATGRPCKMRYDRDDDMVITGKRHDFRIRYRIGADASGKLLGADFVHLARCGWSADLSLPVCDRAMLHADGSYFVPALRIESHRLRTNTQSNTAFRGFGGPQGALGMERAIEHLARGMGRDPAELRALNFYDPPERGGLSAPPSPPEPIATKKTQTTHYGQEVADCVLGELVTRLQKSANFTTRRAEIAAWNSTNRTLARGIALSPVKFGISFTLTHLNQAGALVQIYTDGSVALNHGGTEMGQGLHAKMVQVAAAVLGIDPVQVRITATDTSKVPNTSATAASSGADMNGMAVKDACETLRGRLAGFVAAREGCAARDVIFDAGQVQASGKSWRFAEIVAAAYMARISLSATGFYATPKLSWDRLRGQGRPFLYFAYGAAITEVVIDRLTGENRILRTDILHDAGASLNPALDIGQIEGAYVQGAGWLTTEELVWDHCGRLMTHAPSTYKIPAFSDRPRIFNVALWDQPNREETIFRSKAVGEPPFLLGISAFLALHDACAACGPHWPDLQAPATPEAVLAAVRGAEGRA

SEQ ID NO: 5567 - protein, 243 aa, Agrostis stolonifera var. palustris
MAAANAPFALVSRLSSPAARLPIRAWRAASPAPLGAGRARPLTTASASQDNRDNSVDVQVSQNGGGNQQGNAVQRRPRRTGFDVAPFGLVDPMSPMRTMRQMLDTMDRLFDDAVGFPTTRRSPAAASEAPRMPWDIVEDDKEVKMRFDMPGLSRDEVKVMVEDDTLVIRGEHKKEVSEGQGDGAEGQGDGWWKERSVSSYDMRLALPDECDKSQVRAELKNGVLLVSVPKTETERKVIDVQVQ

SEQ ID NO: 5568 - protein, 196 aa, Streptomyces coelicolor A3(2)
MRVNLTVNGRPQEADDVWEGESLLYVLRERMGLPGSKNACEQGECGSCTVRLDGVPVCSCLVAAGQAEGREVVTVEGLAEYARRRAEGSTTTGTRAGESASLDAARRWQAGGTDSQTGENIELAPVQQAFIDAGAVQCGFCTPGLLVAADEMLERHPNPSDEDIREALSGNLCRCTGYEKIMDAVRLAAARRSEEA

SEQ ID NO: 5569 - protein, 828 aa, Streptomyces coelicolor A3(2)
MAANGAPAGLTQGSGTKGGIGESTLRPDGVLKVTGEFAYASDMWHEDMLWGQILRSTVAHAEIVSVDTGEALATPGVYAVMTYDDLPTDVRHYGLEIRDTPVLAHGKVRHHGEPVAIVAADHPETARRAAAKVKVEYRELPLVTDEASATAPGAVLVHEHRTDHHSGHVPHPNIVHRQPIVRGDAAAAAARADVIVTGDYHFGMQDQAFLGPESGLAVPGEDGGVDLYIATQWLHSDLRQIAPVLGLPEDKVRMTLSGVGGAFGGREDLSMQIHACLLALRTGKPVKMVYNRFESFFGHVHRHPARLHYEHGATRDGRLTHVRCRIVLNGGAYASASPAVVGNAASLSVGPYVCEDVDIEALALYSNNPPCGAMRGFGAVQACFAYEAQMDKVAAGLGLDPVEFRRINAMEQGTLMPTGQPVDSPAPVAELLRRVKAMPMPPERQWESSEGADVRQLPGGLSNTTHGEGVVRGVGYAVGIKNVGFSEGFDDYSTARVRLEAAGGRPVVTVHTAMAEVGQGGVTVHAQIARTELGVTQVTIRPADTRVGSAGSTSASRQTYVTGGAIKHACELVRERVLELGRRRFGSYHPAWATAGLLLEGGKVVTDGGEVLADLVDVLEDEAVEVEEEWRHRPTQPFDPRTGQGDGHVQYSFAAHRAVVEVDTELGLVKVIELACAQDVGKALNPLSVVGQIQGGTVQGLGIAVMEEIVVDPVTAKVQNPSFTDYLLPTILDTPALPVDVLELADDHAPYGLRGVGEAPTLSSTPAVLAAIRDATGLALDRTPVRPEHLTGTAGSDRHPQDPPGGARNVTPSAPPGAPAKSRSARGT

SEQ ID NO: 5570 - protein, 243 aa, Agrostis stolonifera var. palustris
MAAANAPFALVSRLSSPAARLPIRAWRAARPAPLGAGRARPLTTASASQDNRDNSVDVQVSQNGGGNQQGNAVQRRPRRAGFDVAPFGLVDPMSPMRTMRQMLDTMDRLFDDAVGFPTTRRSPAAASEAPRMPWDIVEDDKEVKMRFDMPGLSRDEVKVMVEDDTLVIRGEHKKEVSEGQGDGAEGQGDGWWKERSVSSYDMRLALPDECDKSQVRAELKNGVLLVSVPKTETERKVIDVQVQ

SEQ ID NO: 5571 - protein, 123 aa, Arabidopsis thaliana
  misc_feature (32)..(32): Xaa can be any naturally occurring amino acid
GIALRGLFFIAKEGGFHPFPLHNFGFGPRVYXTIGTLPAFPFLPENPDEVFPPGWKPGWKSIKPPPKLPQEFFSAFLKLFFYSQKGPFFFFVGRVFFFCSVKPSLVWFSLCPPNFNKKLFPFM

SEQ ID NO: 5572 - protein, 411 aa, Alkalilimnicola ehrlichei MLHE-1
MPMKVLHILDHSLPLHSGYTFRTAAILREQHRLGWETVHLTSPKHGVAAGADADREEWAEGLHFHRTPHTPLRVPGLGEWTLMDALTRRLHQVAAETRPDVLHAHSPALNAIPALRVGRRLGIPVVYEVRAFWEDAAVDHGTSRDQGLRYRLTRGLETRALRRADHVTTICEGLRQDIITRGIAPGRVTVIPNAVDAERFQLGGTADPALKAELGLEGCRVLGFIGSFYAYEGLDLLLQAFPRIHDQAPDVRILLVGGGSQAEALKAQARDLGIADQVVFTGRVPHDQVNRYYDLVDLLVYPRHSMRLTELVTPLKPLEAMAQGRLLVASDVGGHRELIRDGETGWLFPAGDPKALADTVLHTLARAADWPQVRANGRRFVEEERNWPASVARYQAIYRRLTGLGEAARAG

SEQ ID NO: 5573 - protein, 907 aa, Desulfovibrio desulfuricans
METKTLIVNGMARRLLVSPNDLLVDVLRSQLQLTSVKVGCGKGQCGACTVILDGKVVRACIIKMSRVAENASVTTLEGIGAPDCLHPLQHAWIQHGAAQCGFCTPGFIVSAKALLDENVAPSREDVRDWFQKHHNICRCTGYKPLVDAVMDAAAILRGEKTVEEISFKMPADGRIWGSSIPRPSAVAKVTGLAEFGADAALRMPENTLHLALAQAKVSHALIKGIDTSEAEKMPGVYKVLTHKDVKGKNRITGLITFPTNKGDGWERPILNDSKIFQYGDALAIVCADSEANARAAAEKVKFDLELLPEYMSAPEAMAPDAIEIHPGTPNVYYDQLEEKGEDTVPFFNDPANVVAEGSYYTQRQPHLPIEPDVGYGYINEQGQVVIHSKSVAIHLHALMIAPGLGLEFPKDLVLVQNTTGGTFGYKFSPTMEALVGVAVMATGRPCHLRYNYEQQQNYTGKRSPFWTTMRYAADRQGKILAMETDWSVDHGPYSEFGDLLTLRGAQYIGAGYGIANIRGTGRTVATNHCWGAAFRGYGAPESEFPSEVLMDELAEKLGMDPFELRALNCYREGDTTSSGQIPEVMSLPEMFDKMRPYYEESKKRVKERSTAEIKRGVGVALGVYGAGLDGPDTSEAWVELNDDGSVTLGNSWEDHGQGADAGSLGTAHEALRPLGITPENIHLVMNDTSKTPNSGPAGGSRSQVVTGNAIRVACEMLIEGMRKPGGGFFTPAEMKAEGRPMRYDGKWTAPAKDCDAKGQGSPFACYMYGLFLTEVAVEVATGKATVEKMVCVADIGKICNKLVVDGQIYGGLAQGVGLALSEDYEDLKKHSTMGGAGIPSIKMIPDDIEIVYVETPRKDGPFGASGVGEMPLTAPHAAIINGIYNACGARVRHLPARPEKVLEAMPR

SEQ ID NO: 5574 - protein, 1240 aa, Oryza sativa Indica Group
MATTRPPASHPAKSPPGGFPTPTAVAPRRRAPPPPPPPPADADAASSSRGPGDDEGSGRAGASQEAGGGGCGVTPYEQARKALALRSPFDGDEAVGRDALLPARVARWAAVGDVRKKHKKAQQPEAAAAAAAAAVEQQPKPSSGSKEFWDLMEPYFREINWDDFEALMQAPLLGFNGPLDPCFLVPFVGSGKEFGENYDPSCVVVEDESSHLNSNLGKDSDELESSIVRSKQDSHGSSDFVGGNMDPVINNGANDEHGEQDMQEVVLQEEQPMEIEQDHGRSDAIALPPDTEESDVSLNWLLGARDRFVLTSERPNKKRKLLGADAGLERLVQLPPLEGEAGTTCDEKGALKPVKRDSGQIADGGNLKFVHLFCSLWTPEVVVEDLNSMEPVTNVGDIQENRTKLVCSLCKVEMRAFCLKHSTVQETISIQNDRICAEEDTSQIELDDASLATQKIQQLRLTRNNKDKFTSSMIASSCSSSLKQTTELATSPSTARSVESQETQITDMAVDRPIGDRCLVSNSGDVSTALRKLIDQGMVNVGDIESELGVSSESLEAALVPETSTFSPGLKLKIIKLLQNTIRVPSVQEKCSKEGSLALQGTVFTGESKSLTDTQICSELEEGISSFDHCCPEGDNTNKDWADSVENGFHNCGEDCISGKCFLNSSTKLEQLADIAVADQVSKAKSSGILEHSPHDEIEGELLHLQSRLLDDVGGAKQRYEDLVLKIVQSLSHDLDSFNKRKWDHIIANQFLRDLREAKKRGNTERRHKEAQAIMAAAARCILPTSRNAPVRKVAECDVLSAKQELFVCLQSVPVAVPAKQEVHSPKQESIPKFNTGSSRVSQLISVQQANDSSPNSKVSADANIGSFDLAKFSKKNALPCDICMRSETVLNRIFVCSSCKAAVHLDCYRSVTNPTGPWKCELCQEMPSDVVAGSQSDCDGSKPCLLQCDLCHGTSGAFRKTIKGRCIHAFCAEESLPKDKDTCAICHRNVGSCLKCSTVDCQITFHPTCARDAGFYMDTKTIGSTLEHKAYCGKHGIEQRKADLLQLHGPEEVKNMKQMRVDLEVLRLICERVVKREKLKKDLVVCGHDTLAARRNSIAYSTRTSYCGSGPGASSESATTSVNNSYSGLMQRTDDVAVDSIISRKPTVRFSLNNSDADRNTADSSTSSISYKQKLDDRESLADKNLPKKPATAMQISEEGETKSSDKKNQRPPKSIVYTRRSALSKKRQLSQNVEGPGG

SEQ ID NO: 5575 - protein, 189 aa, Shewanella sp. ANA-3
MTQSIINSTIKPFKATAYHNGEFVPVTEQDLLGKWSVVFFYPADFTFVCPTELGDMADHYAKLQSMGVEVYSVSTDTHFTHKAWHDTSDTIKKINFPMLADPTGVISRNFGVMIEEEGLALRGTFVINPEGQVKVAEIHDLGIGRSASELVRKIQAAQYVATHDGEVCPAKWQPGDETLAPSLDLVGKI

SEQ ID NO: 5576 - protein, 186 aa, Xylella fastidiosa Ann-1
MSVLNTEILSFKATAYKNGQFVEVSEAVLKGKWAVFVFYPADFTFVCPTELEDLADHYEEFQKYGVEIYSVSTDTHFSHKAWHDISPAIGKIKYAMIGDPTHEISRNFNVLRPSGLADRGTFIIDPQGVIQSVEITAEGIGRDAKELLRKVKAAIYVANHPGEVCPAKWEEGGKTLAPSLDLVGKI

SEQ ID NO: 5577 - protein, 307 aa, Bacillus pumilus SAFR-032
MAVIKDITELIGRTPLLKLSGIGIPEGVEVYAKLEMMNPGGSIKDRLGDMLIREALASGKLRPGGTIIEATAGNTGIGLALSARKHQLRTIFCVPEHFSQEKQQLMKALGAKIIHTPRKEGMKGAINRALELEASLDNAYCVLQFKNQVNPLTYYKTLGPELWSDLQGNIDVFVAGAGSGGTFQGCAAYLKEQHPALKTVVVEPEGSILNGGDPGPHKTEGIGLEFIPDYMESALFDEIYTVSDHDAFRMVKEAAEKEGVLIGSSSGAALFAALEEARKAAPGTVIVTIFPDSSERYLSKGIYEGGK

SEQ ID NO: 5578 - protein, 81 aa, Triticum aestivum
  misc_feature (4)..(4): Xaa can be any naturally occurring amino acid
  misc_feature (18)..(18): Xaa can be any naturally occurring amino acid
  misc_feature (29)..(29): Xaa can be any naturally occurring amino acid
  misc_feature (42)..(42): Xaa can be any naturally occurring amino acid
  misc_feature (48)..(48): Xaa can be any naturally occurring amino acid
  misc_feature (54)..(54): Xaa can be any naturally occurring amino acid
  misc_feature (66)..(66): Xaa can be any naturally occurring amino acid
  misc_feature (69)..(70): Xaa can be any naturally occurring amino acid
  misc_feature (74)..(74): Xaa can be any naturally occurring amino acid
  misc_feature (79)..(79): Xaa can be any naturally occurring amino acid
MASXASSTTLISSTRILXPATKSPLLPSXSLSSPSPSASLRXSLIPLXSPQSAXTSRRSFAVKAQXDDXXLVGXKAPDXEA

SEQ ID NO: 5579 - protein, 905 aa, Rhodococcus sp. RHA1
MTYIVNGRAFDEEPNPGQCLRTFVRSLGHHGVKKGCDAGDCGACTVWLDGDPVHSCITPAFRAEGREVTTIEGLGSPDDLHPLQRQFRDAPGFQCGFCTAGMIMTSATFTDAQKEDLPRALKGNLCRCTGYRAIEDAVNGVAAVEVAEPGRAVGASVGAPAATDVVTGRAEFTMDTEIEGMLHLKVLHSPHAHARIVSIDTTAALAVPGVHRVYTWEDVPRKRFTTAIHTDHLVDPDDTYILDDTVRFAGQRVVAVLADTVGAAEEGCREVVVEYDVLPAVFDPEEAMADGAPQLHGSDDPFVRDPVHNILLELHGEVGDIEAGFAEADVIHEGTYFTPRVQHAHLETHGSIAWMEDGRLHVRTSSQSPSIAKVKLAHLFDLRPDQLRVFCKRVGGAFGGKQEVFSEDLVALATLDTGRPVCFEFTREEEFTTASPRHPMKLTITLGARSDGTLTAFQVRNVSNTGAYGNHGGETLFAAGAAISAYRCLNKKFDAYAVYTNSVPSGALRGYGMTQPAFAVESAMHELAVALDIDPLELRRRNIVRPGDSLVAIDDVPDDVGFGEDGLGQCIDLVDDALRRTANGQVLGVDWLVGEGTASSLHETAPPTEHISEAWATLGDDCVYELAVGTVEFGEGTSTAHVQIAATHLGTTPARIRLVQSDTDRTGFDTGAFASAGLFVAGNAVSNASVALRDRILAFAAVHTGVDVTECSMDDDGVLCGGTRVPLTDLVAAARRRGIRFTEARKAYGSPRSVVSNTHGFRIAVHRVTGEIRILYSVQAADVGVVINPVQVRGQIEGGVAQGIGFALTENFHVDDNGVMINPSLRNYRIPTYADIPRTEVLLVESNDSVGPMRAKGMAECCINPVAPALANALENATGVRFRELPLTPERIYHRIGENRSVPTT

SEQ ID NO: 5580 - protein, 699 aa, Physcomitrella patens subsp. patens
MRPPVLKSVLAVLQLLGTGWGTALLACGGGVNTVSLKYPFFRKFANLTPEEREKMLQGWSTSLLSPLRRLFKSMKSITGYTLYSKINDEGENAAWKAIGYTGMDPTVRSRSKEEYWKPRPLGDGHVDAKEAGVRLKAILGAKGFSVLDEIKSFRVQSRKWGYSESSSDIYMECDVVIVGSGSGGGVMAAVLAKQGFKVLVLEKGQYFAAQDITSLEGPGMVNMYEKMGAQSTDDGGVSLIAGKTVGGGTAVNWCVSFKTPEHVRNEWVNDHGLDLFTSAQYEQAMQAVWKRLAVQPEVDKHSLQNTVLLEGCKKLGYECGTLQRNCSPGHYCGWCSYGCPTGKKQSTAETWLVDAVNTGNAVILSNCHAKHVFHDANPGGKKARKGHGVVATIGEGSTRIFVKANATVIACGALLTPPLLLRSGLKNPNIGKYLRVHPATTCFGYFPEEVEPKGKSYEGGIMTTYSPVTLRKPTEYGGLLETGVFHPAVFAAFHPWQSGADGKERLLHHARTSHITVVTRDKGFGTAKIDNDGLPMYSYKISPYDEQTLIAGMIQSLRILVAAGAVEIGTQQLDGERFKHCNSNWPIRTDSSNCIVVTAGATPAQIEEYLDRVKRRRARQSSIQIASAHQLGSCRMGTSPRTSAVDARGETWEAEGVFVADGSVLPTSSGVNPMVTIQSIAYCTADSVAHFLHGASSAK

SEQ ID NO: 5581 - protein, 194 aa, Streptomyces viridosporus
MGASSLQGEPVLTVGDKFPEFELTACVSLEKGKEFETINHKTYEGKWKIVFAWPKDFTFVCPTEIAAFGKLNDEFADRDAQILGFSGDSEFVHHAWRKDHDDLRDLPFPMMADSKHELMRALGIEGEDGFAKRAVFIVDQNNEIQFTMVTAGSVGRNPKEVLRVLDALQTDELCPCNWTKGDETLDPVALLAGE

SEQ ID NO: 5582 - protein, 163 aa, Aeropyrum pernix K1
MSKAATPLVRVTLKVNGKTYTHHVPPRMLLVHFLRDVLGLTGTHVGCDTSNCGACTVLVNGKAVKSCTVYTFMVDGAEITTIEGLEQNGKLHPIQEAFWENHGLQCGFCTPGMIMTLHDFLSRNKSPTESEVRRAIEGNLCRCTGYVNIVRSALWAAERMRGG

SEQ ID NO: 5583 - protein, 662 aa, Arabidopsis thaliana
MAASNHSSGKPGGVLSDALCRELWHACAGPLVTLPREGERVYYFPEGHMEQLEASMHQGLEQQMPSFNLPSKILCKVINIQRRAEPETDEVYAQITLLPELDQSEPTSPDAPVQEPEKCTVHSFCKTLTASDTSTQGGFSVLRRHADDCLPPLDMSQQPPWQELVATDLHNSEWHFRHIFRGQPRRHLLTTGWSVFVSSKKLVAGDAFIFLRGENEELRVGVRRHMRQQTNIPSSVISSHSMHIGVLATAAHAITTGTIFSVFYKPRTSRSEFIVSVNRYLEAKTQKLSVGMRFKMRFEGEEAPEKRFSGTIVGVQENKSSVWHDSEWRSLKVQWDEPSSVFRPERVSPWELEPLVANSTPSSQPQPPQRNKRPRPPGLPSPATGPSGPDGVWKSPADTPSSVPLFSPPAKAATFGHGGNKSFGVSIGSAFWPTNADSAAESFASAFNNESTEKKQTNGNVCRLFGFELVENVNVDECFSAASVSGAVAVDQPVPSNEFDSGQQSEPLNINQSDIPSGSGDPEKSSLRSPQESQSRQIRSCTKVHMQGSAVGRAIDLTRSECYEDLFKKLEEMFDIKGELLESTKKWQVVYTDDEDDMMMVGDDPWNEFCGMVRKIFIYTPEEVKKLSPKNKLAVNARMQLKADAEENGNTEGRSSSMAGSR

SEQ ID NO: 5584 - protein, 159 aa, marine gamma proteobacterium HTCC2143
MAKIHVSTTVNGDAVEFLCNPGETLLDILRNDLQLTGTKEGCGSGDCGACSITVDDRLVCSCLVLAVEAEGKAIGTIEGVADKDQLNVIQQKFLEHAALQCGICTPGLIVSVQALLKENPEPTEEEARYYLAGNLCRCTGYDKIIRAVLDAAETMRGAA

SEQ ID NO: 5585 - protein, 756 aa, marine gamma proteobacterium HTCC2143
MKNNNEAIAADNYKYIGTRSIRPDGFEKVTGRANYGADLSLPGMIWGKMLRSPHAHAMIKNIDTSRAEALAGVMAIVTYDDFPGVSSEIVAAGEGTEDLLDLARNLMADGKVLYHGHAILGVAAISKQIAEQALELIDIDYDILPAVLDVRDAMAKDAPILHQTMFTKGLSETPTTPSNVASVVELKKGDILAGFAQADIVIEREFYTPTVHQGYIEPHACTVRYDEHGQSMVWCSTQGHFDVRSTTAKLLHMSLSKLKVIASEIGGGFGGKTTVYLEPVALLMSKKTGRPVKMLMDRDEVFKASGPGSATRNWIKVGARNDGTITAMQGKLHYEAGAFKGSPARLGGMTAFTPYDVENMFVECFDVVVNKPKVAAYRAPGAPQAEYAAEMIISELAARLEIDPIDFRLQNVAKEGTKTIYGPKLKKVGLVECLEAAKNSPHYQQPLKDNQGRGVSSGFWFNIGGSSSVTLNMNRDGTGTIVEGSPDIGGSRASMQLMAAETLGIAADNFKTVVADTENIAHNDGTGGSRTTFATGMAVVEAAKDVIRQMKSRAASVWSVEVDTIDWVDGVAINIDSTEKLSAAEICATADRTGGQISGQGNINARGAGPSFAVHICDVEVDKETGKVDVVRYTAIQDAGKAIHPSYVEGQYQGGAAQGIGWALNEEYVYNDKGILQNPGFLDYRIPLASDLPMIETVIVEVPNPAHPFGVRGVGETGIIPPLAATAYAVSDAINAPITDLPCSPPNVLAVIQANS

SEQ ID NO: 5586 - protein, 380 aa, Bacillus thuringiensis serovar konkukian str. 97-27
MRVAIFTDTFTPQVNGVAKTLERLTRYFQKENIAYSVFAPQHTAEDNFVANVNKMRSIPLTILYPECRFSFPTPRIKRELLSFKPDIIHIATPFNMGLCGLYYAKKLNIPVVGSYHTDFDAYLRYYKIEFLSNMLWNYLKWFHSHMQKNFVPSPETLHQLKHKGFQALSIWGRGVDCNLFHPAYNTDLFRKKYNITAKYVLSYIGRIAPEKDIDTLQNLIVKSTHTRNDIHWLIAGDGPLATNLRETVPQTNVTFTGYLQGGDLAEAYACSNLMVFPSATETFGNVVLESLACGTPVIGANSGGVKNIITDGKTGVLCPPKNEDAFLSSIYFLLQNEEKLKQMGIAALSYAKSKSWDEIFRGLLNEYEEVLQHNASELLA

SEQ ID NO: 5587 - protein, 371 aa, Penicillium chrysogenum
MFRQSVRRFATTAARAAEGSTAYCTRVSTAQGVVNGLTEAIGNTPLIRLKKLSEQTGCNVLGKAEFQNPGGSVKDRAALFVVKNAEEKGLLKPGGTVVEGTAGNTGIGLAHVCRSKGYKLVIYMPNTQSQGKIDLLRLLGAEVYPVPAVAFDNPQNYNHQARRHAESLDNAVWTNQFDNVANRQAHIETTGPEIWAQTQGKIDAFTCATGTGGTLAGTTRYLKTVSDGRVKSFLADPPGSVLHSYIQSGGTLIDRSGSSITEGIGQGRVTDNLQPDIDLLDGSVNISDEKTIEMVYRCLDEEGLYLGASSAMNVVAAKEVAEKLGKGNTVVTILCDGAYRYADRLFSSKWLESKNLLGSIPKHLQKYVVLP

SEQ ID NO: 5588 - protein, 486 aa, Physcomitrella patens subsp. patens
MRVGGFLAIWAFLCSGVFVGVDGFQWRDGDSSSLIRPATERQGELAEGKLDVDPHFIESLPGAPPVPFAMRSGYITVDEKAGRALFYWFVEADVADSASAPLTLWLNGGPGCSSVGGGMLSELGPFYPTPNGRHLLKNPYSWNKVSNMLFLESPAGVGFSYSNTTDDYRTGDQQTAQDSYIFLLRFFEQYPQYSSNKFYISGESYAGHYVPQLAVAILEGNKVVSNKKINFRGMAVGNAWTDAAADNFGAIFYQWTHALISDASFNGVVNKCNLSAMLVDDDAFHGVLKTVGTGSSGDINIYDIYADICVSAHAQAEIRQLAKKLSQSPSSRPLLKTSYDPCVDDEVEVYLNRPEVQKALHANTTLLPWRWTDCSDVLNYSDDDVLLSILPLYHTLLESGIEILIFSGDIDAIVPVAGTRVWINTLPLNITEVWRPWTFENQVGGYVTVYDKLTFSTVRGAGHMVPYTQPARALHLFQSFINNKPL

SEQ ID NO: 5589 - protein, 636 aa, Arabidopsis thaliana
MANRGGEYLYDELWKLCAGPLVDVPQAQERVYYFPQGHMEQLEASTQQVDLNTMKPLFVLPPKILCNVMNVSLQAEKDTDEVYAQITLIPVGTEVDEPMSPDPSPPELQRPKVHSFSKVLTASDTSTHGGFSVLRKHATECLPPLDMTQQTPTQELVAEDVHGYQWKFKHIFRGQPRRHLLTTGWSTFVTSKRLVAGDTFVFLRGENGELRVGVRRANLQQSSMPSSVISSHSMHLGVLATARHATQTKTMFIVYYKPRTSQFIISLNKYLEAMSNKFSVGMRFKMRFEGEDSPERRYSGTVIGVKDCSPHWKDSKWRCLEVHWDEPASISRPNKVSPWEIEPFVNSENVPKSVMLKNKRPRQVSEVSALGITASNLWSSVLTQPHEFAQSCITSQWSSPQQCHRDANEDAKKSDWLNNSYSVSNVAKDSTLNDQMVSPVEQKKPETTANYRLFGIDLMSSSLAVPEEKTAPMRPINISKPTMDSHSDPKSEISKVSEEKKQEPAEGSPKEVQSKQSSSTRSRTKVQMQGVPVGRAVDLNALKGYNELIDDIEKLFDIKGELRSRNQWEIVFTDDEGDMMLVGDDPWPEFCNMVKRIFIWSKEEVKKMTPGNQLRMLLREVETTLTTTSKTDNHSN

SEQ ID NO: 5590 - protein, 459 aa, Brucella suis 1330
MRGQAIAINWQRYISCPRYTGTRLRGSFSPEVRFPEPSRGKPGVQLKSLAMKCAYFVRPHIGGTYSVFTRLRASLARSGMDLRWLAAGAPGEAVAVPREQGLEDAMRRGDIIDRMGVLDEETRAKRFVDFLRENRFEAVFVNVLSHRFETNLVRYLPADILRVMIVHSITPGTYAAAQAIRDHVHATVGVSKRCRDDLVRGYGFDPSRTLVIPNGLTPDPHVRCAAPEIEGGRLRLLYLGRIDDSSKGVFWLPAILRRLQCDYHLTVAGDGPDLAALRIKLAPFGNRISFTGWVAPSDVSWLVSQHDVMVMPSRYEGFGSTLIEAMSQGCPVVASRIPGVTDTIVTDGEDGFLFPIGNCRQAAQQIERLAADPRLRVAMGAAGVRKVIAEFDSEIVGRAYAGLLQHLRENRPPITPPLALSQWSMPNALHKNLRSRLPQPVKNWLRRVRERVHTVWSTA

SEQ ID NO: 5591 - protein, 731 aa, Hyphomonas neptunium ATCC 15444
MKFDKPVEGDFKDALTIVGKAIPRIDGPAKTTGTAKYAYERHDVSGPQLVGYPVTSSIARGRIVSIDTSRATSAPGVVTVLTTLEHLPLPKTSYHTATLFGGDQVEHYHQAIAVVVAKSFEEARSAANLVSVTYEKADGDFDLRKALEKGSDEDREVVSSAGDFETAYAAADVKLDAVYTTPGQSHAMMEPHASIAEWEGERLTLWTSNQMIKWNVDALALALDMPAENIRVDSPYIGGGFGSKLFLRADGVLAALAARKTGKPVKVMLPRPIIANNTTHRAATIQTIRIGATRAGRITALYHEGLSGNLPGGDPEDATAQTPKFYAMDTHLVVRRLATVHLPEGNAMRAPGETSGLMALEIAMDEMAEKLGMDPVEFRVLNDTQTAPHPPNKPFSRRNYTQCLRTGAEKFGWADRNPAPGSRREGQWLIGHGMAGAYRGGPITASGARAKLLQNGRIRIETDMTDIGTGSYTIIAQTAAEMMGVPMSQVEVNLGDSSHPASAGSGGQWGASSSTAGALAACLALQRAIAERIEEPYESISFREGQVHFANSSLPLTRIAQAGELQADGALEVGDFRKKVVVSTFAAHFVEVGVNAATGETRVRRMLAVCDAGRILNPMTARSQVIGAMTMGVGAALMEELAPDTRHGFFANHDLAGYEVPVHADIPEQEVIFIDDLDPYASPMQAKGVGELGLCGVSAAVANAVYNATGVRVRDYPVTLSKLLSGLPALA

SEQ ID NO: 5592 - protein, 458 aa, Oceanicola granulosus HTCC2516
MTTISFWLNGALVAVDAPPTRTLLDHLRETQGLTGTKEGCNEGDCGACTVMVTDAAGARAINACILFLPQLHGKAVRTVEGLAGPDGSLHPVQQAMIDKHGSQCGFCTPGFVVTMAVGHLQGRVDHDDLLAGNLCRCTGYAPIIRAAEAAEGVPVPEWMHEDAALVARGLDAPGPIAPESADALAAWYLEHPDAVLVAGATDVGLWVTKGLRDLGEVAFLNRCAELRAIEERDGALRVGAAVSLAELHRALGARLPSLAELIRRFGSEQVRAAATVGGNIANGSPIGDSPPALIALGATLHLRRGDARREMPLEDFFLDYGKQDRRPGEFVEAVTFPADAPALRCYKISKRFDQDISAVCGCFNVTVADDSTVTAARIAFGGMAATPKRAAAVEAALVGRPWGEASLAAALDAFADDFTPLSDMRASEPYRLEVARNLLRRYAADLAGQPVSVLEVTP

SEQ ID NO: 5593 - protein, 310 aa, Mycobacterium leprae TN
MSIAEDVTQLVGNTPLVRLRRVTEGALADVVAKLESFNPANSVKDRIGVAMIDTAEEAGLIKPDTVILEPTSGNTGIALAMVCAARGYHCVLTMPETMSIERRMLLRAYGAELILTPGADGMSGAIAKAEELAKSDKRYFIPQQFENPANPAIHAATTAEEVWRDTDGKVDIFVSGIGTGGTITGVARIIKERRPATQFVAVEPAASPVLSGGQKGPHPIQGIGAGFVPSVLVLDLVDEIVTVGNEEALDLARRLAKEEGLLVGISAGAAVCAALHVARRPENTGKLIVVVLPDFGERYLSTMLFADLAN

SEQ ID NO: 5594 - protein, 809 aa, Oceanicola granulosus HTCC2516
MSVARPLPHDSAPLHVTGAARYVDDTPVPATCLHLAFGVSPVARGTITATDLAEVRTAPGVVAVLEAADLPFANDVSPSIHDEPLLATGEVHYAGQPIFLVVADSHLAARKAARLGRVEIDEAEPILTVEQALAADSRFEGGPVTWSKGDVDAALAAAPDRLEGRLEIGGQEHFYLEGQAALAWPQDNGDMLVQSSTQHPTEIQHKVAEAIGLPMSGVRVETRRMGGGFGGKESQGNALAVACAVAARHTGRACKMRYDRDDDMTITGKRHDFRIDYRVGHDAEGRVLAVDFTHYVRCGWSQDLSLPVADRAMLHADNAYLLPAVRILSHRLKTNTQSATAFRGFGGPQGMVGIERVMDALARKLGRDPAEVRRLNYYHPAHHAPPPAPEPPPEKLAGDTHDDLASRGAAGASVKTGGGKRFRAAFSPERKGAENTTPYGMEVSDFILHEMTDRLLETSDYTARRAAIAEWNADSPLLKRGIAFSPVKFGISFTLTHLNQAGALVHVYQDGSIHLNHGGTEMGQGLFRKVAQVAADRFGVPVEQVRITATDTAKVPNTSATAASSGSDLNGMATKAACDEIRGRMAACLAELHQADAGEVVFADGEVIVGGERIPFARAAQLAYEHRVSLSAAGFYKTPDLAWDRAAGRGRPFFYFAYGAAVTEVAIDTLTGENRILRTDILHDAGRSLNPAIDIGQIEGGYVQGAGWLTTEELVWDAKGRLRTHAPSTYKIPACSDRPDMFNVALWDGENYSETIYRSKAVGEPPLMLGISAWLALMDACAACGPHDPALDTPATPERVLAAVTRARG

SEQ ID NO: 5595 - protein, 185 aa, Hyphomonas neptunium ATCC 15444
MLGIGQKLPDFQITGVKPKFMQHEQNGESAFEPLNQDSFPGLWKVIFFYPKDFTFVCPTEIAEFARLAPEFADRDAVILGGSTDNEFVKLAWRREHADLRELPIWQFADTNGSLVDGLGVREEGAGVAYRATYIVDPHNVIQHVYVTNLNVGRNPQDTLRVLDALQTDELCPCNRPVGGKTLELA

SEQ ID NO: 5596 - protein, 781 aa, Mesorhizobium sp. BNC1
MGIEGIGARVTRKEDQRFVTGLGRYVDDMVVPGMKYAVFVRSPHAHATIKAIDTASAKAMPGVIGVLTGPELKSDGIGNIICGWMIHSKDGSPMKMGAWSPLATDKVRYVGDAVAIVVAETRGQARDAAEAVAVDYDELPAVTDAQKALEAGAPQIHPEAPNNLIFDWELGDSADAERALAGAAHVTRMRIVNNRLIPNAIEPRAALGHYDKAEDHFTLWTTSQNPHLARLVMSAFYNVAPENKLRVIAPDVGGGFGSKIYIYPEEIVCLWASKRTGVPVKWVADRTESFLCDAHGRDHVTEVSMGFDADNRIVGLKVDTIANLGAYMSLFSSCVPTYLYATLLSGQYEIPHIHCNVRTVYTNTAPVDAYRGAGRPEATYLLERVMETAARELGVSPAELRRKNFIREFPHQTPVIMNYDAGDYEASLEAAMRAADYAGFPARREEAKRRGKLRGIGMSCYIEACGLAPSQAVGSLGAGIGLWESAEVRVNAAGTIEVLTGSHSHGQGHETTFAQVVADRLGVPLDSVSVVHGDTDKVQMGMGTYGSRSGAVGISAIVKALDKVEAKAKKIAAHLLEADEGDIVIENGEVKVAGTDRSLPWLQVALAAYTAHNLPAGMEPGLKETSFYDPTNFTFPAGCYICEVEVDPETGVTEIVQFVAADDFGTIINPLIVEGQVHGGITQGVGQALLEGCVYEPSSGQLVTASYMDYTMPRASDVPSFLVSTTVTPSPSNPLGIKGCGEAGAIGSPPAVINAITDAIGNNDLTMPATPQRVWTALRKH

SEQ ID NO: 5597 - protein, 520 aa, Streptomyces avermitilis MA-4680
MTDDQHGEGTPQGRTHGAWERLPQGDYDDGATTFVQLPEGGIDALLASDTPLAAPGHGYVPPPITAAPGADADPSAPGAWGAPVEGVQWPDPGPASPDVAQDAFMYNPGGTGQWAFEESARGDAASGHDVTGQWSIPVADGDLPDESGEFSASSLVEQWGGTPPATLPGGAAAPWATEPAGQLWSPESEEAAGHPGPELPAEAPVEPSGGPYTGFGAGADPGAPEAAQEAPEPSGALDATETHETAGAAEAADAPDAEPAAEEPPVAGDPQAAVEPPAAEPSGSGPDPSAASQAQGASAEETGADDPASAHHHDEHPVASYVLRVNGADRPVTDAWIGESLLYVLRERLGLAGAKDGCSQGECGACNVQVDGRLVASCLVPAVTAAGSEVRTVEGLAVDGRPSDVQRALAKCGAVQCGFCVPGMAMTVHDLLEGNPAPTELEARQALCGNLCRCSGYRGVLDAVREVVAEREAHTEAESAQDADEARIPHQAGPGAGGVNPSAFDPPDAHHRYGQDGGQA

SEQ ID NO: 5598 - protein, 324 aa, Nostoc sp. PCC 7120
MDIKNGFIGTVGNTPLIRLNSFSEETGCEILAKAEFLNPGGSVKDRAALYIIQDAEEKGLLKAGGTVVEGTAGNTGIGLAHICNAKGYKCLIIIPNTQSQEKIDALTALGAEVRPVPAVPYKDPNNYVKLSGRIAAELDNAIWANQFDNLANRRAHYETTGPEIWTQTDGKVDAWVASTGTGGTFAGVAMYLKNQNPAIKCVVADPLGSGLYSYIKTGDIKIEGNSITEGIGNSRVTANMEGAPTDDAIQIDDHEALRVVYQLLRKDGLFMGGSTGINVAGAVALAKQLGPGHRIVTILCDSGSRYQSRIFNRDWLASKGLTVD

SEQ ID NO: 5599 - protein, 186 aa, Streptococcus agalactiae NEM316
MSLVGKEIIEFSAQAYHDGKFITVTNEDVKGKWAVFCFYPADFSFVCPTELGDLQEQYETLKSLDVEVYSVSTDTHFVHKAWHDDSDVVGTITYPMIGDPSHLISQGFDVLGQDGLAQRGTFIIDPDGVIQMMEINADGIGRDASTLIDKVRAAQYIRQHPGEVCPAKWKEGAETLTPSLDLVGKI

SEQ ID NO: 5600 - protein, 358 aa, Coprinopsis cinerea okayama7#130
MIFSSSLRSAARRGFVTNAPVNGFDGAIGNTPLIYLKGLSERIGSKIYGKAEFQNPGGSVKDRAALGLINNAEKLGLLKPGGTVVEGTAGNTGIGLAHVCRAKGYKCVIYMPNTQSQEKIDLLRMLGADVRPVPAVAYENPKNYNHQAKEYAESLPNAVWTNQFDNVANAQAHYDTTGPEIWEQTGGKVDGFICATGTGGTLAGVGRYLKEKSGGKTQVWIADPPGSVLTSYVNSGGKLTERSGSSITEGIGQGRITDNLGTFVKQVDGAFTVPDEKSIAMLYELLETEGLYLGASTALNVVAAYELAQKLGKGSSVVTILADGAYRYQSRLFSKKWLEAKGLSGAIPEHLKKYSVLE

SEQ ID NO: 5601 - protein, 300 aa, Burkholderia pseudomallei K96243
MAYKTIEDTIGNTPLVQLVRLPDDEIRARNNVILAKLEGNNPAGSVKDRPALSMIRKAEERGTIKPGDTLIEATSGNTGIALAMAAAIRGYKMVLIMPEDLSIERRQSMAAYGAEIVLTPVKGGMEFARDLADQMQREGKGVILDQFANPDNPLAHYEGTGPEIWRETEGRVTHFVSAMGTTGTIMGTSQYLKERNPTVEIVGAQPEEGSRIPGIRKWPEAYLPKIFDRSRIDRVENVSQAASEAMARKLAAVEGIFCGISSGGACEVALRVARQAENATIVFVVCDRGDRYLSTGVFPA

SEQ ID NO: 5602 - protein, 200 aa, Neptuniibacter caesariensis
MGVLVGKQAPDFTAPAVLGNGEIVDSFTLSEATKGKKAVVFFYPLDFTFVCPSELLAFDHRIEEFKKRNVEVIGVSIDSHFSHNAWRNTPVNEGGIGAVNYTLVADMTHSICQSYDVESEGGVAFRGSFLIDEDGLVRHQVVNDLPLGRNVDEMLRMVDALAFHQEHGEVCPAGWNQGDKGMDASPEGVAKYLSEEADNL

SEQ ID NO: 5603 - protein, 382 aa, Trichodesmium erythraeum IMS101
MHIAWLGKKYPFCGNVTYSREITNALLDRGYQVSFLHFATDDADLEKWPVCEEVHLPCIYKSQGYTIPSFKSSKVLSQALQKLKPDIVHASLTLSPLDFLLPEICEELNIPLVATFHAQFDSKPRNIKSGTQFLAYQLYAPFLANYDRVIIFSEIQKDLLIKLGVPRKKVAVIPNGVNIDKYSPGVSSLKTKLNASLIFLYLGRISTAKNIESLLKAWKHSDMANDSCLAIVGDGPLAPSLQMFYGDVKGVSWFGYVSDEQRRIEILRGADVFILPSLVEGLSLALLEAMSCGLACIATDAGADGEVLEKGAGIILNTHNVTSQLQTLFPLFRDHPELNILLGQKARQRVLERYTLSRNITQLEMLYNEVLQERNLELKSLI

SEQ ID NO: 5604 - protein, 217 aa, Roseovarius nubinhibens ISM
MALRINDEIPNLNVTTDQGSFDLHDWVGDSWAILFSHPKDFTPVCTTEFGAVARLADEWEKRGTKVIGVSVDGVEDHKKWKGDIEKVSGAAAGFPIIADDGLEVSKAFDMLPAEAYLPDGRTPADSATVRSVFIIGPDKQVKLMMTYPMTVGRNFGEIVRALDALQTSTGKGVATPADWTMGEDVIIPPSVSDADAKAKFGAFDAVLPYLRKTKMPG

SEQ ID NO: 5605 - protein, 436 aa, Streptomyces coelicolor A3(2)
MHLPPTGLRPRVLHLTQPVDGGVARVVADLTRVQLAAGLRVAVACPAGGLADRLRALGADVRHWPSTRSPGPALVEEVRRLVRVVEDVRPDLVHAHSAKAGLAGRLAVRGRIPTVFQPHAWSFEAVGGAAALLALGWERWAARWTARTVCVSEAERLRGTRAGLRGPWTVIPNGIDLAGPSADPSAGPSAGPSADASDDAAGVRRLHGVGPHAPLVVCVGRLCRQKGQDVLLSAWESVLARVPGARLVLVGDGPDRARLTARAPASVLFTGTVADAAPWYRAADLVVLPSRWEGMALAPLEAMACGRPVVVTDVDGAREGLPPALVPHCVVPPEDPAALADAAAALLLDAPLRASLGRRGRAHVRSAHDVRHTAAAVAALYGDLLYGDVLDGLRPPPAAHTADGDRFGDIGDIGDRPADVRRPAVVPIECRESTYP

SEQ ID NO: 5606 - protein, 333 aa, Oryza sativa
MGYARTVKAATAAAAAVLVAFGVRMAAPAAAGFVADELPRAQAAAATWLTPPYLYLVINAIILSIAASSRFQPNRPQAASADASLVRPAPVPVPVPVVAVPAPAVTMPMEVPVVPVPEAMAPEPIPVEVTVPEVVKTAPEAEEAEENFTISRSAWTPRRRSTAEAEAEHEALSPFADLTNSREKPLVSTRFGRKPVKASPEGSSRALGVSRPGKEQTLESTWKAITEGRAPPLARHLKKSDTWETRPGRRQSGSGGGEDAPPPATAMRKAETFNEAAGGGGGGKKVRREPSLGQDELNRRVEAFINKFNMEMRLQRQESLKHYNEMISRGSVY

SEQ ID NO: 5607 - protein, 175 aa, Bradyrhizobium sp. BTAi1
MSDLDEADATVRVRFVVNGRKTACDVAPRDTLVDCLRTQLELTGTHAGCEMGACGACLVQLDGRAVHACLMFAVQADGARIDTIEGLSESGVIADLQAEFHRRNALQCGFCTPGMLINAHELLSNVARPSREAIRDALSGNFCRCTGYEAIVDAIAAVAEARAAKAAQGAEGASS

SEQ ID NO: 5608 - protein, 791 aa, Bradyrhizobium sp. BTAi1
MTAPLTPLDRPNSYIGRSVPRPNAKRLLAGRGRYVTDIRLPRMLHAAFLRSPHAHARIISIDADAARALAGVHLIATGADLARICTPWTGTLDHFKGMTSEPQLPLPLDRVVWAGQAVVAVVADSRALAEDALELISVDYEELPAVVDLDEARQPGTPRANPASQSNICFRTQLDSGGVDEVFVAAAHVIEQQFSFGRHTPVTLEPRAIVADYEPDSGMLTVHHATQTPYQFQDLYSRHYNIPEARVRVIAPDIGGSFGMKLHVYHEDMAVVGLSMMLGRPVKYVADRIESFVSDIHARDHRVQARMAIDADGKILAMDVHDATAIGAFSTYPRTSVVEGNQVIRLIGAPYDFTSYRAALEVVFQNKVQTSQYRAVGHPIACAVTERMVDIAASRAGFDPLAMRDRNVIADDAYPLVSPTGYKFEALSHQACLRRLREIMDYDALRGEQAELRRRGVHRGIGIATFVEITNPSPAFYGVGGARISSQDGATISLTPTGEVRCAISVTEQGQGTEAIIGQIVADQLGLAQEHVKVITGDTEVTPHGGATWACRGAGIGGETALQAARRLKANILAIAALVLQEQAAALDIVDGQVVSAASRQPRLDVAEIARIAYFRSDTLPPGTQAQLTVSHHFAPQGYPFAFTNGIQGCSLEVDVDTGFVKLLKHYVVEDCGRIINPMLVDEQLRGGVVQGLGAALFEECRYGETGQLLNGSLADYLVPMAMEMPDIVIDHVETPTADTILGAKGCGEAGTAAASACVLNAVNDALTPFGASINTIPITPARILKALNRY

SEQ ID NO: 5609 - protein, 381 aa, Bacillus cereus ATCC 10987
MKLKIGITCYPSVGGSGVVGTELGKQLAERGHEIHFITSGLPFRLNKVYPNIYFHEVTVNQYSVFQYPPYDLALASKMAEVAQRENLDILHVHYAIPHAICAYLAKQMIGERIKIVTTLHGTDITVLGSDPSLNNLIRFGIEQSDVVTAVSHSLINETHELVKPNKDIQTVYNFIDERVYFKRDMTQLKKEYGISESEKILIHISNFRKVKRVQDVVQAFAKIVTEVDAKLLLVGDGPEFCTILQLVKNLHIEDRVLFLGKQDNVAELLAMSDLMLLLSEKESFGLVLLEAMACGVPCIGTRVGGIPEVIQHGDTGYLCEVGDTTGVANQAIQLLKDEELHRIMGERARASVYEQFRSEKIVSQYETIYYDVLRDDKNEKI

SEQ ID NO: 5610 - protein, 201 aa, Legionella pneumophila str. Paris
MSVLVGRKAPDFTVAAVMGNGEIVDKFNLHEHLKGKYGLVFFYPLDFTFVCPSELIALDHRIEEFKRRNVEVVAVSIDSHFTHNAYRNTPVKNGGIGPVRFTLAADMTHSICQSYGVEHPVAGVAFRGAFVIDTNGMVRSQIVNDLPIGRNIDEIIRIIDAVQFFEENGEVCPAGWQKGQAGMKASPKGVAEYLSEHSESL

SEQ ID NO: 5611 - protein, 746 aa, Arabidopsis thaliana
MDKYKVAGKFGLPDITVAEMESLASFCEAVLPSVQPPPEELSGEGDNHRNKEALRSFYSTSGSKTPVLRQSIELVTKRGTIEAYIATRLILFLLATRLGTLLICGTECLVSRWPFVEKFSELSLEKRERVLQKQFKNWILTPIRAAFVYIKVAFLFCFFSRVNPNGENPAWEAIGYRVNPDENKPSETHNERPLEKGIVETMEETEQTLLESLAHKGLEAVLDTEHDAIRIKCDVVVVGSGSGGGVAASVLAKSGLKVVVLEKGSYFTPSEHRPFEGPGLDKLYENGGILPSVDGSFMVLAGATVGGGSAVNWSACIKTPKSVLQEWSEDQNIPLFGTKEYLTAMEVVWKRMGVTEKCELESFQNQILRKGCENLGFNVENVPRNSSESHYCGSCGYGCRQGDKKGSDRTWLVDAVGHGAVILTGCKAERFILEKNGSNKGGKQMKCLGVMAKSLNGNIAKMLKIEAKVTVSAGGALLTPPLMISSGLRNRNIGKNLHLHPVLMAWGYFPDKESSNISFKGNSYEGGIITSVSKVLSEDSEVRAIIETPQLGPGSFSVLTPWTSGLDMKKRMARYSRTASLITIVRDRGSGEVKTEGRINYTVDKTDRDNLKAGLRESLRILIAAGAEEVGTHRSDGQRLICKGVNENSIQEFLDSVSTEEGAKGMTEKWNVYSSAHQMGSCRIGENEKEGAIDLNGESWEAEKLFVCDASALPSAVGVNPMITVMSTAYCISTRIAKSMTTGLSH

SEQ ID NO: 5612 - protein, 393 aa, Brachyspira pilosicoli
GITDAGAYASLSGPVLQRACTHAAGPYNYHVIDIEGKSFYTNNPPTGPFRGFGVPQSCFATEMNINLLAEMCGLDPWEIRYRNAIRPGQVLPNYQIADDSTGLVETLEAVKDIFYNNKYVGIACSLKNSGVGVGLPDTGRVRLLIKDSKVNVYSAASCIGQGIATVLYQIAGETLNLNDDEIIVHQPNTATSPDSGTTSGSRQTLITGEACKRACEELKKDLDSGKTLKDLEGKEYYGEWLTITDKMGVDKPNPVSHVAYSYATQVCILNEDGTIQKVVAAHDIGKAINPIALEGQIEGGVVMSLGYALTEKFPLENCVPKVKFGTLGLFRADKTPDVESIIIEKEGVPYGYGATGIGEISSIPTAPAVALAYYKFNGEFQTELPLKNTPYSR

SEQ ID NO: 5613 - protein, 374 aa, Bromheadia finlaysoniana
MAPVPFLPTAVTENTLRESFVRDEDERPKVAYNVFSHEIPVISLRGSTMREMEVEIEICWKIVAACEDWGIFQVVDHGVDAGLIADMTRLAREFFELPPEEKLRFDMSGGKKGGFIVSSHLQGEVVQDWREIVTYFSYPIRTRDYSRWPDKPEGWRAVVEEYSAKLMELACNLLGVLSEAMGLDREALAQACVDMDQKLVVNFYPKCPQPDLTLGLKRHTDPGTITLLLQDQVGGLQATKDGGETWITVQPVQNAFVVNLGDHGHYLSNGRFKNADHQAVVNSNCSRLSIATFQNPAPDGVVYPLAVREGEKPVMEEAITFAEMYRRKMSRDLELARLKKMGKMESKQKGAAGENAEAIGAAATKPKALNEILA

SEQ ID NO: 5614 - protein, 162 aa, Bradyrhizobium sp. BTAi1
MAKLSINGRDVSVDAANDTPLLWVIREQLQMTGTKFGCGAGLCGACTVHVNGEAVRSCQTMVGDVTNKKITTIEGLSQKGDHPLQKAWIAEQVPQCGYCQSGQIMQAASLLAKTTSPTKEEIVAHMDGNLCRCMTYSRIQKAIQRAASEMRTASNTSDRRAT

SEQ ID NO: 5615 - protein, 760 aa, Bradyrhizobium sp. BTAi1
MNQHVKAAPSMAPDLSRRSFLVGTAATGLVLGYAGLADSALAATTPASFEPSVWYSIAPDGLVTVTCGKADMGQHIASTMAQIICEELGAAWKDMRVQLASNDPKFNDPVLGAQITGGSWSTMMNFDAMSRAGAAGRIALTEAAASAMGVPAKELVVRDGVVMHPKSKKQMSYAEIVKSGKITKSFTADELKALTLKTPDQYTMIGVSVPQLDIPAKTNGTAKYGIDTMLPGMVYGKVVTPPVRFGATVKSVDDSEAKKVPGFIKAVVLDDKTGSTSGWVVAVASTFANAKKAADALKISYDKGPYANVSTDSIITEAMRLQAQDDAGQFFVKDGDANAALAGAAKVLEAEYTTSINIHAPMEPMNATAEFKGDILHIYSGNQFATRSGAIAAGAAGIDPKYVVMHQAWLGGGFGRRLDADMMVPAVQAAKAVGKPVKVIYSRENDMTMDYSRPLTYQKVKAGLDSNGKLIALSHDVVSAWPTARWGIPDFLTPSVDKKGPLDSFTVNGADFFYTVPNHHVRAIKNELAHNATPSGQLRSVAPGWTFWAVESMIDEIAAASGQDPAQFRIALLDGKGKNDGGAQRLRNTLLAAMGLSGYGSKKLSKGEGMGVACVSSQERASASWTACVAHVAVADNGAVTVKKLTVATDVGTQVHPDNIRAQVEGAALWGLSLAMYEKATLKDGGIEQTNFDSYTPLRMSQVPEVAIAVIANGEKATGVGEPAVTVVAPALGNAIYNACGARLRSLPITAEAVKANMKA

SEQ ID NO: 5616 - protein, 195 aa, Nocardia farcinica IFM 10152
MALLTIGDQFPAYNLTAVIGGDLSKVDAQQPDDYFTQVTSDDHAGKWRIVFFWPKDFTFVCPTEIAAFGKLNDEFADRDAQVLGVSVDNEFVHFQWRAQHEDLKTLPFPMLSDLKRELSTATGVLNADGVADRATFIVDPNNEIQFVSVTAGSVGRNVDEVLRVLDALQSDELCACNWKKGDPTINAGELLAASV

SEQ ID NO: 5617 - protein, 900 aa, Mycobacterium marinum M
MRFTVNGADLDATPAAGQCLRTFLREHGHFEVKMGCDAGDCGACSVLVDGAAVHSCVFPAFRAAGRTVTTVAGLGTPDDLHPMQRRFAEAAAFQCGFCTAGLVVTASTFGDDELANLPQHLKGNLCRCTGYRAILDALEGKVNVEKPSGSDAGRSIGAPAALRVVTGTEPYTTDHAPAGLLHLAVLGSPLAHARITSIDTTAAAAIPGVHLILTHHDSPAVAFSTARHEMRTDDPDDTYVLDRTVRFIGQRVAAVVADSVAVAEKACRAIQIEYEELPAVFDPEQARAPGAVLLHADKGGQARIADPARNVVAELHGGTGDVEAGVAAAEASGGAVVRGRWQTARVQPAHLETHGCTGWRDSRGRLVIRTSSQTPFLVRDELCHVFGLDRDQVHVFTKRVGGGFGGKQEMLTEDLVTLAVLRLGRPVRYEFTRVDEFVRATCRHPYRIDVTVAADGDGVLTALAVDALMDAGAYGNHTRGVLFHGCGESVSVYRCANKRIDAEAVYTNNVPSGAFRGYGVGQMVFAVESALDDLAQRLGIDAFEFRRRNVVVPGDPFVDAHAGENDLTFGSYGLDQCLDLAQDALRRGGRPAPDGAGWRVGEGMALAMIATLPPGGHFGSADISVDDAGVYTLCVGTSEFGNGTTTVHAQLTATALGTTSDRIVIRQSDTDVVEHDTGAFGSAGTVIAGRAALAAAQQLRSRIIAAAAEVAGASPADCVLGPHGVQCGQQLVGFGQLPTPLTGQGSQDGTPRSVSFNVHAFRVAVNTDTGQVEILQSVQAADAGVVLNPEQCRGQVEGSVAQAIGSALYEDLQIGPDGRVLTQTLRDYHIPQFVDVPLTEVYFADTFDELGPLGAKSMAESPYNPVAPALANAIARACGARVTRLPMTAARVWRAINSAE

SEQ ID NO: 5618 - protein, 328 aa, Prochlorococcus marinus str. MIT 9312
MARIYEDNSFAIGNTPLVKLKSVTKNAKATVLAKIEGRNPAYSVKCRIGANMIWDAEKSGKLTKDKTIVEPTSGNTGIALAFTASARGYKLILTMPESMSIERRRVMAVLGAEIVLTEASKGMPGAIAKAKEIAESNPSQYFMPGQFDNPANPEIHFKTTGPEIWDDCDGEIDVLVAGVGTGGTITGVSRYIKQEKGKNITSVAVEPSHSPVITQTMNGEEVKSGPHKIQGIGAGFIPKNLDLSIVDKVEQVTNDESIEMALRLAKEEGLLVGISCGAAAAAAVRLAEQDKYAGKIIVVVLPDLAERYLSSIMFNEVPSGIIQEPVKA

SEQ ID NO: 5619 - protein, 484 aa, Pseudomonas putida GB-1
MIQFLVNQELRSEHALDPNMTVLQYLREHLGKPGTKEGCASGDCGACTVVVGELTQDEQGNDSLRYRSLNSCLTFVSSLHGKQLISVEGLKHQGQLHSVQQAMADCHGSQCGFCTPGFVMSLFALQKNSSGPDLHQAQEALAGNLCRCTGYRPILDAAEQSCRQPCRDQFDAQQAQTISRLKAITPTQTGELNSGDKRCLVPLTVADLADLYSSHPEARLLAGGTDLALEVTQFHKTLPVMIYVGHVAELKRIEKTASHLEIGAATPLTDCYGALNDEYPDFGALLHRFASLQIRNQGTLGGNIGNASPIGDSPPLLIALDAQVVLRQGERQRVMPLEDYFIDYRITARQDSEFIEKIIVPRATRDWAFRAYKVSKRLDDDISAVCAAFNLSIENGVVSGVRIAFGGMAAIPKRARACEAALRGKPWDQAAIERACLALAEDFTPLSDFRASKEYRLLTAQNLLRKYFIEQQTPYIETRVTAYV

SEQ ID NO: 5620 - protein, 799 aa, Pseudomonas putida GB-1
MSNHHVAKSQAEMAELFSQDLTTGVGRSVKHDSADKHVSGEALYIDDRLEFPNQLHVYARTADRAHARILRIDTTPCYAFEGVRIAITHEDIPGLKDIGPVVAGDPLLAIDKVEFFGQPVLAVAACDLETARRAAMAAIVEYEDLEPVLDVVEALRKKHFVLDSHTHQRGDSAAALASAPHRIQGTLHIGGQEHFYLETQISSVMPTEDGGMIVYCSTQNPTEVQKLVAEVLDVPMNKVVLDMRRMGGGFGGKETQAASPACLCAVVARLTGQPTKMRLPRVEDMTMTGKRHPFYVEYDVGFDDNGRLHGINFDLAGNCGYSPDLSGSIVDRAMFHSDNAYYLGDATVHGHRCKTNTASNTAYRGFGGPQGMVAIEQVMDHIARHLGRDPLAVRKANYYGKTERNVTHYYQTVEHNMLDEMTAELEASSDYAERRESIRRFNANSPILKKGLALTPVKFGISFTATFLNQAGALIHIYTDGSIHLNHGGTEMGQGLNTKVAQVVAQIFQVDFSRIQITATNTDKVPNTSPTAASSGADLNGKAAQNAAEILKRRLTEFAARHYQVTEEDVEFRNGHVRVRDQIVSFEQLVQQAYFAQVSLSSTGFYRTPKIFYDRSQARGRPFYYFAFGAACVEVIVDTLTGEYKMLRADILHDVGDSLNPAIDIGQVEGGFIQGMGWLTTEELVWNAKGKLMTNGPASYKIPAVADMPLDLRVKLVENRKNPEDTVFHSKAVGEPPFMLGIAAWCAIKDAVASLADYRVQPNIDAPATPERVLWGCEQMRKALAETQPAEQELETVTH

SEQ ID NO: 5621 - protein, 151 aa, Hordeum vulgare subsp. vulgare
MSIVRRSNVLDPFADLWADPLDTFRSIFPAISGGNSETAVRERRMDWKGRRLEAHVFKADLPGVKKEEVKVEVEDGNVLIVSGERTKEKEDKNDKWHRVERRSGKFVRPFRLPEDGKVDEVKAGLENGVLTVTVPKAEVKKPEVKAIEISG

SEQ ID NO: 5622 - protein, 405 aa, Propionibacterium acnes KPA171202
MTTLRIAQLANFVGPVSGGMKVAIDALGKGYVAAGHERILVIPGPKDRITESESGITVEIAAPRVSAGYRMIATPWRALDILDRFRPTSIESSDKWTLTPAAGWASRRGIGSVLFSHERLDDMLTMWVRRQFGVAAAVGALNRRLSKSFDVVVVTSDYSAGEFADTGARLVKVPLGVDLETFNPNKREPGLPTPRPDDVLRLCYVGRMSHEKSPQLAVAAALELHRRGVPLRLDMYGVGPDTDAMKPQAGDAPVFFNGFVAGRDEVARRFAAADISMSVCPAETFGLASLEALACGTPVVTANRGGAHEIVDVTSGEAGSPDAVGLADATQRLAARLGPELRDAARHRAEQFTWDASVETMLMIHSEIAARPDAKLYWKQRLVNRRNARRDTQDPLAPTDDSQEQ

SEQ ID NO: 5623 - protein, 381 aa, Bacillus cereus ATCC 14579
MMRVAIFTDTFTPQVNGVAKTLERLTQYFQKEQIAYSVFAPQHTAEDNFVANVNKMRSIPLTILYPECRFSFPTPRIKRELLSFKPDIIHIATPFNMGLCGLYYAKKLNIPVVGSYHTDFDAYLRYYKIEFLSNMLWNYLKWFHSHMQKNFVPSFETLHQLKNKGFQTLSIWGRGVDCTLFHPAYNTDLFRKKYNITAKYVLSYVGRIAPEKDIDTLQHLIVKTAHTRNDIHWLIAGDGPLATSLREAVPKTNITFTGYLQGGDLAEAYACSNIMVFPSATETFGNVVLESLACGTPVIGANSGGVKNIITDGKTGVLCPPKNEDAFLSSIYFLLQNEEKLEQMGIESSSFAKSKSWDEVFRGLLNQYEEVLQHNASELLA

SEQ ID NO: 5624 - protein, 157 aa, marine gamma proteobacterium HTCC2143
MAGVHVTTTINSDPVEYVCPADESLMDVLRDRLGLMGVKEGCGTGDCGACSITLDGQLVCSCLVLGAEAEGRAITTVEGMADGQNLHPLQEQFINNAALQCGICTPGFLIAAKALLDENSDPTETEIRYALAGNLCRCTGYDKIVKAVQAAAKDLRK

SEQ ID NO: 5625 - protein, 200 aa, Photorhabdus luminescens subsp. laumondii TTO1
MVLVTRQAPDFTAAAVLGNGEIVGNFNLKKHLNGKPAVIFFWPMDFTFVCPSELIAFDHRYEEFKKRGVEVIGVSFDSEFVHNAWRKTPVDQGGIGEVKYAMVADTKREIQKSYGIEHPEAGVALRGSFLIDKNGVVRHQVVNDLPLGRNIDEMLRMVDALQFHEEHGDVCPAQWEKGKEGMSASPDGVAKYLSQNAAKL

SEQ ID NO: 5626 - protein, 377 aa, Cyanothece sp. PCC 8801
MRVALFTETFLPKIDGIVTRLRHTVEHLQRNGDQVLVFCPDGGVREHKGAKVHGVKGMPLPLYPELKLAIPTPNVGKALERFNPDLVHVVNPAVLGLGGIYYAKTMNLPLVASYHTHLPQYLQHYGLGSLEGLLWELLKLAHNQAQLNLCTSTAMVEALETRGIERVDLWQRGVDTEMFQPHLASQQMRSRLSGGHPESPLLLYVGRVSAEKQIDQIKPVLEAIPDARLAIVGDGPYREALEAHFAGTKTNFVGYLQGLELASAFASSDAFIFPSRTETLGLVLLEAMAAGCPVVAANSGGIPDIVTDGVNGYLFDPADPDGAIVATKRLLAAKEEREKLRENARLEAERWSWSAATSQLRNYYQKILKGESFSMAA

SEQ ID NO: 5627 - protein, 746 aa, marine gamma proteobacterium HTCC2143
MNDPKYTGQEFKVIGSRVKRPDGIDKVTGRARYGADMNAPGQLVALMLRSPHAHARIKKIDISKAEKLPGVKAVITAADLPDLTEGNAGLFDTLENSMARDRALYDGHAVAGVAAIDKSTAKKALKLIKVTYEKLPHVTDVDDALEDDAPIIQPRYATEGQHGNLINKGEFGQGDIDQGFAEADVIVERSYKTGQTHQGYIEPHACLASVSPDGTGELWVTTQGHYSYRNTCAQLLGMDIAKLKVTSSEIGGGFGGKTHVWMEPIALALSRKANRPVKMVMSREEVFKASGPTCSTSMEIKIGAKKDGTIVAARAECRYMNGAFPGMWGTLGGMTAFACYSIPNNKAIGVNVLCNRPKVAAYRAPSAPMMAFGVESTIDQLSKELGIDPVELRLKNVAREGTQAPYGPVWGPIGIEPTLEAVRDHPHMKAKLGKNQGRGVACGFWFNIGGQTCSDLNIGPDGTVNLTVGTIDVGGARASLAMIAAEELGITYEDVKVNIGDTSSLGHNDTTEGSRGTFSSGMAAIFAARKAVDVLKERAAKMWQIPVESVIWEDGSARANGKEHSNLSPLTLKDIAKKAGSTGGPIAGHHEATAEGAGVSFASHIVDVEVDPETGKTQILRYTVVQDAGKAIHPDYVEGQFQGAAAQGIGWALNEEYIYGKDGRLQNSGFLDYRIPVCSDLPSIDTKILEIPNPGHPYGIRGVGETSIVPPLGAIGNAVSNAVGVRMYEVPMSPPRILKALDEAGV

SEQ ID NO: 5628 - protein, 322 aa, Pisum sativum
KPTSEQYTYVRNNMPITFSSSIPLVDLSKPDAKTLIVKACEDFGFFKVINHGIPLDAISQLESEAFKFFSLPQTEKEKAGPANPFGYGNKRIGLNGDIGWIEYLLLTTNQEHNFSLYGEDIDKFRGLLKDYKCAMRNMACEILDLMAEGLKIQPKNVFSKLVMDKQSDCLFRVNHYPACPELAINGENLIGFGEHTDPQIISILRSNNTSGFQISLRDGSWISVPPDHSSFFINVGDSLQVMTNGRFKSVRHRVLANGIDPRLSMIYFCGPPLSEKIAPLPSLMKGKESLYKEFTWFEYKSSTYGSRLADNRLGNYERIAAT

SEQ ID NO: 5629 - protein, 323 aa, Cyanothece sp. PCC 8801
MDIKDGFVGTVGNTPLIRLTSFSQETGCEILGKAEFLNPGGSVKDRAALYIIEDAEKKGLLKPGGTVVEGTAGNTGIGLAHICNAKGYKCLIVIPDTQSQEKIDLLRTLGAEVRTVPAVPYRDPNNYVKVSGRLAEELDNAIWANQFDNLANRQAHYETTAPEIWAQTQGKIDAWVSATGTGGTYAGAALFFKEKNPNIKCIVADPMGSGLYSYVKTGEIKIEGNSITEGIGNGRITANMQGVPIDDAIQIDDHEAIRVIYQLLYQDGLFMGGSVGINVGAAIALAKAMGPGHTIVTVLCDGGARYQSRLYNQEWLRSKGLWD

SEQ ID NO: 5630 - protein, 156 aa, Vibrio salmonicida LFI1238
MITPLAAGSPAPDISLLDQNGETISLSDLKGKKVLFYFYPKAMTPGCTVQAQGLRDVKAELDAHNVVVLGVSIDAVKRLGKFIERDQLNFTLLSDEDHSAADAFGVWGEKKFMGKVYDGLHRISFLINEDGIIEHVFTKFKTKTHHEVVLDYLNEK

SEQ ID NO: 5631 - protein, 768 aa, Streptomyces avermitilis MA-4680
MSNEAATATTAAAAAAPEPLPHGLGVSLPSADARAKTEGTFPYAADLWAEGLLWAAVLRSPHPHARILSIDTTHAREMPGVRAVVTHEDVPGQVPHGRGTADRPVFASEVVRHHGEPLAAVAADHPDTARMAAAAVIVEYEVLDPVTDPEQAFEAEPLHPDGNLIRHIPLRHGDPDAAGEVVVEGLYRIGRQDPAPIGAEAGLAVPRPDGGVELYVASTDPHADRDSAAACYGLEPDRVKVVVTGVPGATADREDQGFQIPLGLLALKTGCPVKLTATREESFLGHVHRHPTLLRYRHHADADGRLVKVEAQILLDAGAYADTSAEALAAAVSFACGPYVVPHAFIEGWAVRTNNPPSGHVRGEGAMQVCAAYEAQMDKLAKKLGIDPAELRMRNVMATGDVLPTGQTVTCPAPVAELLQAVRDFPLPALPKDTPEEEWLLPGGPEGAGEPGAVRRGVGYGLGMVHMLGAEGADEVSTATVKVHDGVATVLCAAVETGQGFTTLARQIVQETLGIDEVHVAPVDTDQPPAGAGCRGRHTWVSGGAVERAAKMVRTQLLQPLAHKFGMSTELLQITDGKITSYDGVLSTTVTEALDGKELWATAQCRPHPTEPLDAVGQGDAFVGLAFCAIRAVVDVDIELGSVRVVELALAQDVGRVLNPAQLAARIEAGVTQGVGIALTENLRTARGLVRHPDLTGYALPTSLDAPDIRIVKLVEERDVVAPFGAKAASAVPVVTSPAAVAAAVRAATGRPVNRLPIRPQAAVVTAP

SEQ ID NO: 5632 - protein, 191 aa, Glycine max
  misc_feature (143)..(145): Xaa can be any naturally occurring amino acid
  misc_feature (156)..(158): Xaa can be any naturally occurring amino acid
VVTERAAHETLSCKAFIEQLKWFAGTQIRNAASVGGNICTASPISDLNPLWMAARAKFRIIDAKGNIRTVLAENLFLPGYRKVNLASGEILLSVFLPWNRTFEFVKEFKQSHRRDDDIAIVNAGIRVHLQEHSENWVVADASXXXGGVAPYSLAAXXXKEFLIGKNWDQDLLQNALKVLQKDILLKEDAPG

SEQ ID NO: 5633 - protein, 203 aa, Vibrio parahaemolyticus RIMD 2210633
MVLVGRQAPDFTAAAVLGNGEIVENFNFAEFTKGKKAVVFFYPLDFTFVCPSELIAFDNRLADFQAKGVEVIGVSIDSQFSHNAWRNTAIEDGGIGQVKYPLVADVKHEICKAYDVEHPEAGVAFRGSFLIDEEGVVRHQVVNDLPLGRNIDEMLRMVDALNFHQKHGEVCPAQWEEGKAGMDASPKGVAAFLSEHAADLGKK

SEQ ID NO: 5634 - protein, 457 aa, Prosthecochloris aestuarii DSM 271
MLQQNIFSMNAQVPMVAIKRLAAHIQPEIVARLEYLNPSGTHYWSVASVIIENAEKEGLISPGMTLVDWTYGSSGIALAMAAIAKGYKVLLVVPDKISREKQQVLKAMGAEVVITPSDALPGAPRSCVNVAQNLVQNLKHAYFTNMYENPLSFSVHAETTGPMIWEQTGGEVTHLFVPVTSGAMISGIGQFLKSKRQNIRIIGVEPEGSIYRELLQHRKLSAPALFELEEIGGLWESKYWDASVIDDIVQVSDFDAFNCGRELLRSEAIFSGGSSGAAMFAALRAGAHLGRDARIVVMMSDFGGYYLSKMYSDEWMKLKGFYRKAPSSRDEITAEDILGLKTRRDLIFALPEHTLSEVFEMMRQNDVSQLPIVSYGTAIGSISENKILSILIENDDAMNSKVVGYMEQPFPVCPPHATISELSEKLQENASGVLISLSDGRLQLLTKSDLIEALTHK

SEQ ID NO: 5635 - protein, 366 aa, Sorghum bicolor
RPLEYAWNKAANILFAESPAGVVFSYSNTSSDLSMGDDKMAQDTYTFLVKWFERFPHYNYREFYIAGESGHFIPQLSQVVYRNRNNSPFINFQGLLVSSGLTNDHEDMIGMFELWWHHGLISDETRDSGLKVCPGTSFMHPTPECTEVWNKALAEQGNINPYTIYTPTCDREPSPYQRRFWAPHGRAAPPPLMLPPYDPCAVFNSINYLNLPEVQTALHANVSGIVEYPWTVCSNTIFDQWGQAADDLLPVYRELIQAGLRVWVYSGDTDSVVPVSSTRRSLAALELPVKTSWYPWYMAPTEREVGGWSVQYEGLTYVSPSGAGHLVPVHRPAQAFLLFKQFLKGEPMPAEEKNDILLPSEKAPFY

SEQ ID NO: 5636 - protein, 163 aa, Hydrogenophaga pseudoflava
MAKKIITVNVNGKAQEKAVEPRTLLIHFLREELNLTGAHIGCETSHCGACTVDIDGRSVKSCTHLAVQCDGSEVLTVEGLANKGVLHAVQEGFYKEHGLQCGFCTPGMLMRAYRFLQENPNPTEAEIRMGMTGNLCRCTGYQNIVKAVQYAARKLQEPSTAAA

SEQ ID NO: 5637 - protein, 775 aa, Mycobacterium sp. JLS
MTDTVATRYSGTRVARVEDNRLLTGRGTFVDDIQRPGMLHACFVRSPFARAKVNGIDASAALAMPGVYAVFTAEDLNGDAVESWHAVAGKDVPDTPRPPLAEGEVKFVGDPVALVVAESRYLAEDAADAVQVDYEPLPAVADFRTAVNAETVVHEQYPDNVAGGMGGAPPDEETFSSAPCVVSENIYQQMYVPVPIETRGMVVEWEPTTGELTLWASTQTPHELRAFTARLLGIPAQKVRVIMRDTGGGFGQKVVPMREDMVIMLAARKVPGALKWIEDRRENLMSAGQSRHVDGTARMAFDEDGTILAVDIDFNQDVGAYPTPYPVLTTAAIGMFFPGPYRVPKASFNYKTVFSNTAGLHAYRGPWQYETLAREIMFDIAARKLDIDPVELRRKNILRGDEMPYFNPNGMPYDHVAPADTFEQAVKILDHEGFRKEQAEALAQGRYIGLGFSAYIEPTGAATGHLGTEGCTIRMEPTGKINVYVNGGSTGNSLETTVIQLTADALGADIDDVATIQGDTAITPYGAGTQGSRSAPMTAGAVNEAGGILRAQLIRMAAHHLGVEVDDIELGGSKAYVREDPTKSVSFADIAYRAHYQPEHLPPGGTATLEATARFTSMAMIHWANATHACTCEVDVETGQVTLTRYIVSEDVGPMINPNVVEGQVAGGTVQGIGGALLESLVYDADGNPLSSTFVDYLLPTATEVPPIEFGHVEIPGPGVGGYKGAGEGGAIGSTPAVINAINDALAPLGVTVTRLPATPATIVELLEQANREDH

SEQ ID NO: 5638 - protein, 161 aa, Rubrobacter xylanophilus DSM 9941
MRRIRVTVDGRAHEHEVEPRLLLIHYLREVLGIGGAHVGCDTSNCGACTVLMDGESVKSCTVLAVQADGHEITTVQGLAGDGGWHPVQKAFHEAHGLQCGYCTPGMIMAAVSLLRENPDPSEQEIREGLEGNLCRCTGYENIVRAVQQAAREMRGQAVAAS

SEQ ID NO: 5639 - protein, 332 aa, Acinetobacter sp. ADP1
MSTDQEFKAPANLGIAVYSNNAEAIGNTPLVRINRIIKTGATVLGKVESRNPAFSVKCRIGAALIADAEKRGVLKSGMHIVEPTSGNTGIALAFVAAAKGYPITLTMPASMSLERRKVLKAFGANLVLTEPAKGMKGAVEEAVRLATEQPDIYFLPQQFENPANPKIHEQTTGPEIWDATNGQVDILVAGVGTGGTISGISHYFEKVQNKPIYSVAVEPAESPIITQTKRGEEITPAPHKIQGIGANFIPKNLDLDIVDEVMPITSDEALEWARKCATQEGILGGISCGAALAAAAKIAERPENEGKTIVVILPDSGERYLSSVLFEGMFEE

SEQ ID NO: 5640 - protein, 814 aa, Rubrobacter xylanophilus DSM 9941
MTETAQRYVGGGVLRKEDPALVTGRATWTDNIKLPGMLHFALVRSPMAHAKINRIDVSAAREQPGVVAVFTAEDLKDEWAAPIPCGWQVTEDLRVPEHWPLTGDKVRYLGDPVAVVVAEDRYAAKDALEFVEVDYEPLDVVTDMQEALKEGAPLVHEELGTNECYTWPMQNGDIDEAFGRADVVVKERYIQQRLIPNAIEPRAVVAQPEPGGSFTVYSSTQVPHILKSVLSAICGVPEHRLRVVAPDVGGGFGSKLNVYPEEALALALSRRLGVPVKWVEERSENYLATVHGRDQIQDIEVAATSDGKILGMKVELLADMGAYLQLGTTVVPLLGAFMYPGLYDFDAYSFKCTAVYTNKTPTDAYRGAGRPEAAYAVERIVDALARRLGMDPAEVRRKNFHPPFDEPRTQPAGIQYDSGNYEMVLDRVMELADYEGLREEQRRRREAGDPVQLGIGFSTYTEICGIAPSQVAAALGGGGAGWEAASVRVLSSGKVEVVTGTSPHGQGHVTSWSQIAADALGVSPDDVEVIHGDTDSAPWGRDTYGSRSLPVGGVAVYLAAQKVVEKAKKIAAHMLEAAEGDIEFEGGRFSVRGSPDRNVTLQQVAGAAFLAADLPEGMEPGLSAETFFDPPNFTFPFGAHICVVEVDTETGKVRIRDYFAVDDCGPVVNPQIVDGQLHGGIAQGVAQALYEEAVYDEDGNLVTGSMVDYLVPGAPEVPRYTLERTVTPSPSNPMGVKGVGEAGTIGSPPAVINAVIDALSHLGVTHIDMPATPARVWQAIQEARGREASAGEASRTGRPAQAPDHEEHPGGESL

SEQ ID NO: 5641 - protein, 341 aa, Corynebacterium diphtheriae NCTC 13129
MVDRGPAVKVAIVTESYLPNINGVTNSVLRIEEYAKAHGHEVLVIAPRICVNVIRTLPIGLPVGVEKRLRAFDPDVIHLASPYAFAARAAFIAQKMAVPCVAVYQTDVAAYQQHYHLTWLKNAHWSWMRAFHNRAALTLAPSTPAKEQLENHGIKNVQLWGRGVDTELFHPRPKNNPKKVVGYVGRLAPEKSVHRLAALNHRDDLEVVIVGDGILREQLERALPNARFLGQLRGEALAREYARFDVFVHTGDHETFGQTIQEAHASGVPVVAPRSGGPIDLITPANGVFITEGIEQAVDYVLAHDFDPRSTVVTWETVCSQLFAHYRDVVTLDNRGKGIIG

SEQ ID NO: 5642 - protein, 439 aa, Mycobacterium sp. JLS
MRLATDQLGRPPQRVAVLSVHTSPLAQPGTGDAGGMNVYVLQSALHMARRGVEVEIFTRATTSADPPVVRVAPGVLVRNVVAGPFEGLDKYDLPTQLCAFTAGVLRAEATHEPGYYDIVHSHYWLSGQVGWLARDRWAVPLVHTAHTLAAVKNAALAEGDSPEPPLRAVGEQQVVDEADRLIVNTELEAEQLVSLHNADPSRIDVVHPGVDLDTFTPGDQAAARAALGLDPRETVVAFVGRIQPLKAPDILLRAAAKLPDVRVLVAGGPSGSGLAAPDNLVALADELGISERVTFLPPQSREDLVRVYRAADLVAVPSYSESFGLVAVEAQACGTPVVAAAVGGLPVAVRDGVTGALVDGHDVGDWAHTIDSLLSRGPATMRRAAVEHAATFSWAHTVDDLLASYGRAISDYRDRHPHADETLSRRTARRFSRRRGVRA

SEQ ID NO: 5643 - protein, 218 aa, Acinetobacter sp. ADP1
MRFCTMTLRLGDTAPNFEQDSSEGLINFYDFLGDSWGILFSHPADYTPVCTTELGYTAKLKDEFEKRHVKAIALSVDDVDSHQGWIKDINETQQTTVNFPILADKDRQVSELYGFIHPNASETTTVRSLVIIDPNKKVRLIITYPASTGRNFNEVLRVIDSLQLTDNYKVATPANWQQGEDVVIVPSIKDEAELKERFPKGYKAVTPYLRLTPQPDQK

SEQ ID NO: 5644 - protein, 1233 aa, Ustilago maydis 521
MGVPALFRWLSKKYPRIVSSVQEEDPKTAPGPDGTEITLPLDTSTPNPNGEEFDCLYLDMNGIVHPCTHPEGKPAPETEEEMMVEVFAYTERVVNMVRPRRLLMMAIDGVAPRAKMNQQRSRRFRAAKEAREKHEEEQAALAEWKAKGLGATDDEKKSKRAWDSNAITPGTPFMDLLAASLRYWVAQKINSDPGWKDIQVIISDASVPGEGEHKIMEHIRRQRSHPEHDPNTKHVIYGLDADLIMLSLATHEPYFKVLREDVFAADNKPKTCNLCGQPGHFAASCTGAAKKKSGQHDEIAPTPPEKKPFIFLDVATLREYLEVELNIPQLPFAFDLERAIDDWVFLIFFVGNDFLPHLPSLEIRDGAIDTLLRIWKKELPAMGGYLTNHGRVELGRAQLILSGLASEEDEIFRRRKEDEDRRETNRKRREEMQQRRDKELDQGNFGNGSMVEVMSKKRRAHETEKPAFNGVSAQEARDQANSSNKSYDPRKKAIVLGGDNNQVVSDRNAARQANMDAAEALKAELMGDAPKQQEADAERALKKVKTEAGAEPTTASVEKQEHGDDQDSASAGTKRKADQVQHHANAGDDDVAKIEAATEDGDADADTDANADANADAEVDAEAEDDEEEDNDEVDGNEDVDPVTTIKKRKVNADGTVDYEDTVKMWEPGYRERYYKEKFGVDLSDTDFRRSVVKSYIEGLCWVLAYYYQGVPSWQWYYPFHFSPFAADFEDLESLDIQFQLGSPFKPFEQLMGVLPADSRASIPPAFHPLMTESDSDIIDFYPSEFEIDMNGKKMAWQGVALLPFIDEKRLLDALKERYPLLSEDEVRRNGFGNNTLFVGNESRLYDFLCEEIYAKKRTTDDGETPKRVAVNPALSGGITGFVKPDPVCVPGSTFNSPLTSQALHDIHNDRSISVLYDFPEQKTPHRSVLLKGLKPPKRILSAAEIDWVKRGSPDNRGRGRGRGAHHGGAGRDFHRSSNGQQHNNNGYAGGENGSAGYRGSNGGGYGSHNGGGGGGYGAPVGRSHDYQQYSQSGSGGGGGGYGNYGGYGGYGGSGYGVGGRDGGAYYGGYGGGGGGAYGAAPTYASAGAYDAYAGYGGSGGYGAYGASAYAPGAGGNRDNRYAAYTQPSMHVGPAAGRGGRQAAPANHAGYAGLPSLGAPPAPPAPPTHPAAAYGGYTNGGYGGYGAPAHGYGGAPPARGGGRGGRGAGSRGAGRGANNASYAGRGGAYGSFY

SEQ ID NO: 5645 - protein, 354 aa, Silicibacter pomeroyi DSS-3
MIFTTTGRGRLYGSILETVGNTPVIRLNTIAPGHVTMYVKFEAFNPAGSVKDRLALNIIEAAEREGRLQPGQTVVEATSGNTGIGLAMVCAAKGYPLVITMHDGFSVERRRLMRMLGAKVVLTRKEDKAVGMVVKAKELAEANGWFLAHQFETKDNADIHEATTAQEILGDFDGERLDHVVLGYGTGGTVAGLGRVLKAARPGLKITLSEPANAALVQSGEAQQRNAEGEPAATHPAFNPHPIQGWTPDFIPLVLQEALDQGYFDALEPVSGPESIAWSKRLAAEEGILTGISGGASLAAAMKVAETAPEGSVLLVMLPDTGERYLSTPLFEDIAAEMDEAEQALSASTPGYQY

SEQ ID NO: 5646 - protein, 328 aa, Prochlorococcus marinus str. MIT 9515
MAKIYEDNSFAIGNTPLVKLKSVTKNAKATVLAKIEGRNPAYSVKCRIGANMIWDAEKSGKLTKDKTIVEPTSGNTGIALAFTASARGYKLILTMPESMSIERRRVMAVLGAEIVLTEASKGMPGAIAKAKEIAESNPSQYFMPGQFDNPANPEIHFKTTGPEIWDDCDGAIDVLVAGVGTGGTITGVSRYIKQEKGKNITSVAVEPSHSPVITQTLNGEEVKSGPHKIQGIGAGFIPKNLDLSIVDKVEQVTNDESIEMALRLAKEEGLLVGISCGAAAAAAVKLAEQDEYAGKTIVVVLPDLAERYLSSIMFTEVPSGIIEEPINA

SEQ ID NO: 5647 - protein, 308 aa, Oceanobacillus iheyensis HTE831
MRVSDNITGLIGGTPIVKLHNVTDEGSADVYAKVEFMNPGSSVKDRIAIAMIEAAEQGGKLKEGDTIIEPTSGNTGIGLAMVAAAKGYRAVLVMPDTMSQERRNLLRAYGAELVLTPGAEGMKGAIAKAVELQEENDYFMPQQFSNPANPDIHEKTTGKEIVEQMKDGLDGFVSGIGTGGTITGAGKVLKNHFQDIKLYAVEPADSPILSGGSPGPHKIQGIGAGFKPDVLDTAIYDEVLTISNEEAYEAARKVATTNGILGGISSGAAVAAAVKVAKQLGAGKKVLAILPDNGERYLSTPLYQFDKE

SEQ ID NO: 5648 - protein, 326 aa, unidentified eubacterium SCB49
MDYVENILGTIGNTPMVKVNKLAEEIPGLVLAKYETFNPGNSVKDRMALTMIEDAEADGRLKPGGTIIEGTSGNTGMGLALAAVVKGYKMVCVISDKQSKEKVDILRAVGSEVVVCPTDVAPDDPRSYYSTSKRLAEETPNSWYVNQYDNPSNAKAHYQSTGPEIWKQTEGKITHFVVGVGTGGTISGVGKYLKEQNPNIKIWGIDTYGSVFKKYHETGIFDEAEIYPYVTEGIGEDILPKNVDFSIIDGFTKVTDKDAAVWTQKLAKDEGFFLGNSAGAAMKGIHQLKEHFNEDDVIVVLFHDHGSRYVGKMFNDDWMREMKYIE

SEQ ID NO: 5649 - protein, 157 aa, Pseudomonas fluorescens Pf-5
MAVAIDQPIADFQAPATSGQTVSLSDLKGKQVVIYFYPKDSTPGCTTEGQGFRDQYAAFQAANTEVFGVSRDSLKSHENFKCKQEFPFELISDKDEAVCQLFDVIKLKKLYGKEYLGVDRSTFLIDKDGVLRQEWRGVKVPGHVDAVLAAAQALNKA

SEQ ID NO: 5650 - protein, 164 aa, Shewanella oneidensis MR-1
MAIPSSAAKDKSLTTPSLNLTINGRSFTLNADPNMPILWALRDILGLTGTKYGCGAGLCGACTVHVDGQPVRACLTSVSQAQGKQLTTIEGLDNQKLKNAWAEHNVPQCGYCQAGQLMSAAALVTQHPKPSAEQIDAAMSGNLCRCGTYPRIKAALQSYAKQEG

SEQ ID NO: 5651 - protein, 382 aa, Borrelia garinii PBi
MKVAIFTDTYIPEKNGVATSIKQIKEGFEKNGYEVYIFCPKSKTSLNEKNVYRCSSIQINKKLDAVIAFPNKRKISKIIKSYKPDIIHTHSEFSMGKIGKQIALKQNIPIVHTSHTMWDYYLHYLGIFKYFIKPDKMMQKHYNKIKHFIYPSSKAKERYFRLSNNSNYRIIPNGVDRKLFIKTLSKEKKDEIFKKHNIKQTDKIIIFVGRINKEKNINSLVMNLKDLLIQNKNYKLIIIGKGSEEKEIKNFSIKHRLEKQILLIGTIPWEEICFYYKISDIFASLSRSEVYPMTVIEALTAGIPAILINDYIYKDVIKEGINGFLIKKYENLSYYIEKVIKDDKTLKTFKQNAKKHSIKFSSHFFTKKIENYYSEIIARKNH

SEQ ID NO: 5652 - protein, 329 aa, Brassica napus
MVLPSSTPFPPTGKKAKASPEYNFPVIDFSTHDRSKLSEKIVKACEVNGFFKVINHGVRPEIISRFEHEGEEFFNKPESEKLRAGPASPFGYGCKNIGFNGDLGELEYLLLHANPTSVADKSETISHDDPFKFSSATNDYIHAVKDLACEIIDLTAENLWGQRSSEVSELIRDVRSDSILRLNLYPPAPYALRGVSQIGFGEHSDPQILTVLRSNDVDGLEICSQDGLWVPVPSDPTCFYVLVGDCLQALTNGRFTSVRHRVLANTAGKPRMSAMYFAAPPLEAKISPLPEMVSPANPRRYNSFTWGDYKKATYSLRLGVPRLEFFKTS

SEQ ID NO: 5653 - protein, 208 aa, Chlamydophila pneumoniae AR39
MRNNKRVEEEVFMTLSLVGKEAPDFVAQAVVNGETCTVSLKDYLGKYVVLFFYPKDFTYVCPTELHAFQDALGEFHTRGAEVIGCSVDDIATHQQWLATKKKQGGIEGITYPLLSDEDKVISRSYHVLKPEEELSFRGVFLIDKGGIIRHLVVNDLPLGRSIEEELRTLDALIFFETNGLVCPANWHEGERAMAPNEEGLQNYFGTID

SEQ ID NO: 5654 - protein, 366 aa, Methylococcus capsulatus str. Bath
MKVLHVEGGRNLYGGARQVLYLLEGLEQRGIDNVLVCPAGSELAREAAAHAEVHAIPMSGDLDFRLIGRLYRIIGRVRPDLAHLHSRIGADVMGGIAARLAGVPVVHSRRQDNPEMRWAVAVKYRLHDRVVAISEGIARVLASEGLPAAKLRVVRSAIDPAPFLQPGDRPGFRTEFGLPEDCTVIGVIAQLIERKGHRFLLEALPELTGRYPGLHVLLFGKGPLESSLIETVRHLGLADRVHFAGFRDDLPRILPCLDLVVHPALREGLGISLLQAAAAGVPIVASRAGGIPEAVRDGDNGLLVPPGDAAALAAAIRRLLDDRDLARDMGQRGRALIGREFSVEGMVEGNLAVYRELLAEKGSPLS

SEQ ID NO: 5655 - protein, 187 aa, Rhodococcus sp. RHA1
MALINTQIKPFAANAFKDGAFITVSADDIKDKWAVFYFYPADFTFVCPTELGDLADHHEELQRLGVEVFSVSTDTHFTHKAWHGSSDTIGKIKYAMIGDPTQEISKNFEVLRENEGLADRGTFLVDPDGVIQFTEVTAEGIGRNAAELVRKVKAAQYVRSHPGEVCPAKWEEGEETLAPSLDLVGKI

SEQ ID NO: 5656 - protein, 326 aa, Colwellia psychrerythraea 34H
MSKIFEDNTTAIGNTPLVKLNRVIDSENGANVYAKIEARNPSFSVKCRIGASMVWDAEEKGLLTPGKEIVEPTSGNTGIALAFVAAARGYGITLTMPSTMSLERRKLLSALGAKVELTDGAKGMGGAIAKAQELKDSDPEKYVLLGQFDNPANPKIHEETTGPEIWNDTDGNVDIFVAGVGTGGTLTGTSRYLKLTKGKAITTVAVEPTDSPVITQALAGEELTPGPHKIQGIGAGFIPGNLDLDMVDAVELVSNEDAFAMAHRLMKEEGILAGISSGAAVIAAKRLAERPENKGKNIVVILPSSAERYLSSALFTETFSDKELVQ

SEQ ID NO: 5657 - protein, 378 aa, Xanthomonas campestris pv. vesicatoria str. 85-10
MRYAIVTETYPPEVNGVALTVHGLETGLRTRGHQVDVVRPRQSADTAPTDALLVRGASLPPYPGLKFGLPATQRLVRHWRSTQPDAIYVATEGPLGWSAMRAARRLGIPVATGFHTRFDEYLPDYGAAWLQGTALRWMRRFHNQADATPVPTRELQQFLRNDGFERVQLLARAVDSQQFDPSRRDCALRADWGMEGEGFAAIYVGRIASEKNLPLAVRAFRKLQQIRPKARFVWVGDGPAREKLAHDNPDFIFCGVQRGDALARHFASGDLFLFPSRSETFGNVTLEAMASGVATVAFDYGAAREYLRNGHTGAAVDTDEAFIQAAVALTEDDALRQRMGTAAAQAMKKLHPDNVVCDFEALLLGISAARRRYVVNAA

SEQ ID NO: 5658 - protein, 115 aa, Humulus lupulus
LLGVPLGHLYTCGPGSYKIPSLNDVPFKFNVSLLKGHPNVKAIHSSKAVGEPPFFLASAVFFAIKDAIRAARAEVGNSDWFPLDNPATPERIRMACLDEFTEPFIGSEFRPNLSV

SEQ ID NO: 5659 - protein, 160 aa, Bradyrhizobium japonicum USDA 110
MTQTPIRLTVNGRIHEITAERATPLLYVLRNDLALNGPKYGCGLGECGTCTVLIDGAAARSCVIPVGGCVGRDIVTLEGLGTSDKPDPVQQAFIDEQAAQCGYCLNGMIMTTKALLAINPQPTEQEALAALRYNLCRCGTHVEILRAVMRASGQLTEAAD

SEQ ID NO: 5660 - protein, 409 aa, Corynebacterium glutamicum ATCC 13032
MPPFRYRCATVFRWLIFEIMRVGMMTREYPPEVYGGAGVHVTELTRFMREIAEVDVHCMGAPRDMEGVFVHGVDPALESANPAIKTLSTGLRMAEAANNVDVVHSHTWYAGLGGHLAARLHGIPHVATAHSLEPDRPWKREQLGGGYDVSSWSEKNAMEYADAVIAVSARMKDSILAAYPRIEPDNVRVVLNGIDTELWQPRPTFDDAEDSVLRSLGVDPQRPIVAFVGRITRQKGVEHLIKAAALFDESVQLVLCAGAPDTPEIAARTTALVEELQAKREGIFWVQDMLGKDKIQEILTAADTFVCPSIYEPLGIVNLEAMACNTAVVASDVGGIPEVVVDGTTGALVHYDENDVETFERDIAEAVNKMVADRETAAKFGLAGRERAINDFSWATIAQQTIDVYKSLM

SEQ ID NO: 5661 - protein, 158 aa, Mycobacterium marinum M
MHERSVQLSVNGNHVAARVEPRMTLADFLRERCGLTGTHLGCEHGACGACTVLVGGDAVRSCLLFAVQADGAEVTTVEGIASADGELSPVQSALRECHGLQCGFCTPGFVVSITALLRDNPDPTDEQIREGLSGNFCRCTGYQGIVAATRRASELMSQ

SEQ ID NO: 5662 - protein, 776 aa, Mycobacterium marinum M
MTQDMQEAPAPRYAGTRVQRVEDGRLLTGHGSFVDDISRPGMLHACFVRSPFAHARINGIDTATALALPGVHAVFTAADLNADVKEAWHAVAGRDVADTPRPPLAERDAKFVGDPVALVVAESRYVAEDAIELVDIDYEPLPAITDFTRAQSSDVLVHESYPDNVAGGLAGAPPDEQTFATSPCVVTENIYQQMYAPVPIETRGLVAEWAPASEELTLWASTQTPHELRAFCARLLGIAAQRVRVIMRDTGGGFGQKVVPMREDMCIMLAARKVPGALKWIEDRRENLMSAGQARHVDGTARMAFDTDGNIQAADIDFIMDIGAYPTPYPVLTTAAIGMFFPGPYRIPKASFSYKTVFSNTSGLAAYRGPWQYETLAREILLDIAARKMGIDPIELRRRNLLRREEMPYVNPNGMPYDHVAPIETLEQAVKILDYEGFRREQREALAHGRYLGLGLSAYIEPTGAATGHLATEGATIRMEPTGKVNVYVNGGSSGNSLETTVIQLTADALGADIDDVATIQGDTAITPYGAGTQGSRSGPMTAGAVNEAGKILREKIVALAAHHLEVAESEVELVHSKAAVRGDPARQVTFGELAYTAYYSPQQLPSALSTELEGTARFKSPNPIHWANATHACTCEVDTQTGKVTLLRYVVSEDVGPMINPAVVEGQIAGGTVQGIGGALMENLAYDDDGNPLATTFVDYLLPTATEVPPIEYGHVEIPGPGPGGYKGAGEGGAIGSAPAVINAINDALAPLGVTVTRLPASPASVASLLAGASR

SEQ ID NO: 5663 - protein, 157 aa, Brassica oleracea var. alboglabra
MSLIPSFFGGRRTNVFDPFSLDLYDPFEGFLTPSGMTNTTSKDVAAFTNAKVDWRETAEAHVFKADLPGLKKEEVKVEVEDGNILKISGERSSENEEKSDKWHRVERSSGKFMRRFKLPENAKVDEVKASMENGVLSVTVPKMPERKPEVKSMDISG

SEQ ID NO: 5664 - protein, 328 aa, Synechococcus sp. RS9917
MSRVYADNSQAIGNTPLVRLNHVTKGCKATVLAKVEGRNPAYSVKCRIGANMIWDAEKRGVLSEGKTIVEPTSGNTGIALAFTAAARGYKLVLTMPESMSIERRRVMAVLGAEIVLTEAAKGMPGAIAKAKQIAESDPAKYFMPGQFENPANPEIHEKTTGPEIWNDCDGAIDVLVAGVGTGGTITGVSRYIKNQAGKAIESVAVEPAHSPVITQTLNGEEVKPGPHKIQGIGAGFIPKNLDLSVVDKVEQVTNEESIAMALRLAKEEGLLVGISCGAAAAAAIRLAQQDAYAGKTIVVVLPDLAERYLSSVMFADVPTGIIEQPVAV

SEQ ID NO: 5665 - protein, 141 aa, Thiomicrospira crunogena XCL-2
MSLLLRNLEPFRELKELENRLHHLFPKGEESNVAAFTPTVNTREGDYAYHIEIDLPGVKKEDIHVEVKENRLMISGERKVKEEVKEEDYHRVESRYGKFERSFTLPDNVDAENVDASTTDGVLEVVLPKKERSTSKKIEVK

SEQ ID NO: 5666 - protein, 157 aa, marine gamma proteobacterium HTCC2143
MAKLTVNGEIIDVEVEVGTPLLWVIREQIGLTGTKYACGIAQCGACTVHIDGRAVRSCVYPASSVSADQKITTIEGLSDDGSHPVQQAWAELDTPQCGYCQPGMIMASAALLSSTPNPSDEDINTQITNICRCGTFQRVREGIHLAVEITNKSATKA

SEQ ID NO: 5667 - protein, 163 aa, Oryza sativa Indica Group
MACAFSVSSAAAPLASPKGDLPLVGNKAPDFEAEAMFDQGFIKVSFFSFLKSKCMFVSSAEITAFSDRYEEFEKINTEVLGVSIDSVGIALRGLFIIDKEGVIQHSTINNLAIGRSVDETLRTLQALQYVQENPDEVCPAGWKPGEKSMKPDPKDSKEYFASI

SEQ ID NO: 5668 - protein, 273 aa, Brassica rapa subsp. pekinensis
  misc_feature (219)..(219): Xaa can be any naturally occurring amino acid
MASVASSTTLISSSASVLPATKSSLLPSPSLSFLPTLSSPSPSASLRSLVPLPSPQSASSSRRSFAVKGQTDDLPLVGNKAPDFEAEGVFDQEFIKFIKVKLSDYIGKKYVILFFLPLDFTFVCPTEITAFSDRYAEFEKLNTEVLGVSVDSVSVFSHLAGVQTDRKFGGLGDLNYPLISDVTKSISKSFGVLIHDQGIALRGLFIIDKEGVIQHSTIXNLGIGRSVDETMRTLQALQYIQEGPGEVCPAGWKPGEKSMKPDPKLSKELFSAI

SEQ ID NO: 5669 - protein, 311 aa, Ralstonia metallidurans CH34
MACEKPTDSAPMAYKTIEDTIGNTPLVRLQRIPGTAIEARGNVILGKLEGNNPAGSVKDRPAVSMIRHAEARGRIKPGDTLIEATSGNTGIALAMAAAIRGYRMVLIMPEDLSLERRQSMAAYGAEIILTPVKGGMEYARDLADAMERDGKGVILDQFANPDNPLAHYETTGPEIWKDTDGRVTHFVSAMGTTGTITGVSRYLKEKNPLIQIIGAQPAEGSRIPGIRKWPEAYLPKIYDPKFIDRQEPVTQADAEHMARRMAREEGIFAGISAAGALCVALRIAEEVENATIVFVVCDRGDRYLSTGVFPA

SEQ ID NO: 5670 - protein, 813 aa, Oryza sativa Japonica Group; identical to SEQ ID NO: 2331

SEQ ID NO: 5671 - protein, 188 aa, Fusobacterium nucleatum subsp. nucleatum ATCC 25586
MSLIGRKVPEFKATAFKKGEKDFVTVTDKDLLGKWSVFVFYPADFTFVCPTELEDLQDNYEAFKKEGAEVYSVSCDTAFVHKAWADHSERIKKVTYPMVADPTGFLARAFEVMIEEEGLALRGSFVINPEGKIVAYEVHDNGIGREAKELLRKLQGAKFVAEHGEVCPAKWQPGSETLKPSLDLIGEL

SEQ ID NO: 5672 - protein, 380 aa, Cyanothece sp. PCC 7424
MHIAWLGKKSPFCGNVTYGREVTNALLDRGYEVSFLHFAQEESDGENWPHCPEVVLPFLYKSQVYTIPTPKSSKVLMAALKELQPDLVHASLTLSPLDFRLPEICEELKIPLVATFHPPFDSKLRNLSSSTQFLTYQLYAPFLAHYDKVIVFSRLQRNLLIKLGVPPQKLAVIPNGVDPQKYSPGLSSVKPRLNSKRLFVYVGRIATEKNVEALLKAWKHSMTGTDSQLLIVGDGPLAASLKPFYGSEFGINWLGFVAQEQERIEILRAADVFILPSLVEGLSLSLLEAMSCGVACIATDAGADGEVLEDGAGVILNTQGVTIQLKTLLPLFRDHAEITQLLGQKARQRVLERYTLNQNITQLETLYSEILHNQVVFFTK

SEQ ID NO: 5673 - protein, 303 aa, Bacillus cereus ATCC 14579
MCENVTELIGDTPVVRLSKFIPEDAADVYVKLEMFNPSRSVKDRAAYNLLHVAEENGLIKPGDTIIEPTSGNTGIGLAMNAAAKGYKAILIMPDNMSKERINLLKAYGAEVVLTPAEQRMPGAIAKALELQKQIPNSFIPQQFENPANPNIHRYTTALEIYEQMDGELDAFVATAGTGGTITGTGETLKEKLPNLYIAVVEPKGSPVLSGGVPGPHKLVGTSPGFIPKNLNTEVYNEIIQIADEEALTTMRNLARQEGLLVGPSSGASVYAAIMIAKRLGVGKKVLCIAPDTGERYLSMGLFE

SEQ ID NO: 5674 - protein, 321 aa, Thermosynechococcus elongatus BP-1
MNIAPDITALIGRTPLVRLNRIPQAEGCVAEIVVKLESMNPAASVKDRIGLSMIQEAEAAGLITPGKTVLVEPTSGNTGIALAMVAAAKGYRLILTMPETMSAERRAMLRAYGAELDLTPGTEGMSGAIRRAEEIAASLEDAFMLQQFKNPANPKIHRETTALEIWQDTDGQVDILVAGVGTGGTITGVAEVIKAKKPTFQAIAVEPSNSPVLSGGKPGPHKIQGIGAGFVPPVLKRELIDEVIPVSDDQAIHFGRRLAREEGLLSGISSGAALCAAIQVAQRPENAGKLIVMVQPSFGERYLSTPLFQEALPLVPSYLQT

SEQ ID NO: 5675 - protein, 344 aa, Sulfitobacter sp. EE-36
MHVASDLAQAIGNTPLIRLRKASEETGCEIYGKAEFMNPGQSVKDRAALFIIQDAIAKGTLKPGGTIVEGTAGNTGIGLALVGASMGFKTVIVIPETQSQEKKDMLRLAGAELVQVPAAPYRNPNNFVRYSERLANELARTTNEGVIWANQFDNVANRQAHIETTGPEIWEQTGGKVDGFCCAVGSGGTLAGIGMALQPKGVKIAIADPDGAALHNYYTKGELVAEGGSIAEGIGQVRITKNLEGFTPDFSYNVSDAEALPYVFDLLQHEGLCLGASSGVNVAGAVRLAKDMGPGHTIVTILCDFGTRYQSKLFNPDFLREKDLPVPAWLDRAPQSIPGVFEDQ

SEQ ID NO: 5676 - protein, 303 aa, Alkaliphilus metalliredigens QYMF
MIYKNITQTIGNTPVVKLNNLVDENMADVYVKLEMFNPGGSVKDRISISMIEEAEKKGLIKPGDTIVEPTSGNTGIGLGLVAASKGYKLVLTMPESMSLERRKLLKAYGAELELTKAHLGMKGAIDKANELVEENGYVMLQQFNNLANPEIHRNTTAKEILNDFGNDLDAFVVGIGTGGTITGVGEVLKKKIDKITVVAVEPEDSPVLSGGNPGPHMIQGIGAGFVPEVLNVKIFDEVIKVQNEEALETARQLAKQEGLMVGISSGAAVFAAIKVAQKLGKGKKVLTIAPDTGERYISTALFE

SEQ ID NO: 5677 - protein, 395 aa, Deinococcus radiodurans R1
MRIGIVTATYLPSRNGVATSTALFVQGLRERGHEVRVFAPRHPQASGDAEPGVYRLNASFAGAQALGAPADYPVMLAPGPLLSARLPLRGVDVWHTMHPFLAGQLALRWGRLSHAPVVYTAHTQYDEYIHYAPLPSKVSRAMIHPHVSALARRMDAVLAPGRAMVDMLRRYGYGGEIELLPNPVKLASFLGVSGDAFRAEFGIPQDAPLVVYLGRLAPEKNLDTMLAAFAQARTRRPELRMLVVGDGPGREDAEAGAPEGVTFTGAVPYVRVPEALAAADAFLTASTSEVLPMSMIEALAAGAPLVAAHSPAALDLIAEGHNGTVREPTPEALATGLLQVLAPATLPRMQHEARESARQYDLPVRAQALEEVYERVIAARRGKGAPSRFFRSASR

SEQ ID NO: 5678 - protein, 320 aa, Clostridium difficile 630
MRVLNNVTEAIGNTHMLHLSKIADEFGVQGNIYAKMEYLNPGFSKKDRVALQMITEAENAGLLVPGQAVVELTSGNTGTGLAIACACKGYKFIACMSKGNSMERARMMKALGAEVVLVDQMPNSVHGQVSGEDLALVEIEAQKIAKERNAFRADQFNLEACNHAHEKYTAEEMWEQLDGNIDVFVDFLGSGSTFAGCSKTLKKHNSSIKCYVVEPETAAIYSGKEITDQGHKIQGGGYSMDLPLVDKKLIDGYIQVTDEEATDVARKLAKLEGVFAGFSSGANVCAAIKLLKSSEKGKNIVLTLNDSGLKYLSTDLYEEL

SEQ ID NO: 5679 - protein, 444 aa, Streptococcus agalactiae 2603V/R
MRIGLFTDTYFPQVSGVSTSIRTLKEGLEKEGHEVYIFTTTDRNVKRFEDPTIIRLPSVPFISFTDRRVVYRGLISAYRIAKDYELDIIHTQTEFSLGLLGKLVAKALRIPVVHTYHTQYEDYVGYIAKGKLIKPSMVKYIMRTYLSDLDGVICPSRIVLNLLDGYGVKIPKQVIPTGIPVENYRREDISEETIKNLRTELGLADNDTMLLSLSRVSFEKNIQAILMHLSAVVDENPHVKLVIVGDGPYLSDLKELVHSLELENSVIFTGMVEHSQVAIYYKACDFFISASTSETQGLTYIESLASGRPIIAQSNPYLDDVISDKMFGTLYKKESDLADAILDAIAETPKMTQEAYEQKLYEISAENFSKSVYAFYLDFLISQKASVKEKVSLTIGNKDSHSTLRFVRKAVYLPKKVFTFTGRASKKVVKAPKRRISSIRDFLD

SEQ ID NO: 5680 - protein, 195 aa, Mycobacterium avium 104
MPLLTIGDQFPAYELTALIAGDLSKVDAKQPGDYFTTITSEDHAGKWRVVFFWPKDFTFVCPTEIATFGKLNDEFEDRDAQVLGVSIDSEFVHFNWRAQHEDLKNLPFPMLSDIKRELSLATGVLNADGVADRATFIVDPNNEIQFVSVTAGSVGRNVEEVLRVLDALQSDELCACNWRKGDPTLNATELLKASA

SEQ ID NO: 5681 - protein, 620 aa, Physcomitrella patens subsp. patens
MDELNCELWHACAGPLTQLPPVDSLVMYWPQGHIEQVRAADVYQASKQFSNLPAHLLCRISKIELQADPQTDEVFAQMDLTPQYELSKETKDAPSPIQQSNVRSFCKTLTASDTSTHGGFSVPRRAAEECLPLLDHNMVPPCQELVAKDLHGKDWSFRHIYRGHPRRHLLTTGWSVFVSQKRLVAGDTVIFLRGENGQLRVGVRRASKQQPQARSTHFSSANLHLGVLAAASHAATERLRFSVIYNPRTSPSEFVIPYHKYLRSEDNNLTVGSRFKMKFETEESTERRYSGTIVEISDVDPLKWPSSAWRSMKVEWDESASERHERVSPWEIEPLVPISTLPTPPVGPRPKRRPPTFDSSVSWASYMGTGAYQFRDPSCNKILPSWLTNSKSANLTSPPVPARSQLPITSLNNDPKVLHAHNLSFELWETVEQEQLNASPALEQQCKLFGFNLADKVVPTPVSSAPSLCEDSEGSGPWSSSDHTSSTSADTRVGMIVTGTYQPLVAPVRSGTKVYYSGKVGRTIDLKKCESYAALRRMLASLFGLEGQLDDVTKGWQLVYTDHENDVLLVGDDPWEEFCNCVRSLKVLSPQDAAGQSVGKYPMTNCDEDDDWQSAVQSSG

SEQ ID NO: 5682 - protein, 893 aa, Mycobacterium smegmatis str. MC2 155
MSVRVNGKPVSGAPQPGQCLRTFLRDHGHFEVKKGCDAGDCGACSVLIDDVAVHSCVYPAFRADGRDVKTVAGLGTSEDLHPMQRRFVEAAGFQCGFCTAGMITTASTFTEEQRANLAEHLKGNLCRCTGYRSITDALDGVSNVEKSGGTTASVGAPAAVRVATGTEPYTMDHTPEGLLHLAVLGSPVAHARIVAIDTSAAEAVPGVRLVLTYLDAPRVAFSTARHEIREDDPDDTYVLDSTVRFVGQRVAAVVADSVAAAETACRAIAVEYEQLPAVFDPDEARSPGAPLLHADKGPDARIADPSRNIVAELHGGIGDVQQAVAAAHTVVRGRYHTQRVQHVHLETHGCTGWVDEDGRLTIRTSTQVPFLVRDELCRIFRLDRDVVRVFATRVGGGFGAKQEMLVEDLVALAVLRLGRPVRYEFSRSDEFTMAPCRHPFRVDVTVAADEDGTLTALAVDVLTDAGAYGNHSPGVMFHGCAESVAVYRCANKRIDAQSVYTNNLPSGAFRGYGLGQVIFAIESALDELAQRLGIDPFELRRRNVVRPGDRLIDAHEPEDLLFGSYGLDQCLDLTQNALAAGNGAVAPQGWQVGEGMAVAMIATLPPRGHFADATVTLKDDGRYELSVGTAEFGNGTTTVHAQLVATLMNTTVDRVSIRQSDTDAGGYDTGAFGSAGIVVAGRAVHQACVALRATIERAAAELTGVDAVSCVVGPHGVQCRDRFVPFTELALPLTATGHHDGTPRSVAFNVQGFRVAVNPETGEVRILQSVQAADAGVVLNPEQCRGQVEGGVAQAIGSALYEEMRVGADGRVLTQTLRNYHIPQLADIPQTKVYFADTYDELGPLGAKSMSESPYNPVAPALANAIARAVGVRPRELPMTPARIWRALQQGRA

SEQ ID NO: 5683 - protein, 904 aa, Bradyrhizobium sp. BTAi1
MSVVVNGKAVDAAPRPGQCLRTFLRDTGHFGVKKGCDAGDCGACTVLLDGEPVHSCLIPAFRADGREVTTVEGLATADGLHPMQQAFLDAQAFQCGFCTAGMIVTCASLNQAQKKDLGAALKGNLCRCTGYRAIEDALLGRSHVEDVAAGEAFGRSLPAPAGPDVVRGKARYTFDTAIEGLLHVKLARSPHAHARITGIDKAAALAVPGVHTVLTHEDAPAMLFSTARHEQAWMDPADTRVLDDTVRFIGQKVAAVVADSEAAAEEGCRRLRVDYEVLPAVVDPAQAIAPGAPRIHAGRSREHRIADVSRNIVAETHGEFGDVATALAAAAATYEGTFTTQRVQHAALETHGGLAWLDDDGTLNVRSSTQVPFLTRRALSEIFALAPDKVRVFCERVGGGFGGKQEMFVEDILALAALKTKRPVKLEFTREEQFIATSTRHPMRVTVKAGADKDGKLTALQLDVLSNTGAYGNHAGPVLFHACGESIAVYNCPNKKVNAAAVYTNTVPAGAYRGYGLPQTTLAVEAAIDELALQLGIDPFEMRRRNIVRPGDPMLSPPGAEHSDVLYGSYGLDQCLDLVERAMAEATPTPELSDEWLTGDGIALTMIDTVPPDGHIADAAISLGADGGFTLTVGTAEFGNGTSTVHRQIAATILGTTVDRITLKQSDTSHGGHDTGAYGSTGTFVAGRATQAAAEALAETIKRVAADHWNVDPSECRLADDAVSCGARRLPFTDLIKAGGPPLTAQGNSQGTPRSVAFNVQGFRVAVNKYTGVVRILKSVQAADAGRVANPMQCRGQIEGGVAQSLGAALYEEIVIDETGRVINPRFRDYHLPSYADVPRTEVLFAETTDTIGPLGAKSMSESPYNPVSAALGNALRAATGIRFTATPFKPDRLFPLLQEKFGA

SEQ ID NO: 5684 - protein, 1018 aa, Candida glabrata CBS 138
MGVPSFFRWLSRKYPKIISPVLEEPQQLVDGVALPIDYAGPNPNGELDNLYLDMNGIVHPCSHPENKPPPETEDDMLLAVFEYTNRVLNMARPRKVLVIAVDGVAPRAKMNQQRSRRFRSARDAEIENEAREEIMRQKEQLGQIIDDSVKNKKTWDSNAITPGTPFMDKLAIALRYWTAFKLATDPGWKNLQVIISDATVPGEGEHKIMNFIRSQRADPEYNPNTTHCIYGLDADLIFLGLATHEPHFKILREDVFAQDNRKRNNVKDTIDMTDEEKDLIRKQDSEKPFLWLHISVLREYLSAELWTPKLPFPFDLERAIDDWVFMCFFCGNDFLPHLPCLDVRENSIDILLDIWKSILPRLKTYMTCDGKLNLESVEMVLKELGNREGDIFKTRHIQEIRKKEANERRKQQKQQNVSTGQDRHPTKFNEQLQMYDTNGSLAKGSWNLTTSDMVRYKKELMLANEGDENSIKIIEEVSERNNSLMKEIQSEMTPEDYKGNNNNFTAAELLKKKLNARKRELEKEKENEEQERASKQPKISETPDESDLTEEIEADVIAEVEDETTPDEKDTDSIITEVPEISNGGITSGVIDTDEAVKLFEPGYHDRYYIEKFHIEPNQIPALSKHMVKCYIEGVSWVLMYYYQGCASWTWYYPYHYAPLAEDFVDFHDLDIKFELGEPFLPYEQLMSVLPAASGHNLPEVFRPLMSSEDSEIIDFYPTEFPIDMNGKKMSWQGIALLPFIDETRLLTATRNQYKFLSEDEKRRNTRNDPVLLISNKNVNYEKFAKRLYKKGHEDNFQLVFHHFKSSLAGIVSTDTEGFKLHAKLPCPIQSGALPELSTNLFLKMQYKLLPLPSANKSLILNGFIPSEPMLTQHDFDSIVYKYGTRGFQRNQRNFGMEMKQNIVPVGPSGTTQYKPRIGGYRSFFYFGQLNQQMHQHNQVYQQNQAPTHDRYRNDRSDRGGRGYGRPDHDRGDYRGDYRGDGYRGGHRGGYRGGSRSRGPSSRGISSRGYSGPSRYNR

SEQ ID NO: 5685 - protein, 322 aa, Alcanivorax sp. DG881
MTGIYQDNSETIGNTPLVKINRITQGNILAKIESRNPAGSVKCRIGASMIWDAEKSGKLKPGMTLVEPTSGNTGIALAYVAAARGYDLVLTMPDSMSLERRKILKALGAKLVLTPGAKGMPGAIARAEELVQENPDSHLMLQQFNNPANPAIHEKTTGPEIWEATGGDIDVLVSGVGTGGTITGVARYIKNSQGKAITAVAVEPDSSTMISAALKGEEPTHGPHKIQGIGAGFVPKNLDMSVVDRAEQVSNEEAMEWAHKLMQEEGILAGISCGAAMCVADRLSQQPEFAGKTIVVVLPDSGERYLSSPLFADTFTEQELGQ

SEQ ID NO: 5686 - protein, 152 aa, Cyanobium sp. PCC 7001
MGLAVGDRAPLIALADQSGTERRSDQLGGRALVLFFYPKDDTPGCTMEACAFRDSFSDLQALGAEVWGVSGDDAASHQRFAQRHNLPFPLLVDRGNALRKAFGVPSVLGLLPGRVTYVIDGEGVIRHVFNNLLDGAAHRREALDALRALQAA

SEQ ID NO: 5687 - protein, 381 aa, Bacillus cereus G9241
MKLKIGITCYPSVGGSGVVGTELGKQLAERGHEIHFITSGLPFRLNKVYPNIYFHEVTVNQYSVFQYPPYDLALASKMAEVAQRENLDILHVHYAIPHAICAYLAKQMIGERIKIVTTLHGTDITVLGSDPSLNNLIRFGIEQSDVVTAVSHSLINETHELVKPNKDIQTVYNFIDERVYFKRDMTQLKKEYGISESEKILIHISNFRKVKRVQDVVQAFAKIVTEVDAKLLLVGDGPEFCTILQLVKNLHIEDRVLFLGKQDNVAELLAMSDLMLLLSEKESFGLVLLEAMACGVPCIGTRVGGIPEVIQHGDTGYLCEVGDTTGVAGQAIQLLKDEELHRNMGERARESVYEQFRSEKIVSQYEAIYYDVLRDDKNGKI

SEQ ID NO: 5688 - protein, 128 aa, Brassica oleracea var. alboglabra
DPFEGLLTPSSARDMAAFTNARVDWKETPEAHVFKADLPGLMKEEVKVEVEDKNILQISGERSKENEEKNDKWHRLERASGKFMRRFKLPENAKMEEVKATMENGVLTVTVPKAPEKKPEVKSIDISG

SEQ ID NO: 5689 - protein, 233 aa, Ammopiptanthus mongolicus
MAQAMSLTTTCPLLSQKAGYSAKLDNKVIAPCLVSFPSPKRSLARVGRVRAQASGDNKDNSVDVHVTKGEGDQGKAVEKKPRKAAMDISPFGLLDPWSPMRSMRQMLDTMDRIFEDTLAFPVRNMGGGEIRAPWDIKDEEHEIRMRFDMPGLSKEDVKVSVEDDVLVIKGDHKKEQGGDDSWSSKTYSSYDTRLMIPDNCEKDKVKAELKNGVLYITIPKTKVERKVIDVEIN

SEQ ID NO: 5690 - protein, 503 aa, Parvularcula bermudensis HTCC2503
MVDQSDTSDDRVRFVLNGEVRSIARPDPTSSLLSWLRYDARLTGTKEGCAEGDCGACTVVVGERRRGKIRYRALNACTLFLPMVDGREVITVEALSTGERLHPVQQAMVTCHGSQCGFCTPGFVMSLFARYEGKDDCMSGDLNDCLAGNLCRCTGYGPIQQAGDMMTSLPAEGLKIDEEAAHRRLDSLARTSPLAYRYDEPATATTKHFFAPKSLAALLSLKATYPNATLVAGATDVALWVNKDFRVLIEIISVNDVEELRSVTEDDTVLTIGAGVRYTDALGPLVALYPAFGRFLSRLGATQVRNSGTIGGNIANGSPIGDSPPALIALGATLVLASSSGERRLPLEEFFLDYGKQDLRPDEIVKAIIVPKRSPDQLVAFRKISKRFDQDISAVCGAFSLHVSEGIIRSARVAFGGMAATPRRAHGCEAALAGARLSMEGIAPALRALTKDFTPLSDLRATAAYRQAAAQALLAAMMREVDASTAPIDLYDIPPIAVEATNA

SEQ ID NO: 5691 - protein, 195 aa, Chlorobium tepidum TLS
MSVLVGRPAPDFNAAAVVNGSTFVDSCQLSAYRGKYVVLFFYPLDFTFVCPTELHAFQEKLDEFKKRNVEVLGCSVDSKFSHFAWLNTPRSKGGIQGVTYPLISDINKTIAKDYDVLTPDGSVALRGLFLIDKEGIVRHQVVNDLGIGRNIDEVLRIVDALQFTEEFGEVCPANWNKGDKTMKPTDEGLKEYFAE

SEQ ID NO: 5692 - protein, 424 aa, Cyanothece sp. PCC 7424
MYSQNKGKIALISVHGDPSIEIGKEEAGGQNVYVRQVGEALGRLGWQVDMFTRKIHPEQANIVEHTSNCRTIRLSAGPEKFIERDRLFDHLPEFVKSFLNFQGQTQTLYPLIHTNYWLSAWVGLELHKHHLFRQIHTYHSLGAVKYRSVTTIPLIANTRLSVEKTCLETADCIVATSPQEQEDMRSLVSSQGNITVIPCGTNVQHFASTERHSAREKLGFAPDAKVILYVGRFDPRKGIETLVRAVGRSEVRHPENLKLIIVGGSRPGHKDGRERDRIESIVKELGLEEITIFPGQISQSELPNYYAAADVCVIPSHYEPFGLVAIEAMASGIPVIASDVGGLKYTVVSQETGLLVEPKNEVAFADGINQILSDPSWAKTLGKAGQKRVLSYFSWDGVAEQLDQLYLSQLKQLHQDFFAVNVVS

SEQ ID NO: 5693 - protein, 788 aa, Parvularcula bermudensis HTCC2503
MPDHGEPQHPEQTREIRGGVRQSVAHESAVRHVSGTAKYIDDLPEPPGLLHLAFGVSTKAHATILNCDLSAVRNYPGVVAVLTADMIPGRNDIGPVIKDDPLFAENEVVFHGQPIFAVVAESYDGARRAASRAKVSYGDLPAYLDIKAASQHGSLIEETQHMGAPVEEVRRHIAEAPHRIRGDLTIGGQDHLYLEGQIAMAIPGEDRELHVFSSTQNPTEAQHLIAQVLGRADHDIVVETRRMGGGFGGKETHPALPATAAALAASLTGRPVKCRLTRDEDMIMTGKRHDFQAAYEAGIDDEGRMIGAHVELSSRCGHSTDLSMAVNDRAMFHVDNTYFLGLAAITSHRYRTHTVSNTAFRGFGGPQGMLAGERMMDQIAFELNADPLDIRLANLYRKGRNLTPYGQTVDDGIARELIERVALEANYRERRAAIDAFNRESPVLKRGIALTPVKFGISFTSTHLNQAGALVHVYLDGSVQVNHGGTEMGQGLMTKVAQVVAEEFQIDLERIRVTSTRTDKVPNTSATAASSGSDLNGMAAANAAREIKHRLTAFAADRYGVSPEEIHFRSGKVYVGNVPLTFTEIVAAAYRARISLSQTGFYRTPKIHYDRATHRGRPFYYYAYGAAVSEVAIDATTGESRVMKVDILHDVGRSLNPAIDRGQIEGGFIQGLGWLTSEELVYDSEGRLRTHAPSTYKIPTARDRPAAFTIDIWERGENKEETIHRSKAVGEPPFMLAISVFSALTHAVAAVGEHRVFPALQAPATPEAILMAIEDIRRRMEPGAKGVS

SEQ ID NO: 5694 - protein, 171 aa, Magnetospirillum magnetotacticum MS-1
MSPPRFRLNGCDRALSGSPDRSLLDILREDHGLMAAKPGCRIGRCGACTVLMEGRPVTACLVMGYRLEGAEILTADCAEAGPEVAVVRAALIDENAFQCGYCASGFVLALASLLGRAPEADEAEIRAALSGNLCRCTGYASILRAALTAQDRLRAARGSAGAARPHATRPG

SEQ ID NO: 5695 - protein, 322 aa, Solanum lycopersicum
MVILSKQTSFFNGVPLIDLSKPDSKNLIVNACEEFGFFKIINHDVPMEFISKLESEAIKFFSSPLSEKLKAGPADPFGYGNKQIGTNGDCGRVEHILVSTNSEFNYQKFASILGVNPENIRAAVNDYVSAVKKMSCDILEMLAEGLKIYPTNVFSKLLMDENSDSVFRLNHYPPCSEIERLNDNNNDLIGFGEHTDPQIISILRSNNTSGLQILLKDGHWISVPPDENSFFVNVGDSLQVMTNGRVKSVKHRVLANSVKSRLSMIYFGGPPLSEKIAPLASLMEGEDSSLYKEFTWFEYKKSAYKTRLADNRLILFEKIAAS

SEQ ID NO: 5696 - protein, 501 aa, Pichia pastoris
MSDNNQPLPPVSNSILEHIGKTPLVKLNRIPKILNLKPQVYAKVELFNSGGSIKDRIALRMVEQAEKEGRIKPGYTLIEPTSGNTGIGLALVGAVKGYRTIITLPEKMSNEKVAVLKALGAEIIRTPTEAAWDSPESHIGVARRLEKEIPNAVILDQYGNVNNPDAHFYTTGAEIWDQTNGKVTHGVAGAGTGGTITGIAKFLKSKNPNIQIIGADPHGSILALPESLNTSNEQYKVEGIGYDFIPEVLDREIVDTWYKTDDKDFFKLARQLISEEGILVGGSSGSALSAAVKIINDAKLDESAVVVVVCPDSIRSYLTKFADDDWMKLNGFTEDEPAPLKRKSSFSKDTLSSYTIKDLALKPVVSVTIDDSIESTINILQTKGFDQLPVLKNDKLAGIVTLSQLLRLLSNKKIHLTSKVESAYFDFSKLENFEKSYNINKESTNKRREYQKITTSTTLAKLNKFFETSSAAIVENDKGQPIHIVSKVDLLSFLASKGEFN

SEQ ID NO: 5697 - protein, 528 aa, Magnaporthe grisea 70-15
MAARGAQSVTESATDLIGNTPLVRLNKIPQSLGIKAQVFGKLELMNTGGSVKDRIALRMIEEAEKEGRIKPGDTLIEPTSGNTGIGLALVGAVKGYKTIITLPEKMSAEKVSVLKALGATIIRTPTQAAWDAPESHIGVAKRLLKEIPNSHILDQYSNPNNPLAHEHGTAEEIWAQTGGKITAVVAGAGTGGTISGLARGLRKHSKTVKVIAADPIGSILALPESLNDNGVNEPYKVEGIGYDFIPDVLDRELVDKWYKTEDRESFMYARRLIAEEGLLVGGSSGSAMAAMVRAVKDLNLGEDDVVVVVLPDSIRSYLSKFADDDWLAANDLLLPTPDSSVNGDTLDSPAVAEAQALHKSRARRASNPYGGATVRSLRLKPVTSVLADSKCSEAIETMRDKGFDQLPVVRDNKLVGLVTLGNMLSYVSRGRVKTNSPVSDVMFDFGRLDEVITDPRDVEGAAKMSTAHGRKKRNFVEITMNTPLDVLSKFLEWNSAAIVTEKSGEVSKPVAVVTKVDLLTWMMKELKA

SEQ ID NO: 5698 - protein, 221 aa, unidentified eubacterium SCB49
MDKENLLQEQVMPMPRIGDTAPDFEAVTTKGNIKMSDFAKDKWIVMFSHPADFTPVCTTEMSGFAIRKPEFDALNTALLGLSIDSIHAHLGWVQNVRENTGVYFDFPIIADIDMKVSKLYGMLQPNESETAAVRAVFFIDPSKKIRLVMYYPLNVGRNMDEILRALDALQTSDKYKVAMPLDWKRGDQVICPPPKTLDALNERLVDDTVEKVTWYLAKKGV

SEQ ID NO: 5699 - protein, 207 aa, Triticum aestivum
VTFRTRCTKKQVATGPEFPGYRRPTRPRLTTAAMACAFSASTVSTAAALVASPKPAGAPQCLSFPRAAARPSRLAAAGSRTARARSFVARAAAEYDLPLVGNKAPDFTAEAVFDQEFIHVKLSDYIGKKYVILFFYPLDFTFVCPTEITAFSDRHEEFDKINTEILGVSVDSVCSHLAWVQTERKSGGLGDLKNPLVSDVTTSISKS

SEQ ID NO: 5700 - protein, 240 aa, Zea mays; identical to SEQ ID NO: 3966

SEQ ID NO: 5701 - protein, 310 aa, Selenomonas ruminantium
MAKIYNSVTELIGNTPLLKANNFIEANDLQANILVKLEYLNPAGSVKDRIAKAMIEQAEKEGKITKDTVIIEPTSGNTGIGLASFAAARGYKAILTMPETMSVERRNLLKAYGAQIVLTDGAKGMKGAIAKAEELAKETPNAFIPSQFTNQANPAIHEATTGPEIWQDAEGKVDVFIAGVGTGGTLTGVGRYLKKQNAAVHIVAVEPESSPVLSQGTAGPHKIQGIGAGFVPETLDTKVYDEVLPISNEDAFKYGRQFAHSEGVLVGISAGAALAAAVQLAKRPEFAGKNIVALLPDTGDRYLSTELFND

SEQ ID NO: 5702 - protein, 222 aa, Mesorhizobium loti MAFF303099
MSLRIADTAPDFAAETTHGPISFHDWLGNSWGILFSHPKDFTPVCTTELGYMAKLKPEFDKRNVKIIGLSVDPVERHAGWADDIAETQGQAPNFPMIGDPMLAIAKLYDMLPATAGDSAEGRTAADNQTVRHVYVIGPDKKIKLMIAYPMTTGRNFDEILRVVDSMQLTAKHRVATPVNWRPGDDVIIAGSVSNDEAKVLYPDGWKQPKPYIRIVPQPHSNA

SEQ ID NO: 5703 - protein, 435 aa, Kineococcus radiotolerans SRS30216
MRRSSSVQRVALLSVHTSPLAQPGTGDAGGMNVYVVELATQLARRGVEVEVFTRRTSSEQPPVVETADGVRVRHVAAGPYEGLAKDDLPGQLCAFTAGMLHAEARHAERHYDLVHSHYWLSGQVGWLTADRWDVPLVHSMHTMAKVKNAALAEGDAPEPAGRVIGEQQVVEAADRLVANTDAERRELIDLYGADPAKVVVVPPGVDLATFAPAPGRAASRARLGVPADAEVLLFVGRIQPLKAPDLLVRATAELLREQPWRRSRLRVVVLGGPSGSGTAHPDSLADLVRSLDLEDVVRMAPPVARAELADHYRAADVVAVPSHNESFGLVALEAQACATPVVAAAVGGLRTAVLDDGAGAGTGEGTGLLVPDHTPRSWAAALRTLLDDPARRTAMGARAARRAQGFGWGATAEATLEVYRRAVQDRAAERGADPR

SEQ ID NO: 5704 - protein, 307 aa, Oceanobacillus iheyensis HTE831
MRVVNDVTELIGQTPMVKLNRLQPENAADIYVKLEMFNPSGSVKDRAASHMIRVAEEQGLIKQGATIIEPTSGNTGIGLAMAASAKGYKAIMIMPDNSTMERRNILKAYGAEVVLTPSEEKMPGSIRKALELQKSIPNSFIPQQFENVANPDVHRISTALEILEQMDNQLDAFVCTAGTGGTVTGTGETLKEKLPHVHVAVVEPEGSPVLSGGKPGPHKLVGTSPGFVPDILNTDVYDEIIQIKDEQAVTLLKDLAQKEGIFLGPSGAAAVYAAMEVAKKLGPNKKLVCIAPDTGERYLSMDMFDEK

SEQ ID NO: 5705 - protein, 308 aa, Geobacter sulfurreducens PCA
MEHPPFSLAGSIGATPLVELRHLNPNPRVRILAKLEGNNVGGSVKDRPALYMLAKAEESGELVPEKTILEPTSGNTGIALAMLGTVKGYRVKLVMPACVSLERRAVLEAYGAELVLSPHDEATDGAIRLAHRILEEEPDRYYMPNQYANPNNPLAHYETTAPEIFRDTGGAVDFFVAGMGTGGTLMGTSRYFREKKPSVRIVGVEPRLGHKVQGLKNMQEAIVPPIYHPEALDLKLTVHDEPAFDTARELAAREGLFVGMSSGAAVAGAVQVARDAPAGSTIVVLLPDRGDRYLSTVLFRSVCGKCPP

SEQ ID NO: 5706 - protein, 154 aa, Legionella pneumophila str. Lens
MKIGEMVPDFAFNATNNVQGHFNDYKGQIIVLYFYPKDATPGCTTEGQDFRDAYSQFKDLNTVIFGISRDSLKSHEQFKSKQNFPFELISDENETLCQTFDVIKMKSMYGKQVRGIERSTFIIDTQGVLTHEWRKVNVKGHVEEVLNAVRALVG

SEQ ID NO: 5707 - protein, 386 aa, Bacillus licheniformis ATCC 14580
MNDGSVRPKRVLHIVSGMNRGGAETMIMNIYRHTDRRHIQFDFISHREETCDYDPEIITRGGRVFYVPSIGRSGPVAYIKNIRRILVEKGPYAAVHAHTDFQTGFAALAARLAGVPVRVCHSHNTAWKPNPRFWDTWQLLAFRRLIFSSATALCACGKDAGRFLFGAKKMGENAVHLLQNGIELDRFKEANGVSKTNAKKSFGIKEDALVIGHVGRFFEQKNHAFLLGLAAYCKKSGIPFQAVFAGDGPLRRQMEEKAAALGVKDDILFLGVVEDIPALMQAFDVFVMPSLFEGLPLVLVEAQASGLPCIVSDNITEETDLGLGLLQRLSLNAGFERWAEDISRAAQPKKPAWPEIERSLAERGYDAKANLARLMDIYSISAAEGQ

SEQ ID NO: 5708 - protein, 382 aa, Bacillus licheniformis ATCC 14580
MTRTVLFCATVDYHFKAFHLPYLKWFKEQGWNVHIAAKGDMTLPYTDKKFDIDIRRSPLNASNIAAYRELARIIDEHRYSIIHCHTPMGGVLARLAARKQRKEGTKVIYTAHGFHFCQGAPLKNWLLYYPIEKGLSALTDCLITINEEDFVLAKGLRKALRTEKIHGIGVDTERFHPVSETEKMLLRKTYGFKEDDFILIYPAELNANKNQALLIETAAALKDRAPNLKVVFAGKGQMEQKYRNHAEQKGVSSLVMFAGFQKNIHEWIQLADVSVASSIREGLGMNLLEGMASGKPAVAADNRGHREVIQEGVNGFLVPQGDAGTFSDRILQLYRLPSLRKKMGDAGRRTAAAFSQQRTVKEMAGIYSSFMDNETVERRLKG

SEQ ID NO: 5709 - protein, 378 aa, Xanthomonas axonopodis pv. citri str. 306
MRYAIVTETYPPEVNGVALTVHGLETGLRARGHQVDVVRPRQSADTAPTDALLVRGASLPRYPGLKFGLPATQRLLRHWRSTQPDAIYVATEGPLGWSAMRAARRLGIPVATGFHTRFDEYLPDYGAAWLQGTALRWMRRFHNQADATLVPTRELQQFLRNDGFERVQLLARAVDSQQFDPNRRDFALRADWGIEGEGFAAIYVGRIASEKNLPLAVRAFRKLQQIRPKARFVWVGDGPAREKLAHDNPDFIFCGVQRGDALARHFASGDLFLFPSRSETFGNVTLEAMASGVATVAFDYGAAREYLRNGHTGAAVDNDEAFIQAAVALTEDDALRRRMGTAAAQAMKKLHPDNVVSDFEALLLGISAARGRYVVNAA

SEQ ID NO: 5710 - protein, 319 aa, Xanthomonas axonopodis pv. citri str. 306
MALYDNILDTIGRTPVVKLQRLAPDNVTLYVKVESFNPGGSVKDRLALAIILDAEQRGLLKPGDTIVEATSGNTGVALAMVAAARGYKFVATMVETFSIERRKLMRAYGAKVILTPAAERGSGMVRKAKELAEQHGWFLASQFANPANPAYHRNTTAAEILRDFAGHRLDHFVTGWGTGGTLTGVGEVLSVARPEVRITASEPAGAALLQGQDWKPHKIQGWTPDFIPEVLNREVAHEVLSVEDTDAITVARRLAAEEGIFTGISGGATVATALRVAEGAVPGAVILAMLPDTGERYFSTPLFADINEGSDDDWLAGLP

SEQ ID NO: 5711 - protein, 113 aa, Zea mays
MSQTGEAQVPLLQTQEADAEWSSKPRRIALFVEPSPFALVSAFSSRPFSAASQIRVDRIGVYISGYKNRFQNFIKHLREMGDEVLVVTTHKGAPEEFHGAKVIGSWSKREDKV

SEQ ID NO: 5712 - protein, 331 aa, Solanum lycopersicum
MVVLTKPAITHFPIVKNSFKSPSYINDIPVIDLSKANSKNLIVNACEEFGFFKVINHDVPMEFISKLESEAVKFFSSPLSEKLKAGPADPFGYGNKKIGQNGDIGWVEYILLSTNSEFNYQKFASVLGVNPENIRAAVNDYVSSVKKMSCEILEKLAEGLKIQPTNVLSKLLMDEKSDSVFRLNHYPPCPDIQEFNAKNLIGFGEHTDPQIMSILRSNNTSGLQILLKNGNWFSVPSDQNSFFVNVGDSLQVMTNGRFKSVKHRVLTNSVKSRLSMIYFGGPPLSEKIAPLPSLMEGKDSLYKEFTWFEYKKSAYKTRLADNRLVLFEKSL

SEQ ID NO: 5713 - protein, 327 aa, Leifsonia xyli subsp. xyli str. CTCB07
MTALATRPADPASSLSPGEVCDSVAALIGNTPLVELRSLTAGLGARILVKLEGRNLGGSSKDRTALSMIRTAEASGALSPGATIVEATSENTGIGLALIGRLTGHPVIIVHSADIADEKRKVLAAYGPRLVEALWDAAPDDPANPRAVADRIAQEIPGAWRPAQFANTANPAAHYRGTGPEIWRQTAGRVTHFVASVGTGGTVSGAGRYLKEASGGAVNVVGANPVGSTYGGGQAGRILVDGVGTAWPREFWPENFDPAVVDAVDTVEDAAVYCTLRRLAAEEELLLGPSVGARCRRRAAAGAVGGAGRGHRGRRPRRRGELPDEGF

SEQ ID NO: 5714 - protein, 152 aa, Ralstonia eutropha JMP134
MTTLNINGKAQEVDADPSTPLLWALRDNLDLTGTKFGCGMAACGACTVHINGQATRSCVTPISAAASARITTIEGVSGDKVGRAVLDAWIKHDVAQCGYCQNGQVMSAVGLLRNKPKPTDADIDQAMAGNLCRCGTYQRIRAAIKDAARALA

SEQ ID NO: 5715 - protein, 198 aa, Corynebacterium diphtheriae NCTC 13129
MSILTVGEKFPEFNLTALKGGDLHDVNASQPEDYFETVSLDKYEGKWKVVFFYPKDFTFVCPTEIAAFGKLDEEFQDRDTQILGGSIDNEFSHFNWRATHPELKTVPFPLFSDIKHDLIKALGVENEEGVADRATFIIDPDGIIQFVSVTPDAVGRNVDEVLRVLDALQSEEVCACNWQKNDPTKNIDKFAELEKGLN

SEQ ID NO: 5716 - protein, 300 aa, Pseudomonas fluorescens Pf-5
MTLQYPTIADCVGNTPLVRLQRLPGATSNTLLLKLEGNNPAGSVKDRPALSMITRAELRGQIQAGDTLIEATSGNTGIALAMAAAIKGYKMILIMPDNSSAERKAAMTAYGAELILVSQEEGMEGARDLAERMQAEGRGKVLDQFANGDNPEAHYSGTGPEIWRQTQGSITHFISSMGTTGTIMGTSRYLKEQNPAVQIVGLQPMEGSAIPGIRRWPEQYLPKIYQASRVDRIVDMAQSEAEDVTRRLAREEGIFCGVSSGGAVAAMLRLSREVENAVMVAIICDRGDRYLSTGIFDAPN

SEQ ID NO: 5717 - protein, 467 aa, Frankia sp. CcI3
MRIALLSYRSLPTCGGQGVYVRHLSRELVALGHRVQVVSGPPYPVLEEGVGLTELPSLDLYRDSDPFRWPGLAEFHGLPDVVEFAMMRTGQFSEPLAFSLRACQALRPRASGGRPPFDIVHDNQGLGYGLLALRAALRPYRIPVVGTVHHPITVDRRLHLAAATTFTSRLGLRRWYSFLPMQARVARGLDGIVIPSESSRREIIADMNLPPTVMRTVPLGVDADVFTPAPAGNPAVPGRVVVVTSADVPLKGLLVLLEALAKLRVDRSAHLVCVGKVREGGTAQRQVAELGLADAVTFRSNMPEPELVDLLRSAEVAVVPSLYEGFSLPAVEEMACGIPLVATTAGALPEVAGPDGEAALLVPPGDAGALADAIGSLLDDPERRARMGAAGRRRVEARFSWRAAAAATADWYAERIAAVGGTPTSPVPAPGPGPGPAAQWTPAPLSTPGAVTPGAAASAPASSTLTG

SEQ ID NO: 5718 - protein, 187 aa, Xanthomonas campestris pv. campestris str. ATCC 33913
MSLINTQVQPFKANAYHNGNFIEVTEASLKGKWSVLIFMPAAFTFNCPTEVEDAADNYAAFQKAGAEVYIVTTDTHFSHKVWHETSPAVGKAQFPLIGDPAHKLTRAFGVHIEEEGLALRGTFIINPEGVIKTLEIHDNSIARDVTETLRKLTAAQFVANNPGQVCPAKWKEGAKTLAPSLDLVGKI

SEQ ID NO: 5719 - protein, 484 aa, Deinococcus radiodurans R1
MNTFELTVNGAARRVRDVPPHTTLLHWLRDQGLTGCKEGCAEGECGACAVLVARPDGEGADTRWESVNACLVTLAALSGQEVVTAEGLGSPADLHPVQRELAGRGGSQCGYCTPGFVTSMAAEYYRERTPQNHGAPNGFDLHALSGNLCRCTGYRPIRDAAYALGTPDGEDPLAQRRTQPAPAPQATELVTPQGNFYRPLALADALDLMAQHPGARLLAGGTDWNVDVNLRHARAETVIAVDALPELRELKWSTGPLDTGTLEIGAGLNLSDIERRLGGRVPLLAQLWPQFASRLIRNSATLGGNLGTASPIGDSPPALLALDASLVLVSSGGERTVPLAEYFTGYRQTALQPGELIRAVRIPLPLSPLTAFHKIAKRRFDDISSVAVAFALDVQGGVVHKARIGLGGVAATPLRAYETEQALEGQPWTEATVQRAARALRGEGTPMSDHRASAEYRAAMLGQALLRFFYESQQGESDVREAQA

SEQ ID NO: 5720 - protein, 273 aa, Arabidopsis thaliana; identical to SEQ ID NO: 3316

SEQ ID NO: 5721 - protein, 915 aa, Sulfitobacter sp. EE-36
MDKPTTTEVTSFTLNGSIAQVEPLPGERLSYALRERLDRKDVKIGCNAGDCGACTVLVDGAPVCACLMPVQQAVGRQVETLAGLVKTDHDAQALMQSFQHHQAAQCGICTPGMMVSAVALLREVPQPSAAQVQDALGGVLCRCTGYRKIIDAVVGAHAADGLTVASTALGQPARRLDGQAKVDGSEAFGDDVAPAGALVARVIRAPHASAGFTFGDLEAWRSAQPGIHCILTADDVPGLNAFGVIPGFIDQPVFAVNHIRFRGEAVACVVGEAEAMIALDLESFPVRWVPQTALADTDAATAPDAPQLFEDRKGNIMCGGFVQCGDVEAALDAADVTFEAQYTTSFVEHGYIEPEAGFAQVIDGRIHVHACTQAPGMDREALAAILDRPMADIRIVPTAVGGGFGSKIDLSLQPFIALAALKTARPVRMTYARAETMQSTTKRHPAQITIKVGAKADGTLSGLRFDGDFNTGAYASWGPTVANRVPVHASGPYHIPDYRARSRAVHTHCPPAGAFRGFGVPQSAIAQETAFDLLAEKLGLDPLEFRLKNALADGVPTVCGQVFDQGVGIAPCLEALRPAWEEAKAECARFNTRNDTVKRGVGIAGAWYGCGNTSLPNPSTILAGVRPDGTVVLHQGAMDIGQGANTVIPQIFAQALGLSVEGIKILGGDTDITPDAGKTSASRQTFVSGNAAVRTGEALRAQILRQVNAGPAAQIGCQDGQLTVTDGGRTQRLDLTRLPVDAQGYVLQAQESYDPPVKPLDENGQGVPYAQFGYAAHLVVVEVDIALGLCRPLRFVAAHDVGRAINPLLVEGQVQGGIAQGLGMALMEEYIPGRTENLHDYLVPTIGDVPPIETLILEVADAHGPYGAKGLGEHVLIPTAPAILNAIYHATGARVTQTPATPTRLRAALKEAGHA

SEQ ID NO: 5722 - protein, 344 aa, Chromobacterium violaceum ATCC 12472
MRIMIVTDAWKPQVNGVVRSLTETVRELDGFGHQVNMITPLEFRTIPCPTYPDIRLSLLPYRQVAQRIAGFAPDAIHIATEGPLGLAARRFCLREGLAFTSAYHTRFPEYIHARCRLPLSASYAWMRRFHNASQAVMVPTRSIANDLEARGFGNVKLWSRGVDTAMFSPGERQRLDESAPPRFVYIGRVAVEKNIEAFLKLDLPGSKWVVGDGPLLPRLKQQYPEVYFAGVFPQHELARFYRAADVFVFPSLTDTFGLVLLEAMACGSPVAAFPVAGPLDVVGDSGAGVLDWDLRAACLKALELDRAHVRRVAEGYSWQAASRQFESHLRPNAPASAGLSPIAD

SEQ ID NO: 5723 - protein, 387 aa, Chlorobium tepidum TLS
MFCKVMKIGISCHHTYGGSGAVATELGKALAMKGHTVHFFSQAAPFRLGLYSRNIYCHEIEAMNYPLFETPYHSLALASKIAEVAFYEKLDVVHAHYAIPHAISAMLARQMLEEKCPAAECFRIVTTLHGTDITIVGADRSMSDAVRLAINKSDGVTAVSGYLRDETIRMFTPRKKIEVIHNFVDTAVFKRLPGRRDLLGLDGGKVVIHISNFRPVKRIMDVLAVFESIRREIPATLLLVGDGPDRSEAETWVRNYGIGDRVRFLGKLDDIVPLLSIADLMLMPSNVESFGLAALEAMACGVPVVVTDAGGFPEFVRQGVDGFRHPHGDIEGMSRSALSILRDDEVWQRFSGAAANQAGRFKTALKVKEYEAFYRRLIDEARERKAQ

SEQ ID NO: 5724 - protein, 227 aa, Arabidopsis thaliana; identical to SEQ ID NO: 3283

SEQ ID NO: 5725 - protein, 648 aa, Nicotiana tabacum
MVDLLGSNSQLKHFEGDNALCREIWRACSGSLLDVPKLGERVHYFPRLHMDQLEQSSNLEWIQGLQLSHLPRKILCRVLHIRLLVEHDTEEVYAETILLPNQEQNEPSTPEFCPLEPPRPQYQSFCKALTTSDIKSNWGLSVHRKDANKCFPPLDMMQEKPTQELIVNDLQGNEWRFKHVFQGQPRRHLLKHGWSTFVTSKKLLAGDLVVFLRDETGKLHVGIRRLSYQCNSVGSSTFSRQSMEGVLAVASHAFATRSLFSVYYKPCYNRSSQFIMSLSNYFEGGNHGPGVGTISRTQHTSLDSHVKRTSGMDQMSFPQGQHKTNLLLEEDQYMQDSEAISNSARPTMMALEIGQQSVESLNNIHHIEDSVLQPHTAVARENNERFIPNETVAIQAQDENFDELFKETDFPDFVNTSLDTITLDWDSDLRSTIQDFDEWLEETNPPGLQTCSEDHSRQTSSILEQPTSSQVMSISSTPSRIPYEGPGRGDEQVPWGSYQVARRCLPILNRVVSRYPDSLVNFKVTSSIFQSVCLEILAELVYFLDNLTVMNLSKDQFNVAGQHLWDLKLSGIELGWLEKRLAHIDGAFSMENLLQRRQVVTLRMGDTLATFRQLDEELGCINKELHQLSLKVGPNPPMRFHPVLEGLL

SEQ ID NO: 5726 - protein, 413 aa, Mycobacterium smegmatis str. MC2 155
MRIALLSYRSKTHCGGQGVYVRHLSSGLAELGHDVEVFSGQPYPEGLDPRVTLTKVPSLDLYREPDPFRVPHPREIRDGIDALELLTMWSAGFPEPRTFTMRAARILAARRDEFDVVHDNQSLGTGLLKIEKLGLPVVATVHHPITRDKVVDVAAAKWWRKPLVRRWYGFAEMQKKVARQIPELLTVSSSSAADIAADFGVTSDQLHIVPLGVNTELFKPAEQRVSGRIIAIASADVPLKGVSHLLHAVARLRVERNLDLQLVSKLEPNGPTEKLIAELGISDIVHISSGLSDQELAGLLASAEVACIPSLYEGFSLPAVEAMASGTPIVASRAGALPEVVGTDGSCARLVRPADVDELTAVLGELLDSPAERRRLGAAGRQRALDVFSWESVAAQTVAVYERAQNRMGVKAC

SEQ ID NO: 5727 - protein, 323 aa, Escherichia coli
MSKIFEDNSLTIGHTPLVRLNRIGNGRILAKVESRNPSFSVKCRIGANMIWDAEKRGVLKPGVELVEPTSGNTGIALAYVAAARGYKLTLTMPETMSIERRKLLKALGANLVLTEGAKGMKGAIQKAEEIVASNPEKYLLLQQFSNPANPEIHEKTTGPEIWEDTDGQVDVFIAGVGTGGTWTGVTPYIKGTKGKTDLISVAVEPTDSPVIAQALAGEEIKPGPHKIQGIGAGFIPANLDLKLVDKVIGITNEEAISTARRLMEEEGILAGISSGAAVAAALKLQEDESFTNKNIVVILPSSGERYLSTALFADLFTEKELQQ

SEQ ID NO: 5728 - protein, 165 aa, Arabidopsis thaliana
  misc_feature (15)..(15): Xaa can be any naturally occurring amino acid
  misc_feature (22)..(22): Xaa can be any naturally occurring amino acid
  misc_feature (32)..(32): Xaa can be any naturally occurring amino acid
  misc_feature (42)..(42): Xaa can be any naturally occurring amino acid
  misc_feature (48)..(48): Xaa can be any naturally occurring amino acid
  misc_feature (64)..(66): Xaa can be any naturally occurring amino acid
  misc_feature (71)..(71): Xaa can be any naturally occurring amino acid
  misc_feature (74)..(74): Xaa can be any naturally occurring amino acid
  misc_feature (77)..(77): Xaa can be any naturally occurring amino acid
  misc_feature (82)..(82): Xaa can be any naturally occurring amino acid
  misc_feature (88)..(88): Xaa can be any naturally occurring amino acid
  misc_feature (91)..(91): Xaa can be any naturally occurring amino acid
  misc_feature (101)..(101): Xaa can be any naturally occurring amino acid
  misc_feature (103)..(103): Xaa can be any naturally occurring amino acid
  misc_feature (108)..(108): Xaa can be any naturally occurring amino acid
  misc_feature (112)..(112): Xaa can be any naturally occurring amino acid
  misc_feature (116)..(118): Xaa can be any naturally occurring amino acid
  misc_feature (120)..(121): Xaa can be any naturally occurring amino acid
  misc_feature (123)..(123): Xaa can be any naturally occurring amino acid
  misc_feature (127)..(128): Xaa can be any naturally occurring amino acid
  misc_feature (130)..(131): Xaa can be any naturally occurring amino acid
  misc_feature (135)..(135): Xaa can be any naturally occurring amino acid
  misc_feature (137)..(137): Xaa can be any naturally occurring amino acid
  misc_feature (142)..(142): Xaa can be any naturally occurring amino acid
  misc_feature (144)..(144): Xaa can be any naturally occurring amino acid
  misc_feature (146)..(146): Xaa can be any naturally occurring amino acid
  misc_feature (148)..(148): Xaa can be any naturally occurring amino acid
  misc_feature (153)..(153): Xaa can be any naturally occurring amino acid
  misc_feature (159)..(160): Xaa can be any naturally occurring amino acid
KVSSPPPPPSQRLSXVSSSSTXLLSSSRVLLXSKSSLLSPTXSDPRTXHSSSGSSSSLCCGVSXXXSLSTXRSXSRXNFGVXAQADDXPLXGNKAPDFEAXAXFDQEXIKAXLSEXXXRXXMXILFXXPXXFTCXCXTDITXFXDXYXQFEKXKQPKNXXVAVDS

SEQ ID NO: 5729 - protein, 347 aa, Alkaliphilus metalliredigens QYMF
MYSRCVEDRIKDLSNLIGNTPLLEIEFTYKGERRRIFAKAEHYNLTGSIKDRMALHIIKKGYESGELKVGDIIAEATSGNTGIAFSAIGSSLGHNVTIFMPDWMSEERKNLMKSYGADIQLVSKEQGGFLGSIAMAEEFAKDNENVFLPCQFSNENNCQAHYLTTGPEIWTQLQDLNLIPDGIVAGVGTGGTIMGIGNYLKEKNPDVKVYPLEPISSPTLTTGYKVGNHRMQGISDEFIPSIVKLNELDEVIAVDDGDAIIMAQKLANALGIGVGISSGGNFLGALRVQEILGKECIIVTIFSDDNKKYLSTDLMKKEPIKEGFMSTEVELISVISHKRQCVTCLAK

SEQ ID NO: 5730 - protein, 320 aa, Dehalococcoides sp. VS
MENRASEPNTRKGCGIASNITELIGNTPLVRLNKIGSGLKAEIILKLESFNPTHSAKDRPALHMIEKAEQEGKLSPGGIIIESTSGNTGIALAAVCAAKGYRLMLTMPENFSVERRRLLRLLGAELVLTPAELGMQGAIEKASELKSRLPQAFIPNQFENPANPESHYRTTAEEIWWDTDGRIDILVAGVGTGGTLSGTARGLKAAKPSIQIVAVEPAESPVISGGKPHSHLIQGIGAGFIPRILSLEMIDKVIRVPGEEAVKMALRLASEEGIMAGISSGAALWAALETAKQAENSGKLIVAIMPDSGERYLSSLPLGD

SEQ ID NO: 5731 - protein, 329 aa, Bdellovibrio bacteriovorus HD100
MRIYSDITKTIGQTPLIEMQRIGKGLPGRLLLKLEFFNPLGSVKDRIGLAMIEDAERSGQLKPGMKIIEPTSGNTGIALAFVAAAKGYDITLTMPETMSQERRTLLLMLGAKIILTPGPLGMKGAIAKAMELLEQTPNAWMPRQFDNPANPAIHKETTALEIWNDTDGKVDMVVSGVGTSGTITGVGTVLKAKNKNIKIIAVEPAESPVLSGGKPGPHKIQGLGAGFVPSVMDRSVVDGVEQVSSEESIKVAREVIKKEGIPVGISSGAAISAGLRQAAKEENRGKNIVVIIPSTTERYLSTLLAEQERAEALSLPVATVDENYLSKVK

SEQ ID NO: 5732 - protein, 220 aa, Oryza sativa Indica Group
MPGLTIGDTVPNLELDSTHGKIRIHDFVGDTYIILFSHPGDFTPVCTTELAAMAGYAKEFDKRGVKLLGISCDDVQSHKDWIKDIEAYKPGNRVTYPIMADPSREAIKQLNMVDPDEKDSNGGHLPSRALHIVGPDKKVKLSFLYPSCVGRNMDEVVRAVDALQTAAKHAVATPVNWKPGERVVIPPGVSDDEAKEKFPQGFDTADLPSGKGYLRFTKVG

SEQ ID NO: 5733 - protein, 237 aa, Triticum aestivum
MAAANAPFALSRLSPAARLPFRAWRAARPAPVWTGRTRPLSVASAAQENRDNSVDVQVSQAQNAGNQQGNAVQRRPRRAGFDISPFGLVDPMSPMRTMRQMLDTMDRLFDDAVGFPTARSPARRAKTPRMPWDIMEDEKEVKMRFDMPGLSREEVRVMVEDDALVIRGEHKKEAGEGQGEGGDGWWKERSLSSYDMRLALPDECDKSQVRAELKNGVLLVSVPKRETERKVIDVQVQ

SEQ ID NO: 5734 - protein, 220 aa, Oryza sativa Indica Group
MPGLTLGDVVPDLELDTTHGKIRLHDFVGDAYAIIFSHPADFTPVCTTELSEMAGYAGEFDKRGVKLLGFSCDDVESHKDWIKDIEAYKPGRRVGFPIVADPDREAIRQLNMIDADEKDTAGGELPNRALHIVGPDKKVKLSFLFPACTGRNMAEVLRATDALLTAARHRVATPVNWKPGERVVIPPGVSDEEAKARFPAGFETAQLPSNKCYLRFTQVD

SEQ ID NO: 5735 - protein, 378 aa, Geobacillus kaustophilus HTA426
MKLKIGIVCYPTVGGSGVVATELGKLLAERGHEIHFISSSMPFRLNKVYGNIYYHEVSVNQYSVFQYPPYDLALASKIAEVAKRERLDVLHAHYAVPHAVCAVLARQMVGELPIITTLHGTDITVLGYDPSLSDMIKFGIEQSDIVTAVSDALARQTYELLDVQATIHTVYNFVDERVYRRREAGHLRREYGIRDDERVVIHVSNFRKVKRVPDVVRAFAIVRRHVPAKLLLVGDGPEMTVVCRLVKELGLQDDVRFLGKQDKLEELYSISDVMMLLSEKESFGLVLLEAMACGVPCIGTAIGGIPEVIEDGKTGFLCPLGDVKEAARQAMALLTDCRLHAEMARQAVQTVERKFRSADIVGQYEQLYASLAARKVKR

SEQ ID NO: 5736 - protein, 387 aa, Corynebacterium glutamicum ATCC 13032
MILRNRSRCRSSRENVILFGATTDMSNIFYEGILQNLIQDGWDVHLVSNPGPVGKKLLNGKAHTIEMSREISIGTDVKSLFNWVLLLRKIRPRVLIVGTPKASLLGVVAARIARVPRIVYVAHGLRSETVLGLKKKILVFLEYLTQLFAHQTLAVSHSLKKAIEDAHPRFKGRVQVLGYGSMNGVELDRFRVPSLEEKLSARNALNLPSKSVIVGFVGRINKDKGGDLLAALTKHEAFTRLRLHLLIIGELEDDDLREAFIKLVNEGQVTITGWIDFPEEPLAAVDVLLHPTQREGLGMSLLEAQAMGVPVLTNAVTGTVDAVTSGEGGFFADDDSVESWVSKIDLLVSDPKLRDRMGRAGRQFVSARFNRDDVAARFSHFVEQFKK

SEQ ID NO: 5737 - protein, 699 aa, Debaryomyces hansenii
MISYVVEDKHVEVFMFLADAIVHETTPENIEPFLDENFDKSKLEEYCQSFTKPSEVPGFRDCVKECVNCTPVSSSRTFVLLMNVLDSRVLAPILTGSITLIRDMGYKEREELLRSWQNSNLESFRRLFKLLYSLSITTFIKLCPDLHNQVIGYPGKEMRDEIYENIEIDPFRYSMLEHPTGDELYAPNIDVLIIGSGSGAGVVAHTLSNDGHKCLVLEKGKYFHPTELVFDEKDGNKNLYESRGVLTTVNQQTMILAGSTFGGGSTVNWSACLKTPFKVRKEWYDDYGVDWAANELYDKCADYVWNKMGATLDSVKHSFSNQVILNGAEKLGYTAKPVEQNNGNHPNHSCGFCHLGCKFNVKQGSSACWFRDASEKGCQFMDQVKVVKVLHSGGKAVGALCQDTQTGHEFTIKGPKKFVVCGGSLNTPVVLQNSGFKNKNIGANLKLHPVTVIFGDFGKDNNTKPFNESILTTVCTEVDDLDGKAHGAKIETVLHTPLLESVFMPWQSSDKARQDLLRYNHLAAMLIITRDKSSGTIRADATKPDSLIIDYSINKYDRNALLQAILVSADMLYVEGAKEIIHPQRWVPNFQSNKPKEERSVKDRDYVQWRESVSKTKLDTFGCPYGSAHQMSSCRISGKGPKYGACDNKGRLYECKNVYVADASAMPTASGANPMISTMSIARLIALGISKDLQPQARL

SEQ ID NO: 5738 - protein, 155 aa, Codonopsis lanceolata
MALIPSIFGGRRSNVFDPFSHDIWDPFQGLSSALANARDQETAAIANTRIDWKETPEAHVFKADLPGLKKEEIKVEVEDGRVLQISGERSKEQEEKTDTWHRVERSVGKFHRRFRLPENAKVDQVTASMENGVLTVTVPKKEEKKPEVKAIDISG

SEQ ID NO: 5739 - protein, 250 aa, Aeropyrum pernix K1
MPGSIPLIGERFPEMEVTTDHGVIKLPDHYVSQGKWFVLFSHPADFTPVCTTEFVSFARRYEDFQRLGVDLIGLSVDSVFSHIKWKEWIERHIGVRIPFPIIADPQGTVARRLGLLHAESATHTVRGVFIVDARGVIRTMLYYPMELGRLVDEILRIVKALKLGDSLKRAVPADWPNNEIIGEGLIVPPPTTEDQARARMESGQYRCLDWWFCWDTPASRDDVEEARRYLRRAAEKPAKLLYEEARTHLH

SEQ ID NO: 5740 - protein, 385 aa, Mycobacterium abscessus
MTFHPGGLRQRILLVTNDFPPRPGGIQSYLQEMVSRLAGSHEVTVYAPRWKGCERYDAAAEYQVVRHPTSLMLPGPGVRRRMVDLIRAQHADVVWFGAAAPLALLSSAAKAAGAAVTAASTHGHEVGWSMLPVARSALRQIGESTDVITYVSRYTRGRFASAFGPRAALEYLPSGVDTNRFCPDPAAREELRERYGLGDRPTIVCVSRLVPRKGQDMLIEALPAIRERVDGAALVIVGGGPYAEPLRALANRFGVDEHVVFTGGVPWEELPAHHAMGDVFAMPCRTRGAGLDVEGLGIVFLEASACGVPVVAGNSGGAPETVRAGETGVVVDGRSVSAITDAIVQILVDPARAAAMGAAGRAWVTEQWRWDHHAARFADLVSGSA

SEQ ID NO: 5741 - protein, 217 aa, Oryza sativa; identical to SEQ ID NO: 4070

SEQ ID NO: 5742 - protein, 165 aa, Alteromonadales bacterium TW-7
MITLTVNGNKHEFTGDPSTPVLWYLRDELNLTGPKFGCGMAQCGACTIHIDGVAQRSCVLPVSAVVGRNITSIEGLSEQGDHPVQKAWVEHKVPQCGFCQCGQIMQAASLLAANPNPTDDEIVSNMSGNICRCGTYPRIHKAIKSAAKTIAGVEYFDPNEQGEEV

SEQ ID NO: 5743 - protein, 657 aa, Mycobacterium marinum M
MNSPVTDTHRAVLAALADTVVPSLDRSDDPTRFWSLGGSDLHADVAVGFTLAELPEQQRAGMLALLDGLHAQGFVAASQSARERLIGDFAQLGPQPAAAMNALVSLTLAVAYAGPDPQTASNPMWEGFGYPGAPRIEPGGDEAPVPFVPDGPELSADVCVVGSGAGGGLIAGVLAQAGLDVVVLEAGGNFNEPDFSGLELPAFQQMFWRGGPTPTADFNVTLLAGATLGGGPTINWSNCLRTPAQVREQWAQEFGLKDVDGPEFDRHLDAVWERLGVNPDCSDLNGPHERMRDGAQELGWSFKTLFRNADPAAYSPDTAGYIGLGDRSGAKLDVRRTYLRDAVHSGARVIARCRAERVLTRDGRATGVQASFVDPRTGASVPLQVNAPRVVAACGSLESPALLLRSGIGGPAVGRYLHLHPVVAMLALHDQPQQPWWGGPMTALVDEFSDIEDGYGFLIEGAQWATSIIAGGMARATFEEHKETMARLGNAAWLIGLARDRGHGTVTIDDAGEAVVHYDLTDELDVRIAHQSIEAQIRIHAAGGAREIVPFAATGARWRAGDDLEAFIAEMQRIPLGAGGHRLFSAHQMSSCRMGSDPATSVANEWGELHDTPGVFIGDASALPSASGANPMISTMALAHRTAEAIAAIAVPGGGNA

SEQ ID NO: 5744 - protein, 153 aa, Geobacter metallireducens GS-15
MKRITFKVNGVTHSFAGEPEMPLLWYLRDELHLTGTKYGCGKGLCGACTVQINGEATRSCITTMKSVAGKKIVTIEGLSARGDHPLQKAWQELNVPQCGYCQSGQIMQAAALLKGKPHPTDQEIDEAMGGNICRCGTYERIRQGIKRAAEVKP

SEQ ID NO: 5745 - protein, 211 aa, Streptomyces coelicolor A3(2)
MSSGGRWIRGRHRSTGPSRKVTDAMDSQHDSAPASRPPESSRSQTTLRVNGKPHTLTVDHRRVLLDLLREDLELAGAKKGCDHGQCGACTVLVDGRRVNSCLLFAVALDGCEITTVEGLAGDGEELHPLQRAFLDRDAFQCGYCTPGQICSAVGALAEAAAGHPSHVTDPAVPSGEPVALDREEIRERLSGNLCRCGAYPRIADAVEDVIP

SEQ ID NO: 5746 - protein, 745 aa, marine gamma proteobacterium HTCC2080
MNAKQEFKIVGTRPIRPDGLDKVTGRARYGADLNMQGQIYGHILRSPHAHANIKSIDCSNALAMEGVLAVMTGEDLAEPGNIVLGSGEGAIALKDLIPMVMSQGKVLFHAQAVAAVAATTAALAAEAAAAIEIVYEVLPAVTDMHEALADGAPILHSDRFPDGKPKEPTNLAAEITMQVGEPDAAFERADVIVERTYSVPMCHQGYIEPHACVVRVDAAKRVDLWCCTQGHFTVRQYTAAVTGISLGNIRVTPSEIGGGFGGKTTVYLEPIAVILAQKSGRPVKIVMDRGDVFRTTGPAPGATTRVKLGATKDGRLIAADVECLMDSGAYNGNPAGIPAFMATACYKLTDARSSGRSVYTNKPKIHAYRAPSMPQVTLAFELVINEVAAELKIDPLEFRLNNAVEEGDVNMMGAPYKRIGLRECLEAARSHPHYQSSVADGAGRGIAAGYWINAGMQSSATLNVSPDGSVSLLTGSPDIGGSRASMAIMGAEVLGIPLETIYPQVVATDAVGHCDVTGGSRTTLATGQAVIQAADELVAELCRRVALEWDVPEDEVMWSDGAAHHGEKSLSFKDLASRASAMGGPLTVSSSLNSTSASPGFGVHICDAEVDKETGRTTITRYTVVQDAGKAIHPTYVEGQMQGGAAQGIGWALNEEYVYNDQGVLENAGFLDYRIPVASDLPFIDTVIVEVPNPLHPYGVKGVGEVPIVPPMPAVAQAVFDSGNIRVMDLPLNPAKVAAAIIEAP

SEQ ID NO: 5747 - protein, 375 aa, Alteromonadales bacterium TW-7
MKILFIAKNIPLPSYSENDIILKLAAGLEENQVDTQLLYPKELFPSFLSFLSKRMKASSSLNREFCVGQHSIKTVEYIRVFLVPKFEWALSMLPLKVDSSYRPDIIHAHFIFPDLMIAHGLKKEREKIVVTVRQGDLNNIKSSFYNLNLFKKYLAKTDLIIAPSPRIKFEVEKLLENRSTVQVIPNFIDDDFFTFPSIAKEIKHAGEDKIKLICVANLIERKNIDWLINAHRKRANYFDLVIVGSGPELNYLRTIADKSVLFTGRLERKAIIEKLDESDVFVLPSDNETFGLVYVEAMSRGKPIIGKRGTGLDGFCSEALYFVDDESDLLDALHSLRILLKDNKEQLNLASKRFSENFKTDVVIKKLVNEYKRLL

SEQ ID NO: 5748 - protein, 165 aa, marine gamma proteobacterium HTCC2080
MSTPLNKLPIQAVINGEPKMFLAAPGQVLADVLRDELELIGTKIGCNTGDCGACSVLVNDRLVCSCLVLAAEVEGQSVQTIEGIADGAVLHPVQQKLLEHGGLQCGVCTPGVVVAAKALLDSNPNPTEEEARYWLAGNLCRCTGYDKIIHAVLDAAEAIREGAAS

SEQ ID NO: 5749 - protein, 200 aa, Thiomicrospira crunogena XCL-2
MSVLVTKKAPDFTSAAVLADGTIVDDFNLKSHIDGKYAVVFFYPLDFTFVCPSEILAFDHRVEKFKELGTEVIGVSVDSQFTHNAWRNTPVNEGGLGPVKFPLVADLGGSIMDAYGIVHPGNVALRGAFLIDKEGVVRHQVVNDLPLGRNVDEMVRMVEALQFHEENGEVCPAGWNKGDEGMKDSPEGVADYLSKHGEEL

SEQ ID NO: 5750 - protein, 291 aa, marine gamma proteobacterium HTCC2080
MAVQEFVAPKSLPEAQGIFANDGSASWLAGGTDLLVGMRLGMRDPSRIIDLKQIPELMALEVSDDSILIGAAASAYDILHNSEIGSLCPGLADALDLIGSTQIQGRCSAGGNLCNASPAADSIPALIANGAVCRILGSSGERLLPVEDFLVGPGKNALKADELLVQLVLPKPMLGTSDAYLRLTPRTEMDIAVAGTGVSITLDTAGVCTAARVAIGAVAPTALLVEAAGQALVGSKLEDEAIDSAVTAVRAAASPISDKRGSAQYRTHVVGVLVKRAIQRAQARINAGAKA

SEQ ID NO: 5751 - protein, 406 aa, Azoarcus sp. EbN1
MRVLMVSDVYFPRVNGVSTSIETFRRALSPRGVATRLVVPRYADEAEEEGIVRVGGRAVPGDGEDRLPRWRAMHAAVREAARDCDLIHIQTPFVAHYAGVTAARSLGLPVLATYHTLFEEYLQHYVPLLPARWLRHGARALSRRQCNDLDAVIVPSTAMQQRLQQYGVTAPTHTLPTGVPFERLAAGAPGEFRRRCGIPSDRPVALYVGRVAHEKNIGFLLDAMHHTLARRPDLLLMIAGEGPVERELRDRVRREGLGESVLFVGYLERVNALPACYAAADVFVFASQTETQGLVLLEAMAAGLPVVALSDMGTHDILAPGRGALSPPDDPRLFGDALVDLFARPHERQKLADDARRYAAEWSDVAMAGRLATLYGTLCRGPAACTDVARRSSGMTRPFLRSFDER

SEQ ID NO: 5752 - protein, 751 aa, Glycine max
NKRERERMEGRESCHPLLRGGRRREEKGYNHGLSTTQMHVMAAICDALIPSLPLNKDTSQDQALSDFYNTSASQLPFPDEAAELLYKRTVPEAVSLVSWVLWILSFRLGTLLLCGRLSLDWKWPFIRKFSEISLEKREQIFRNWTREKSWVALRVVFVLIKLFCFYNFFSRTDANGQNPTWKAIGYQVDTKEKLIRKERPLEKGLIETMYETDSTLIQSLTEKGLEVTEDKRQNLYKVKCDVVIVGSGCGGGVAAAVLANSGHKVVVLEKGEYFVSHDYSSLEGPSMDEQYESGGIMPSLDGKMMILAGSTVGGGSAVNWSASIRTPDSVLREWSKKYKIPLFGSSDYQSAMDSVCRRIGVTEKCKKESFQNQILIQGCEKMGLKVESVAINSSADHYCGSCCYGCRTGDKKGTDSTWLVDSVGNGAVILTGCKAERFILENGKNGMKKKKCLGVIAAASWRSKVTKKLQIESKVTISACGSLNTPPLMISSGLKNPNIGRNLHLHPVQFAWGYFPEDMTTNFSGNNYEGGIITSIHKEYAEDSTPRFIIETPSLGPGSFSAFVPWLSGQDMKDRMAKYARTANIFALIRDQGSGEVKAEGRVTYRLDKEDKESLRVGLRKALRILVAAGAMEVGTYRSDGQRIKCKGMKEEDLEEFLDTVTIVGGPRSRNEVWTVFTTAHQMSSCRMGASEEEGALDENGETWEAEGLYVCDGSVLPSAVGVNPMVTIQSTSYCIASKIAESLGKASTYS

SEQ ID NO: 5753 - protein, 152 aa, Fulvimarina pelagi HTCC2506
MVSFTLNGEQRQFDGDPETPLLWVIRDAEKLTGTKYGCGIAQCGACTVHVDGMTRRSCITPISSLEGSSVTTIEGLDGREAEAVQAAWTEIDVPQCGYCQSGQIMSAVSLLQMNPKPNDADIDGAMAGNICRCATYQRIRQAIHNAADSMEG

SEQ ID NO: 5754 - protein, 156 aa, Tropheryma whipplei str. Twist
MGGIVSNQVLPKGSFAPDFELVDQNGATVVLSEVAAKKDVVLFFFPLAFSGICTDELIQVRDSLDSFKSFEVFALSVDSKFTLRAYSESQGFSFALLSDFWPHGGVAKQFGAFLEDVGVASRSTFIVGKDLKIKASFFSGIHEPRDFSEIRAALAS

SEQ ID NO: 5755 - protein, 420 aa, Azoarcus sp. EbN1
MSCLDIAVVTETFPPEVNGVAMTLGRLVHGMRERGHRVSIVRPRQRRDDRGSEYDLTIAGVPMPGYAGLRFGLPSGGALARQWRRHRPDLVHVVTEGPLGWSAVSTARRLGIPVTSGFHTNFDHYSVHYGLGWLRPAVSAYLRALHRRTRATLVPTTALAADLAGEGVPGVRVVGRGVDTRLFNPRRRSTDLRAEWGAAPEDFVCLYVGRLAPEKNLVLAERAFAAIRGQHSNARMIWIGDGPSASRLKLERPDHHFAGVRLHEALAEHYASADLFLFPSLTETYGNVVAEAMASGTPVVAYRSAAAAELVEDGENGALAPPGDDAGFVAAALSTLADRTRLGRLSRAARVSMLPAQLGWCRPRVRAGRAGRDSRRLSLLGKTPRLRRCTLLGRSLTAPASSRGCGRSSAAPLDVLALPA

SEQ ID NO: 5756 - protein, 335 aa, Solanum lycopersicum
MVVLTEPDNDHLPIINSNSCKSPSFFNDIPVIDLSKPDSKNLIVEACEEFGFFKVVNHDVPIEFISKLESEAIKFFSSPLSEKLKAGPADPFGYGNKQIGQSGDIGWVEYILLSTNSEFNYQKFASVLGVNPENIRAAVNDYVTAVKRMSCEILEKLAEGLKIHPTNVFSKLLKDEKSDSVFRLNHYPPCPDIQEFNAKNLIGFGEHTDPQIISVLRSNNTSGLQILLKNGNWFSVPPDQSSFFVNVGDSLQVMTNGRFKSVKHRVLTNSVKSRLSMIYFGGPPLSEKIAPLPSLMEGEESSLYKEFTWFEYKKSAFKSRLAQNRLTLFEKFGTS

SEQ ID NO: 5757 - protein, 378 aa, Magnetococcus sp. MC-1
MRLSFLCHEFPPTGGGAASALDHFTRVLVKRGHRVQILTIGLGAKTLRETLDERQIIRYGVGRRSMLSPTTTELLRSYWALRHRSKRDLAEFKPDCSVAFFAFPAGHALLKQRRRLTGPMAVSIRGSDIPGFSKKRWGLFQWLQPWLVRPVLEGADRVFANGETLATLTRAFAPHIAVTSIPNGVDTQQFSPADRAVGAHDGPLRVLSVGQLIPRKQVALLLAGAALLQRPLEITLAGSGPLEEPLKAQAAQLPPPIKVHFCGHTQREAMPQLYRAHDLLVHLSGAEGVSNVALEALASGLPLLATPQALGPEFVGSRGVMVLHDPNEAALAEALLTLDSQRQRLGQMGHEARHFAERFDWQRAAAQFEAQMSRLWLA

SEQ ID NO: 5758 - protein, 200 aa, Neorickettsia sennetsu str. Miyayama
MSTLVGKKAFDFTAKAVLKNGSFCDDFNLQRELSGKYGVLFFYPLDFTFVCPTEIIAFSNRIPAFIERNAVVVGVSVDSHFSHFAWRSLPVKDGGIGSIGYTLVSDITKSISRDYQVLLDDAVALRGTFIIDPNFVIRVAHVNDLNVGRNVDEVLRTLDALKYSDENGEVCPAGWSKGKEAIKATHESISDYLASNRDEL

SEQ ID NO: 5759 - protein, 160 aa, Anaplasma marginale str. St. Maries
MDTLEGEAAPEFTIKLEDGTVASSSSYIGKKNIVLYFYPKDDTPGCTREAEGFRDAHAEFARLDTIIVGVSGDGASSHANFRKKYQLPFELISDEDSSLSKLYGTWVEKHMFSKSYMGIERSTFLIDKHGKIRKIWRKVKVDGHVDAVLDAAKSLENETV

SEQ ID NO: 5760 - protein, 1273 aa, Myxococcus xanthus DK 1622
MSNMFEFQLNGATVRVDGVSPNTTLLDFLRARGLTGTKQGCAEGDCGACTVALVDRDAQGNRCLRAFNACIALVPMVAGRELVTVEGVGSCEKPHPVQQAMVKHYGSQCGFCTPGFIVSMAEAYSRKDVCTPSAVADQLCGNLCRCTGYRPIRDAMMEALAQRDEGPSPATAIPSAPLGGPAEPLSPLRYEAGGQTFLRPTSWEELLDLRAKHPEAHLVAGATELGVDITKKSRRYPFLISTEGVESLRAVRRGEDGWYVGGAASLVALEEALGDELPEVKKMLNVFASRQIRQRATLAGNLVTASPIGDMAPVLLALDASLVLGSVRGERTVALSDFFLAYRKTALQSDEVVRHILIPHAAVPEGGRRLSDSFKVSKRRELDISIVAAGFRVELDAGGLVKLARLGYGGVAATPVRARRAEAVLTGQPWTAETVARVLPVLAEEITPISDLRGSAEYRRGLVAGLLEKFFSGSHSPALDAAPGFDAGEVQAPADAGRALRHESALGHVTGSARYVDDMAQKRPMLEVWPVCSPHAHARILKRDPTAARKVPGVVKVLMAEDIPGMNDTGPIRHDEPLLADREVLFHGQIVALVVGESVEACRAGARAVEVEYEPLPAILTVEDAVARSSYHTEPHVIRRGDVDAALDSSPHRLSGTLAIGGQEHFYLETQAAFAERGDDGDITVVSSTQHPSEVQAIISHVLHLPRSRVVVQSPRMGGGFGGKETQGNAPAAFVALAAWHTGRSVRWMLDRDVDMAVTGKRHPFHTAYEVGFDDQGRLLALRVQLVSNGGWSLDLSESILDRALFHLDNAYYVPALAYSGRVAKTHLVSNTAFRGFGGPQGMLVTEEVLARVARAVGLPADEVRERNLYRGTGETNTTHYGQELEDERILRVWEELKKSSEFERRQRDVAAFNAQSPFIKRGLAITPMKFGISFTATFLNQAGALVHVYRDGSVMVSHGGTEMGQGLHTKVLGVVMRELGVTVDAVRMAKTATDKVPNTSATAASSGSDLNGAAVRVACVTLRERLAPVAVRLMSDRHGRSVTPDALLFSDGKVGLRGEPELSLSFADVVEAAYLSRVGLSSTGYYQTPGIGYDKAKGRGRPFLYFAYGAAVCEVEVDGHTGIKRVLRVDLLEDVGDSLNPAVDRGQIEGGFVQGLGWLTGEELRWDANGRLLTHSASTYAVPAFSDAPIDFRVRLLERAHQHNTIHGSKAVGEPPLMLAMSAREALREAVAAFGQAGGDVELASPATHEALFLAIQKRLARAAAEGGREAA

SEQ ID NO: 5761 - protein, 155 aa, Helianthus annuus
MSIIPSLFAGRRSSVFDPFSLDVWDPFRDFPISSSSDVSRETSALVNARVDWKETPEAHVFKADLPGIKKEEVKVEVEDGNILQITGERNVEKEDKNDKWHRVERSSGKFTRRFRLPENAKMDQVKAAMENGVLTITVPKEEVKKPDVKSIEISG

SEQ ID NO: 5762 - protein, 322 aa, Prochlorococcus marinus str. NATL1A
MPIANDITYLVGQTPLVKLNRLPNEFNCRAEIIAKLESFNPTASVKDRIAGAMVKSAEKEGTIKPGHTVLVEPTSGNTGIALAMVAAAKGYRLILTMPDTMSTERRSMLRAFGAELQLTPGQDGIQGAIQLAKELVASVPNAYLLQQFDNLSNPEIHEKTTAEEIWEDCEGKLDALIAGVGTGGTITGCARFLKQKNPKIKVFAVEPSSSPVLSGGNPGSHAIQGIGAGFIPNVLDMNQIDEVIRINDNEAMDIGRRLAKEEGLLSGVSSGAAVAAALKVGNQPEFANKRLIVILPSFGERYLSTTMFTSIPAKPVKGNEFL

SEQ ID NO: 5763 - protein, 307 aa, Bacillus licheniformis ATCC 14580
MNVIKDITELIGKTPLLQILDFRIPKGVNIYAKLEMMNPGGSIKDRLGEVLIAEAIGSGKLKPGGTVIEATAGNTGIGLALAARKHGIRPVFCVPEHFSMEKQSIMKALGARIVHTPRSAGMKGAIEKALELEKEIPDSYCVLQFKNPVNPLAYYKTIAPEIWNDLGGRIDVFVAGAGSGGTFAGTAKFLKEKNPSIKTVIVEPEGSILNGGEPHGHKTEGIGMEFIPEYMEESYFDEIYTVLDEDAFRLVKEAAEKEGLLIGSSSGAALFAALKEAEKAKAGTNIVTIFPDSSDRYLSKKIYEGGI

SEQ ID NO: 5764 - protein, 384 aa, Mycobacterium avium subsp. paratuberculosis K-10
MRVAIVAESFLPEVNGVSNSVIRVLEHLRRTGHEALVIAPDTPPGQPRAERIHDGIRVHRVPSRMFPKVTTLPLGVPTPRLVSVLRGFDPHVVHLASPALLGYGGLRAARWLGVPTVAVYQTDVPGFAASYGIPMTARAAWAWFRHLHTLADRTLAPSTVTMESLVAHRFPRVHRWARGVDVLRFAPSARSEALRRRWSPQGKPIVGFVGRLAPEKHVERLAGLAASDAVQLVVVGDGVDRAKLQSAMPTAVFTGALYGDELAAAYASMDVFVHPGEHETFCQVVQEALASGLPVIAPDAGGPRDLVTPWRTGLLLAVDEFETKLPAAVAHLIGERHRYAPAARRSVLGRSWPVICDELLGHYEAVLSPFVRHQVRAGRYAQGE

SEQ ID NO: 5765 - protein, 385 aa, Mycobacterium marinum M
MSRVLLVTNDFPPRRGGIQSYLSEFVGRLVEAGSHSITVYAPQWKGAQGYDDVARAAGYRVVRHPSTLMLPVPTVDSRMRRLIAQHDIDTVWFGAAAPLALLAPRARQAGATRVLASTHGHEVGWSMLPVARSVLRRIGDTTDIVTFVSRYTRSRFAPAFGPAASLEYLPPGVDTDRFRPDPAARAELRKRYQLGERPTVVCVSRLVPRKGQDTLIKALPAIRRRVDGAALVIVGGGPYLETLRKLARDCEVDEHVTFTGGVPGEELPTHHAMADVFAMPCRTRGSGMDVEGLGIVFLEASASGVPVIAGESGGAPETVQHNKTGLVVDGNSVDKVAGAVIEVLADRDRAARMGDAGRQWVTSQWRWDTLAARLAELLRGDDTGR

SEQ ID NO: 5766 - protein, 346 aa, Vibrio vulnificus YJ016
MRILHIINDLSKNGGAQKFLVDLVTGEEVKYDIKILVLCHENDYLETLSRRGIECYVWQTLTFKEKWALFRWPDIVHGHLYPSIYLALLALGKKKLQTEHSSSNRRRDYPAFKFMEYLLYLSHDLTISISEKVQEELIKFMPNFRQKYKVINNGVDLSCFSMSARTGIKHPTQIKIGMVGRLHEHKDHEALIRAVALLPTQYQLHLAGDGQKREMLESLAQQLDITNRVFFHGVVSDIPTFLEQMDLYVQSSLIEGFGLAAVEAMAAGLPVLSSNVPGLDDVIGNAGYLFEVSNSEELANKIIQVCDSNENYSVASKYSILRCKEFTIEKFRDSYYKAYDGLFIQG

SEQ ID NO: 5767 - protein, 206 aa, Xylella fastidiosa 9a5c
MLKLYIILSSTLSATNRKYSMSVLNTEILSFKATAYKNGQFVEVSEAVLKGKWAVFVFYPADFTFVCPTELEDLADHYEEFQKYGVEIYSVSTDTHFSHKAWHDISPAIGKIKYAMIGDPTHEISRNFNVLRPSGLADRGTFIIDPQGVIQSVEITAEGIGRDAKELLRKVKAAIYVANHPGEVCPAKWEEGGKTLAPSLDLVGKI

SEQ ID NO: 5768 - protein, 814 aa, Thauera sp. MZ1T
MNEPIEPTSSPPASAPPAGQPHPHESAHLHVAGEATYVDDLPEPAGTAHAALGLSTQAHARIVAMDFGAVLAAPGVLGVLVAADIPGRNDCGPIVHDDPILAAGEVHYVGQPIFAVIADERDAARRAARLARIDYAPLPARLDPLEAACAGELVLPPMRLMRGDVDAALAAAPHRVEGRWQVGGQEHFYLEGQVALAQPREDGCMQVWCSTQHPSEMQQVVAHCLGIAAHRVVVEMRRMGGGFGGKESQSALFACVAALAAARFRRAIKLRPDRDDDIAITGKRHDFHYDYTVGHDEEGRLLALRVDMVARAGCSADLSGPVATRALCHVDNAYHLPAADLRARLARTHTQSNTAFRGFGGPQGAILAEWVIDGIARTLGRDPLDVRRANFYGGPGRDTTPYGQVVADNVLHALVDELEASSDYRARRAEIAAFNAAAPVLRRGLALTPVKFGISFNLTHLNQAGALVHVYADGSVLVNHGGTEMGQGLHTKVCQVVAAELGIALERVRATATDTSKVANTSATAASTGADLNGQAAAAAARTIRMRLAEFALRRFAEGGEGGQGEDRGDARPGRRPADPAAVRFADGQVYVGAHTIPFAELVGAAYRARVQLWSDGFYATPGLHWDAATLTGHPFHYFAYGAAVSEVVVDTLTGEWRLLRADLLHDAGSSINPAIDRGQVEGAFIQGMGWLTMEELWWNAEGRLMTHAPSTYKIPAAHDCPADLRVRLFHNPNRADTLLRSKAVGEPPLLLGFSVFFALRDAIAAAGDGHSNPPLRAPATPEAILDALDAVRRRPTPDARRPTPDASHLTPDA

SEQ ID NO: 5769 - protein, 501 aa, Thauera sp. MZ1T
MDSQTIRILLDGEAVSITDLAPTPSLLAWLRGARGLVGTKEGCNEGDCGACTVVVGELADDPADAPRLYAVNACIRFLATLDGKAVFTVEHLRSLAGGALHPVQQAMVDCHGSQCGFCTPGFTMSLWALYEDRHAQGEAAADPARIRSALAGNLCRCTGYRPIVEAGERMFDAPSRLLDRDRLRTALLALRRDDTLDFGHEGGRFVAPRSVDELLALRSRHPAATLLAGGTDIGLWVNKGLRRLDTLIHTGEVAALRAIVPHAGGLRIGAAASLTAAFAALVRLHPELAELRERFASPPVRNAGTLGGNVANGSPIGDSMPALIALGARVVLASVRGRRSLALEDFYLDYMKKDLAADEIVEAIELPPPAPARRLRSWKLAKRFDSDISAVCAGFALELRAGRIHAPRIAFGGMAATPRRATATEAALAGRPWDEAALAAAQCALEHDFAPLDDLRASAGYRRRAAAGLLARFFLETRPDAPLAAAQTRAFAAEDLAGGGR

SEQ ID NO: 5770 - protein, 374 aa, Desulfitobacterium hafniense Y51
MPTYKILQLIGGGEIGGAEQHVLTLLQGIDKAAFSLTSGSLIDGPFARSTEEKGIPTLRFPMKHALDLSPLPKLMADIRREKFSLIHTHGSRANLLGRLAGGCLKLPVVSTVHSSLKRDYLSPAAACLALALDRLTLPLTSGIITVSEALAEEVARRGGQRIRTIYNGIPPLPQLATSERRGELRESFRRTWGIPKDALVLGSVARLHPTKGLHTLLEAAHILRPQFPHLHILIIGDGPLHRELEEQAGAWGLPHTFTGYLPDAYQTLPAMDIFILPSLSEGMGLVLLEAMQAHLPLVATAVGGIPELIRPSLDGLLIPPGQPAELAGACRTLLQNPELAQSCLDSGAQRWQDFSVQEMLRQTENFYQEVLTRC

SEQ ID NO: 5771 - protein, 186 aa, Xylella fastidiosa Temecula1
MSVLNTEILSFKATAYKNGQFVEVSEAVFKGKWAVFVFYPADFTFVCPTELEDLADHYEEFQKYGVEIYSVSTDTHFSHKAWHDISPAIGKIKYAMIGDPTHEISRNFNVLRPSGLADRGTFIIDPQGVIQSVEITAEGIGRDAKELLRKVKAAIYVANHPGEVCPAKWEEGGKTLAPSLDLVGKI

SEQ ID NO: 5772 - protein, 205 aa, Mycobacterium smegmatis str. MC2 155
MTTHETHDTAEALAWQIRRRTFIGASITVGGAMTLPLLASCSTEDVEPQAESTTVRMSINGEQRVVDVDNRTSLLDMLRERVGLTGTKKGCDQGACGACTIHLNGERVVACLTLAVMHDGAEITTIEGLEDNGRLHPLQQAFIDRDALQCGYCTPGQIMSGVACIREGHANSPEEIRESMSGNICRCGAYVNIVGAVAAVARQGE

SEQ ID NO: 5773 - protein, 316 aa, Haemophilus influenzae Rd KW20
MAIYADNSYSIGNTPLVRLKHFGHNGNVVVKIEGRNPSYSVKCRIGANMVWQAEKDGTLTKGKEIVDATSGNTGIALAYVAAARGYKITLTMPETMSLERKRLLCGLGVNLVLTEGAKGMKGAIAKAEEIVASDPSRYVMLKQFENPANPQIHRETTGPEIWKDTDGKVDVVVAGVGTGGSITGISRAIKLDFGKQITSVAVEPVESPVISQTLAGEEVKPGPHKIQGIGAGFIPKNLDLSIIDRVETVDSDTALATARRLMAEEGILAGISSGAAVAAADRLAKLPEFADKLIVVILPSASERYLSTALFEGIEG

SEQ ID NO: 5774 - protein, 387 aa, Dictyoglomus thermophilum H-6-12
MKIAFFTNNYLPNTGGAAIAVESYREALEKLGHEVFVFAPKYPPWFPRYKDDSNKKVWRFPSFALKFITPQPIPLYFSFFVEDFFKKQNFDIVHSHHPFVIGKTALKLAKKYRIPIVFTHHTQYHKYVHYIPLIPEKISAKFAIQESVKYANQVDLVIAPTKEIKEMIINFGVKTRIEILPTGIDFSLWEKDISEEFLKNFPWKDKRILLYAGRLAKEKNIPFLFYSLEKLLKNRDDTIFLVVGDGEEKKNLENLIKKLNLEDKIILMGWYPREELVNFYKIAEIFVFASTTETQGLVTLEAMAGECAVVAIRAPGSMSLIEDGKEGFLVEEDLEEFSNKVELLLNNPELLKMMQKNAKIKAQEFSIDRSAIKLEELYRELIKNKEK

SEQ ID NO: 5775 - protein, 160 aa, Mycobacterium marinum M
MMQVNMTVNGEPVSAEVEPRMLLVHFLRDQLRLTGTHWGCDTSNCGTCVVDVDGVPVKSCTMLAVMASGRSIRTVEGLAAADGSLDPVQEGFMRCHGLQCGFCTPGMMITARALLDRNPDPDEETIREAISGQICRCTGYTTIVRSIQWAAKNAKEVASS

SEQ ID NO: 5776 - protein, 794 aa, Ralstonia solanacearum GMI1000
MNAPAEPNRHLIGAAVKRKEDYRFLTGAGQYTDDVVQAHQSYAVFLRSPYAHARIVRIDAEAARKQRGVLAVLTGEDLATDKVNGLPCGWLIHSLDGSPMKEPPHPVLAQGKVRHVGDQVALVVAESVKIAKDAVELIDVEYEELPAVVDPAAASTAGTAVHDGVPDNTCYTWGHGDKAATDAAFARAAHVTRLDIVNNRLIPNAIEPRAVNASYSRQDDSYTLYVANQNPHVERLLMSAFVLGLSEAKVRVIAPDVGGGFGSKIFLYPEDVALTWASKKVGRPIKWTAERSESFLTDAHGRDHVTHAELALDAQGNFLGMRVHTIANMGAYLSTFASSVPTILYATLLAGQYRTPAIYAEVKAVFTNTAPVDAYRGAGRPEATYVVERLVETAARELQIDPAELRRRNFIRSFPYATPVGLTYDTGDYEPCLDRAIELADVPGLRARRDASRAKGRLRGMGYSCYIEACGLAPSNIAGALGARAGLFEVGEIRVHPTGSVTVFTGSHSHGQGHETTFAQVVADRLGVPIENVEIVHGDTGRIPFGMGTYGSRSIAVGGSAVMKALDKIEAKAKKIAAHLLEASAEDIEFKDGVFRVAGTDRTKTFGEVALTAYVPHNYPLDKLEPGLNENAFYDPANFTYPAGAYICEVEVDPETGEVRIDRFVAVDDFGNIINPMIVEGQVHGGLGQGIGQALLEGCVYDDSGQLLTGSYMDYAMPRADDLPSFTVETAKGTPCTHNPLGVKGCGEAGAIGSPPALINAIVDALAPLGVKDIQMPATPHRVWRAIQSARANA

SEQ ID NO: 5777 - protein, 796 aa, Mycobacterium marinum M
MTTIESRPEDLADNDQKPCGHGRMLRKEDPRFIRGRGNYVDDVALPGMLHLAILRSPYAHARIVSIDVTAALAHPKVKAVVTGADLAEKGLAWMPTLSNDVQAVLATDKVRFQGQEVAFVVAEDRYSARDALELIDVEYDPLDPVVDVRKALDPSAPVIRTDLDGKQDNHIFDWETGDAAATDAVFAKADVVIKQEMVYPRVHPAPMETCGAVADLDPVTGKLTLWTTSQAPHAHRTLYALVAGLPEHKIRVISPDIGGGFGNKVPIYPGYVCAIVGSLVLGKPVKWMEDRSENLTSTSFARDYIMVGEIAATNEGKILALRSHVLADHGAFNGQAAPTKYPAGFYGVFTGSYDLEAAYCHMTAVYTNKAPGGVAYACSFRITEAVYFVERLVDCLAFELKMDPAEVRLRNLLKPEQFPYTTKTGWVYDSGDYESTMRQAMDMIGYDALRAEQKEKRDRGELMGIGISFFTEAVGAGPRKDMDILGLGMADGCELRVHPTGKAVVRLSVQTQGQGHETTFAQIVAEELGIPPDDIDVVHGDTDQTPFGLGTYGSRSTPVSGAAAALVARKVRDKAKIIASGMLEVSVADLEWEKGSFHVKGDPSASVTIADIAMRAHGAGDLPEGIEGGLDAEVCYNPSNLTYPYGAYFCVVDVDPGTGVVKVRRFLAVDDCGTRINPMIIEGQVHGGIVDGIGMALMEMIAFDEDGNCLGGSLMDYLIPTALEVPHLETGHTVTPSPHHPIGAKGIGESATVGSPPAVVNAVVDALAPYGVRHADMPLTPSRVWEAMQGRATPPI

SEQ ID NO: 5778 - protein, 175 aa, Ralstonia solanacearum GMI1000
MAISLSLSVNGAPVTVSVEPHTLLVELLREHLRLTGTHVGCDTAQCGACTVHMNGRAVKSCNILAVQADGADVTTIEGLARNGKLHPMQEAFRECHGLQCGFCTPGMVMAATALVAQYPHPDERQVREQLDGNLCRCTGYHNIVRAVLQGAEAMAAAEGEDASLQSLAAARAHAA

SEQ ID NO: 5779 - protein, 221 aa, Flavobacteria bacterium BBFL7
MENSNVTPEQIISMPRIGDTAPDFTAVTTKGNIKMSDFAKDKWIVMFSHPADFTPVCTTEMSGFAERKPEFDALNTELLGLSIDSIHAHLGWVQNVRENTGVYFDFPIIADIDMKVSKLYGMLQPNESETAAVRAVFFIDPSKKIRLVMYYPLNVGRNMDEILRALDSLQMSDKHKVAMPLDWKRGDQAICPPPKSLDALNNRLSDDSVEKITWYLAKKDI

SEQ ID NO: 5780 - protein, 306 aa, Thermoanaerobacter tengcongensis MB4
MVANNILDLIGKTPVVKLNKVPDKNSAEVYLKLEFFNPAGSVKDRIALAMIEKAEKEGILKKGSVIVEPTSGNTGIGLAMVGAAKGYKVIIVMPDTMSMERRMLLAAYGAEVILTPGKLGMEGAIRKAEELVKQNKNYFMPQQFENLANPLIHEETTAKEIIEDFKEGLDAFVAGIGTGGTITGVGRVLKKVFPDIKIVGVEPYSAAVLSGREPGPHKIQGIGAGFIPKVLDREVLNEVIPVKDEDAFEMTRILAKKEGILAGISTGASLWAALNVAKKLGKGKKVLAIAPDSGERYLSTQIFREH

SEQ ID NO: 5781 - protein, 173 aa, Bacillus subtilis subsp. subtilis str. 168
MDIKEAGPFPVKKEQFRMTVNGQAWEVAAVPTTHLSDLLRKEFQLTGTKVSCGIGRCGACSILIDGKLANACMTMAYQADGHSITTIEGLQKEELDMCQTAFLEEGGFQCGYCTPGMIIALKALFRETPQPSDKDIEEGLAGNLCRCTGYGGIMRSACRIRRELNGGRRESGF

SEQ ID NO: 5782 - protein, 790 aa, Rhodobacter sphaeroides 2.4.1
MPKDGGIGASTLRREDIRFLTGKGRYTADISLRGQAHACFLRSEVAHGRIRSIDTSAAEEMPGVLAVLTGEDFTEVGGNPTGWLVQSRNGATMKEPKRPVLAHGKVRHVGDAYAMVVAETYEQAKDACEAIEADIEELPAIVDMAQAVADSSNRVHDEIEDNVVFDWGWIEENRAAVDAAFETAPHVTTLELVNNRLSPNAMEPRASIGDFDSGTGDYKLYTTSQNPHLTRLLISAFVMGIPENKLTVIAPDVGGGFGSKIYHYGEEAAVLAASKRLNRPVKWVCDRSEAFLSDAHGRDHVTKIQLATDMEGNFLALRTETLANMGAYLSNFATCTPTFLHGTLMAGPYKTPLVYVNVKAVLTNTVPVDAYRGAGRPEATYSLERVVDKAADELGLDKWEIRRRNFIDPGAFPYTTPVGLVYDTGNYHATMDKLHELSDAAGFEARAEESRQRGKWRGFGLSTWIEACGIAPSNLVGVLGCRVGLYDAATIRVNATGNISVLVGAHSHGQGHETVFAQLIAEKLGVDANSVEIVHGDTSKIPFGMGTYGSRSLAVCGSAMMKAADKIIDKGKKIAAHMLEAAEGDIEFTDGSFSVAGTDRQKSFAEIAFSAYVPHNYPLETLEPGLEETAFYDPANFTYPAGAYGCEVEVDPETGGVDIVRFTCADDFGNVINPMIVQGQVHGGVAQGIGQALLEGVVYNEDGQLLTGSYMDYAMPRADDVPSFTVDHSCVTPCTHNPLGAKGCGEAGAIGTPPAVVNAVVDALRRAGHGHVTHIDMPLTPSRVWTAMQG

SEQ ID NO: 5783 - protein, 165 aa, Shewanella sp. MR-4
MAIPSSEAAKDQSLAMPSQNLTINGRSFTLNADPNMPILWALRDILGLTGTKYGCGAGLCGACTVHLDGQPVRACLTSVSQAQGKQLTTIEGLDNQKLKNAWAEQNVPQCGYCQAGQLMSAAALVTQHPKPSAEQIDAAMSGNLCRCGTYPRIKAALQSYAKQEG

SEQ ID NO: 5784 - protein, 303 aa, Klebsiella pneumoniae subsp. pneumoniae MGH 78578
MNTLEQTIGNTPLVKLQRLGPDNGSEVWVKLEGNNPAGSVKDRAALSMIVEAEKRGEIQPGDVLIEATSGNTGIALAMIAALKGYRMKLLMPDNMSQERRAAMRAYGAELILVSKEQGMEGARDLALEMAQRGEGKLLDQFNNPDNPYAHYTTTGPEIWQQTAGRITHFVSSMGTTGTITGVSRFLREQSKPVTIVGLQPEEGSSIPGIRRWPAEYMPGIFNASLVDTVLDIHQQDAENTMRQLAVREGIFCGVSSGGAVAGALRIARENPGAVVVAIVCDRGDRYLSTGVFGEEHFSQGAGI

SEQ ID NO: 5785 - protein, 745 aa, Bacillus subtilis subsp. subtilis str. 168
MIINKPSRVRPDGRGKVTGELKYMTDLSFPGMLYGKVLRSAYPHAEIVSVCTIKAEKMEGVQAVVTHKDVPGLNRFGIVIPDQPVLCEDRVRYVGDAIAAVAAETEEIAEAALELIQVEYKELEVMDSPEKALRPNAQRLHEDGNILHRAFFSNGDVEEGFQASDTVFEETYELPRQMHTYMETEGGVAVPEDDGGFTMYAGTQHGYKDRFQLARIFDIPEEKIRIVSSPMGGSFGGKDELNIQPYAALLALKSGRPVKIHQTRKESVRSGIKRHPMKITIKTGADHSGNLLAHDVKIVADTGAYATLGPAVLDFSVEHAAGPYRIPNIRTEGISVFTNNGVAGEFRGFGGNQITFALETHLDRLSGMLGIDPLELRRKNIRKPHDLGPLEHRIAPTDGAAQVLNAISKSPILKKTSRNCGYLQRGTGAAITMHGGGLGFGRMDAAGGRLSLSSEGKITASFGFEECGQGILAAIEQIVMEELGCAAEDISIVIGDTAKVPKSGSSTASRGTSMVWHAIQRLKKPFLAQLKKRAAEWSGCSAENLIPGAAGLRDKNTKALVVTYKELAEKGPLAEETAFDFPTTPDPVVGGHFLYSFGAAAVEVEVDLLTGDVKLIDCEHAIAAGPVVSPQGYRGQIEGGAAMALGYTLMEEAKMTDGRYAAENLDHYLIPGIKDVPDMKLIAIEDLMKGDVYGPRGVGEIGTIAITPAIVKAVHDAVGCWINKLPISREELLEAIDRKGLKQWT

SEQ ID NO: 5786 - protein, 160 aa, Rhodobacter sphaeroides 2.4.1
MKVTMTVNGRPMSAETEGRTLLSSFLRDGLGLTGTHVGCDTTQCGACTVHVDGEPVKSCTVLAQDVAGKSVTTIEGMANKDGSLSVIQQAFQDHHGLQCGFCTPGMVMISAALLNEKPNPTEEEVRHYLKGNICRCTGYHNIVKAVMAAAGADSRKLAAE

SEQ ID NO: 5787 - protein, 297 aa, Moritella sp. PE36
MELLDLIGNTPLINLSFLSPQPERVSLFAKAEWMNPGGSLKDRSVKLILTRAIEDGLLQPGKIILDSSSGNAGISYSMIGAALGYAVNIVIPDNASNERKMRLRAHGAQLIETDALEGYDQAIRHVHELYANSPDKYFFADQYSNQANVLAHYHGTGAELIEQVSGPITHFVCGVGTGGSLTGIARRLKAKYPAVVIVGIRPERWPGIEGLKPLGEKEDILPKIFDGSLVDRWLDVSANEAKSMCLTMARRGYFVGQSSGAYLAGCCKLMAELSEGVVTTLMCDSGERYFSTGLWQS

SEQ ID NO: 5788 - protein, 224 aa, Magnaporthe grisea 70-15
MAEEQRPAPLRLGTEAPNFKAETTKGPIDFHEFIGSNWVILFSHPEDFTPVCTTELGEFARLEPEFTKRGVKLIGLSANTVGSHDGWIKDINDVTGSHVAFPIIADKERKVAYLYDMLDYQDTTNVDEKGIAFTIRSVFIIDPAKKIRTILSYPASTGRNSAEVLRIVDSLQTGDKHKVTTPINWVPGDDVIVHPSIKDEQAKDLFPNFRAVKPYLRFTPLPKE

SEQ ID NO: 5789 - protein, 159 aa, Anabaena variabilis ATCC 29413
MSNFPQAGQPAPDFSTPDQNGNLVSLNDFHGQWVVIYFYPKDDTPGCTTEAKDFTGLHEEFHRLGAKILGVSPDSGKAHCKFIDKHNLSITLLSDPEHQLIEAYGAWRLKKFMGKEYMGVARSTFLISTDGIIAYTWPNVKTKGHAQAVLNKLQELTNS

SEQ ID NO: 5790 - protein, 434 aa, Arabidopsis thaliana
MTITQVREDDESEIDAPLLDPESLSKPRRIALFVEPSPFAYVSGYKNRFQNFIRYLREMGDEVIVVTTHEGVPEEFYGARVIGSRSFPCPYYQKVPLSLALSPRIISEIARFKPDIIHASSPGVMVFGALAIAKMLSVPIVMSYHTHVPVYIPRYTFSWLVKPMWSIIRFLHRAADLTLVPSAAIGKDLIAAGATAANQLRLWNKGVDSESFNPRFRSQEMRIRLSNGEPEKPLVIHVGRIGVEKSLELLKSVMDKLPEARIAFIGDGPYKEDLEKLFTGMPAVFTGTLQGDELSQAYASGDVFVMPSESETLGLVVLEAMSSGLPVVAARAGGIPDIIPEDQEGKTGFLFNPGDVEDCVTKLRTLLHDRETREIIGKAAREETEKYDWRAATTKIRNEQYSAAIWFWRKKKVHVLGPINWLIKRLFPVPEGNV

SEQ ID NO: 5791 - protein, 698 aa, Candida cloacae
MSHQVEDHDLDVFCLLADAVLHEIPPSEIVEYLHPDFPKDKIEEYLTGFSRPSAVPQFRQCAKKLINRGSELSIKLFLYLTTALDSRILAPALTNSLTLIRDMDLSQREELLRSWRDSPLTAKRRLFRVYASFTLSTFNKLGTDLHFKALGYPGRELRTQIQDYEVDPFRYSFMEKLKHEGHELFLPDIDVLIIGSGSGAGVVAQTLTESGLKSLVLEKGKYFASEELCMTDLDGNEALFESGGTIPSTNQQLFMIAGSTFGGGSTVNWSACLKTPFKVRKEWYDDFGLDFVATQQYDDCMDYVWKKMGASTEHIEHSAANAVIMDGAAKLGYAHRALEQNTGGHVHDCGMCHLGCRFGIKQGGVNCWFREPSEKGSKFMEQVVVEKILQHKGKATGILCRDTESGIKFKITGPKKYVVSGGSLQTPVLLQKSGFKNKHIGANLKLHPVSVALGDFGNEVDFEAYKRPLMTAVCNAVDDLDGKAHGTRIEAILHAPYVTAPFYPWQSGAQARKNLLKYKQTVPLLLLSRDTSSGTVTYDKQKPDVLVVDYTVNKFDRNSILQGFLVASDILYIEGAKEILSPQAWVPTFKSNKPKHARSIKDEDYVKWRETVAKIPFDSYGSPYGSAHQMSSCRMSGKGPGYGACDTKGRLFECNNVYVADASVMPTASGVNPMITTMAFARHVALCLAKDLQPQTKL

SEQ ID NO: 5792 - protein, 383 aa, Bacteroides fragilis YCH46
MIGLFNDCFPPIMDGVSLTTQNYAYWLHRKAGNVCVVTPKSPDARDAEEYPVYRYSSVPIPMRKPYRLGFPRIDWPFHERISRLSFELVHAHCPFSSGALAMQIAREQHVPIVATFHSKYRADFERAIPSRLLVNYLIRKVIRFYEAADEVWIPQAAVEETLREYGYKGRIEVVDNGNDFAGTPFLQSVRQEARRTLGIRSGEFMFLFVGQHIWEKNLGFLLDSLVRLSDIPFRMYFVGSGYASHELKQKVVELGLASKVSFVGSIVEREILKRYYVAADLFLFPSLYDNAPLVIREAAALGTPSVLIRDSTASEIISDSVNGFLSPNSTEAYSNRIREILCSTAIIKQVGEEASRTIARSWEDVAGEVYDRYNRLIKRNGNK

SEQ ID NO: 5793 - protein, 698 aa, Candida cloacae
MNPVVEDSHLDVFCLLADAVVHEIPPSEIVEYLHPDFPKDKVEEYLAEFSHPSAIPEFREVAKRIINKGTVLSIKLFLLLATALDSRILAPALTNSTTLIRDMDLSQREELLRSWRDSPFTTKRKLFRVYNSFTLNAFSKTATDLHFKALGYPGRELRTQIQDYEVDPFRYTFLEKPQQDGQELHFPDIDVLIIGSGSGAGVVAQTLSENGLKSLVLEKGKYFSNDELTMNDLEGSEALFENGGALSSTNQQIFIIAGSTFGGGSTVNWSACLKTPFKVRKEWYDNFGLDFVATQYYEDCMDYVWKKMGASNENIDHSGANSVILEGSKKLGYPHRAVEQNNGGKIHDCGMCHLGCRFGIKQGSVNCWFRGPSENGSKFMQQVLVDKILQRDGKAVGVLCRDVVTGVKFKITGPKKIVVFWWFFANSGFVTKSGFKNKHIGANLKLHPVSLTLGDFGNNVDFEAYRKPIMTSICNKVEDLDGKAHGTRIEAMLNAPYGVAPFFPWKSGAESRKDLLRYKQTVPILLLSRDTTSGSVTYDKQKPDALVIDYLLNKFDRNSILQGFLIASDLLYIEGASRDHVTYKLGYQWFKSSKPKHARSIEDEDYVNWRAKVAKIPFDSYGSPYGSAHQMSTCRMSGKGPGYGACDTKGKLFECSNVYVADASTLPTASGANPMVSTMSFARHVSLGIVKELQQSKL

SEQ ID NO: 5794 - protein, 158 aa, Mycobacterium smegmatis str. MC2 155
MQVTMTVNGEAVTADVEPRMLLVHFLRDQLGLTGTHWGCDTSNCGTCVVEVDGEPVKSCTMLAAMASGHSVNTVEGMEVDGKLDPVQEGFMQCHGLQCGFCTPGMMITARALLRQNPDPTEEEIREAISGQICRCTGYTTIVRSVQWAARHAREEAKA

SEQ ID NO: 5795 - protein, 222 aa, Zea mays
MINAFQYSTRRAFANTVLKRSVSDRKAVLPLKVTDPAPKWKAMGVLNEEFKTYELSDYSGKFLVMVFYPLNFTFVCPTELIAFSEKKDEFLKRNTHLVGVSCDSHFSHLAWNNQPRKEGGLGGLNFPLISDIKKQISRDYNVLLPEQGISLRGLFIIDDKGILRVTMVNDLPIGRNVEEVLRLVDAIQFTDKHGEVCPANWNKGSSTIKPNVSGSKEYFKNQ

SEQ ID NO: 5796 - protein, 479 aa, Oryza sativa
MAAWNTSILLSPPPPLLSRAAVATPALNPYPLRLHRRHPQKPLCLPSESYPADTDADASSASLDSRPRRIALFVEPSPFAYVSGYKNRFQNFIKYLREMGDEVIVITTHEGVPQEFYGAKLIGSWSFPCPWYQKVPLSLALSPRIIGEVARFKPDIIHASSPGIMVFGALIIAKLLCVPLVMSYHTHVPIYIPRYTFSWLVKPMWLIIKFLHRAADLTLVPSVAIGKDLQAARVTAANKIRLWNKGVDSESFHPRFRNDEMRARLTNGEPEKPLILYVGRLGVEKSLDFLKRVMDRLPGSRIAFVGDGPFRAELQLMFTGMPAVFTGTLQGEELSQAYASGDVFVMPSESETLGFVVLEAMSSGVPVVAARAGGIPDIIPEDQEGKTSFLYTPGDVDDCVSKIERLLTCEELRETMRKAARKEMEKFDWRAATRKIRNEQYSAAIWFWRKKRAQLLRPIQWVSRRLFRPTPAPSTMNQS

SEQ ID NO: 5797 - protein, 156 aa, Mycobacterium smegmatis str. MC2 155
MLDVGTPAPDFTLRDQNNRPVTLSDYRTGENPRDVLVVFFPLAFTGVCEGELGAIRDQLPLYENDHSAVIAVSVGPPPTHKIWSIESGFTFPVLSDFWPHGKVARDYGVFNEDAGYPNRGTFVVDRSGIIRFAEMMEPGQVRDQKVWTAALQALRA

SEQ ID NO: 5798 - protein, 430 aa, Clostridium thermocellum ATCC 27405
MKIALICTEKLPVPPVAGGAVQLYISEILPYLKERHNITVFSKIHPGLSPDEVVDNVRYIRVPAANASKYVKNVKDLLDESFELIHIFNRPKWVLDFSEKLPSAKFSLSLHNEMFLPDKIPYEKAVECINRVEFINTVSKFIADGVKQLYPMAEDKLRVVYSGVNIEKYKPNWSPEGICNKELLKKKLGIENKRVILHVSRLSPKKGTHIVLSAMKKVMDCFDDVALVIIGSKWYGKNEEDDYTKQCKALAEQLSGPVVFTGFIPPSEIPPYYNVGDIFVCASQWNEPLARIHYEAMAAGLPIITTDRGGNAEIFEDNVNGIIIKDYKNPDSFADNIIYLLNNPHTALEMGKKAFESALSRFTWKKVADEVLAPIQNFDQRITVNDNKTQSGLAKENIIEEDIMKENNDEKATEEKSTEEIETFFDDTNF

SEQ ID NO: 5799 - protein, 214 aa, Brassica napus; identical to SEQ ID NO: 4801

SEQ ID NO: 5800 - protein, 211 aa, Thalassiosira pseudonana
MVTFPQIGKRAPNFVTVGVFKKRLGRIRLSDYRGKKYVLLFFYPANFTPVSPTELINLSDRISEFRKLSTQILAVSIDSPFSHLQSLLLSRKEGGLANLNYPLISDLSQTITKDYKVLTEEGLGLPGVFIIDKEGIIQYYTVNNLLCSRSVNELLRILESIQYVKKNPGQACPENWHPSSLIGRQQYDQILYSHPLKSKLYFRDLYSSKKN

SEQ ID NO: 5801 - protein, 327 aa, Oryza sativa Japonica Group
MAAPFALVSRVSPAARLPIRAAWRRARPTVGLPSSGRARQLAVASAAQENRDNTAVDVHVNQDGGNQQGNAVQRRPRRSSALDGISPFGLVDPMSPMRTMRQMLDTMDRIFDDVALGFPATPRRSLATGEVRMPWDVMEDDKEVRMRFDMPGLSREEVKVMVEDDALVIRGEHKKEEGEGAEGSGDGWWKERSVSSYDMRLALPDECDKSKVRAELKNGVLLVTVPKTEVERKVIDVQIKYLKKLVMENCSDECTVGNYWLVARIRKIVMTRAADQTILRKHLIQRLRRFQPSSFLTFRTSANTVLLGQERSASVHRPPETDTPYPP

SEQ ID NO: 5802 - protein, 776 aa, Silicibacter pomeroyi DSS-3
MSVAKPLPHDAAPLHVAGTARYVDDIPTPRDTLHLAFGLSTIAKGRITAMDLDAVRKAPGVVRVMVADDLPFANDVSPSAHDEPLLSDGTVHYVGQPLFVVVATSHLAARKAVRRARIDYAEEPAILTIEQALAANSRFEDGPRIYEKGDAEAAISGAAHVIEGTFELGGQEHFYLEGQAALALPGEGGDMLVHSSTQHPTEIQHKVAEALGVPMHAVRVETRRMGGGFGGKESQGNALAVACAVAARATGRACKMRYDRDDDMVITGKRHAFRIAYRAGFDAEGRIQGVSFLHHAICGWAQDLSLPVADRAMLHADNAYLLPNARIESHRLKTNTQSATAYRGFGGPQGMVGIERVMDHAAHVLGIDPVELRQRNYYAAPVGGAAPHIPRSISNQKEANTTPYGQVVEDFELHGMTEALLTSSDYAARKAAVAAWNAANPIVKRGIAFSPVKFGISFTLTHLNQAGALVHVYQDGSVHLNHGGTEMGQGLFQKVAQVAASRFGIPLEMVKITATDTAKVPNTSATAASSGSDLNGMAVKAACDTIRDRMAAYLAERHQAEVASVRFGNGHVEVGEARYSFAEAAALAYQGRISLSATGFYKTPKIEWDRIQGRGRPFYYFAYGASVTEVAVDTLTGEYRILRADILHDAGASLNPDLDIGQVEGGYVQGAGWLTTEELVWDDHGRLRTHAPSTYKIPACSDRPEVFNVALWDGQNREDTIYRSKAVGEPPFMLGISAWLALSDAVASCGDAYPALNAPATAEEVWKGIRRLGDGV

SEQ ID NO: 5803 - protein, 385 aa, Paulinella chromatophora
MKIAFFTETFLPKVDGIVTRLTKTVEHLVKMGDEVIVFCPEGAPKNYMGAQVAGVPAMPLPLYPELKLAIPRPGVAEILEDFCPDLVHVVNPAVLGLGGIWLAKTKNLPLVASYHTHLPKYLEHYGIGMLEPLLWELLKAAHNQAVLNLCTSTAMVEELSNKGIQHTALWQRGVDTDLFRPELRSNVMRERLLDGRSDTGALLLYIGRLSAEKQIERILPVLEALPETRLALVGDGPHRQQLERIFKDTATHFVGYLGGEELASAYASADAFLFPSSTETLGLVLLEAMAAGCPVVGANRGGIPDIVTNGVNGYLYEPDQEASLTIATQKLLGNHQQRLALREAARKEAERWGWAAATKQLRNYYEQVLGSKSNNFNYKSIVSKD

SEQ ID NO: 5804 - protein, 480 aa, Mycobacterium tuberculosis CDC1551
MVVGSGAGGAMVARTLARAGLDVVVLEEGRRWTVEEFRSTHPVDRYAGLYRGAGATVALGRPAVVLPMGRAVGGTTVVNSGTCFRPSLAVQRRWRDEFGLGLADPDQLGRRLDDAEQTLRVAPVPLEIMGRNGRLLLQAAKSLGWRAAPIPRNAPGCRGCCQCAIGCPSNAKFGVHLNALPQACAAGARIISWARVERILHRAGRAYGVRARRPDGTTLDVLADAVVVAAGATETPGLLRRSGLGGHPRLGHNLALHPATMLAGLFDDDVFAWRGVLQSAAVHEFHESDGVLIEATSTPPGMGSMVFPGYGAELLRWLDRAPQIATFGAMVADRGVGTVRSVRGETVVRYDIAPGEIAKLRVALQAIGRLLFAAGAVEVLTGIPGAPPMRSLPELQDVLRRANPRSLHLAAFHPTGTAAAGADEQLCPVDATGRLRGVEGVWVADASILPSCPEVNPQLSIMAMALAVADQTVAKVVGVR

SEQ ID NO: 5805 - protein, 461 aa, Silicibacter pomeroyi DSS-3
MDISFLLNGETVTLAGVDPTATLLDWLREARGLTGTKEGCNEGDCGACTVMISDAESSRALNACILFLPQLDGKAVRTVEGLGGTHPVQQAMVTHHGSQCGFCTPGFVMSMAASHAEGATDHDTQLAGNLCRCTGYAPIIRAARAVEDAPKPDWLATDRAFISPEILRGEAAGRGAEPPAAPTSSNELAALYDAHPDATLVAGATDVGLWVTKQLRELPKVIFLSGCADLKDIEITDTHVRLGAMVDMNRMRDALAPLHPSYGEMIRRYASVQVRNAATVGGNIANGSPIGDNPPALIALGATLHLRKGDTRRDLPLEAFFLDYGKQDRAPGEFVEAVSFPRQPDRLKCYKLSKRFDQDISAVCGCFNITVEGGTVTAARIAFGGMAGIPKRASAVEAALIGQPWTQQVVNAALPEFERDFTPMSDMRASARYRMETAKAMLSRYFAEDQGHLANVLEVRA

SEQ ID NO: 5806 - protein, 335 aa, Gemmata obscuriglobus UQM 2246
MARILIATDAWHPQVSGVVRTLDTTSRLLREQGHAVEVIEPTPYPALRVPFYPEIPLVLPRPGRIYERVYQFRPDHVHISTEGPIGLLVRRFCTRMRWRFTTSYHTRFPEYLKKLARVPEGLTYQFLKWFHGPSACMMVATPSLEAELIARGFRAPIRRWSRGVDLGLFRPRPKPDLEYPRPVLLYVGRVSHEKGIGDFLKLKTAGTKLVVGDGPARAELEREHPDATFLGYRKGEPLGEVYAAADLFVFPSRTDTFGIVLIEALASGLPVAAYPVTGPVDIVTRPELGALNDDLSVAVSKALAEGSPRACAEEGARYTWANCTAQFVSNLAPVR

SEQ ID NO: 5807 - protein, 202 aa, Vibrio salmonicida LFI1238
MVLVGRQAPDFTAAAVLGNGEIVDSFNFKEFTKGKKAVVFFYPLDFTFVCPSELIAFDNRLADFQAKGAEVIGISIDSQFSHNAWRNTAIEDGGIGQVKYPLVADVKHEICKAYDVEHPEAGVAFRGSFLIDADGLVRHQVVNDLPLGRNIDEMLRMVDALNFHEKNGEVCPAQWEEGKAGMDASPKGVAAFLSEHADDLSK

SEQ ID NO: 5808 - protein, 470 aa, Arabidopsis thaliana
MTTLSSINLSIPPHLLPSTTNTCSSSSATSCSPPRSSSFVLHSPLSFGHRRLPISKKSKLRFCGVITKEAVSGSNDMTITQVREDDESEIDAPLLDPESLSKPRRIALFVEPSPFAYVSGYKNRFQNFIRYLREMGDEVIVVTTHEGVPEEFYGARVIGSRSFPCPYYQKVPLSLALSPRIISEIARFKPDIIHASSPGVMVFGALAIAKMLSVPIVMSYHTHVPVAADLTLVPSAAIGKDLIAAGATAANQLRLWNKGVDSESFNPRFRSQEMRRIGVEKSLELLKSVMDKLPEARIAFIGDGPYKEDLEKLFTGMPAVFTGTLQGDELSQAYASGDVFVMPSESETLGLVVLEAMSSGLPVVAARAGGIPDIIPEDQEGKTGFLFNPGDVEDCVTKLRTLLHDRETREIIGKAAREETEKYDWRAATTKIRNEQYSAAIWFWRKKKVHVLGPINWLIKRLFPVPEGNV

SEQ ID NO: 5809 - protein, 345 aa, Agrobacterium tumefaciens str. C58
MTIHSSALSAIGNTPLIRLKAASEATGCEILGKAEFLNPGQSVKDRAALYIIRDAERRGQLRPGGTIVEGTAGNTGIGLSLVANALGYKTVIVIPETQSQEKKDALKLLGAKLVEVPAAPYSNPNNYVKVSGRLAKQLAATDENGAIWANQFDNIANRQAHIETTAPEIWDQTDGKVDGFICSVGSGGTLAGVADGLRDFNPDIKIGLADPEGAALYEFYKHGVLKSEGSSITEGIGQGRITANLEGFAPDFSYRISDAEALPVLFDLVTKEGLCLGGSSGINIAGAIRLARELGPGHTIVTILCDYGNRYQSKLFNPDFLRSKGLPVPQWLATKSEIPVPYETV

SEQ ID NO: 5810 - protein, 814 aa, Arthrobacter nicotinovorans
MDNPHYYSPPITRNVIGKRVPRTEDARLLTGRGKYLNDINVDGQLHACFVRSPAAHAQITGIDTSAASEMPGVHLVWTSADIEQYCAGIEAQYTAEGCEAMTMPLLAKDVVRYVGEPVVLVVAESRAAAEDACDLVGLELEHLEVVLDPRKSIQGGPVANGERPDNVGIRGRASFGDVDEAFSNAEHVVSALYHPGRVAAAPMETRGCLADYEWTEDRLKLWVSTQMPHYVKMCLSLFLGFDESRSEVISPDTGGGFGQKAHVFPEEMLMPLASKHLKTPVKWVEDRRENLLAGSHAHEQFVTIQYAANAEGRITGVRTHALVDGGAYHMPPQTMAVECWATAQSRQLVYTISRPLSTSTRGPLPSPMGAFRGVGYTAGTLARESLMDDLARKMKVSPFEIRRRNVVREFPWTNPQGVVYEEGSFLEVIDALEEMVDYPAFLRRQDEARKAGKYLGLGISVFVESSGESTGMMQAHGATDVFHDTATVKMDSTGSVTITSGLNSQGQGHQTTLAQVAADVLGIPFESISVDAGTSTKGAYGSGTIGSRAAVIAGGCVNRAAYAIRQKLVAVAANMLESSEEDIVLEDGFASVIGAAESRVSIADVAMAVYWDSSKWPAGFEPGLEFTKAWDTSRPMFSNGGHALIVELDPVTGFVKVEKVYSVEDCGVIINPTIVEGQIRGGVVQGIGMGLFEQLAYDNAGNLSTTSFLDYQTPTMDVSPPFEIRHIETPSVMTASGVKGMGESGLISAPAAVLNAVNDALSPFGSVLYELPATPEKVVRATKGIIDLQGPQDWSELWERAGVPALDRGPMDRE

SEQ ID NO: 5811 - protein, 134 aa, Magnetospirillum magnetotacticum MS-1
MTLNGRAREDLVPDNMLLLDYLREVTNLTGTKQGCDGGECGACTVLVDDRPRLACSTLAHQVAGKRVETVEGLATQGTISRLQAAFHEKLGTQCGFCTPGMLMAAEALLRKNPDPSRDEIKAAWRAICAAAPAM

SEQ ID NO: 5812 - protein, 769 aa, Magnetospirillum magnetotacticum MS-1
MSPKFPKNGTVGARTPLVDGVEKVTGKAKYTADIAANGALVGRILRSPVAHARIISIDTSAAEALDGVHAVCTGAETPVPYGVLPIAENEYPLARDKVRYRGDPVAAVAAVDELTAEKAINLIKVEYEVLPAYMTPKAAMKEGAVALHDDKPNNILREVHAEFGDVEAAFGEADLIREKVYTFAEVNHVHMELNATLAEYDPVRDMLTLNTTTQVPYYVHLKVAACLQMDSARIRVIKPFLGGGFGARTECLHFEIIAGLLARKAKGTVKLVQTREETFIAHRGRPWTEVKMKIGLMKDGKIAALALEATQAGGAYAGYGIITILYTGALMHGLYHIPAIKHDAWRVYTNTPPCGAMRGHGTVDTRAAFEALLTEMGEELGIGSLEIRQINLLPQIPYTTMYAQKVMSYGVPECLEKVKEASGWATRKGKMPKGRGLGIALSHFVSGTSTPKHWTGEPHATVNLKLDFDGGITLLTGAADIGQGSNTMATQVAAEVLGVRMSRIRVISADSALTPKDNGSYSSRVTFMVGNASISAAEELKSILVKAAAKKLDAREEDIEVIDEVFMVAGSQDPGLTFQEVVKAALIDTGTITVKGTFTCPIEFQGDKKIRGSAIGATMGFCYAAQVVEASVDEITGRVTAHKVWVAVDVGKALNPLAVEGQTQGGVWMGMGQALSEETRWDDGRMMHGNILDYRVPTMAESPDIEVIIVESLDPNGPFGAKEASEGMLAGFLPAVHEAVYEAVGVRSVKFPLSPETITELLDARDAAE

SEQ ID NO: 5813 - protein, 296 aa, Thauera sp. MZ1T
MEFRTLEDYVGRTPLVRLKRIDAGRNNVILAKLEGNNPAGSVKDRPALSMVMRAEARGQIKPGDTLIEATSGNTGIALAMAAAIRGYRMILVMPENQSVERRQTMRAFGAELVLVPSSGGMEMARDIAEKMRDEGRGIILDQFANPDNPVAHYEGTGPELWEQTGGRITHFVSSMGTTGTIMGTSRFLKERNPDICIVGCEPEEGSSIPGIRKWPEAYLPKIFERPRVDRFERVSQADAEEMTRRLAREEGIFAGISSGGAMHVALRIAAQVENAVIVSIVCDRGDRYLSTGVFPA

SEQ ID NO: 5814 - protein, 786 aa, Mycobacterium smegmatis str. MC2 155
MDTRTAPGRWPKRHALEFATGQARFVDDIRPQGLLHMAVVRSTRAHARIVSVDVSAAAARPGVVLVLDAHEAARHLETLPYQFGAPELLGARNVALQALPVDKVRYVGEPVAVLAAENPRAARAAAAAVAVEYDDLPEAPRPYEYLGTSVLSAEQREHVVTENHFSSGDPDGALARAEHLLDAEFTVGRSTTAPLETRGYVASWDASAQRLTVHASHQQPFQLRDELAEVLRLAPEAIRVVVPNVGGSFGLKMTGQVEEPLVCLLSMLCERPVKWIESRAECFLGGGREQIHRVRAGFGGDGRVEVFTDHMVVPVGARSVSPGWRQAYVSAASLPGPYDIPHVDVTSRVVTTNLPPWHSCRGFGKEAPVFVMERVMDLIARRLRLDPAEVRRRNLLPTSAFPHRMPSGYQIDSGDYRAVLDRVIDISGYTGTHQQPSSATVRRGVGISFEITPEGGGHASGRLAPNVTPTVAAAESATVRLDRDGHVTVLSGVTNPGGGNDTALARLAAETLGTTTENVTVVQGDTSLCPPGTGNASSRGVAVGGAAVVLAARDMADKLRRTAAATLGCAPHEVTLADDAAHAASGASIPLRNLCARAAECGELSYTRSYRPTPPDDPAYRYSYPYFSSGAYVAEVDVDTATGVVKVHAITAVHDCGRVVEPVLVEGQLQGAIAMGIGLALYEDNRFEADGAPATRTFKEYMVPRANDLPDFVIRHHETPAPHTLLGAKGAGEAGVGGALAAVANAIDDALQGAQHGAGEPIATVTSVPLDPPTVLSLIPEPRGLG

SEQ ID NO: 5815 - protein, 172 aa, Escherichia coli
IKPFKNQAFKNGEFIEITEKDTEGRWSVFFFYPADFTFVCPTELGDVADHYEELQKLGVDVYAVSTDTHFTHKAWHSSSETIAKIKYAMIGDPTGALTRNFDNMREDEGLADRATFVVDPQGIIQAIEVTAEGIGRDASDLLRKIKAAQYVASHPGEVCPAKWKEGEATLAP

SEQ ID NO: 5816 - protein, 365 aa, Thermobifida fusca YX
MNGLRIALVLATSSGGVGSHVRSLSRGLVAQGHRVAVVGPEATEQRFDFTGTGARFAPLEVADRPRPFRDLAALLRLNALLAGADVVHAHGARAGALVALSGAAAPLVVTMHNAPPAGGGAWLFGLLEQILVCRADLVLGVSSDLVERARTRGARRVARALVPAPPAAPSGRDPEQIRAELGVEPGQPLLVTVARLAEQKGLPVLLDAARAWARRTPSPLVVVAGEGPLRESLTARITAENLPVRLLGNRDDVADLLAAADVFVLSSMWEGQPLVVQEALRAGVPVVATDAGGVADLVGDAAVLVPVGDADALADGVVQVLDDEARAARMRLRSRAAAAVLPPPGSDCAQVISYYAELVDRARTR

SEQ ID NO: 5817 - protein, 152 aa, Hyphomonas neptunium ATCC 15444
MPYSLSVNGQVHLVEDEAQTPLLWVLRDTLKMTGTKYGCGVGQCGACTVHVDGQPTRSCSLPLIAVAESEITTIEGMSGAETRAVQDAWVRHDVPQCGFCQSGQIMSAVALLRANPAPDDRDIDTSMSGNICRCGTYNRIRAAIRDAAQSLP

SEQ ID NO: 5818 - protein, 461 aa, Streptomyces coelicolor A3(2)
MQFHDSMISLVGNTPLVRLNSVSKGIRATVLAKVEYFNPGGSVKDRIALRMIEAAEKSGELQPGGTIVEPTSGNTGVGLAIVAQQKGYKCIFVCPDKVSTDKINVLRAYGAEVVVCPTAVDPEHPDSYYNVSDRLVRETPGAWKPDQYSNPNNPLSHYHSTGPELWEQTEGKITHFVAGVGTGGTISGTGRYLKDASDGAVTVIGADPEGSVYSGGSGRPYLVEGVGEDFWPTAYDREVADEIVAVSDKDSFQMTRRLAKEEGLLVGGSCGMAVVAALEVAARLGEDDVVVVLLPDSGRGYLSKIFNDEWMADYGFLEDTGPSARVAEVLNHKEGGHIPSLVHMHPDETVGQAIEVLREYGVSQMPIVKPGAGHPDVMAAEVVGSVVERELLDALFAKRASLEDPLEKHMSAPLPQVGSGEPVADLMSVLGGADAAIVLVEGKPTGVVSRQDLLSFLAKVK

SEQ ID NO: 5819 - protein, 152 aa, Rubrobacter xylanophilus DSM 9941
MPAEVGERAPGFALPADSWEREVSLEEALERGPVVLFFYPGDWSSVCTDQLDEVQERLSEFSRRGAGVLAISVDSPWSHRAWAEARGITFPLLSDFHREVVRAYGVLNEQGFAERAYFVVDREGRIRARRVERTPRDRPPLERVLEDLDGAL

SEQ ID NO: 5820 - protein, 290 aa, Zea mays
  misc_feature (254)..(254): Xaa can be any naturally occurring amino acid
EQVCTKKQAGTGPEFPGCLTETDTHQRERETERRASGTSKHGGGRPSAQAASSAAYQGLSFLIPLAVCPCLHLPASSPEKIAPPPESRPRRIALFVEPSPFAYVSGYKNRFQNFIKYLREMGDEVIVVTTHEGVPQEFHGAKLIGSWRVSFPCPWYQKVPLSLALSPRIIAEVARFKPDIIHASSPGIMVFGALIIAKLLCVPLVMSYHTHVPIYIPRYTFSWLVKPMWLIIKFLHRAADLTLVPSVAIGRDLXAARVTAANKIRLLDKGVDSESFHPRFPHMEMRSRLT

SEQ ID NO: 5821 - protein, 51 aa, Glycine max
FSHLAWIQTDRKSGGLGDLNYPLISDVTKSISKSYGVLIPDQGIALRGLFI

SEQ ID NO: 5822 - protein, 179 aa, Legionella pneumophila str. Paris
MITVGNKFPEFQLKATVANDINNAFQMISNETYRGKWLVVFFWPKDFTFVCPTEIAEFGRLNSEFADRDAQILGGSTDSEFVHLAWRNQHPDLKDLPFPMLADVKRELTANLGILDDEEGVAQRATFIVDPQGITRFVMVTDLNVGRNPAEVLRVLDALQTDELCPCNWKKGEETIHIK

SEQ ID NO: 5823 - protein, 704 aa, Candida tropicalis
MASFLPDKVDYKNVDTLLLLCDGIIHETTVDEIRNVIDPNFPEDKYEEYVKTFTKPSQTPGFRETIYDIINANTTDAIHSFIILTTALDSRILAPTLTNSLTPIREMSLPERERLLASWRDSPIAAKRRLFRLVSSLTLSTFVRLASDLHLKAIHYPERDLREKAYESQEIDPFKYSFEEKPKFDGAESYLPDIDVIIIGSGAGAGVVAHTLANDGYKTLVLEKGRYFSNLELNFNDKDGVQELYQGGGALTTTNQQMFILAGSTFGGGTTVNWSACLKTPFKVRKEWYVDYGVEFAADETYDMAQDYVWKQMGASTEGITHSLANNVVIEGAKKLGYKSKPIDQNSGGHPHHPCGFCHLGCKYGIKQGSVNNWFRDAAANGSKFMQQVRVLQIINKKGIASGILCEDVATGVKFTITGPKKYVVAAGALNTPIVLNNSGFKNKHIGKNLTLHPVSTVFGDFGKEVQADHFHKSIMTSLCYEVADLDGKGHGCRIETILNAPFIQASLLPWRGSDEVRRDLLRYNNMVAMLLTTRDTTSGSVSADPKKPEALIVDYDVSKFDKNAILQAFLITSDMLHIEGAKRILSPQAWVPIFESSKPRDERSIDDKDYVEWRAKAAKIPFDSYGSAYGSAHQMSTCRMSGKGPKYGAVDTDGRLFECSNVYVADASVLPTASGANPMITTMTFARNIALGLAEDLKSKAKL

SEQ ID NO: 5824 - protein, 386 aa, Magnetococcus sp. MC-1
MATLMLTCRQIDLVLLLSERVPLQSWAQKGMLERELALYRAMQPHLRSITLLSDGNRHELDFRPQVPGMHILCNRWGLRPWHYQRWLKMPWRGWQRGHVLFKSNQLSSALLGLSLANHFKQKSITRCGYLLSEFAALHHGAASLARVRAFSREHRAFHGAHRAVVTTPHMHSLLQQRYGIDPQKIFVQPNYVDCDLFQPAPRVQQNATTQRLLLVGRLHPEKNILALLQAMIGLPKLHLDLIGQGEQLETLQQFVAQQALSVTFHGALPHRALVDFYQQCDLFVLPSLQEGHPKALLEAMACGAPVLASDAPGNRDVVMHGNNGWLCQTDSASIRHALQQLLPNQAQRQSLGQQARHYALQEVSLPVIAAREMALYEAIFNDSQRP

SEQ ID NO: 5825 - protein, 200 aa, Pseudomonas putida KT2440
MSVLVGKKAPDFTVPAVLGNGEIVDSFNLASAIKGKYGLVFFYPLDFTFVCPSELIALDNRIPDFQARNVEVIGVSIDSHFTHNAWRNTPVNNGGIGQVKYTLAADMTHEICKAYDVESEGGVAFRGAFLIDTNGVVRSQIVNDLPLGRNMDELLRLVDALQFHEEHGEVCPANWKKGDKGMNASPEGVAAYLSENAGKL

SEQ ID NO: 5826 - protein, 319 aa, Anabaena variabilis ATCC 29413
MRIANDVTELIGGTPLVKLNKIPQAEGVVARIVVKLEGMNPASSVKDRIGVSMINSAEAEGLITPGKTILVEPTSGNTGIALAMVAAARGYRLILTMPETMSQERRAMLRAYGATLELTPGTEGMRGAIRKAEELVASTPDAHMLQQFRNPANPKIHRETTAEEIWNDTDGEVDIVIAGVGTGGTITGIAEVLKQRKPSFQAIAVEPSNSPILSGGQAGPHKIQGIGAGFVPDVLRLELVDEVIRVSDDQAMSYGRRLAREEGLLSGISSGAALCAALQVGKRPENAGKLIVMVQPSFGERYLSTPLFQDLTNETAGVR

SEQ ID NO: 5827 - protein, 213 aa, Populus trichocarpa x Populus deltoides
MASISLPKHSLPSLLPTLKPITSSSQNLPILSKSSQSQFYGLKFSHSTSLSIPSSSSVKNTIFAKVNKGQAPPSFTLKDQDGKTLSLSKFKGKPVVVYFYPADETPGCTKQACAFRDSYEKFKKAGAEVVGISGDDPSSHKAFAKKYRLPFTLLSDEGNKIRKEWGVPADLFGTLPGRQTYVLDKKGVVQLIYNNQFQPEKHIDETLKLLQSL

SEQ ID NO: 5828 - protein, 163 aa, Bdellovibrio bacteriovorus HD100
MRLITPYWPTRRMTSNIFDEMDRMFENFATVPAAESQERLFKTACEVTESDDHYLLSVDLPGFKKENINIEMNGNLLTISGERKRDEKVIGTFSRSFTVPDTVDGAKIEAHHEDGVLSIYLPKAPLAKAQRIEIQTHKGGFFDRLLAAKNTAIEGNKSESSSH

SEQ ID NO: 5829 - protein, 763 aa, Vitis vinifera
MGIPAFYRWLADRYPLAVVNAVEDRPAFDNLYLDMNGIIHPCFHPEGLPAPKTYTDVFKAVFKYIDRIFSLVRPRKLLYMAIDGVAPRAKMNQQRARRFRAAKEAADDASGTERLKTVFESEMEMLALLDQTKKLDSNVITPGTEFMALLSSALKYYIHLRMNLDPGWRGIKVILSDANVPGEGEHKIMSYIRLQRNLPGFDPNTRHCLYGLDADLIMLALATHEIHFSILREDVHKAYRKDKNNKPRKDSLLVNKRGKSKQGEVGGEDIEDFISRQKFQFLNIWTLRDYLAHDMSIPDRSLKTDLERLIDDFVFMCLFVGNDFLPHMPSLEISEGAIDLLMTVYKKEFVQIGGYLTNSSEVYLERVERFMQVVGSHENAIFRKRSQKMRYDIFLSCKIMLTIQVQKKRGVRFQGSSNKKTVSDYSTTPCVEPQGMTGSSGSSLEPRKTPFCQDSKNIKLGEDGWKERFYVEKFEAKTEDDRERVRRHAVLKYIEGICWVMHYYYQGVCSWQWYVFYPYHYAPFASDIYGLDQLDIQFTLGKPFKPFDQLMGVLPAASAHALPLYYRKLMMDETSPILDFYPADFELDMNGKRYPWQAICKLPFIKESRLLAEIAKVESTLTDKEKLRNRLGMDALFIHISDPLAVKIFSFYKRKKDHPKLPMAKVKRKIDPKFSGGMNGYMYISDRPVWPAEFYSPIEDMEMIAQNKVISIFYKCPSFHPHIPRPLEGVILPGKTVIKPHLLRPPVLWHETSAVCGRKFSER

SEQ ID NO: 5830 - protein, 384 aa, Mycobacterium avium 104
MRVAIVAESFLPEVNGVSNSVIRVLEHLRRTGHEALVIAPDTPPGQPRAERIHDGIRVHRVPSRMFPKVTTLPLGVPTPRLVSVLRGFDPHVVHLASPALLGYGGLRAARWLGVPTVAVYQTDVPGFAASYGIPMTARAAWAWFRHLHTLADRTLAPSTVTMESLVAHRFPRVHRWARGVDVLRFAPSARSEALRRRWSPQGKPIVGFVGRLAPEKHVERLAGLAASDAVQLVVVGDGVDRAKLQSAMPTAVFTGALYGDELAAAYASMDVFVHPGEHETFCQVVQEALASGLPVIAPDAGGPRDLVTPWRTGLLLAVDEFETKLPAAVAHLIGERHRYAPAARRSVLGRSWPVICDELLGHYEAVLSPFVRRQVRAGRYAQGE

SEQ ID NO: 5831 - protein, 329 aa, Bdellovibrio bacteriovorus HD100
MQAGSVSDVVGHTPLIKLQSLSKITGCEIFAKAEYLNPGGSVKDRTALGIIQSAEKQGLLKPGDTIVEGTAGNTGIGLATLAAQRGYHCVIVMPDNQSKEKYHALEALGVELVKVAPCPFANPNHFYHTARALAESRPNSFWANQFENTANFEIHYKTTGPEIWEQMGQRVDAFVSSVGTGGTLAGVSAYLKEQDPKVFTLLADPMGSGLYSFVKSGKFEAQGSSITEGIGIMRLTENFKKARVDEAVQIHDEQMLSMLYYLAQHEGLLVGTSAALNIFASYQYALQNQGKGLRIATVMGDSALRYQSKVFNPQFLNEKNLKIMPLIHS

SEQ ID NO: 5832 - protein, 321 aa, Cyanothece sp. PCC 7424
MKIAHNITELVGRTPLVQLNRIPQSEGCLAQIVVKLEGMNPAASVKDRIGVNMINAAEKAGLIAPGKTVLVEPTSGNTGIALAMAAAAKGYQLILTMPETMSLERRAMLRAYGAQLELTPGTEGMRGCIQKAYEIVAMLPNAYMLQQFNNPANPEIHQETTAEEIWEDTDGQVDFLIAGVGTGGTITGVAGVIKERKPSFKAIAVEPANSPILSGGQPGPHKIQGIGAGFVPEVLKVDLIDEVVTVSDEEAISFGRRLAREEGLLSGISSGAALCAAIKVGKRPENKDKLIVMIQPSFGERYLSTPLFQELEPKMVALIHG

SEQ ID NO: 5833 - protein, 211 aa, Synechocystis sp. PCC 6803
MALQLGDVVPDFTQESSQGPISFHEWAGDSWVVLFSHPADYTPVCTTELGTVAKLKPEFDKRNVKVIALSVDDVESHKGWICDIDETQNTTVNYPILADGDKKVSDLYGMIHPNALNNLTVRSVFIIDPAKKLRLTFTYPASTGRNFDEILRVIDSLQLTDYHQVATPANWQDGDKCVVVPSISTEDAKVKFPKGVEEIKPYLRLTPQPNK

SEQ ID NO: 5834 - protein, 196 aa, Chlamydophila pneumoniae CWL029
MTLSLVGKEAPDFVAQAVVNGETCTVSLKDYLGKYVVLFFYPKDFTYVCPTELHAFQDALGEFHTRGAEVIGCSVDDIATHQQWLATKKKQGGIEGITYPLLSDEDKVISRSYHVLKPEEELSFRGVFLIDKGGIIRHLVVNDLPLGRSIEEELRTLDALIFFETNGLVCPANWHEGERAMAPNEEGLQNYFGTID

SEQ ID NO: 5835 - protein, 369 aa, Pseudomonas fluorescens Pf-5
MNSASLMCLLHRHDWPGWPGCCATGRSRAPGIPLGTSSLLHKDPAMSRIFADNAHSIGNTPLVQINRIAPRGVTILAKIEGRNPGYSVKCRIGANMIWDAESSGKLKPGMTIVEPTSGNTGIGLAFVAAARGYKLMLTMPASMSIERRKVLKALGAELVLTEPAKGMKGAIEKAAEIVASDPARYFMPQQFDNPANPAIHEKTTGPEIWNDTDGAVDVLVAGVGTGGTISGVSRYIKKTQGKPILSVAVEPATSPVITQKLAGEEIKPSPHKIQGIGAGFVPRNLDLAMVDRVELVTDEESKAMALRLMQEEGILCGISCGAAMAVAVRLAETPEMQGKTIVVILPDSGERYLSSMLFSDLFTEQENQQ

SEQ ID NO: 5836 - protein, 299 aa, Pseudomonas aeruginosa PAO1
MTVQYPTIADCVGNTPLVRLQRLPGETSNTLLVKLEGNNPAGSVKDRPALSMITRAELRGDIRPGDTLIEATSGNTGIALAMAAAIKGYKMILIMPDNSTAERKAAMTAYGAELILVSKEEGMEGARDLADKLQREGRGKVLDQFANGDNPEAHYHSTGPEIWQQTGGSITHFVSSMGTTGTIMGVSRYLKEQNPAVQIVGLQPMEGSAIPGIRRWPQEYLPKIYDASRVDRVVDMHQDEAEDIMRRLAREEGIFCGVSSGGAVAAMLRLSRELENAVLVAIICDRGDRYLSSGVYDPR

SEQ ID NO: 5837 - protein, 307 aa, Bacillus subtilis subsp. subtilis str. 168
MTVITDITELIGNTPLLRLKNFDVPEGVAVYAKLEMMNPGGSIKDRLGDMLIRDALDSGKVKPGGVIIEATAGNTGIGLALSARKYGLKAIFCVPEHFSREKQQIMQALGASIIHTPRQDGMQGAIQKAIQLETEIENSYCVLQFKNRVNPSTYYKTLGPEMWEALDGNIHTFVAGAGSGGTFAGTASFLKEKNPAVKTVIVEPVGSILNGGEPHAHKTEGIGMEFIPDYMDKSHFDEIYTVTDENAFRLVKEAAEKEGLLIGSSSGAALYAALEEAKKASAGTNIVTVFPDSSDRYISKQIYEGGI

SEQ ID NO: 5838 - protein, 322 aa, Yersinia pseudotuberculosis IP 32953
MSKIYEDNSLTIGHTPLVRLNRIGNGRILAKVESRNPSFSVKCRIGANMIWDAEKRGILTAGKELVEPTSGNTGVALAFVAAARGYKLTLTMPETMSIERRKLLKALGANLVLTEGAKGMKGAIAKAEEIQATDPERYLILQQFSNPANPEIHEKTTGPEIWEDTDGDVDVFVSGVGTGGTLTGVSRYIKNTKGKAITTVAVEPTDSPVITQALAGQEIKPGPHKIQGIGAGFIPGNLDLSLVDRVALVTNEEAISMARRLMDEEGILAGISSGAAVAAAVKLSEEEGFTDKTIVVILPSSGERYLSTALFADLFTEQELQQ

SEQ ID NO: 5839 - protein, 197 aa, Magnetospirillum magnetotacticum MS-1
MVGATATAALATVPSAAGAKPGGTDAPVLAKVSLTVNGQRRDLELDTRTSLLDAAHEHLHLTGSKKGCDHGQCGACTMIVDGRRINSCLTLAVMHQGAEITTIEGLGQPDNLHPMQAAFVKHDGYQCGYCTPGQICSAVAVLAEIKAGIPSHVTADLNAPMQVTEAEIRERMSGNICRCGAYSNIVEAMTEVTGRPA

SEQ ID NO: 5840 - protein, 153 aa, Burkholderia thailandensis E264
MSVEVDRQVPDFIAPATGGEFSLSGVKGKKLVLYFYPKDNTPGCTTEGLQFRDLYPKFKKAGAEVVGVSRDSLRSHENFKAKLELPFPLISDPDETLCTLFGVMKLKKMYGKEVRGIERSTFVIDGEGVLRHAWRGVKVPGHVDDVLGAVQAL

SEQ ID NO: 5841 - protein, 464 aa, Mycobacterium sp. JLS
MRIAQHVSELIGNTPLVQLNSVVPEGAGTVAAKIEYLNPGGSSKDRIAVKMIDAAEASGELKPGGTIVEPTSGNTGVGLALVAQQRGYKCIFVCPDKVSEDKRNVLRAYGADVVVCPTAVAPDDPDSYYSVSNRLVTEIEGAWKPDQYSNPMGPESHYETTGPEIWRDTDGKVTHFVAGVGTGGTITGAGRYLKEVSGGKVRVIGADPEGSVYSGGTGRPYLVEGVGEDFWPSAYDPAVPDEIIAVSDADSFDMTRRLAREEGLLVGGSCGMAVVAAIEVAQKAGPDALVVVLLPDGGRGYLSKIFNDSWMSSYGFLRNRLDGSIEQPTVGDVLRGKSGELPDLVHTHPSETVRDAIGILREYGVSQMPVVGAEPPVMAGEVAGSVSERELLSAVFEGRAKLADAVAEHMSPPMPLIGAGELVSTAAKTLRECDALMVVEEGKPVGVVTRHDLLGFLSDGSTRR

SEQ ID NO: 5842 - protein, 292 aa, Populus tremula x Populus alba
RIAAKLEMMEPCSSVKDRIGYSMITDAEEKGLIKAGESVLIEPTSGNTGIGLAFMAAAKGYRLIITMPASMSLERRMVLLAFGAELVLTDPARGMKGAVQKAEEISAKTPNSYILQQFENPANPKVHYDTTGPEIWKGSGGKVDAFVSGIGTGGTITGAGKYLKEQNPDIKLYGVEPVESAVLSGGKPGPHKIQGIGAGFIPGVLNVDLLDETVQISSEEAIETAKLLALKEGLLVGISSGAAAAAAIKIAKRPENAGKLIVAIFPSFGERYLSSVLFESVKKEAENMVFEP

SEQ ID NO: 5843 - protein, 394 aa, Clavibacter michiganensis subsp. sepedonicus
MRADVITKEYPPEVYGGAGVHVTELVKAMRQRTEVVVRAFGAPREEPGVFSYPVPAELAGANATLQTMAVDLAIASDVAGADVVHSHTWYANHAGHVASMLHGIPHVVTAHSLEPLRPWKAEQLGGGYRVSSWIERTAYEAADAVIAVSDGMKRDILRSYPALDEARVHTVYNGIDLESWKPVHDDELVRSLGIDPSRPSVVFVGRITRQKGLPYLLRAAALLPADVQMVLCAGAPDTPQIMEEVTALVRGLQEGRSGVVWIDRLLPRRELSAVLTAATVFVCPSVYEPLGIVNLEAMACGAPVVGTATGGIPEVVDDGVTGRLVPIDQATDGTGTPTDPERFVRDLAATLTEVVQDPGTAMRMGEAGLVRAEREFGWDRIARQTEAIYASILR

SEQ ID NO: 5844 - protein, 497 aa, Vitis vinifera
  misc_feature (7)..(7): Xaa can be any naturally occurring amino acid
MTITEMXEEDEEEESPPPSLESEATSRPRRIALFVEPSPFAYVSGYKNRFQNFIRYLREMGDEVMVVTTHEGVPQEFYGAKLIGSRSFPCPWYRKVPLSLALSPRIISEVARFKPDIIHASSPGIMACECLCVSLQASMGLHMREGVPMCFSMCGYGVACEGGKSLFEPRCMFIKPTRNPKGGYLWIVYLWACVCLCVSLLWVWGQRRGRVFGALFIAKLLCVPIVMSYHTHVPVAADLTLVPSAAIARDLQAARVTAANRIRLWNKGVDSESFHPRYYSHEMRLRLSNGEPEKPLVIHVGRLGVEKSLDFLKRVMDRLPEARIAFIGDGPYREELEKMFSGMPAVFTGMLQGEELSQAYASGDVFVMPSESETLGLVVLEAMSSGVPVVGARAGGIPDIIPRDDEGKTGFLYNPGDIEDCLSKLEPLLHSHELRETIGKAAREEMEKYDWRAATRKIRNEQYNAAIWFWRKKRAQLLRPLQWLTRLFFRTPEINYR

SEQ ID NO: 5845 - protein, 344 aa, Oceanicola granulosus HTCC2516
MQFKSDLADAVGNTPLIKLRKASEETGCTILGKCEFLNPGQSVKDRAALYIIRDAVERGELKPGGTIVEGTAGNTGIGLALVGASMGFRTVIVIPETQSQEKKDMIRLAGAQLVQVPAVPYRNPNNYVRYSGRLAEELRRTTEAGVIWANQFDNTANRQAHVEGTAPEIWEQTDGKVDGFVCAVGTGGTLAGVGMALQPKGVKVALADPGGSAVFDLLQNGEAKAEGTSITEGIGNGRITANLEGFTPDMAYKISDEEALPIVYDLLEQEGLCLGGSSGINVAGAIRMAKELGPGHTIVTVLCDYGNRYQSKLFNPDFLKSKDLPVPRWLEHGPTSIPGVFEDV

SEQ ID NO: 5846 - protein, 675 aa, Zea mays
MVTRCIREAVALAWVVLWALSTRAGTLLLCGRLSLGAGFPYVRRFADMAPERREAALRRWNRVRWLFPLRIAFAIVKILCHYVFYAMVNENSENPYWKAIGYSVDEPREDRARTATPSPSRPLDVGVVETRLLDDNKLLRSLVGRGLTVKPASSDANHHTVQCDAVIVGSGCGGGVAAAVLASAGYKVVVVEKGDYFTAEDYSSIEGPSMERLFERGGIFCTSNVTTMIFTGATVGGGSAVNWSASIRTPEEVTQEWAREHGLPVFASPGYAQAMDAVCARLGVTDGCQEEGFQNKVVRRGCEALGLCADAVPRNSSDAHFCGSCNFGCPTGDKRGTDTTWLVDAVARGAVILTGCKAEYFVLEKNHSSGSGSGRGKKCVGLVATCASNGVTKKLRIEAKVSIAACGALMTPPLLRRSGLKNRHIGSNLHLHPVSMAWGYFPENKQDPPLSGKCYEGGIITSMHRVTDRTIIETPALGPGAFAAMVPWESGRDMKERMRRYSRTAHAFALVRDRGVGFVDGEGRVRFTPSREDVDELRNGLRRVLRILVAAGAAEVGTHRSDGLRLRCKGLRDEDLEGFLDEVTIEKGPMHSRVDKWALHCSAHQMGSCRMGSSPKDGAVDGRGESWEAEGLYVCDGSLLPTAVGVNPMITIQSIAFCLSKGIAETMAQGQGKGQ

SEQ ID NO: 5847 - protein, 1444 aa, Arabidopsis thaliana
  misc_feature (1425)..(1425): Xaa can be any naturally occurring amino acid
MNVDQCQWRKKMMGRGVDGGCGAEEKPYRPFRRVALDKENGYEDMGSLEIDFLAQASKNLSERSPFDVPEDGSTSVLSVPTLPIALANLLKNHSDNKKRHKKSHSGADKKKKKSSRQGDKLRSGSIWLEHEDYFRRLDFPDLETLSDLASLRSLSSRNCFSIPSVEYDSIDIQQRETDASAKNEDVVCGDGVVLEQIKNLLTKDISEGTVRKEEDVVKPMGVDNVGNGISSGSDYSGSLEWVLGNRNRILLTSERPSKKRKLLGSDAGLGKLMVAAPCEGNALLCDFCCTGHHQLIVCTSCKATVHKKCYGLLEDSGKPWLCSWCELENGRADSERPCLLCPKKGGILKPVLSKTENGGPAEFAHLFCSLWMPEVYIEDLKKMEPILNFPGIKETRRKLLCNLCKVKSGACIRCCNGTCRTSFHPICAREAGNRLEVWGKHGCDTHSDIQESGKSVEGGESNAAESRSPICHLPSESVGEGHLSNDEMGVDVGTPGTGSDISRNSDLQELESPHSKFNLSATDNVESGMTGRSNEDERTLSKSLSFGLILKKLIDLGKVDVKDVAAEIGINPDALRAKLTDGDLLPDLLGKVVKWLSQHAHMGSSDKGKNLKRKTTTKSERRAAICTEGIVMLDSDILDPAVAKAFSIERTHEINICNNTTNNTRCTLTENCTGNGIVVVEAKANGSVLKKEGSVSLAPDHSPEEKNSIVLDQKVHHGKSSVIPSVDDHGEQSNSSSSGVMMENAFSLRPNSSQNRGNLNCPNPIILDLFNQEAYPGFNPHRYIHKELSELGKEQTLKSSTDSDVARMTTNFDGSEEGNKHLQGAETFLQLSKARKLGILDLSPEDELEGELLYYQLQLLGTAVSRKQLSDNLVYEVAKKLPLEIDEQHGRRWDDVLVNKYFHDVREARKQGRKEQRNKQAQAVLAAATAAAATSSRNTSLRKDMSEEPAQQEMSTSRRKVVGSSHLVPQTKESLLKMAVSGPPSEKRSDHHTPDFLVENPRTCDICRRSETIWNLIVVCSSCKVAVHIDCYKCAKESTGPWYCELCAESSSEPSFNFGEKPNSSTECTLCGGTTGAFRKTTNGQWVHAFCAEWSLESTFRRGQINPVQGMDYGNCQTTFHPSCARSAGFHMTGGGKHPHKAYCEKHSMEQKAKAESQKHGAEELKSLKHYRVGVLSEVELERLRLLCERIVKREKLKRELAISSHEILAAKRDHAARPLHVRNPFSPPEVSSDSATTSIKGHPDSNISGSEAIQRSDDITIDSTVTDKRRGKGPLLMDTDQKTDDSATSKSRFSRKLTERQILSGKTVPRKHCIVSPSVSEDGDNGSKPKKQHVETFAKELVMTSDEASFKNRRLPKGYFYVPVDCLQEDKPGNQKLASSDKPANQKTSSGDQSGFTNWLKAKEQMVLRYKRAVAATENQLKKXIVKLLGTRYKLCLLVMFEI

SEQ ID NO: 5848 - protein, 365 aa, Agrobacterium tumefaciens str. C58
MKIAFYSPLKSPYHPVPSGDRLMARLLMKAMTMAGHEVFVASELRSFLKQPDDPARPALIDEAGREIEAIAERWRQEGAPDLWFCYHPYYKAPDLLGPELVHRFGIAYVTAEASYSPKRNGMGWQAIQDGLLAALNGAAVNICFTARDREGLVRASPTLQWAILPPFIDAGAFLSNIPRPEPARLITVAMMRAGDKLSSYRTLSEALALLPETLDWTLDIIGDGPERAAVETMFSAFPDHRLGWHGEKSPTEIATLLSKASLYVWPGHGEAYGLAYLEAQAAGLPVVAEKVAGVPEVVKSGTTGLLTPENDTAAYAEAIRTLLGDDRQREELAKAARQFVINERSLENAATTLNQILLQAKARRS

SEQ ID NO: 5849 - protein, 523 aa, Bradyrhizobium sp. BTAi1
MLELRKDIFADERDDNLNEVGKGTQRQDMLGHVTGTSTYFNDHKLQGMLHLRVVRSAQPHARLRRIDTSEAERSEGVRRIIRGSDVPRNLNTLLSLINFGKDDEPTLAVDKVRYRGEPIVAVVAETPRAAAEAAAKVRIDYEDLPAVFDVEEALKPGAPTVNETYPKNTFIYHERYDHQKLRFGDVERGLAQADHVLEQRYQMSPIEHAPVETNGSIAAPDTNGRYVVYTSTQALFFSLDTCAKILDLPSNTFHFIGGTVGGGFGGKVDTLTEPLAILAAMLTGRPVRYVLGREEEMQFGPPRGAERIYIKDGVMRDGRIVARQIRGYFDSGAYTRLSSYAVVKCAAHLPGPYTIPNVHGDIYCVFTNRTPATAMRGFGITGIDFALECQMDKLAHLIGMDPMEFRILNAYRDGDMKAHRREAKNTALIECVQVAAEKAKWPMREEFRRMSSRKDGGGARAAVPSTPRETAATRPAPAQQRTSYDRGLSSPPLEPPPPPPQSPAPSSSHGATRFSSVFGTRRR

SEQ ID NO: 5850 - protein, 159 aa, Bradyrhizobium sp. BTAi1
MTKTPLQFRHNGREVALFVDGGTNLLVVLREMLGDVTPKFGCGQGGCGACTVLIDGEAHLSCLTLAETVEGRAVETLDGIKTGPNLHPLQQAFAEGFAAQCGYCTPGMLMAAKALLDRIPQPSREQVVEAISGNICRCTGYEPIINAVLAAAASRRASA

SEQ ID NO: 5851 - protein, 317 aa, Deinococcus radiodurans R1
MIESFIGHTPLVQLRRVVTPDMADVFIKLEGQNPGGSIKDRTALGLVQDAERRGVLKPGGTIVEPTSGNTGIGLAQVAAAKGYKLILCMPAQMSEERKRTLRAYGAELILTDPERRMLAAIEEAEKIAAETGAVMMNQFANPANPATHEASTGPELWEQMEGRVDAFVYGTGTGGTITGTGRYLKRQDPNIQVIACEPARSNVLSGGERGNHGFQGMGPGFIPDNLDRSLLDDVIQVWEEDAYPLARRLAQEEGIFIGMSSGAMVWTALEVARRLGPGKRVVTIACDTGARYLTTALFSGEGDTPAGYLPYSRERVE

SEQ ID NO: 5852 - protein, 216 aa, Silicibacter sp. TM1040
MGLRINDVVPNFTAETDQGTITFHDWIGDSWAILFSHPKDFTPVCTTEFSAVAQLSEEWAKRNTKVIGVSVDGVEDHKKWKGDIESYGNAPAGFPIIADEGLAVSKAFDMLPAEAYLPDGRTPADSATVRSVFIIGPDKQLKLSMTYPMTVGRNFAEILRALDGLQMSGKGVATPANWVPGEDVIIPPTVSNEDAKAKFGEFETIFPYLRKTKAPE

SEQ ID NO: 5853 - protein, 315 aa, Burkholderia xenovorans LB400
MSNFRGVIYDSIVDTIGATPLVRLSKLAAACDCRADVVGKLEFFNPLASVKDRIGIALIETAERAGRIKPGTLLIEPTSGNTGIGLAFVAAAKGYPLVLCMPESASIERRKMVGLLGAKVELTPASEGMGGAIRRAEALKRNHPDSLILQQFDNPANPDAHRHTTAEEIWNDTAGRVDIIVSGIGTGGTITGIGQTLKARKPELQMIGVEPSGSAVLSGGKPGPHKQQGIGSGFLSSILDLSVVDEIVTATDEDAIQTARQAAALEGVPIGISSGAALSVALRVGRRPGNAGKLIVVIVPSFAERYLSTELFADV

SEQ ID NO: 5854 - protein, 816 aa, Desulfovibrio desulfuricans subsp. desulfuricans str. G20
MDTNVLKADLHVHSRHSTRPSQWILQKLGCAESYTDPQALYRTALKRGMDLVTITDHNTIAGSLEIAHLPHTFVSEEITAYFPEDRCKLHVLAWNITEAHHDDITRLRENVYDLVDYLIQQDIAHAIAHPMYSLNDKLTVDHMERMVLLFRAFELNGSRDAYQNALLRQMLQSLDEAAVTRLADKHGMTPRMDRPWEKTLTAGSDDHSSLNIARSHTVVGPVTGSGSGRVQDFLRGIMDGRSQPAGRDATPETMAHNLYSIAYQFYKQKFGLGAHVHRDLLLRFVDRSLCSSPEPESGFMAKLHGLIGYRRPAHFFSGPPRSVQGLLQKEAEDIIWNDTELREIAAAQTKNDPAGEDTWFRFVNRATEKVMTQFGTSLLDNVKGADLFSVFNAMGSAGSLYAMLAPYFVAYTLFTRDREFCRTCRDSFTGQTDHAARLHVGHFTDTFYDVNGVALTLQMQLDMAFKNNKQLKVITCGPSEGEAARRPGVVNFTPVGSCTMPEYPELTLFYPPVLRMIHHCYTQNFTHIHSATPGPIGLVALAVARILKLPVHATYHTAFPQYVSMLTEDAGLEDAMWRYMVWYYNQMDRVYVPSHATGEELVARGIHPSRVVFYPRGIDTEKFSPAHRNGFYGRYGAHAGKTRLLYVGRISREKNMHVLANAFAQLLRRRSDVELAVVGDGPWTDAMKAQLSGLPVLFTGYLTDGDLSAAYASADVFVFPSGTDTFGNVVLEAQASALPVIVTDKGGPAENMLPDETGLMVPEGDAQALAAAMHALCADSAMRTRMSREARAYAQSRSFEAAFLKQWNMYRLQNVA

SEQ ID NO: 5855 - protein, 242 aa, Triticum aestivum
MAAANAPFAIVSRLSPAARLPIRAWRAARPAPLSTGGRTRPLSVASAAQENRDNSVDVHVSRQDGGNQQGNAVQRRPRHAGFDISPFGLVDPMSPMRTMRQMLDTMDRLFDDAVGFPTARRSLAAASEMPRMPWDIMEDDKEVKMRFDMPGLSREEVKVMVEGDALVIRGEHKKEAGEGQGEAAEGGDGWWKERSVSSYDMRLALPDECDKSQVRAELKNGVLLVSVPKRETERKVIDVKVQ

SEQ ID NO: 5856 - protein, 61 aa, Glycine max
  misc_feature (28)..(28): Xaa can be any naturally occurring amino acid
LCGTPSVSTVYSSELPLVGITAPGFRRXAVFDEEFNNVKLSDYIGKKYVVLFFYPLDFTFV

SEQ ID NO: 5857 - protein, 163 aa, Magnetospirillum magnetotacticum MS-1
MPGKPASPRKLSLTVNGTLRQALPADGDMPLIFWLRDDLGLAGTHLGCGKGECGACTVLVDGQPVRSCQTTLAEAAGKEITTIEGLGSPEAPHPVQAAFVAEQAAQCGFCTPGMVVESAALLARNAQPDRDEVKTALDGHLCRCGSHHRVLRAVMSLGGRDKS

SEQ ID NO: 5858 - protein, 221 aa, Thermoanaerobacter tengcongensis MB4
METEAIENIPRVCLPQIGAPAPDFKANSTFGPIKLSDYRGKWVVLFSHPGDFTPVCTTEFIAFTQVYTSFVERNVQLIGLSVDSNPSHLAWVENIYKTTGVEIPFPIIEDKDMRIAKLYGMISPAETSTSAVRAVFIIDDKQILRLILYYPLEIGRNIQEIIRIIDALQTVDKYKVLAPANWYPGMPVIVPPPKTYPELKQRLKNVEGYTCTDWYLCYKKV

SEQ ID NO: 5859 - protein, 187 aa, Acidovorax sp. JS42
MSVLNTTIKPFKAQAFKSGKFIEVTEKDVLGKWAVFFFYPADFTFVCPTELGDVADHYDELQKLGVEVYSVSTDTHFVHKAWHDASDTIRKIKYTMLGDPTWQISQNFDCLREGQGLADRATFIVDPQGVIQAMEITAEGIGRNAADLLRKVKAAQYVASHPGEVCPAKWEEGAKTLAPSLDLVGKI

SEQ ID NO: 5860 - protein, 297 aa, Yersinia pseudotuberculosis IP 32953
MTTLEHCIGHTPLVKLQRLSQGLNAEIWVKLEGNNPAGSVKDRAALAMIQQAELRGDIAPGDVLIEATSGNTGIALAMIAAMKGYHLKLLMPENMSQERQAAMRAYGAELILVSREQGMEGARDLALTMQENGEGNVLDQFNNADNPYAHFTGTGPEIWQQTAGKVSHFVSSMGTTGTITGVSQYLKSQNPQVKVIGLQPAEGSSIPGIRRWSAEYIPGIFRPELVDQVLDITQSVAEQTMRRLAKEEGIFCGVSSGGAVAGALRIAVDNPDAVIVAIICDRGDRYLSTGVFLSKGG

SEQ ID NO: 5861 - protein, 744 aa, Sulfolobus tokodaii str. 7
MRYVGQAVKRLYDDKFVTGKSTYVDDIQISALYAGFVRSPYSHAKIKSIDVTDALKVPGIVAVYTYKDLAPLIKDGIRIWTTYEDPRMWKFVPRKPLADGKVRFAGEPVAIVIGVNKYVVRDAIDKVNVDYEKLPPVVKMEEALEDKVIIHEELKTNVAFDQTFNGGNVEEAFKQADKVIPVEITNNRLIPSPMEPRGIVSRYEGGTLTIWYSTQVPHLARSEFARIFGVPASKIRVIMPDVGGAFGSKVNFMPEEVSVIASSIKLGRAVRWTATRSEEMLASEARHNTFKGEVAVKNDGTVLGIRGDLLVDLGAYLTLTAPLQPAIIPLMVPGPYKIKGVSIRSRAVYTTTPPITMYRGASRPEATFIIERIMSIVADELKLDDVTIRERNLVRANEMPYTNPFGLKYDSGDYLALLKDGIQKLQYYELKKWAEEERKKGRKVGVGMAYYLEISGFGPWEFGEIRVDENGDVLVITGGTPHGQGTETAIAQVVADTLQIDISRIKVIWGDTETVVASMGTYGSRTAAAAASAAMVASKEVLEKMKRIAAGLLNADVEEIEYESGEFYNKKDKSKKVSWNDVARNGYYGKELGISAQIILPGDVTFPYGVHVAVVEVDDYGIPRVLTYKAYDDIGNVINPALAEGQIHGGGVQAVGQALYEEAIINEDGQLTVTYADYFIPTAVEAPKFESYFVEKPHTSTWPTGAKGVGEAALIVGPAVIIRALEDATGKRFTKTPVRPEEIL

SEQ ID NO: 5862 - protein, 135 aa, Sulfolobus tokodaii str. 7
MLLVHFLRDELGLTGTKVGCDTSTCGACTVLMNGKSVKSCTVLAVQADGAEITTIEGLSSDSKLHPIQEAFKDNFALQCGYCTPGMIMQTYYLLKENPSPTEEEIRDGLHGNICRCTGYQNIIKAVQDASKRMRA

SEQ ID NO: 5863 - protein, 263 aa, Populus trichocarpa
MACSATSTSFISSIAAAKSMATPLSKTLTLPNSFSGTRKSIQSPVLRSISLTRGSHSAKSFVVKASSELPLVGNVAPDFEAEAVFDQEFIKVKLSEYIGNKYVVLFFYPLDFTFVCPTEITAFSDRYEEFKQINTEVLGVSVDSVFSHLAWVQTDRKSGGLGDLKYPLISDVTKSISKSYGVLIPDQGVALRGLFIIDKEGVIQHSTINNLAIGRSVDETKRTLQALQYVQENPDEVCPAGWKPGDKSMKPDPRQSKDYFAAL

SEQ ID NO: 5864 - protein, 377 aa, Bordetella bronchiseptica RB50
MTQRSEPAVPALRILHTEAATGAGGQETSIYREMLAMRARGHHLEAACQPGAPLARRLRAAGFPVHELAMDGVAAGVRAVWRLRELVRGRFDVVNTHSRRDTVLAAWAGRMAGAPLIVRTRHLAKPVGSLYTYTWLPHRVIAVSDHVRGQILRAGARAAHVEAIASPATLAPAPPASSLRAELGIAAAAQVIGCVAVMRADKGLDDLLDAFVALAGRHAAAHLVLVGEPGGIGALLRERAQRLGLGARVHLTGHRDDIPNVLAAFDVFALPTRSEALGLAMVEAAAAGLPVVAGNVGGVPEVVRHGATGLLVPPSDPAALAQALERLLVDPALRRAMGRAGSRMVRDERDFSPERQAARVEAAYCRWLAQRGRPAWR

SEQ ID NO: 5865 - protein, 283 aa, Sulfolobus tokodaii str. 7
MFPPQFGYYRPSSLADALDFMSGGGTKPLAGGQSLIPMLKFRLIQPKFLVDLNSLRELYFIRDEGNTVSIGSMIKHADIVKDLTIRNKLPLLSHTALKVGDMQVRNMGTIGGSLSNADPSADYPAVALAYDAKMVLISSSGEREVSAKDFFKGPFTTELREDEILREIKFPVLQGYKFKYEKIVRRAGDFALVGMAVLAKVEGNKVEDVRVAYTGVSDKPYRPYELEKMLVGEASLSKIKEFAEKVSNSINPPSDSRGSSSYRRKVTQLVTINVLKEVLGVVS

SEQ ID NO: 5866 - protein, 155 aa, Sulfolobus tokodaii str. 7
MVEIGELAPDFELPDTELKKVKLSALKGKVVVLAFYPAAFTQVCTKEMCTFRDSMAKFNQVNAVVLGISVDPPFSNKAFKEHNKLNFTILSDYNREVVKKYNVAWEFPALPGYVLAKRAVFVIDKEGKVRYKWVSDDPTKEPPYDEIEKVVKSLS

SEQ ID NO: 5867 - protein, 455 aa, Thermobifida fusca YX
MRVSNSLIELVGNTPLVRLKKVTAGLAPTVLAKVEYFNPGGSVKDRIALRMVEDAERRGLLKPGGTIVEPTSGNTGVGLAIVAAEKGYRCVFVCPDKVGADKLAVLRAYGAEVVVCPTTVAPDHPESYYSVSDRLAATIPGAWKPDQYSNPNNPESHYYSTGPEIWEQTEGRITHFVAGIGTGGTITGTGRYLKEVSNGRVKVIGADPEGSVYSGGTGRPYLVEGVGEDIWPATYDTKICDEIIAVSDKDSFLMTRRLAKEEALLVGGSCGLAVVAALKVAAQAGPDDVIVVLLPDGGRGYLGKIFNDEWMADYGFLEPETEEATAGQVLAAKDDSLPEFVHTHPHETVGTAIAIMREYGVSQLPVMKEEPPVMAAEVVGAIAERDLLDALFNGRAQLGDPVEQHMRPPLPVVGSGEPVSRCVELLQSSGAVVVLEDGKPSGILTRQDLLAHLAS

SEQ ID NO: 5868 - protein, 226 aa, Gracilaria tenuistipitata var. liui
MLLCCFITVILYNIDNTKFYNRKCSIKMITNNNILRVGQQAPNFSAIAVYDQEFKKITLSDYLGKYVILLFYPLDFTFVCPTEITAFSDSYKEIQSLNTEVLGISVDSEYSHLAWLQMERDIGGLGDLNYPLVSDLTKQISASYNVLTEEGKALRGLFIVDQQGIIQYSLVNNLDFGRSISETIRTLKAIQYVQSHPDEVCPANWQPGKATIINSPQKSKNYFQSI

SEQ ID NO: 5869 - protein, 393 aa, Clostridium acetobutylicum ATCC 824
MKILITTDTYYPMTNGVVVSINNLYRQLKTLGHDVRILALSPDGGEKVVGDVFYLSSFAIGIYPDARIMKPIKNKIVGEIIKWRPDIIHSQTEFSTMLVAKYIKRKLNIPEVHTYHTMYEDYLHYLLCGRILGKAGISKVTQKLLNSCEAVIAPTEKVRLKLQSYDVSTNIDVVPTGIDIKKFQKELNKEEKLELLSKYELTEEDTVLVYVGRIAEEKNIEEVIRLYRMALKLFKNIKLLIVGGGPYLSKLKGIIIKNRLSEYVKFTGMISPDKICKYYKLGDVFVTASTSETQGITYVEALSSGLPIICKWDMCVKGLIVNGQNGFAYRKDEEFLRALNYVIYNKKFKIHMMEMLQEKIKEYSTERFASRVLLTYNEALMESDDCYLVSKQA

SEQ ID NO: 5870 - protein, 158 aa, Colwellia psychrerythraea 34H
MNTLNVGDTAPLFTLNNENDEPVSLTDYIGKQQVLIYFYPKAMTPGCTVQAQGLRDIKAELTELNTVAFGISPDEVKRLIKFCQRDELNFSLLSDVDHQVADQFGVWGLKKFMGKEYDGIHRLSFLIGLDGKISHVFNKFKTKEHHDVVLAVLNELKK

SEQ ID NO: 5871 - protein, 477 aa, Physcomitrella patens subsp. patens
MCLFLDSPSLAVRWTDTTERKTLEYGCGEEQDVDRIVALPGQPPVDFAMYAGYITVDEKAGRAHYYFFVEAEENSEEKPLVFWFNGGPGCSSIAYGFAEELGPFFINSGGESLRLNRDSGNKVANVLFVESPAGTGFSYSNTSSDLLAAGDFRTAKDNYAFVTNWFKRFPQYRGRPFFLAGESYAGLYIPELAKLIYDNNKKLTSQSRINFMGFMVGNPVIDAYSDNWGYIDFLYYHALISDETYSQMKKACKFTHDNAPLSRECIQLMFYQSTNEYGGIDPYSIYAPACVSESSTNSSRNHFHRGLQQTSKNPVLGLVRQGYDPCTYDNSLIYFNRPDVQKAMHANTTGIPYPWVGCSDQLIVNWKDSAATVLPIYRELLNAGLRLWVISGDSDSVVPVTGTRYALASLNLPIVVPWYSWYHHQQVGGREVVYKGNLTLVVVRGAGHEVPLLRSAQWLQVFESFLKGSLLPSNPYN

SEQ ID NO: 5872 - protein, 354 aa, Ginkgo biloba
MVSTRVESLAQSGLLTIPSEYIRPVEERPTDCIIVNAEEEKNGKYDERTGQIPVVDMAGWEEGGEARRKEIMRQVAEASEEWGVMQVLNHGISDSLIARLQAAGKAFFDLPIEEKEVYANDSASGKIAGYGSKLANNASGQLEWEDYYFHLLWPTHERDMTTWPKYPSDYIEATDEYGREIRKLVSRILGTLSMELGLEEPRMETILGGQDLEMQLKINYYPRCPQPELALGVEAHTDISALTFLLHNMVPGFQLFKDGKWVTAKCIPGALIVHIGDQVEILSNGKYKSGLHRGLVNKEKVRISWAVFCDPPKDAMIGPMKELINEKNPPLFAAKTFKDHTDHKLFKKGQSKKN

SEQ ID NO: 5873 - protein, 385 aa, Treponema denticola ATCC 35405
MKIGIFTDCYYPQINGVVTSTMNLQKELEKLNHEVYIITTTFPNFKDEDEKHIIRIPSIPFFKWSEFRIGLFLKHTKAYNKVKALNFDIVHTQTEFSMGNFGTFIAKDLNIPCIHTYHTVYEEYTHYISNFGKSPLKKVVRKLSKRYIAHFSGVIAPTEKTRDLLISYGVKNKIYVVPTGINLEKFKKDIPDAETNSLLKSFNIKKDSFKLIFLGRISKEKNIETLINIMPKIVSENNNIQLIIVGDGPDRLELEERVRYLDLQDNVIFTNRIPNDKVPIYYKAADLFISPSKTETQGLTILEAMAAGVPVLVYDDTNIKGLVLHKKTGLLFKENDELLDNIKFALNNKEEIQSYAKEAFKIAEDFSSANFAKKVERIYKELINQ

SEQ ID NO: 5874 - protein, 381 aa, Ustilago maydis 521
MASTLPRSLVGIARSSVRALHSSVATAASTSTLSPVAAAHMRPVNGFVGAIGNTPLIRLNKISDETGCEVLGKAEFMEPGGSVKDRAALYVVKDAEERGLIKPGGTVVEGTAGNTGIGLAHVCRSKGYRCVIYMPNTQSQEKIDLLRMLGAEVHPVPAVAFDNPDNYNHQAKRHAERLENAVWTNQFDNTANRRAHIETTGPEIWDQIDGNLDGFICATGTGGTLAGITSYLKQKSNGKVQCWLADPPGSVLHSYIQTKGKLMDREGGSITEGIGQGRVTENLKPDVEKLDNSVHVPDEESISMVYDLLHEEGIYVGASSALNVVAAKKMAQQLGPNKTIVTILCDGAYRYQARLFSRKWLESKKLDTAIPEHLQKYIVLP

SEQ ID NO: 5875 - protein, 219 aa, Mesorhizobium loti MAFF303099
MSLRINDIAPDFTAETTQGTISFHDWIGDGWAILFSHPKNFTPVCTTELGTMAGLEGEFKKRNVKIIGISVDPVASHDKWQADIKTATGQTVHYPLIGDKDLKVAKLYDMLPAGAGETSEGRTPADNATVRSVYVIGPDKKIKLVLTYPMTTGRNFDEILRAVDSMQLTAKHQVATPANWKQGEDVIITAAVSNEDAIKRFGAFDTILPYLRKTKQPSA

SEQ ID NO: 5876 - protein, 376 aa, Acidobacteria bacterium Ellin345
MKVAIDIRRISDFGVGTYIRNVVRTLGRLDRENEYLLLGTPGRIHDMGQLQENFSHLECPDNDYSPASYFEFHRALKRQKVNVLHVPHLFWIPQGIPCPYVVTVHDLLDYLYRSNSASPAKRFAHFHFTKRVLNKASRIFAVSKFSKEDTVRLFGVPEEKIEVVYNAIDDRFRQGHTTDSDKLMIAERYQVNYPFILYAGRISPHKNVVRIIEAFSLLKSELAKEDSYPDLKLIIIGDEVSRHPDLRRAVIKGRVQQDVRFLGFVPIEVLRIFYDAAKVFIFPSLYEGFGLPPLEAMSHGTPVITSNTSSLPEVVGNAAVLVNPENVFEIQRALQRVLLDQPLREKLKLRGEEQIRKFSWENSVGRMLEIFRQVAK

SEQ ID NO: 5877 - protein, 184 aa, Streptomyces avermitilis MA-4680
MLTVGDKFPEFDLTACVSLEKGNEFQQINHKTYEGQWKVIFAWPKDFTFVCPTEIAAFGKLNDEFADRDAQVLGFSGDSEFVHHAWRKDHDDLRDLPFPMMADSKHELMRDLGIEGEDGFAKRAVFIVDQNNEIQFSMVTAGSVGRNPKEVLRVLDALQTDELCPCNWTKGETTLDPVALLAGE

SEQ ID NO: 5878 - protein, 184 aa, Brucella melitensis 16M
MLGIGDKLPPFKVTGVKPGFNHHEENGVSAFEEVTEQSFPGKWKVIFFYPKDFTFVCPTEIAEFARLASEFEDRDAVVLGGSTDNEFVKLAWRRDHKDLNKLPIWSFADTNGSLVDGLGVRSPDGGAYRYTFVVDPDNVIQHVYATNLNVGRAPKDTLRVLDALQTDELCPCNREVGGETLKAA

SEQ ID NO: 5879 - protein, 1353 aa, Arabidopsis thaliana; identical to SEQ ID NO: 150

SEQ ID NO: 5880 - protein, 196 aa, Saccharomyces cerevisiae
MVAQVQKQAPTFKKTAVVDGVFDEVSLDKYKGKYVVLAFIPLAFTFVCPTEIIAFSEAAKKFEEQGAQVLFASTDSEYSLLAWTNIPRKEGGLGPINIPLLADTNHSLSRDYGVLIEEEGVALRGLFIIDPKGVIRHITINDLPVGRNVDEALRLVEAFQWTDKNGTVLPCNWTPGAATIKPTVEDSKEYFEAANK

SEQ ID NO: 5881 - protein, 217 aa, Ralstonia eutropha JMP134
MAIRIGEEAPDFTAETTQGTIHFHEWIGDGWAILFSHPKDFTPVCTTELGYMAGLKPEFDKRNTKIIGLSIDPVGDHSRWAKDIEETQGHAVNYPMIGDADLKVAKLYDMIHPEASGGPRTAVDNATIRSVFWIGPDKKIKAMLAYPMSAGRNFDEVLRLLDSLQLNAKHAVATPVNWKPGDDVIIPTSVSDEDARKKYPNGFKTLKPYLRVVAQPK

SEQ ID NO: 5882 - protein, 180 aa, Cyanothece sp. ATCC 51142
MLRRQILAILLAIAVIFSGTQTPALALGGPQPPLNESAPNFTLPTNTGDGEISLSDYRGQWVVLYFYPQDFTPGCTLEARRFQQDLPKYEAKNTQILGVSVDDVNSHREFCDAEGLKFPLLADTTGEVSKTYGSFLTGMSLRHTYLIDPDGILREKFLGVRPAIHSQEVLAYLDEVNSNH

SEQ ID NO: 5883 - protein, 343 aa, Synechococcus sp. CC9311
MPMLAIKFLENNSSLMSRVYADNSQAIGNTPLVRLNHVTKGCKATVLAKIEGRNPAYSVKCRIGANMIWDAEKRGVLSEGKTIVEPTSGNTGIALAFTAAARGYKLILTMPESMSIERRRVMAVLGAELILTEAAKGMPGAIAKAKEIADSDPSKYFMPGQFDNPANPEIHEKTTGPEIWDDCDGAIDVLVAGVGTGGTITGVSRYIKQEKGKAITSVAVEPSHSPVITQTMNGEALKPGPHKIQGIGAGFIPNNLDLSVVDRVEQVTNEESIEMALRLAQEEGLLVGISCGAATAAAIRLAQQDEFAGKTIVVVLPDLAERYLSSVMFADVPTGIIEQPVPV

SEQ ID NO: 5884 - protein, 196 aa, Cyanobium sp. PCC 7001
MSRLVGLPAPDFTATAVVDQEFQTVSLSQYRGKYVVLFFYPLDFTFVCPTEITAFSDRYGDFTSKNTEVLGVSVDSEFSHLAWVQTDRKNGGLGACNYPLIADLKKEIARAYNVLDEEAGVALRGLFIIDPDGVIMHSTINNLPVGRSVDETLRVLQAFQYVQSHPDEVCPANWQPGDKTMNPDPVKSKDFFAAVN

SEQ ID NO: 5885 - protein, 344 aa, Arabidopsis thaliana
MVSWMMTTKAVLISSGVATVALLLKLSVPVAVDFSVSRAPILWSSLLSWLKPPYLYVVTNGIIITIVASSKYYRSHHDRDEEDEIVVYGGGGYKIQTEEPIVNQHQASPRILEVKDLDTGAHFGFVVANLEAEELESEAVTAVVFDDEEEEKKIIDSAATAEDEIEEELKSVIMVENSDLVESDVIPPPMMIESENLPPIEKPLVTSRFGHRKLMKASQEGGRALRVTKPKKNETLENTWKMITEGKSTPLTRQLYRRSDTFGRGDSGGVDGEVKPVYKKSDTFRDRTNYYQLAETAKVRKEPSLSQEELNRRVEAFIKKFNEEMKLQRMESLRQYKEITSRGV

SEQ ID NO: 5886 - protein, 153 aa, Synechococcus sp. RS9917
MALGVGDSAPAIRLEDQNGVLRDSNALEGRCLVLFFYPKDETPGCTAEACGFRDNYSELQAQGAEVWGVSGDDIVSHRRFAERHQLPFPLLSDRDQGLRRAFGVPKTLGLLPSRVTYVIDGSGTIRHVFNNLLDGPAHVNEALRILQGLQGGA

SEQ ID NO: 5887 - protein, 219 aa, Fagopyrum esculentum
MPGLTIGDSIPNLQVETTHGSFKLHDFIGDSWVILFSHPGDFTPVCTTELGKMAKYEEEFTKRGVKLLGLSCDDIASHKEWIKDVEAFTPGSKVRYPIIADPKREVITKLNMVDPDEKDSSGSQLPSRALHIVGPDKKVKLSFLYPATTGRNMEEVVRVVESLQKAANDKVATPVDWQPGDEAVISPSVSDEEAKKMFPHGYRTVDLPSKKGYLRFTQV

SEQ ID NO: 5888 - protein, 150 aa, Nocardioides sp. JS614
MNLTINGREVALTSDRETPLLTALRDELGLVGTRFGCGQGLCGACHVNVDGTVLPSCQTPLWQVEDRSVTTVEGLSRDGAPHPVQQAILDHQAAQCGFCISGIVVRAAALLEEEPDADADRVAEALDGHLCRCGAQRRIVAAVLAARGEA

SEQ ID NO: 5889 - protein, 671 aa, Ustilago maydis 521
MTQSQATPINVVQDMARAYPRDVKRPKLRVAIVTENFLPKVDGVTRTLARLLEHLNNEGHEAMVLGPETGIRQYAGHPVVGTFGVPLIIYPGLKLNFMRPRFVRRLQQFKPDVIHFVDPIWLGAQMLPAVQKWLPEVPCVSSYHTNLPTYATLFGMPWLENTMWNLTRNLHDRCEIIFCPSESTRRMLKDKGFSNVEIWSRGVDTELFNPQARDENLRESWGCTPKPANLRLPLSPSVAAADAAAKFGSEHAALSHLAGKLGVAIVEANTKRNSVSLTQDDSFIRTPPTVATSPEFSFSPPPAYDSLSGVPDLASSSFLLPPPALASSSAASIPTSLRVERELRDSKTVVLYVGRISWEKNLRLLIEAFKLLPSSVRSKAKLVFVGDGPARSDLTRLCNKLELDASFMGHQKGSRLAAMYASASIFAFPSFTETFGQVVLEALASGLPVVGLHAEGTSDLVSHGKTGFLLDVNAVKKSSTMGAPNESRSATPGARGSSMCDKAAQTMAINDLAAAAQNAVGKLGRVAGPASKPSWSSRSTECVGLPTRIPSTLDFKCAMTPNTAWFHQCAKTYSMLLERLILDRQARALMGQRAVLYASGKTWWDAMDAPVRGYEHVILQSGSSNLSDDELEAWRTRQRIHAPLTGPRIKLAVILYVVLFACLVSLRFVSP

SEQ ID NO: 5890 - protein, 405 aa, Xanthobacter autotrophicus Py2
MNALPRPEGTALGASPMITLTLNGRSVAATAEARTNLADLVRDTLNLTGTHIGCEHGVCGACTILVDGEPARACISFAAACQGADVVTIEGLDDDAVTAELRAAFNREHALQCGFCTPGMLVSARDLVLRLPEADEARIRLGLAGNLCRCTGYAGIVKAVASVIAARRAQGIGPLTAERRLGPVGARAGGATAIAVPLANVAALAAPAAEPLALGETFIPANSFDQGFEVPFPPADVFAFFGRIEDVAACLPGAVIDAMPSADLVEGGMRVKLGPIGTTFRGTARIRRDEATSSGTIHGAGGDGRSRTEGEIRYRVLPGTTPGSACVALSVGYTLKGPLAQFGRPGLVREVAGRLIADFAANLEARLSGAPAPAATGPGLNPLKLLTALISQKLGALWHRIRPAS

SEQ ID NO: 5891 - protein, 306 aa, Erythrobacter sp. NAP1
MKATSILETIGNTPHIRLSRMFPDHEVWLKSERANPGGSIKDRIALAMVEDAEASGALKPGGTIVEPTSGNTGIGLAMVAAVKGYTLVLVMPESMSIERRRLMLAYGATFDLTPKEKGMKGAIERATEIVETTEGAWMPSQFDNGSNPAVHARTTAKEILGDFADNPIDVMITGVGTGGHLTGCAEELKKSWSDFKAYAVEPVGSPVISGGEPGPHPIQGIGAGFIPGNLHTNAIDGAIKVDPEDAKEMARRAAREEGMLIGISSGATLAAIAQKLPDLAAGTRIMGFNYDTGERYLSVPDFLPVE

SEQ ID NO: 5892 - protein, 414 aa, Synechococcus sp. PCC 7002
MLKVLQISSSDISGGASIAAYRLHQGLQRVGIDSSILVGNKQSGDRHVNQISKRRYVNKALSRIGASFGLHYLTIPDTWQIKKHPFYQTADILNLHNLHGEYFNYLALSQLTANIPAVYTLHDMWSFTGHCAYSFTCEKWQSGCGSCPNLSTYPAVKIDNTQLEWRLKKWVYDKSNLTIVTPSQWLKQQAEKSILIANKTTQIYWIPNGIPTTIFQPLDQQLCRSVLGLPQNKYILAFAAQNLNDPRKGSDLLQKALQLIPTSLKQEIQLLILGNQSAGFLADIDIPAISLGYVEGDRLKTIFYNAADLLLCPTRADNLPLVLQEAMACGTPLVSFDIGGVPDLVRPGVTGYLAQPEDPQDLCNGIVQLLEDKTLRGKMAQNCRRIAETEYPIELQAQRYIDLYQQILNQKTTA

SEQ ID NO: 5893 - protein, 1364 aa, Neurospora crassa
MAPSAVPVESGATPLNLGSLPGSLTTTFDDTLRFYLNGTRVVLDDIDPEITLLEYLRGIGLTGTKLGCGEGGCGACTVVVSQFNPTTNKIYHASVNACLAPLVSVDGKHVITVEGIGNVKKPHPAQERVAKGNGSQCGFCTPGIVMSLYALLRNNDNPSEHDIEEAFDGNLCRCTGYRPILDAAHTFIKKAPSACGNSKANGGSGCCMEGGGGGGGCGGANQNGDDQPIKRFTPPGFIEYNPETELIFPPALKKQEFRPLSFGNKRKRWFRPTKLEQLLEIKKVYPNAKIIGGSTETQIEIKFKALQYPISVFVGDIPELRQYFLKENHLEVGGNITLTDLENVCQEAIKHYGEKRGQIFNAMYKQLKYFAGRQIRNVGTPAGNLVTASPISDLNPVLLAADAVLVAKSLGENGIVETEIPMSQFFTGYRRTALPQDAILAAIRVPLTREKNELFRAYKQAKRKDDDIAIVTSAFRVRLNEDGIVDQCSLVYGGMAPTTVGAKTANSYLLGKKFAEQETLEGVMNALEQDFNLSFSVPGGMATYRKSLAIGLFYRFYHEFMLILGSSADEEVVPELEREISTGQEDREAAAAYMQETVGKSNPHLAALKQVTGEAQYTDDIPPLKNELYGCLVLSTKAHAKLLSVHASAALDIPGVVDYIDKNDMPNAAANHWGAPHYQEVFFAEDTVYTAGQPIGLIVATSAARAAEGARAVKVEYEELPAIYTMEEAIEKESFFDFFREIKKGDTQEGFKNSDYVFSGVARMGGQEHFYLETNATLAIPKHEDGEMEIISSTQNPNEAQAYAARVLDVAANKIVVKVKRLGGGFGGKETRSVQLSSIIALAAQKTGRPVRCMLTREEDMVISGQRHPFLGRWKMGVNKDGKIQALEVDIFNNGGWCWDLSAAVCERAMTHSDNCYSIPNMHVTGRICKTNTMSNTAFRGFGGPQGMFIAESYMNEVADRLGMPVERFREINFYKPGERTHFNQEIQDWHVPLMWGQVMKEAEYESRREAIAKYNVEHKWRKRGLAIIPTKFGISFTALWFNQAGALVHIYHDGSVLVAHGGTEMGQGLHTKMTQIAAQALNVPLENVFISETATNTVANASATAASASSDLNGYAIYNACQQLNERLAPYREKLGPDATMKDLAHAAYFDRVNLSAQGFYKTPEIGYTWGENKGKMFFYFTQGVTAAEVEIDTLTGTWTCLRADIKMDVGQSINPAIDYGQIQGAFVQGLGLFTMEESLWMRNGPMAGNLFTRGPGTYKIPGFRDIPQKWNVSLLKDVEWKELRTIQRSRGVGEPPLFMGSAVFFAIRDALKAARAQYGDDGLLRLESPATPERIRLACVDPIVERARVLPKEGEKSFFIAI

SEQ ID NO: 5894 - protein, 370 aa, Aspergillus nidulans FGSC A4
MFRQSVRRFATAALRSAAESPYNVRVSQAQGFVNGLTEAIGNTPLIRLKRLSEETGSNILAKAEFQNPGGSVKDRAALYVVKDAEERGLLKPGGTVVEGTAGNTGIGLAHVCRSKGYKLVIYMPNTQSQGKIDLLRLLGAEVYPVPAVAFDNPENYNHKARRHAESLDNAVWTNQFDNTANRRAHIETTGPEIWAQTGGKLDAFTCSTGTGGTLAGITYYLKQASGGRVKSFLADPPGSVLHSYIQSGGKLVERSGSSITEGIGQGRITDNLQPDVGTLDGSLNISDEKTIEMIYRCLDEEGLYLGASSALNVVAAKEVAEKLGKGSTVVTILADGAYRYADRLFSKSWLESKGLRNAIPKHLEKYIVLP

SEQ ID NO: 5895 - protein, 227 aa, Picrophilus torridus DSM 9790
MEGKMPLIGEKFPEMEVVTNLGNIKLPDDFKGKWFVLFSHPGDFTPVCTTEFFSFAKHHDDFKKLNTELIGLSVDSKISHIEWINWIKQNLKIDIKFPIIADPMGHVATKLGMIQAQSATQTVRAVFIVDDRSTIRAILYYPMETGRNISEILRLIKSLQMVDKYKIVTPANWPNNEIIGDNVLNPPPATQNDIEERTKKYKGYAWWLTYQDANKADVDEAKEITGE

SEQ ID NO: 5896 - protein, 272 aa, Persea americana
DIPIISLAGIDSEDGRAEVCKKIVEACEDWGVFQVVDHGVEAGLISEMTRLAREFFTLPAEEKLRYDMSGGKKGGFVVSSHLKGEAVQDWREIVTFFSYPIRSRDYSRWPDKPEGWKEVAQVYSDKLMGLACKLLEVLSEAMGLEKEALTKACVDMDQKMVVNFYPKCPQPDLTLGLKRHTDPGTITLLLQDQVGGLQATKDGGKTWITVQPVEGAFVVNLGDHGHFLSNGRFRNADHQAVVNSNFSRMSIATFQNPAPEAIVYPLAIREGE

SEQ ID NO: 5897 - protein, 371 aa, Burkholderia xenovorans LB400
MKALSVLHSESSRGWGGQEVRTLKEMIALRALGHNVELVCPEDARLGIRSRAEGFAVHHARMRTGGDLRSMLTIRTLLERGRFNVLNTHSGHDSLVAGMAGRLARTPFIVRTRHLALPITSLATYNWIPHRVVAVSHHVRRYLISAGVQESRVETIYDGIVKPEALTHSTLRDELGLNAGAIVAGMVAIVREKKGHEDLIAAVRPMLAERPDLHVVMAGDGVWFGKIRAIVDGMGLAHRIHLLGFRTDITNVLRGCDLFVLPTHQEALGQSFIEAMAAGLPVIGTRVDGVPELIDDGVNGLLVPAHDIEALRAALARLIDDAPLRARLGLAARLKTDSRFTVDAMANETVDCYMRGIVGRRPYYGQWRATA

SEQ ID NO: 5898 - protein, 160 aa, Bradyrhizobium sp. BTAi1
MTPATIRLTVNGQTHDVTAAPDTPLLHALRNDLGLNGPKYGCGLGECGACTVLIDGRAARSCVIPIEGCVGRTVTTLEGLGSREAPDPVQQAFIAEQAAQCGYCLNGMIMTTKALLAIKPDPSLDEIKQALRYNLCRCGAHIEILRAAMRAAGHALEALD

SEQ ID NO: 5899 - protein, 309 aa, Oceanobacillus iheyensis HTE831
MAIYESIQQLIGNTPLLRINEMDIPNNVHLYAKLEFLNPGGSVKDRLGQYLIDKAWEQGFLREGSTIIEPTAGNTGIGLALAARTKKLSVIFCVPEQFSVEKQQIMRALGATIIHTPKEKGMMGAIEKAEQLVEEIPNSYSPQQFSNKFNPMTYYETMAPEIWSDLQGDIDIFVAGAGSGGTFTGCASYFKERKNSIHNVIVEPVGSILGGGEAGPHLTEGIGMEFIPEYMNQSFMDEVQTISDKEAFSMVEELARKEGLLVGSSSGSAMVAALNKAREARSGTTIVTILPDGSDRYLSKQIYNVSKQL

SEQ ID NO: 5900 - protein, 308 aa, Bacillus clausii KSM-K16
MEVYRHIHELIGSTPMLELTAFPLPRRVRLFAKLEYTNPGGSIKDRLGIKLLKEAIATGKITPKGTLIEPTAGNTGIALALAAIGTDVKVICVVPKAFSIEKQQLMRALGAVIVHTPSEHGMKGAIAKAKALEQELDDAYCPQQFSNKANPLAYYETLGPEIVHELDGKVDVFVAGAGTGGTFSGTAAYLKEVIPGIRTVVVEPEGSILNGGEPGPHRTEGIGMEFIPDFVNRSLFEAIYTISDNQAFKRTRELAEHQGVLVGSSSGAALEAALREAEMADEGAHIVTVFPDGAERYLSKGIYEEEPL

SEQ ID NO: 5901 - protein, 152 aa, Tropheryma whipplei TW08/27
MSNQVLPKGSFAPDFELVDQNGATVVLSEVAAKKDVVLFFFPLAFSGICTDELIQVRDSLDSFKSFEVFALSVDSKFTLRAYSESQGFSFALLSDFWPHGGVAKQFGAFLEDVGVASRSTFIVGRDLKIKASFFSGIHEPRDFSEIRAALAS

SEQ ID NO: 5902 - protein, 155 aa, Bradyrhizobium japonicum USDA 110
MPIQFQLNGTATAVDADPDQRLLDVLRGRLGVTGPHFGCGANECGACYVMVDGRAMASCDMPMWSVAGKDVVTIEGLGTTEQPHALQRAFISEQAMQCGYCVSGILISAAALLKRNPSPTEAEVRTALDRNLCRCGSHNRMVRAVLRAASEMATP

SEQ ID NO: 5903 - protein, 803 aa, Burkholderia xenovorans LB400
MGNLDTNLDRLAALEGMGCSRKRREDPRFIQGKGTYVDDVKMPGMLFGVMVRSPYAHARVKKIDKSRALAHPGVHAVLTADDLKPLKLHWMPTLAGDVQAVLADEKVCFQNQEVAFVVADDRYVAADAAELVEVEYEELPAVVDPLTALAADAPVIREDIQDKQAGAHGARKHPNHIFTWQVGDKDKTDRVFDNAEVTVTQDMLYPRVHPCPLETCGCVASFDKARGDLTVYITSQAPHVVRTVVGLLSAIPESKIRIISPDIGGGFGNKVGVYPGYVTSIVASIVLGRPVKWIESRAENLSSTAFARDYHMSGELAVDRDGRIKALRVHVTADHGAFDACADPTKWPAGMFHVCTGSYAIPNAFVSVDGVYTNKFPGGVAYRCSFRVTEAVYLIERMVDVLAQKLGIDKAEIRLRNFIRKEQFPYTTPLGLEYDSGDYEPALKKVLAAVDYPGLRAEQAARRADPDAEWLLGIGVVNFTEIVGAGPSKMCDILGVGMFDSCEIRVHPDGSAIARMGTITQGQGHQTTYAQIIASEAGIPASVITVEEGDTSTAPYGLGTYGSRSTPVAGAAIARASRKIREKARQIAAHLLEASPGDVEFDLDRFVLKGSPGQFKTIKEVAWAAYNNVPEGLEMGLEAVDYYDPPNFTFPFGAYVCVLEVNRYTGETRVRRFYALDDCGTRINPMIIEGQIHGGLTEGFAVAMGQELPYDEAGNLLGATLMDYFVPTSVETPHWETDFTVTPSPHHPIGAKGVAESPHVGSIPCFTAAMVDAFAHLGVTHMNMPHNAYRVWQQCRALGLTRQ

SEQ ID NO: 5904 - protein, 342 aa, Fulvimarina pelagi HTCC2506
MDDISQNRSARTHGRGKIYDSIVDTIGDTPLVRLKKLAAEKGVKANLLAKLEFFNPIASVKDRIGVAMLEKLEADGRIEPGKTTLVEPTSGNTGIALAFAAAAKGYNLILTMPETMSIERRKMLRLLGAQLVLTEGAKGMKGAIARAGELVEEIPNAVIPQQFENPANPEIHRVTTAEEIWNDTGGNVDVLVAGIGTGGTITGAGQILKSRKPDVHVVAVEPEASPVLSGGQPGPHKLQGIGAGFAPQILDQGVYDEVLTVSNEESFELARLVARLEGVPVGISSGSALAAAIKVGQREEMADKNIVVIIPSFAERYLSTPLFEGLTDEDEPKEPRRGAPSI

SEQ ID NO: 5905 - protein, 189 aa, Neptuniibacter caesariensis
MSNSLINTEVKPYNASAFHNGEFIDVSEADLKGKWSVFFFYPADFTFVCPTELGDLADYYPQLQEMGVEVYSVSTDTHFTHKAWHDTSDTIQKINFPMIGDPTGLITRNFEVMIEEAGLAERGTFVIDPEGKIQIIEINAGGIGRDAGELVRKIKAAQYVAAHPGEVCPAKWKEGEETLAPSLDLVGKI

SEQ ID NO: 5906 - protein, 391 aa, Tropheryma whipplei str. Twist
MVHGKSLRVLIGTETFPPEVNGAAKFSGRLASCLIERGHIVRVVAPSRTRGRGGEYLEEIEGNAVLVYRLPSVKWPGHSWFRFASPLFVSRFCSKIIDDFQPDVIHYQSHFMIGLSLSKKGRARGVRLVGTNHFMPDNVIHYCEFLPTFLHKFLWKANWHYASRCFARADVVTSPTQSAANFLERYTTIENVVPISCGIDLSGYTPSFERGSVLLYVGRITREKQLDVLIRAFAKLNNKDITLKLVGIGEEVEPLRALAYSLGVSDRVVFCGYLEEGDLRKTYSEASVFVMPSTAELQSIATMEAMASGLPVVGADSMALPHLVRDGENGYLFSPGDPDDLASKLTAVIALDDADFAAMQRRSLEIVAEHEIDRTIDAFERLYAGSQVSCN

SEQ ID NO: 5907 - protein, 531 aa, Oryza sativa Indica Group
MMMMNYRALWLWLSVAIVFSVQSCRALAAGEGSKEADKIAALPGQPPDVKLQQYSGYINVNETSGKSLFYYFVEASVDAAHKPLLLWLNGGPGCSSMGIGAFQEIGPFRVDTDGKTLCRNPHSWITAANLLFLESPVGVGFSYAAVKPQEVYSTIGDNMTAHDSHTFLLRWLDRFPEYKTRDLFIVGESYAGHYVPELAVTILDNNLLPHATPIKLKGIAIGNGILEFAAEQTQLYEYLWQHAFISDSAHALITQSCKYPDDHPSALCESARKAAYSRIGNIDIYNIYSSTCHEQKVRPSASKCMDLADPCSQYFVEAYMNQPQVQKTIHANTELKYPWTRCRVYNLDHFGDSPKSMLPSIKAVITGRIRIWIFSGDLDAMVPVTATRQSMERLQLRVAADWRPWSADGKDVAGYVIAYDGLVFATPYAHTSAGRYTIRQKLGRACNTVRGSESELINSGRWSTNLWSGCNASGPIHCHPLRSGPKSVTHRPILPSVTKHIWHQHADLVHHIFTEKGNQTSRINPLLYSLN

SEQ ID NO: 5908 - protein, 159 aa, Silicibacter pomeroyi DSS-3
MSKIHVSTTVNGDAVEYLCDPRETLLDCLRDKLSLTGAKEGCGTGDCGACSVTLDGRLVCSCLVLGVEAEGKEIGTVEGIAEGDVLHPLQQKFIDYAALQCGICTPGILVAAKALLEQNPDPTEEEVRFWLAGNLCRCTGYDKIIRAVMDTARDMREAV

SEQ ID NO: 5909 - protein, 372 aa, Sesbania rostrata
MDSGLCLVSGLNHKDVQTRFFGPSWLQMQSHVPMNFIWPKECLVNAHEELQAPLVDLDGFLRGDEEATHRAAELISKACLTHGFFQVINHGVDQRLIGEAYNQMDGFFKLPIDRKLSVRKIPGSMWGYSGAHADRFSSKLPWKETLSFPFHDNNSEPVVTNYFNSTLGKTFEQTGVTFQKYCEAMKGLGMKLMELLAISLDVDRFHYKDLFEDGCSIMRCNYYPSCQQPSLALGTGPHCDPTTLTILHQDQVGGLDVFADKKWQTVRPLPHALVVNIGDTFTALSNGRYKSCLHRAVVNQYKERRSLAFFVCPKEDKVVRPPEDIVRRDGTKQYPDFTWSKLLEFTQKYYRADEDTLQNFTKWLLSSKPQTL

SEQ ID NO: 5910 - protein, 753 aa, Silicibacter pomeroyi DSS-3
MALDDRKSDGFTFVGTRPNRPDGLDKVTGRARFGADAHAPGMLHGAILRSPHAHARILRIDTSKAEALKDVKAVVTRADFSDKVEFAPGLEGDFWNILENVMAGDKALYDGHAVAAVAATSALAARDALKLIEVDYEVLPHVTDVDKAMLMDAPVIRQGAADYSVPEGMHPNVVRKHESGHGDVEAGFAEADLVIEDHFTTEATHQGYIEPHACLATLGADGKGELWCCTQGHWIVQKTCAALLGIETANLRVTASEIGGGFGGKTTVFIEPVALALSRKANKPVKLVMSRSEVFRATGPTASASMDIRIGMKKDGTLTAAQGTFRLQGGAFPGGPADFTAMCAFAPYNLPHVRQVGYDVMTNRPKQAAYRAPGSPMAAFAVESVIDELCNQLGLDPIEVRLKNASREGTKASYGPRFQRVGLVETLEAAKAHPHYTAPLKPGQGRGISCGFWFNHGGETSVSLALSEDGSAQVMVGTPDIGGSRASMALMAAEVLGIPYENIRVTIADTATLGYNDVSHGSRVTYASGLATIKAARHAVEKLCERAAKKWGIPVDAVKWENGCAVPSGPNAGEFDPLPLADITADMGRTGGPISGHFEATPEGAGVSFATHIVDAEVDPETGKTKVVRYTVVQDAGKAIHPTYVEGQFQGGAAQGIGWALNEEYIYGADGRLQNSVFLDYRIPVASDLPMIDTVIVEVPNPGHPFGVRGVGETSICPPLAAIANAVSAAAGARMRQLPMSPPRILAALKADG

SEQ ID NO: 5911 - protein, 704 aa, Candida tropicalis
MAPFLPDQVDYKHVDTLMLLCDGIIHETTVDEIKDVIAPDFPADKYEEYVRTFTKPSETPGFRETVYNTVNANTMDAIHQFIILTNVLGSRVLAPALTNSLTPIKDMSLEDREKLLASWRDSPIAAKRKLFRLVSTLTLVTFTRLANELHLKAIHYPGREDREKAYETQEIDPFKYQFLEKPKFYGAELYLPDIDVIIIGSGAGAGVVAHTLTNDGFKSLVLEKGRYFSNSELNFDDKDGVQELYQSGGTLTTVNQQLFVLAGSTFGGGTTVNWSACLKTPFKVRKEWYDEFGVDFAADEAYDKAQDYVWQQMGASTEGITHSLANEIIIEGGKKLGYKAKVLDQNSGGHPHHRCGFCYLGCKHGIKQGSVNNWFRDAAAHGSQFMQQVRVLQILNKKGIAYGILCEDVVTGAKFTITGPKKFVVAAGALNTPSVLVNSGFKNKNIGKNLTLHPVSVVFGDFGKDVQADHFHNSIMTALCSEAADLDGKGHGCRIETILNAPFIQASFLPWRGSNEARRDLLRYNNMVAMLLLSRDTTSGSVSSHPTKPEALVVEYDVNKFDRNSILQALLVTADLLYIQGAKRILSPQPWVPIFESDKPKDKRSIKDEDYVEWRAKVAKIPFDTYGSPYGSAHQMSSCRMSGKGPKYGAVDTDGRLFECSNVYVADASLLPTASGANPMVTTMTLARHVALGLADSLKTKAKL

SEQ ID NO: 5912 - protein, 224 aa, Brassica napus
MASTLSFTSSLRSPLALPPSSKPTSSFSVSFPRKIPGKIRAQDQRSDSLDVVHQGQKGNQGSSVEKKPQRLAMDVSPFGLLDPLSPMRTMRQMLDTMDRMFDDAAMIVPGRNRGGGSGVSEIRAPWDMKEEEHEIKMRFDMPGLSKEDVKVSVEDNVLVIKGEQKKEDENDSWSGRSFSSYGTRLQLPDNCEKDKIKAELKNGVLFITIPKTKVERKVVDVQIQ

SEQ ID NO: 5913 - protein, 157 aa, Thermoplasma volcanium GSS1
MSPKVNEKAPDFEAPDTALKMRKLSEFRGQNVVLAFFPGAFTSVCTKEMCTFRDSMANFNKFKAKVIGISVDSPFSLAEFAKKNNLTFDLLSDSNREISKKYDVLHQNFAGVPGLTASKRSVFIIDGDGIVRYAWVSDDPGKEPDYKAIQEFLSKMN

SEQ ID NO: 5914 - protein, 1453 aa, Kluyveromyces lactis NRRL Y-1140
MGIPKFFHFISERWPQISQLIDGSQIPEFDNLYLDMNSILHNCTHGDGSEVNSRLSEEEVYSKIFSYIDHLFHTIKPKQTFYMAIDGVAPRAKMNQQRARRFRTAMDAEKALQKAIENGDELPKGEPFDSNAITPGTEFMAKLTENLKYFIHDKITNDTRWQNVKVIFSGHEVPGEGEHKIMDYIRAIRAQEDYNPNTRHCIYGLDADLIILGLSTHDHHFCLLREEVTFGKRSSSVKTLETQNFFLLHLSILREYLALEFEEITDSVQFEYDFERVLDDFIFVLFTIGNDFLPNLPDLHLKKGAFPVLLQTFKEALQHMDGYINEQGKINLARFSIWLKYLSDFEYLNFEKKDIDVEWFNQQLENISLEGERKRTRMGKKLLMKQQKKLIGAVKPWLLKTVQRKVTSELQDADFEIFPLEDKELVRANLDFLKEFAFDLGLILAHSKSKDLYYFKLDLDSINVQETDEEHEARIHETRRSIKKYEQGIIIASEEELEEEREIYSERFVEWKDQYYKDKLDFSINDTDSLKEMTENYVGGLQWVLYYYYRGCPSWSWYYRYHYAPRISDVIKGIDQNIEFHKGQPFKPFQQLMAVLPERSKNLIPVVYRPLMYDEHSPILDFYPNEVELDLNGKTADWEAVVKISFVDQKRLVEAMAPYDAKLSPDEKKRNSFGTDLIFIFNPQVDTVYKTPLAGLFNDIEHNHCIEREFIPESMENVKFLFGLPKGAKLGASSLAGFPSLKTLPLTAELAYNSSVVFNFPSKQQSMVLHIQDLYKENGISLSDLAKRHMGKIVYSRWPFLRESKLLSLITEETVYEGVKSGKLTKVIERKPQDFERKEFRELKMTLKSNYQRTKAILLDDISALAKVVPVNGLVRNSDGSYSKSFNETIEYYPLQLIVEDVKNKDERYIEKEPLPINKEFPKGSKVVFLGDYAYGGEATVDGYNSETRLKLTVKKGSLRAEPNIGKVRAKLDSQALRFYPTQVFSKIARVHPLFLSKITSRYLVNDSKKKSHNVGLMIKFKARNQKVLGYARCSSNKWEYSDVALGLLEQFRSTFPEFFAKLSNSKEQAIPSITDLFPNKSSAEADSILKTVADWLSEARKPFVVVSLESDSLTKASMAAVESEIIKYVSLPDSSEQKKLAKVPREAILNAESSYVLLRSQRFHLGDRVMYIQDSGKVPLHSKGTVVGYTSIGKNVSIQVLFDNEIIAGNNFGGRLQTRRGLGLDSSFLLNLSDRQLVYHSKASKSADKKPKAVPNDKQVALAKKKRVEELKKKQAHELLNHIKKDNAESNTESGSAPQIAVNTLNPSAANNVFNAVLNQIKPGSQQQIQPPPANSLPYNFTVPPHMVPGGIPHPLMMQPPFIPNNEHIAYAAPPQSQPVQNPPLDKEASRNLKNLLIRDENGRTANVENKDSDDTKRSSHSRGGRRGRSNRGRGASGRGGHFKNSPKKTET

SEQ ID NO: 5915 - protein, 328 aa, Synechococcus sp. CC9605
MSRIYDDNSQAIGNTPLVKLNNVTKNCKATVLAKVEGRNPAYSVKCRIGANMIWDAEKSGKLTKGKVIVEPTSGNTGIALAFTAAARGYKLILTMPESMSIERRRVMAVLGAELILTEAAKGMPGAIAKAKEISESDPAKYFMPGQFDNPANPEIHFKTTGPEIWNDCDGAIDVLVAGVGTGGTITGVSRYIKNEAGKAIESVAVEPTNSPVITQTMNGEAVKPGPHKIQGIGAGFIPKNLDLSVVDKVEQVTNEESVAMALRLAQEEGLLVGISCGAAAAAAIRLAEKDEYAGKTIVVVLPDLAERYLSSVMFAEVPTGIIEQPVAV

SEQ ID NO: 5916 - protein, 383 aa, Cyanothece sp. ATCC 51142
MHIAWLGKKSPFCGNVTYGREITNALLDRGYQVSFLHFSQEETNSAHWRDCREVALPFLYKSQIYTIPTPKSSKILMDALAKLKPDLVHASLTLSPLDFRLPEICQALNLPLIATFHPPFDSKLRNLKSSTQFLTYQLYAPFLAHYDKVIIFSRLQQELLMKLGVHQDKLAIIPNGVDPIKYSPGPSSIKSHVKAKRLFIYVGRIATEKNVEALLKAWKQVGMGDGSKLLIVGDGPLKPSLEPFYNAEHGIYWLGFVADEQQRIDILRAADVFILPSLVEGLSLSLLEAMACGVACIATDAGADGEVLEDGAGVVLNTQGVTTQLKTLLPLFRDHHEITLLLGQKARQRVLDKYSLTNNISQVEKVYEEILGRPNFPMMSHLS

SEQ ID NO: 5917 - protein, 157 aa, Zea mays
NALDRFKEINPTVFGVSTDSHFTHLAWVEKPRKQGGLGPDLELPLIADKSTKISRNYGVLIEDEGIALRGLFIIDPKGVLRQITVNDLPVGRDVEETIRLVKAFQFTDEYGEVCPAGWQEGGKTMKADPKGSLEYFSAQGENDTSNETRIPINTRSQ

SEQ ID NO: 5918 - protein, 401 aa, Gluconacetobacter xylinus
MTGMPEAGAGSVMADATAPTVAIYRTQILPLSETFVRDQARGLRRWRPVLLGERTIGQLPLDGMDVRALHDGPPTFLQRLTGMAARMFERPVPGMLTLAQGFAPRLVHAHFGFDGVEAWPLAHALGVPLLVTLHGSDITTRMEWFAAGGGGRRWRAYPRRLRHLASIPQVNYVAVSHSIREAAIRAGLPEQRIHVCPIGIDLTRFHPAGPPVAERAPVILFAGRLVEKKGCRHLIEAFRSVRAQVPDARLLIAGDGPERNMLAGLAADIGGVTFNGRYSAAEMQPLLAQARVFCLPSVTAANGDAEGMGLVLLEAQACGVPVVTSARGGATEGIEHGKTGFAFAEGDVAALSAYLIRLLRDDALAARMSAAGPAFVAKHHDLSYWAGMLEKIYDSMTGRIS

SEQ ID NO: 5919 - protein, 673 aa, Oryza sativa Japonica Group
MAAAMEMAANPGGSGTCSDALFRELWHACAGPLVTVPKRGERVYYFPQGHMEQLEASTNQQLDQYLPMFNLPSKILCSVVNVELRAEADSDEVYAQIMLQPEADQSELTSLDPELQDLEKCTAHSFCKTLTASDTSTHGGFSVLRRHAEECLPQLDMSQNPPCQELVAKDLHGTEWHFRHIFRGQPRRHLLTTGWSVFVSSKRLVAGDAFIFLRGESGELRVGVRRLMRQVNNMPSSVISSHSMHLGVLATASHAISTGTLFSVFYKPRTSRSEFVVSVNKYLEAKKQNLSVGMRFKMRFEGDEAPERRFSGTIIGIGSVPAMSKSPWADSDWKSLKVQWDEPSAIVRPDRVSPWELEPLDASNPQPPQPPLRNKRARPPASPSVVAELPPSFGLWKPPSEAAQTLSFSEPQRAREIFPSIPASIFSASSHVEFNSKNEPSILSNQFYWSMRDSKTDSFSASTNKTRVERKQEPTTMGCRLFGIEISSAVEEALPAATVSGVGYDQTVLSVDVDSDQISQPSNGNKSDAPGTSSERSPLESQSRQVRSCTKVIMQGMAVGRAVDLTKLNGYGDLRSKLEEMFDIQGDLCPTLKRWQVVYTDDEDDMMLVGDDPWDEFCSMVKRIYIYSYEEAKLLAPKSKLPVIGDTIKLSSMNSSHESVDLDNHASVTNRDC

SEQ ID NO: 5920 - protein, 110 aa, Brassica napus
MSNGIRSDDWISLRLGDSAGGNHGEATSANGLNSNQQMSTREGCMDATTETASLLLGMNDNNKAKRQRSDKPFSFPRQKRSNNQQDHQTAYRTELAKICLDSLCSQASNW

SEQ ID NO: 5921 - protein, 217 aa, Gentiana triflora
MAAICLPVAKHSFPSLLNTQTPKPLFSQNLHTIPLSSQSQICGLKFLISSPSSLPPPPSYSARISVFAKVSKGSVPPQFTLKDQDGKNVSLTEFKGKPVVVYFYPADETPGCTKQACAFRDSYEKFKKAGAEVIGISGDDPSSHKAFAKKYRLPYTLLSDEGNKIRREWGVPADLFGTLPGRQTYVLDKNGTVQLIYNNQFQPEKHIDETLKFLQSA

SEQ ID NO: 5922 - protein, 301 aa, Acidovorax sp. JS42
MKTYPTIEDAIGHTPLVALQRIGAQDNAARGNVILGKLEGNNPAGSVKDRPALSMIRRAEERGEIKTGDTLIEATSGNTGIALAMAAAIKGYRMVLIMPEDLSVERAQTMKAFGAELVLTPKSGGMEYARDLADQMVAQGKGVVLDQFANPDNPRIHYETTGPELWEQTEGRITHFVSAMGTTGTITGVARFLREKNPAVRIVGAQPQEGSRIPGIRKWPEEYLPKIYEPQLVDELVLVSQDDAEDMARRLAREEGIFAGISAAGACWVAQQIAQREENATIVFVVCDRGDRYLSTGVFPA

SEQ ID NO: 5923 - protein, 153 aa, Campylobacter lari RM2100
MKELQIGDEAPIFELLNQDDVKISLKDFFGKKIILYFYPKDNTPGCTLEACDFTKFYDDFLNKNAVIIGISPDSVKSHVNFIQKHNLKHILLSDENKEICKLYGAWGLKKNYGKEYEGLIRSTFVIDENGKIEKIYKNVKTKDHAFKVLQELC

SEQ ID NO: 5924 - protein, 184 aa, Bradyrhizobium sp. BTAi1
MLGIGSKLPSFEIVGVKPGFQLHEEKGESAFETLTETSFPGKWKVIFFYPKDFTFVCPTEIAEFARLAKDFEDRDAVVLGGSTDNEFCKLAWRRDHKDLHKLPIWQFADTKGSLVDGLGVRSPDGVAYRYTFVVDPDNTIQHVYATNLNVGRAPKDTLRVLDALQTDELCPCNREVGGATLKVA

SEQ ID NO: 5925 - protein, 203 aa, Aegilops longissima
MASAVDCKGEGAAPASLLKSGAPVAFCPLRSPAITAAHRPYNTQAKEASRYDDDDDDYSGRDLVIPSFFSQDPLGAPMSMGRLLSLMETGLSSAAGASRLGRWVAKEDDEAVYLKVPMPGLTKEHVKVRADKNILVIEGEGEKQPWDGDGDSAVPRYNRRIEMPADAYKMDKIKAEMKNGVLWVTLLKVKEEERKDVFHVKVE

SEQ ID NO: 5926 - protein, 200 aa, Rickettsia sibirica 246
MSVFVGKTAPDFTAKAIMPNNNIDDKFKLSNYAAGDNIVLFFYPLDFTFVCPSEIIAFHNKLGEFTERRTKVVAVSVDSHFSHLAWKNTPHNKGGLGQVQFPMVSDIKKDISSKYNVLNEDGVALRGTFLIDKDFIVRHMLVNDLPIGRDINYTLKVIDALIHHQKHGEVCPAGWHKGEEAITPSHEGIAHYLSSHAEKL

SEQ ID NO: 5927 - protein, 400 aa, Rhodospirillum rubrum ATCC 11170
MDDGTRLGQADHAAGPRPPGVIFTMRYPSDVGFVWKTIALHRDLIARAFGGEARCILAYPQLSPTSAYQPRWSTAIQADFYDYSAENRQRLERVITDEAIRLVVFMSAQPADVDLGFLRGLGLRTVTSENNSYDHSLRQPFMKRLAKALIRRVLKRQVFDLHIANSQAQYDFLRGFAQLPASRLRAVRNGVDTDHFQPGERTGACSTLGLDPDRLWIMAASQARPEKRLERVLEVIRAVKDARPALPIGFFFVGEGENLAEWRQIALGLPDAETYRFFGRQNDLRPYYQAASVFIHGAFRESFGLVIAEAMASGLPVVATHAHGPAEIIAEGETGRLVGRDDWEGLGKAVIEYLDDAELRRTHGLAGRARCVALFSITRQAQEFADLLRPFLKDGAGAPY

SEQ ID NO: 5928 - protein, 735 aa, Xanthomonas campestris pv. vesicatoria str. 85-10
MKFDTPAGTNPIDQLTVVGKPVDRIDGPLKTTGQAPYAYEHHDLPGQPAYGHVVGAGIAKGTIRSIDLSAARKAPGVLGIVTAQNAGKLQKGKFNTAKLLGGPEIAHYHQAIAVVVAETFEQARAAGQLIKVDYGRHVGAYDLEKARGGAKVTKKGDAPNSNVGNFDAAFATAPVQLDAQYTTPDHSHAMMEPHASIAMWDGDKLSVWTSNQMINWGAGDLARTLGLPRENVRIMSPYVGGGFGGKLFLRADVVLASLAARQVGRPVKVMLPRPLIANNTTHRPATVQRIRLGAGRDGKLTAIAHESWSGDLPDGSPENAAAQTQLLYAGANRLITTRLAVLDLPEGNAMRAPGEAPGLMALEIAMDGMAEKLDMDPVKFRIVNDTQVDPENPQRPFSQRQLVKCLEDGAKRFEWSKRKARPGSTRDGRWLVGMGVAAAFRNAPVTTSGARMRLEQGGRVVVETDMTDIGTGSYTIIAQTAAEMLGVPLNWVDVRLGDSSFPASAGSGGQWGANSSTAGVYAAAVKLREAVARQLGLDPAAAEFADGYVRAGGKRIALGDAAASGALVVEDKIEFGDLSKTHQLSTFGAHFVEVGVDVATAEVRIRRMLAVCAAGRILNPKSARSQVIGGMTMGAGAALMEELAVDKRLGFFVNHDLAGYEVPVHADIPHQDVVFLEESDPLSSPMKAKGVGELGICGVAAAIANAVYNATGVRVRDYPVTLDKLLPHLPEMLRA

SEQ ID NO: 5929 - protein, 573 aa, Triticum aestivum
  misc_feature (23)..(23): Xaa can be any naturally occurring amino acid
YLQSRLLNDVAAMNQRYVLIISXEDLMPKVVQSLPQEMDSSNKRKWDHIIVNQFLRDIREAKKRGNTERRHKEAQAILAATAPIAAPTSKDVNIRKETENDAAPRSPHASAKVHAGSLRVSQLTSLPQTKDPSFSNSKVSADTNFGIFDLAKFSKKNGLPCDVCMRRETVLNRVFLCSSCKAAVHLDCYQSRTNPTGPWKCERCQEMLSDAVVSDSQSDCSGSKSWLVQCGLCHGTSGALRKTTNGQWVHAFCAEWLLENSFIRGQCNPVDGMEGLLKGKDTCSICQHNVGTCLKCSTVGCQVTFHPACARDAGLYMNTKKFGSLWQHKAYCGNHSIEQKKVDSQQYGPAEVKIMKQMRVELERLRLLCERVVKREKEKKELLVCEHDILAVKRDYVAFSMRASCYTPAPGASSESATTSVNNNSYGGKRQRSDDITARSDDVTVDSTIPRKHTIRFPVHSKDTDRNTADSSTSTISYKRKLDDVESLALKNLQERAATALQKSEDGETKSTDNALQKSEDGEIKSTDNALQKSEDGETKSTDNALQKSEDGETKSTDNALQKSEDRRNKVNR

SEQ ID NO: 5930 - protein, 154 aa, Silicibacter sp. TM1040
MAISLKLNGETHTVEAEPGTPLLWVIRDELKLTGTKFGCGVASCGACTVHMDGAPIRSCQTYIEDVEGAEITTIEKMEDDKVGAAVQQAWRELDVVQCGYCQSGQIMSAVGLLRENAKPTAEDVDNYMYGNACRCATYQRIRAGVLRAAEILEA

SEQ ID NO: 5931 - protein, 336 aa, Chrysanthemum x morifolium
MVVLTKPTLEQLIMKTKPVNLLTLAQIPIVDLSSHDSKHQIVNACQEFGFFKVVNHGISMNLINKLESQAMKFFSSPQDIKDKAGPADPFGYGNKKIGTNGDVGWVEYLLLNAKPETDIEKLVSVFGEHSEVFQHVLNDYLTSVKKMGCGILELMAEGLELESKNVFSKLLMDDKSDSVFRLNYYPPYPDVQEDEINVRNLIGFGEHTDPQIISVLRSNNTSGLEIALKDGSWVSVPADSEAFFINVGDSLQVMTNGRFKSIKHRVVANSKKSRMSMIYFGGPPLNEKIAPLSSLIGREEDSLYKEFTWFEYKNSAFSSSLSDNRLGLFEKLSSRI

SEQ ID NO: 5932 - protein, 216 aa, Xanthomonas campestris pv. vesicatoria str. 85-10
MRDIKMTRREVLIAGTASAASVAATQSMAATAATAISQRPATEPANASSQVAFEVNGKPVTLTLDNRTTLLDALREHLHLTGTKKGCDHGQCGACTVIVDGQRMNACLSLAVMHEGAKVTTIEGLGRPDKLHPMQAAFVKHDGYQCGYCTPGQICSAVAVLDEVKRGIPSHVTEDLTGKTKLTTPELQERMSGNICRCGAYSNIVEAINDVAGGRA

SEQ ID NO: 5933 - protein, 304 aa, Thermus thermophilus HB8
MRVEGAIGKTPVVRLAKVVEPDMAEVWVKLEGLNPGGSIKDRPAWYMIKDAEERGILRPGSGQVIVEPTSGNTGIGLAMIAASRGYRLILTMPAQMSEERKRVLKAFGAELVLTDPERRMLAAREEALRLKEELGAFMPDQFKNPANVRAHYETTGPELYEALEGRIDAFVYGSGTGGTITGVGRYLKERIPHVKVIAVEPARSNVLSGGKMGQHGFQGMGPGFIPENLDLSLLDGVIQVWEEDAFPLARRLAREEGLFLGMSSGGIVWAALQVARELGPGKRVACISPDGGWKYLSTPLYAEP

SEQ ID NO: 5934 - protein, 187 aa, Azospirillum brasilense
MSLINTEIKPFKATAFKGGKFIDVSDADLKGKWSVVFFYPADFTFVCPTELEDLADNYSEFQKLGVEIYSVFTDTHFCHKAWHDTSPAIGKIAYTMVGDPTGTICRNFEILIEEKGLADRGTFVVDPDGKIQIIEITAGGIGRDARELLRKVKAAQYVASHPGEVCPAKWEEGEKTLAPSLDLVGKI

SEQ ID NO: 5935 - protein, 307 aa, Bacillus cereus G9241
MEIKNSITELIGKTPVVKLNHIVKGNVADIYLKLEFMNPGSSVKDRIALAMIEDAEKKGVLKKGDTIIEATSGNTGISLAMIAAAKNYKSILVMPDTMSVERRNLLSAYGAKLILTPGHEGMSGAIQKANELAKINGYFIPQQFKNQTNPEIHRLTTGPEIVEQMGNQLDVFIAGVGTGGTITGAGSFLKEVYKDIKICAVEPADSPVLSGGKPKKHQLQGIGAGFVPETLDVRVYDEVIQVRADQAFEYARKVACKEGILLGISAGAAIYASVKIAKKIGRGKKILTIIPSNGERYLSTMLYRFEQ

SEQ ID NO: 5936 - protein, 296 aa, Nitrosococcus oceani C-27
MDYPTIEDFVGHTPLVQLQHLPGETSNTLLVKLEGHNPAGSVKDRPALSMIQYAEERGEIKPGDTLVEATSGNTGIALAMIAAIKGYRMVLVMPENMSVERRAVMKAFGAEIILVTSQEGMEGARDLALEMEAEGKGRVLDQFANPDNPRAHYEGTGPEIWRDTRGSVTHFVSSMGTTGTIVGVSRYFKAQNPAIKIIGVQPLEGASIPGIRRWPEAYLPKIYDPAAVDQIIDVSQGEAEETTRQLAAREGIFAGISSGGAVAAALRLAKKVKHSTIVVIICDRGDRYLSTPVFPA

SEQ ID NO: 5937 - protein, 201 aa, Methylococcus capsulatus str. Bath
MSVLVGKPAPDFKAAAVLGCGTIVDDYWFSKETKGKYVALVFYPLDFTFVCPSELIALDHRVDELKKRGVEVIGVSVDSQFTHNAWRNTPIDKGGIGPVKYTLVADVSHAIVKAYDVEVEGAAVAYRGTFLIDKSGIVRHQVVNDLPLGRNMDELIRMVDALQFHEEHGEVCPAGWNKGQSGMKADPEGVASYLSKNADKL

SEQ ID NO: 5938 - protein, 190 aa, Polaromonas sp. JS666
MSLINTEIIPFKATAYHNGKFVPVSNENFMGHWSVVVFYPADFTFVCPTELGDLADHYAEFQKLGVQIYGVSTDTHFTHKAWHDTSDTIRKVQYPLIGDPSQQLSRAFQVLIEEGEDAGLAYRGTFVIDPAGKIKTIEVHDNGIGRDAAELLRRVKAAQYVAAHPGEVCPAKWTEGAETLKPSLDLVGKI

SEQ ID NO: 5939 - protein, 310 aa, Methylococcus capsulatus str. Bath
MKIANSVTDLIGNTPLVRIHRLSAGCGAEVVAKLEFFNPAHSVKDRIGAAMIDAAEQAGLIGPDTVIVEPTSGNTGIALAMVCAARGYRCVLTMPETMSKERRMLLRAYGAELVLTPGPDGMGGAIRKAEELAASDPKYFMPQQFKNAANPEIHRRTTAEEIWRDTEGRVDIVVAGVGTGGTITGVGEVLKQRKPSLRCVAVEPDASPVLSGGEKGPHPIQGIGAGFVPPILNTTIYDEVIRVKNDDAFEFARRAAREEGLLVGISSGAALWAARQLACRPENAGKLIVTIIPSFGERYLSTALFAHLED

SEQ ID NO: 5940 - protein, 158 aa, Opitutaceae bacterium TAV2
MAIATGTKAPDFSLKSKTADGLTDIKLSNYLGKSQVVILFFPLAFTGVCTTEMCDVSGGLTAYEDLGAKVIAISVDSPFAQEAWAKANRIGLTLASDLNKTTAAAYGTLLADLNGLGSVSARAAFVIGKDGIVKYAEQTPTPKDLPNFAAIKAALAAA

SEQ ID NO: 5941 - protein, 339 aa, Oryza sativa Indica Group
MEEGGRRGIPSLLNSSSSDEHIATDITQLVGWTPLIELNRIVRKDGVNARIVGKLESYQPLCSVKDRSALRMIEDAEEKGLISPGVTTLVEPTSGNLGIGVAYNALLKGYRFVAVMPAEYSLDKQMLLTYLGAEVILTDPTLGFQGQLDKVEQIKNDMPNVHHLDQFKNAANPEAHFVWTGPEIWKDTAGKVDIFVAGSGTGGTISGVGKYLKMKNPAVKVICVEPAESPVISGGKPSRHKIQGMGPGFVPKNLDISIVDEIITVTAQDAMANAKRLAREEGLVVGISSGANLAACLKVASRKEYEGKMIVTIFPSGGERYMNSDLFAQAREECSAMTF

SEQ ID NO: 5942 - protein, 215 aa, Sulfolobus tokodaii str. 7
MVKLYSKFPDVQVLTTKGPIDFYKDIFGKGKWLFLFAHPADFTPVCTTEFVAFSQKYEEFKKLGVELVGLSVDSIYSHIQWLMDIEQRYGVKVPFPVIADPDKKLARMLDALDEASGQTIRIVVLASPDGIIRFVAQYPMEFGRNIDELLRITKAAIVNYKAKVVLPANWQPGQDVIVPPPAIFDEAEMRIKLPNAKAWYLLFKKYEELPPDQKV

SEQ ID NO: 5943 - protein, 309 aa, Leptospira interrogans serovar Lai str. 56601
MKAKSILETIGNTPHVKINRLFNTKSEVYAKLERSNPGGSIKDRIALSMIEDAEKTGKLTKDSIIVEPTSGNTGIGLALVAAVKGYKLLLVMPESMSIERRRIMAAYGAEFELTPREKGMPGAIEKAKQIVAENPKAWMPQQFENEANIKIHVETTAQEIAKDFPDGLDYVITGVGTGGHITGVAQVLKQKFPKLKVFAVEPEASPVISGGKPGPHPIQGIGAGFIPKNLHTNLLDGTIQISKDEAFEYAQRAAKEEGLFIGVSSGAALAAVAKKLPEIPEGSRILTFSYDTGERYLSIEGLFPVPSNA

SEQ ID NO: 5944 - protein, 306 aa, Oryza sativa Indica Group
MEGEGIGRRGLPSLLGSSSSESGGIGQEHIASDITQVEMIEDAEEKGLITPGVTTLVEPTSGNLGLGLVLVALRKGYRFVAVMPGQYSFDKQILLKYMGAELFLSDPTLGFQGLVDKVEQLKKELPNVHVLNQFSNPANQEAHMRLTGPEIWKDTAGKVDIFVTGSGSGGTVSGVGKYLKLQNPAVKIICVEPAESPVISGGEPGKHKIQGIGPGLIPDMLDTSVIDEVVTVNTDEAMVNARRLAMEEGLLMGISSGANLAACLKVASREENKGKMIVTMFPSGGERYMNSDLFAAVREECNAMTF

SEQ ID NO: 5945 - protein, 394 aa, Mycobacterium bovis AF2122/97
MSLTAHDGRFCSRYACCSGRQLLWTSLGRTPHRGGPAGRGILRQRTRGVLIVPGARTERHLLRTGVVRITLPAKHIPYTGGYRAVMPGAVRTVLETLRPDTLEVSDRLTLRSLGRWGREHGVTTVMISHERLDRFAGQLLPRRAAQKFADFANARTAANYDTVVCTTGFAREEFDRIGATNTVTVPLGVDLKTFHPRRRCARVRQHWATPTQILLVHCGRLSVEKHADRSIDALAALCDAGVDARLVIAGEGPLRARLERKATGLPIDFTGFISDRHAVAGLLASADVALAPGPHETFGLAALESLACGTPAVVSRTSALTEIITADSGACADNRPEAIAHAVRTIVSRPERHRRRCARRRAEIFTWQRAAASMLATLGAMAVSTRCGDTQDTA

SEQ ID NO: 5946 - protein, 195 aa, Coprinopsis cinerea okayama7#130
MPAIVQRPAPTFKAEAVTEGLFNEVSLQDYQGKCEILAFNDALPQFQELNTVVLGVSTDSKFSHFAWATQPRKEGGLGPDLKLPLIADRNMKISRDYGVLLEDEGIALRGLFIIDPKGILRQITVNDLPVGRSVDETIRLIKAFQFTEKYGEVCPANWTEGSKTIKTDPVAKLEYFGAANGEVNGEGPKKRPRTE

SEQ ID NO: 5947 - protein, 322 aa, Alteromonadales bacterium TW-7
MSTIFEDNSLSIGNTPLVKLKRVTGGNVFAKVEARNPSFSIKCRIGASMIWEAEKAGQLTEGKELIEPTSGNTGIALAFVAAARGYKLTLTMPNTMSLERRKLLKALGANLVLTDGAKGMNGAIQKAKEIQATDPEKYILLQQFENPANPKIHFETTGPEIFDALDGKVDYFVAGVGTGGTITGVSRYLKTEKGLNVKSIAVEPTNSPVISQTLAGEEVKPGPHKIQGIGAGFIPGNLDMSLIDAAEQVSNEDAIAMAHELMKKEGILVGISSGAAVVAAKRIAEKPENADKNIVVILPSATERYLSSPLFDEEFSDQELVQ

SEQ ID NO: 5948 - protein, 1112 aa, Vitis vinifera
  misc_feature (75)..(75): Xaa can be any naturally occurring amino acid
  misc_feature (659)..(659): Xaa can be any naturally occurring amino acid
MGSLKNEEELEGVEEGSKEAILYVNGVRKVLPDGLAHLTLLEYLRDIGLTGTKLGCGEGGCGACTVMVSYFDENXKKCVHYAVNACLAPLYSVEGMHVITVEGIGNRRNGLHPIQESLALSHGSQCGFCTPGFIMSMYALLRSSQTPPSEEQIEESLAGNLCRCTGYRPIIDAFRVFAKTDDVLYTDRSSLSLQEGEFICPSTGKPCSCKSGSSNDKDAAKSNMSCVDRYEPISYSEIQGSTYTEKELIFPPELLLRKLTPLNMNGFGGLKWYRPLGLKHLLELKARYPDAKLVVGNSEVGIEMRLKRIQYQVLISVINIPELTMLSVKDDGLEIGAAVRLSSLQNLLRKVLADRVAYETSACKAFIEQIKWFAGTQIKNVASVGGNICTASPISDLNPLWMAAGAKFRVINCKGNIRTVLAENFFLGYRKVDLAHDEILLSIFLPWTRPFEFVKEFKQAHRRDDDIAIVNAGMRVYLQEKEEKWMVSDASIAYGGVAPLSLSASKTKDFLIGKIWNRELLQDALKILQKNILIKDDAPGGMVEFRKSLTLSFFFKFFLWVSHQMDGQRFFLETVPISHLSAVQPFHRPSVTGMQDYEVVKHGTAVGSPEIHLSSKLQVTGEAEYADDMPMPPNGLHAALVLSRKPHARILSIDDSGAXSSPGFAGIFFHKDVPGGNAIGPVVNDEEIFASEFVTFVGQVIGVVVADTQENAKLAARKVHVKYEELPAILSIEDALKAKSFLPNTERHIEKGDVDLCFQSGCCDKILEGEVHVGGQEHFYLETNSSLVWTTDSGNEVHMISSTQCPQKHQKYVSHVLGLPMSKVVCKTKRIGGGFGGKETRSACFAAVACVPSYLLNRPVKLTLDRDIDMMISGQRHTFLGKYKVGFTNDGKVQALDLEIYNNGGNSLDLSGAVLERAMFHSDNVYDIPNVRINGKVCLTNFPSHTAFRGFGGPQGMLITENWIQRIATELKKSPEEIREINFQSEGCVTHYGQQLQHFTLPRVWNELKSSCEFLKARGEVDQFNLQNRWKKRGVAMVPTKFGISFTTKFMNQFHVYTDGTVLVTHGGVEMGQGLHTKVAQVAASSFNIPLSSVFISETSTDKHIIPLSDTL

SEQ ID NO: 5949 - protein, 329 aa, Arabidopsis thaliana; identical to SEQ ID NO: 3852

SEQ ID NO: 5950 - protein, 310 aa, Mycobacterium avium subsp. paratuberculosis K-10
MSIAENVTQLIGNTPLVRLNRVTEGAVADVVAKLEFFNPGNSVKDRIGVAMIDAAEQAGLIKPDTIILEPTSGNTGIALALVAAARGYRCVLTMPETMSVERRMLLRALGAEIVLTPGADGMPGAIAKAEELAKSDDRYFVPQQFENPANPAIHRSTTAEEVWRDTDGKVDIFVAGVGTGGTITGVAQVIKERKPSAQFIAVEPAASPVLSGGQKGPHPIQGLGAGFVPPVLAMDLVDEVIAVGNEESIALARRLAAEEGLLVGISSGAALVAALQVARRPENAGKLVVVVLPDFGERYLSTPLFADLAD

SEQ ID NO: 5951 - protein, 325 aa, Microcoleus chthonoplastes PCC 7420
MDIKEGFVGTVGNTPLIRLNSFSEETGCEILGKAEFLNPGGSVKDRAALYIIQDAEDKGLLKPGGTVVEGTAGNTGIGLAHICNAKGYKCLIIIPETQSQEKMDALRTLGAEVRPVPAVPYKNPNNYVKLSGRTAKEMENAIWANQFDNLANRQAHYETTGPEIWQQTDGKVDAWVAATGTGGTFAGVSMFLKEKNPQIKSIVADPMGSGLYSYVKTGEINTEGNSITEGIGNSRITANMEGVPIDDAIQIDDKEAVRVIYQLLEKDGLFMGGSVGINVGAAVALAKEMGPGHTIVTVLCDSGSRYQSRLYNREWLAQKGLLPER

SEQ ID NO: 5952 - protein, 751 aa, Triticum aestivum
  misc_feature (154)..(154): Xaa can be any naturally occurring amino acid
  misc_feature (175)..(175): Xaa can be any naturally occurring amino acid
MAAPEGEEKAPTGHPLLRVLRRDKYTHGLYPAQMEALRAMCGALIPSLPPEEALDGRRDTPRDKDLERFYLASGADSTIPDEVAELAFTRCVWEAGVLVHVTLWLLCTRLGTLALCGRLCVSGEFPYVRRFADMPVGRREEALRRWTKARWLIXSRSPSPSSRASASTSSTPRWXENSENPCWKATGFSVPNVKEQRKKHPTEATTLRPLDSGVVETRELDDAALLTSLAEKGLAVKPATSGDYHAVECDVAIVGSGCGGGVAAAVLASAGHKVLVVEKGDYFTPDDYSSVEGPSMERLYEQGGIFCTSNVTTVLYAGTTVGGGSAVNWSASIRTPREILQEWSRDHGLPVFGSAAYVQAMDAVCARLAVTDGCLEEGFQNKVLRRGCEALGLPVDRVPRNSSEGHHCGSCYLGCPTGDKRGTDTTWLVDAVEHGAVILAGCKAERLIFQNNSGKNGRSKKCVGLVATCMSNGITKKLRIEAKVSISACGALMTPPLLRNSGLRNRHVGRNLHLHPVSMAWGYFPDTNQEPQLTGKCYEGGIITSMHRVTERTIIETPALGPGAFASLVPWESGRDMKERMRRYTRTAHAFALVRDHAAGSVYGEGRVHYSPSRGDIEELRDGLRRALRIMVASGAAEVGTHRSDGLRLRCKGVQDKDLEAFLDEVTVARGPMQPGTDTWALLCSAHQMGSCRMGSSPKEGAVDGRGESWEAEGLYVCDGSLLPTAVGVNPMITIQSLAYCLSMDIAESLA

SEQ ID NO: 5953 - protein, 322 aa, Vibrio fischeri ES114
MTKIYEDNSQTIGNTPLVRLNRVSKGNVLAKVEARNPSFSVKCRIGANMIWEAEKAGTLKEGIELVEPTSGNTGIALAFVAAARGYKLTLTMPASMSLERRKLLKALGANLVLTEAPKGMGGAIAKAEEIVASDPSKYLLLQQFNNPANPAIHEKTTGPEIWEATEGNVDVFVAGVGTGGTLTGTSRYLKHTQNKAVLSVAVEPAESPVIAQALAGEEIKPAPHKIQGIGAGFIPGNLDLTLIDRVEAVTSEDAIEMARRLMEEEGILAGISSGAAVVAANRIAELPEFANKQIVVVLPSSGERYLSTALFAGLFTEQENEQ

SEQ ID NO: 5954 - protein, 381 aa, Synechococcus sp. RS9917
MKIAFFTETFLPKVDGIVTRLTKTVKHLVEAGDEVLVFCPEGAPSEYMGAGVIGVPAMPLPLYPELKLALPRPAVSEAIDAFQPDLVHVVNPAVLGLGGIWLAKNKAIPLIASYHTHLPKYLEHYGMGMLEPLLWELLKAAHNQAELNLCTSTAMVKELSEKGIQHTALWQRGVDTELFRPELRSDAMRQRLLGAHDDRCALLLYVGRLSAEKQIERIRPVLEALPDTRLALVGDGPHRQQLERHFEGTATTFVGYLAGEELASAYASGDAFLFPSSTETLGLVLLEAMAAGCPVVGANRGGIPDIISDGLNGCLYEPDGADGGAASLIQATQRLLGNDLERQALRRAARTEAERWGWAGATEQLRTYYRNVLKPELAQVA

SEQ ID NO: 5955 - protein, 199 aa, Chlamydomonas reinhardtii
RASHAEKPLVGSVAPDFKAQAVFDQEFQEITLSKYRGKYVVLFFYPLDFTFVCPTEITAFSDRYKEFKDINTEVLGVSVDSQFTHLAWIQTDRKEGGLGDLAYPLVADLKKEISKAYGVLTEDGISLRGLFIIDKEGVVQHATINNLAFGRSVDETKRVLQAIQYVQSNPDEVCPAGWKPGDKTMKPDPKGSKEYFSAV

SEQ ID NO: 5956 - protein, 210 aa, Idiomarina baltica OS145
MGLRIGDKAPNFEIETTQGKIDFHDWAKGSWVFFFSHPADYTPVCTTEMGRTAQLAPEFEKRNVKPLGLSTDTVDAHKGWINDVNDTQNTLLEFPIVADQERKVAELYDMIHPGESQTATVRSVFIIDPDQKIRLTMTYPMTVGRNFAEILRVIDALQTTDSQEVACPADWVPGDRVIIRPTVSEEDAQKKFPQGYETLRPYLRLTDINK

SEQ ID NO: 5957 - protein, 241 aa, Aegilops peregrina
MAAANAPFALSRLSPAARLPFRAWRVARPAPLSTGRTRPLSVASAGQENRDNSVDVQVSQAQNAGNQQGNAVQRRPRRAGFDISPFGLVDPMSPMRTMRQMLDTMDRLFDDAVGFPTARRSPAAASEMPRMPWDIMEDDKEVKMRFDMPGLSREEVKVMVEGDALVVRGEHKKEAGEGQGEAAEGGDGWWKERSVSSYDMRLALPDECDKSQVRAELKNGVLLVSVPKRETERKVIDVQVQ

SEQ ID NO: 5958 - protein, 379 aa, Wolinella succinogenes DSM 1740
MRILLFTDTLGDANGVSRFVTDMGREAQESQGELHIFGSTLKKRYESALYIHNEKPFWRFRMPFYPELDLAIPPFWRFWSLAKELNPDIIHISTPGFVGLCGRIIAKRLGKPLCGTYHTDFPAYIMENTQSSFLKRLSIRCLRWFYAPFSRLLLRSMTHSRELFEELRIEPSRVGVIQAGIDLTRFGPRFRDRTIWKEWGLCMNAPKALYVGRLNKEKNFLFLLEAWRELKAHYAKPLELVVVGEGEFSGALADEDLDIHYLGFKGGEELSKIYASSDFFLFPSRTDTLGQAVMEACASGLPAVVSDEGGPKEIVSMTQSGYILDAKNHKAWKEAIIHLAQEPLVREEWGKRGASAMLSLGIRRSWESFYKEHQKVPLV

SEQ ID NO: 5959 - protein, 242 aa, Aegilops peregrina
MAAANAPFALVSRLSPAARLPIRAWRAVRPAPLSTGRTCPLSVASAGQEDRDNSVDVQVSQAQSAGNQQGNAVQRRPRRAGFDISPFGLVDPMSPMRTMRQMLDTMDRLFDDAVGFPTARRSPAAASEMPRMPWDIMEDDKEVKMRFDMPGLSREEVKVMVEGDALVIRGEHKKEAGEGQGEAAEGGDGWWKERSVSSYDMRLALPDECDKSQVRAELKNGVLLVSVPKRETERKVIDVQVQ

SEQ ID NO: 5960 - protein, 898 aa, Arabidopsis thaliana
  misc_feature (873)..(873): Xaa can be any naturally occurring amino acid
MDLEANCKEKLSYFRIKELKDVLTQLGLSKQGKKQELVDRILTLLSDEQAARLLSKKNTVAKEAVAKLVDDTYRKMQVSGASDLASKGQVSSDTSNLKVKGEPEDPFQPEIKVRCVCGNSLETDSMIQCEDPRCHVWQHVGCVILPDKPMDGNPPLPESFYCEICRLTRADPFWVTVAHPLSPVRLTATTIPNDGASTMQSVERTFQITRADKDLLAKPEYDVQAWCMLLNDKVLFRMQWPQYADLQVNGVPVRAINRPGGQLLGVNGRDDGPIITSCIRDGVNRISLSGGDVRIFCFGVRLVKRRTLQQVLNLIPEEGKGETFEDALARVRRCSGGGGGDDNADSDSDIEVVADFFGVNLRCPMSGSRIKVAGRFLPCVHMGCFDLDVFVELNQRSRKWQCPICLKNYSVEHVIVDPYFNRITSKMKHCDEEVTEIEVKPDGSWRVKFKRESERRELGELSQWHAPDGSLCPSAVDIKRKMEMLPVKQEGYSDGPAPLKLGIRKNRNGIWEVSKPNTNGLSSSNRQEKVGYQEKNIIPMSSSATGSGRDGDDASVNQDAIGTFDFVANGMELDSISMNVDSGYNFPDRNQSGEGGNNEVIVLSDSDDENDLVITPGPAYSGCQTDGGLTFPLNPPGIINSYNEDPHSIAGGSSGLGLFNDDDEFDTPLWSFPSETPEAPGFQLFRSDADVSGGLVGLHHHSPLNCSPEINGGYTMAPETSMASVPVVPGSTGRSEANDGLVDNPLAFGRDDPSLQIFLPTKPDASAQSGFKNQADMSNGLRSEDWISLRLGDSASGNHGDPATTNGINSSHQMSTREGSMDTTTETASLLLGMNDSRQDKAKKQRSDNPFSFPRQKRSVRPRMYLSIDSDSXNNEQDHQTRHRSLNKICIILCAGKN

SEQ ID NO: 5961 - protein, 365 aa, Thauera sp. MZ1T
MNFSALRVLLVGPLPPPAGGMANQTRQLAELLRGEGASVEVVQVNAPYRPAWVERLKGVRALFRLLPYLLRLWQAAGRANLMHVMANSGWSWHLFAAPAVWIGWLRGVPVVVNYRGGEAAGFLARSAAVVRATLRRASSLVLPSGFLLEVFARHGMAGRIVSNIVDLERFHPATAPRAAGEGPHLVVARNLEALYGNDTALRAFARLCAAWPAARLSIAGSGPEAAALAALAQELGIAERVRFTGRLDGEQMAALYRDADLMLNPSRVDNMPNAILEALASGLPVVTTDVGGIPFIVTQGHTAMLVPPDDPQAMADAAHKVLADTGLRAALVAAGCAEVQRYRWSSVRAQLLSAYADAIAAKRAT

SEQ ID NO: 5962 - protein, 403 aa, Thauera sp. MZ1T
MRILHILDHSIPLHSGYTFRTAAILREQRALGWETFHLTSPKQGETKAMVEEIEGLRFHRTGVPTPASSGIAELRQIRAVQARIEQLAAELRPDILHAHSPVLNAIPAIRAGRKLGIPVVYEIRAFWEDAAVDHGTTTEGSLRYRATKALETWAIKRADHVFTICEGLRADIVGRGIPAAKVTVIPNAVDIESFQLSGDADPALREQLGLAGTTVVGFVGSFYAYEGLDLLLEAFPALLQKRPELRLLLVGGGPQDENLKAQALRLGVADKVVFTGRVPHKDVSRYYDQIDLLAYPRHSMRLTELVTPLKPLEAMAQGRLFVASDVGGHKELIRDGETGRLFKAGSAEALAAAIDDLLAHRERWPAMRAAGRQFVEDVRNWTNSVANYTPVYRSLVAKPRAAA

SEQ ID NO: 5963 - protein, 393 aa, Debaryomyces hansenii
MINWKLILRSSAAIVSALIILQRIHEQLNNNKKRLTTLSPRSRGVESLIGNTPMIEIKSLSKLTGCKIYAKLELMNPAGSAKDRVALSIIRANEKLGKLKPNHGDVIFEGTSGSTGISFAVLANALGYKAHICLPDDTSPEKMQLLKSLGAELEPVKPASIVDPNQYTNAARYGAQKINEDSSNNKNAIFADQFENDFNWRIHYSSTGPEIWEQMEENLDVFINGSGTGGTIAGVSKYLKEKNDRIKIVLADPQGSGLANRVNYGVMYDSVEREGTRRRHQVDTLVEGIGLNRLTWNFQQGEHNIDEAIRVRDEQALKMAKFLCINDGLFWGSSSAINCVAAVKTAFKYGPGQKIVIIACDSGARHLSKFWKDAAELPNDITLQDIIEDIKSP

SEQ ID NO: 5964 - protein, 377 aa, Synechococcus sp. WH 5701
MKIALFTETFLPKVDGIVTRLTKTVEHLVRAGDEVLLFCPEGAPSLYMGARVIGVPALPLPLYPELKLALPRPAVAEALEAFQPDVVHVVNPAVLGLGGIWMARTRQIPLVASYHTHLPKYLEHYGMGVLEPLLWELLKAAHNQAVLNLCTSSVMVEELAQRGIQHTALWQRGVDTEMFRPELRSDAMRRRLMGRHPDSDSLLLYVGRLSAEKQIERIRPVLDALPQARLALVGDGPHRAQLEKVFEGTATTFVGYLGGEELAGAFASADAFLFPSSTETLGLVLLEAMAAGCPVVGANRGGIPDIVTDGVNGCLYDPDDDASLTAATLRLLASPERREQLRLAARHEAERWGWAGATAQLRRFYRDVAGAGLQLAA

SEQ ID NO: 5965 - protein, 156 aa, Rickettsia sibirica 246
MTLELGKKLPDLSLHIGQDNVIKLSDLKGKFVILYFYPKDDTPGCTIEAQDFNKLKPEFDKLNTVIIGVSKDKLDSHDKFKEKYSLGFDLASDANSNLCEQLGVWIEKSMFGKKYMGIDRATFLLDKEGIVKHIWRSVNAKNHAQEVLEKLRTMLS

SEQ ID NO: 5966 - protein, 396 aa, Trichodesmium erythraeum IMS101
MKILVLSWEFPPRIIGGIARHVAELYPELVKLGHEVHLVTVKSGEAPMYEIVEGIEVYRVPVGPSHNFFHWIGNMNEAMGRYGGKLIKEEKNFDIIHAHDWLVADATIALKHIFKLPLIATIHATENGRHNGIHNRSQQYIHEKEKELIYNAWRVIVCSNYMRGDVTRTLDSPWDKIDVIYNGICPEKKPTLNQFDYLHFRRHFATDEEKIVYYLGRMTPEKGLSVLIHAAPRVIEEMGDRIKFIMIGGGKTDYWKQEIWNLGISERFYFTGFMSEEKLDKFQAIADCAVFPSLYEPFGIVALESFAARVPVVVSDTGGLPEVVEHGKTGIVTKVGNPTSLALGILEVLKGRSFVKELVNNAYQELENKFCWGKIAKQTDRVYHRVLAERTQVTWK

SEQ ID NO: 5967 - protein, 418 aa, Planktothrix agardhii NIVA-CYA 126
MKIAFFDYIWTLAEPPKFGSGILCYQLALRLASDNDLIFYGSKAAHHQELEYSEDGITYRRIPNNFIDKILGLLYVLDDWKIFPAKRPFFTSILSDFKYYWQIAKDLQSQNCDIIQINFAFHVSPLIRAFNPQAKIVIFLQTEWLTQLDPKMIERKLKAVDLVIGCSDYITNQIRTRFPNVPCQTIFNGVDINHFVVNNEAKKNQKKEMKTLLFVGRISPEKGLHILLEAFNKVILQYPQVQLKLIGPEGKYGVLPIQMINTEDPYFQTLIPFYQGEYSDQLRQIISPNAANSVCFFGPVEQLDLVEHYQDADIFIFPSVWNEPFGIPLVEAMAMELPVIATYSGAFPEIVEDEKTGLLVERSNPDALAEAILRLLSDENLSQEMGKAGRQRVVDKFSWEQISETLLVEFHKICDPTC

SEQ ID NO: 5968 - protein, 349 aa, Rhodopirellula baltica SH 1
MLLSQPSMNQLSSRVCNGVLDAIGGTPLVRLNRFLDRPDIELIVKWEAANPGGSAKDRPAAKMLSEALKRGEIGPETTIVESTSGNMGIGLAQVCRYHGLKFICVVDPRAQKQNLSIIEALGGTIELVTQPLKGDFLAARIAKVCELIETTPNSYWPNQYANTDNPRSHFKGTIREIDETLNGEFDVLFVATSSTGTAQGCRDFLKSRGRDVQVVAVDSVGSVLFGGSSGPRKIPGLGAGKEPRLAAGQSFDHLVRVSDLECVVGCRRAAQREAMLIGGSAGGVLMSVGRMQEQFAGKRCVAVLHDSGTRYLETVFSDEWVSESLGCTSEELNYLVGSSSFEFFEGVSA

SEQ ID NO: 5969 - protein, 154 aa, Magnetospirillum magnetotacticum MS-1
MFSLIINGERHKVDAAPDTPLLWVLRDLLGLTAVRYGCGQGLCGACSILVGSEPVRACQLPVSEVGGRRVVTLTGQDDAVSTQLRAAWIELDVPQCGYCQSGQLISAGALLRRNPKPSDADIDAAMSGNLCRCGTYQRIRAAIHLAARRLRGAS

SEQ ID NO: 5970 - protein, 189 aa, marine gamma proteobacterium HTCC2143
MQEESGWKSQGLMVSLFERITELTFNGPDMNLFINGTERVINGVWEEETLLSVLREYFGLIGTRFGCGKGLCGSCTVHVDGEPVRSCITSVNNIAGTSVLTIEGLQQDSEKLHPLQQAWIDERVPQCGYCHSGQIMQAWGLLSKTSNPTEEQINAFMDSVLCRCGTYDRIKKAILRAAVMLQQSSDTHV

SEQ ID NO: 5971 - protein, 799 aa, Mycobacterium tuberculosis H37Rv
MTTIESRPPSPEDLADNAQQPCGHGRMMRKEDPRFIRGRGTYVDDVALPGMLHLAILRSPYAHARIVRIDVTAAQAHPKVKAVVTGADLAAKGLAWMPTLANDVQAVLATDKTRFQGQEVAFVVAEDRYSARDACELVDVDYEPRDPVVDARTALDPSAPVIRTDLEGKSDNHIFDWETGDAAATEAVFAKADVVVQQEIVYPRVHPAPMETCGAVADLDPVTGKLTLWTTSQAPHAHRTLYALVAGLPEHKIRVISPDIGGGFGNKVPIYPGYVCAIVASLLLDKPVKWMEDRSENLTSTGFARDYIMVGEIAANRDGKILAIRSNVLADHGAFNAQAAPAKYPAGFFGVFTGSYDIEAAYCHMTAVYTNKAPGGVAYACSFRITEAVYFVERLVDCLAFELKMDPAELRLRNLLRPNQFPYQSKTGWVYDSGDYETTMRKAMNMIGYEALRAEQKQRRARGELMGIGMSFFTEAVGAGPRKDMDILGLGMADGCELRVHPTGKAVLRLSVQTQGQGHETTFAQIVAEELGIAPDDIEVVHGDTDQTPFGLGTYGSRSTPVSGGAAALVARKVRDKAKIIASGMLEVSVADLQWEKGKFHVKGDPSAAVTIADIAMRAHGAGDLPEGIEGGLDAEVCYNPSNLTYPYGAYFCVVDIDPGTAVVKVRRFLAVDDCGTRINPMIIEGQVHGGIVDGIGMALMEMIAFDEDGNCLGGSLMDYLIPTALEVPHLETGHTVTPSPHHPIGAKGIGESATVGSPPAVVNAVVDALAPFGVRHADMPLTPSRVWEAMQGRATPPI

SEQ ID NO: 5972 - protein, 838 aa, Xanthomonas campestris pv. vesicatoria str. 85-10
MRIVMDLQGAQSESRFRGIGRYSLALALTVARDARGHDIHLALNGAFPEAVKDIRTAFKGLIPQSNIHVWHVPLPVHACDTGNSTRCSHAEIVREATLASLKPDIVHVSSLFEGYGDNALTSIGRVFQIPTVVTMYDLIPMMNPEVYLNHDPVYAKAYAEKFSFLQRADAVLAISESSADEARRVGKFGSDKVFNISAGCDAVFSQLEIQHPARRLVRAKFGIEGEFFLYTGGADRRKNLNRLIDAYAALPVATRKIARLVMAGRMPASLVDDLNRVALERGLRADEIIFTGYVSDEELVALYNECRFFVFPSWHEGFGLPVLEAMACGAAVIAANASSIPEIATEPAMLFDPYDTAEMSERIRWMLEDDAAVAEARAFSEHRATAFSWERSATAFLDACESVHLRSLPRTDAGQALNIAMAALGRKSTQTLAVVAAADALDRSIAPEERMLMLDVTELAAHDRGTGIQRVTRAISNEWLRRPPHGYRIQLVRLDRESRRYVCANAYAGHLLGQDFGEDAALVCHAGDVFVGLDLVGHAVDLASDWFDYFHVAGVVINFVVYDILPVRNPQWWPGPGGQHHERWLRGIVSVSDRLICISQAVADDVTGWMLENGIGKQPDVAWFHLGADLEGSAPSRGMPDHADALLSRLKQVRSFLMVGTLEPRKGYAGVLAAFEYLWSAGQDIALVIVGKKGWMVDELCEKLETHPQLHRNLFWLSSASDELLEKLYQACTCLIAASEGEGFGLPLIEAGQRRLPILARDIPVFREVAGEHATYFAGHTPVEIASAIEKWLELHTQNAHPRTDELSWLTWAQSADQLAAALLKPAASLVYPSQEAN

SEQ ID NO: 5973 - protein, 159 aa, Mycobacterium tuberculosis H37Rv
MQVNMTVNGEPVTAEVEPRMLLVHFLRDQLRLTGTHWGCDTSNCGTCVVEVDGVPVKSCTMLAVMASGHSIRTVEGLAGPDGQLDPVQEGFMRCHGLQCGFCTPGMLITARALLDRNPDPDEQTIREAISGQICRCTGYTTIVRSIQWAAAHQTVKAQS

SEQ ID NO: 5974 - protein, 373 aa, Hordeum vulgare
MADCMQEWPEPIVRVQAVAESGLAAIPGCYVKPPHDRPAQQHLAAVAVLHEPSDTSIPVIDLGELLAADEGRIDGLITEAVAAACRDLGFFQVVNHGVAPELMRAVREAWRGFFRLPISAKQQYANQPRTYEGYGSRVGVQKGGPLDWGDYYFLHLAPEAAKSPDKYWPTNPAICKELSEEYGREVTRLCELLMAAMSAGLGVKPGRLQEEFGGADGAGVCVRVNYYPRCPQPELTLGLSSHSDPGGMTVLLADERVRGLQVRGRGGEWVTVDPIADSFIVNVGDQIQVLTNAAYRSVEHRVTVNADAERLSVAMFYNPRSDLPLAPMAELVSAEAPALYKPMTFDEYRLYIRRMGPRGKSQVESLKAKPDNR

SEQ ID NO: 5975 - protein, 342 aa, Brucella melitensis 16M
MFNSVLDTIGNTPLIRLSKASELTGCDIYGKAEFLNPGQSVKDRAALYIIRDAEKRGLLRPGGVIVEGTAGNTGIGLTMVAKALGYRTAIVIPETQSQEKKEVLRLLGAELIEVPAAPYRNPNNYVRLSGRLAEQLAKTEPNGAIWANQFDNTVNRQAHIETTAQEIWRDTSDQIDGFVAAVGSGGTLAGTAIGLKERNHNIKIALADPHGAALHAFYTTGELKAEGDSITEGIGQGRITANLEGFTPDFSYQIPDAEALDILFALVEEEGLCLGGSSGINIAGAIRLAKDLGPGHTIVTVLCDYGNRYQSKLFNPAFLRGKSLPVPRWLEKKTEIDIPFEG

SEQ ID NO: 5976 - protein, 383 aa, Mycobacterium marinum M
MRVVQVANFYGPRSGGLRTAVDRLGAEYCASGHEVFLIVPGAHTGQRRLDTGVVRISVPAKLIPLTGGYRAVMPGRVRELLGALDPDAVEVSDRLTLRSLGCWGRERGITTVMISHERLDRLVGQVLPHRAAQRLADFANRRTAANYDTVVCTTAFAREEFDRIGATNTLTVPLGVDLQTFHPRRRCPLVRQRFATPRQLLLIHCGRLSVEKHVDRSIGALAALCDAGVDARLVIVGEGPLRARLQRQAAGLPVDFTGFVTHRDTVAQLLASADIALAPGPHETFGLAALESLACGTPAVVSRTSALSEIITTDSGASADNDPAAIAAAVRTIVGWPERQRRSSARRRAEMFTWQVAAAGMLTALDADAPGCCGGGDAASRAC

SEQ ID NO: 5977 - protein, 206 aa, Desulfovibrio desulfuricans subsp. desulfuricans str. G20
MNIYMRQFSFAGILAVAVVCAFAIAAAPLRAAAHGPHQPDVYDMGTLQPVATVPLLHKGDAAPDFELPATDGTKVRLSSFRGSKNVVISFVPAAFTPVCSDQWPGYNIARELFHRHDAVLLGISADNTPSQHAWIQQMGGLWFPVLSDFWPHGATAAAYGVLRPEGVSERAIFVVDKQGRIAAAIISDINKRPDLGLIIDALKDLP

SEQ ID NO: 5978 - protein, 189 aa, Staphylococcus epidermidis RP62A
MSLINKEILPFTAQAYDPKKDEFKEVTQEDFKGSWNVVCFYPADFSFVCPTELEDLQNQYAKLQELGVNVYSVSTDTHFVHKAWHDHSDAISKLEYSMIGDPSQTITRNFDVLDEETGLAQRGTFIIDPDGVVQAAEINADGIGRDASTLVNKIKAAQYVRQHPGEVCPAKWEEGSESLQPGLDLVGKI

SEQ ID NO: 5979 - protein, 300 aa, Polaromonas sp. JS666
MNYPTIEDAIGKTPLVALQRIAAAENTERNNVILGKLEGNNPAGSVKDRPALSMIKRAEERGDIKPGDILIEATSGNTGIALAMAAAIKGYRMVLIMPEDLSIERAQTMKAFGAELVLTPKSGGMEHARDLAEQMQNEGKGRVLDQFANQDNPRIHYETTGPEIWTDTSGKVTHFVSAMGTTGTITGVSRYLKEKNPAIRVIGAQPSEGSRIPGIRKWQQEYLPKIYDPSHVDELVLVSQSDAEDMCRRLAREEGIFAGISSAGACWVAQEIAKTVKDAVIVFVVCDRGDRYLSTGVFPA

SEQ ID NO: 5980 - protein, 1039 aa, Xanthomonas campestris pv. vesicatoria str. 85-10
MRIAIDLQAAQTASRHRGIGRYSLALAEAMLREPRAHEFWLVINGDIASDAIDSLAALLPRERVVAFRTAQPVHWRDPANAWRRTASEHMRESFLQALQPDIVHVTSVIEGASDGAVTSIGRGTGGARTAATLYDLIPLHDPRYIATPWAAEWYADKVASLQRADVLLSISDYVRNDAIERLSVAPERVVNISSAASQIFRPIHVDSVLRGRFAHEHGIVGGYVMYSGAMDPRKNLEALVAAYALLGKEKQERYQLVVTGHLDELERARLALVARRLKLSPDRIVCTGHVTDQSLVELYCGAELFVLPSLQEGFGLPLLEAMACGTAVIGARASSIPEVIGRDDALFDPTDPAAIAGAMRRVLEDTDFARSLRHHGPQRARAFSWAGSASRALDAFEAYGQLHPAAKWGWRETSEALQKKRAALVTDLAHACGSRVPVADTDLVQVAVAMDANEDLLRDVLRRQHPLPQFPSWRVEGPFDSSYSLALVNRELARALDAQGLNVLLHSTDGSGDFDADPEFLASDQQIARLHSRASGSAPVAADVCSRLLYPPRVADMDSRFNLLHAYAWEESAVPEAWVADFNEFVQGISALSTHVVKALVDSGVAIPLGVCGAGVDHWESIAAAEGTSLQQRGFSFLHVSSCLPRKGVDVLLQSYGDAFSDRDDVSLIIKTFANPQNEVRRLLHGVRRARADFPHVILIEEDLDSASLKRLYSQCDVMVAPSRAEGFGLPLAEAMLSGLAVITTAWGGQCDFCNDQTAWLIDYTFAPAETVFGLPHSVWAEPSRTGLSRLLREVHRLPAEQRNERTRRGRQLLQGHFKWADVAQRLLAFVRDLWARPIRTATPLIAWIAPSSPAQSSGGVFAELSGLAGELTLFEIDASIIYSGATMPAGLVSLSEPRHCPTRSLPVIGHQLTNAVVIDCPHILHHGHWFAGLLEDQLDRGRIVVVLLRRVAASDPWEPALIRALRRCDRVLVEGFADLNLLKSQGVSANTAILPTLGDNVEIQQSALRVWSIVRALLWQRHADPSIFSPRPAEVVCS

SEQ ID NO: 5981 - protein, 389 aa, Synechococcus sp. CC9605
MAQIAWLGKKSPFCGNVSYGISTTEALRKRGHQVHFIHFDNPRSPERDNTSLLANDPDVSLPYLVKSQVYTIPSPGAQRELRESLERLQPDLVHASLTLSPLDFRLPELCQQLGVPLVATFHPPFDAGLRNLTAGTQQLTYQLYAPALARYDRVIVFSQLQADFLERLGVPADRLTVIPNGVDTDRWCPTSPGTLSLMHQQVRQRLGRERIVLYMGRLATEKNVEALLRAWRLVSPKGCRLVIVGDGPLRNSLMNQFNDDRILWWGHEPDLDTRVALLQCAEVFILPSLVEGLSLALLEAMASGTACVATDAGADGEVLEQGAGIVLSTQGVTTQLRTLLPVLRDQPVLTAELGRKARLRALERYTISSNIDALEQLYADLMLTSTVAA

SEQ ID NO: 5982 - protein, 153 aa, Burkholderia thailandensis E264
MSTSFVLNGKNLTLDADPAMPLLWAIREDAGLHGTKFGCGAAQCGACTVHLEGQAVRSCVLPLAAVAGKRVTTIEGLASKPAKAVQAAWIKLQVPQCGYCQSGQIMSATALLEQNPAPTDADIDAAMNGNICRCATYTRIRAAIHEAAATLKA

SEQ ID NO: 5983 - protein, 384 aa, Staphylococcus aureus subsp. aureus COL
MGKRMKIGITCYPSMGGSGIIATELGIELAERGHEVHFITSNIPFRIRKPLPNMIFHQVEVNQYAVFQYPPYDITLSTKIAEVIKEYDLDLLHMHYAVPHAICGILAREMSGKDIKIMTTLHGTDITVLGYDHSLQGAIKFGIEKSDIVTSVSKSLAQETHEIIETNKEIIPIYNFVRENEFPTKHNTALKSQFGIAPDEKVLIHVSNFRQVKRIDTIIETFAKVREKIPSKLILLGDGPELVPMRQLTKELNVEEDVLFLGKQDCVSEFYQLSDLVLLLSEKESFGLTLLEAMKTGVVPIGSNAGGIKEVIKHGETGFVVDVGDCDSASDYAIRLLEDKVLYNKLQKNMLADIAERFGSELITDQYEYYYQKMLNEHNKSKGE

SEQ ID NO: 5984 - protein, 242 aa, Prototheca wickerhamii
GGICRSGPSHESHPAKEAVVTMGGSHSKKSGATTDPLVTVLENKPSRSQATPPADTAPPPAKKNIVSSNITQVIGNTPLVRLNHLAETEGAKATILLKMESLEPNSSVKDRIGLAMIEDAEQSGKITPGKTTLVEPTSGNTGIALAFVAAARGYKLVLTMPATMSLERRIVLRAFGAQLVLTDPAKGMKGALLKAEEIAAATPDSYILQQFENPANPAIHYTTTGPEIWNDAGGDVDVFIAG

SEQ ID NO: 5985 - protein, 438 aa, Magnetospirillum magnetotacticum MS-1
MSGLPILSVAALVDLEQRQGAGGHVKCWERLAEAALRQPESLELTVFMSGEAERTTELGANVRCVTLPPVFSTRRLQALTGPLPDHTDLSPWHPLLARRLSEGRFNMLHTTDAFFAFSRTAERVAARTGLPLVNSIHTATPELTRLFAEQSIHKICGHGWLGRLLTQDLDLPERFKRTKLARLARHQSRCAYALVSKADEVRLASEVLPPDRVRMLRRGLNHNVFAPEKRDRAWLSARFGIPETMSVALFVGRLDPSKNLAPLVEAIRQVNGRGVGLHLFCAGDGREKAAILGRLGSSVTCPGQLGEEDLSRVYACADLLVMPSEIEVVSNVVLEGLASGLPVVVSAAGGMSHYVQPGLTGEVVGDSSARKWAEVLEALAGNPGHLAEMRQAVTSSTSHALPSWDQVLVEDLLPVWRAAVEEAEAVAMGQKLEAACRS

SEQ ID NO: 5986 - protein, 191 aa, Bradyrhizobium japonicum USDA 110
MHCREFRRFIVSRRYDYGRAEIRRIDRRKRSSSKGMHMATVLTINGETKSFDAPPEMPLLWVLRDILGMTGTKFGCGIAQCGACTVHVDGKAVRSCVLPVSAVQNRTITTIEHIGSTPTGAKVQKAWLDAEVIQCGYCQSGQIMSAAALLAATPNPDDSDIDAAMAGNICRCGTYVRIREAIKQAASGRQS

SEQ ID NO: 5987 - protein, 112 aa, Rhododendron breviperulatum
MRQMLDTMDRLFEDAMPFPGRSQSASEIRAPWDIKDDENEIKMRFDMPGLSKEDVKISVEDDVLVIKGEHKKEGGGDDSWSGKSYSSYDTRLRLPDNCEKDKVKAELKNGVL

SEQ ID NO: 5988 - protein, 174 aa, Thermoplasma acidophilum DSM 1728
MSLVNKAAPDFEANAFVNGQIKKVRLSSYRGKWVVLFFYPADFTFVCPTEVEGFAEDYEKFKKKNTEVISVSADTVYVHQAWVQHDERVAKAKFPMVEDRKGTIARAYDVYNEETGNAQRGLFIINPDGIVKYVVITDDNVGRSTDETLRVLEALQSGGLCPVNWHEGEPTIKV

SEQ ID NO: 5989 - protein, 148 aa, Picrophilus torridus DSM 9790
MLKVGDNAPDFEAISDSNEKIRLSDEVKKHRVVLYFYPKDDTPGCTTEACTFRDNYNELLSLGGNVIGVSSDSIESHRKFKEKYRLPFTLISDPDGKIRKLYDATGLMLPPRITYVIDKNMKIIEAFNSQMRPRDHVEISINALKSKN

SEQ ID NO: 5990 - protein, 242 aa, Aegilops kotschyi
MAAANAPFALVSRLSPAARLPIRAWRAVRPAPLSTGRTRPLSVASAGQENRDNSVDVQVSQAQNAGNQQGNAVQRRPRRAGFDISPFGLVDPMSPMRTMRQMLDTMDRLFDDAVGFPTARRSPAAASEMPRMPWDIMEDDKEVKMRFDMPGLSREEVKVMVEGDALVIRGEHKKEAGEGQGEAAEGGDGWWKERSVSSYDMRLALPDECDKSQVRAELKNGVLLVSVPKRETERKVIDVQVQ

SEQ ID NO: 5991 - protein, 303 aa, Salmonella typhimurium LT2
MNTLEQTIGNTPLVKLQRLGPDNGSEIWVKLEGNNPAGSVKDRAALSMIVEAEKRGEIKPGDVLIEATSGNTGIALAMIAALKGYRMKLLMPDNMSQERRAAMRAYGAELILVTKEQGMEGARDLALAMSERGEGKLLDQFNNPDNPYAHYTTTGPEIWRQTSGRITHFVSSMGTTGTITGVSRFLREQEKPVTIVGLQPEEGSSIPGIRRWPAEYMPGIFNASLVDEVLDIHQNDAENTMRELAVREGIFCGVSSGGAVAGALRVARATPGAIVVAIICDRGDRYLSTGVFGEEHFSQGAGI

SEQ ID NO: 5992 - protein, 223 aa, Clostridium tetani E88
MKDCKEEKHKCLNIGMKAPDFCATTTFGSIRLSDFRGKWVILFSHPGDFTPVCTTEFIGFAQCYPYFKKRNVQLLGLSIDSNPSHLAWVYNIYINTGIQIPFPIIADRDGSISRMYGMVSPYISSTETVRSVFIIDEDGIIRTILTYPLTNGRNIGEILRMVCALQTTDEEKVVTPANWIPGRPVMVPPPKTYNELINRRKDNPELCCIDWYWCYKKQNKNFA

SEQ ID NO: 5993 - protein, 1369 aa, Oryza sativa Japonica Group; identical to SEQ ID NO: 4962

SEQ ID NO: 5994 - protein, 601 aa, Arabidopsis thaliana; identical to SEQ ID NO: 4035

SEQ ID NO: 5995 - protein, 372 aa, Synechococcus elongatus PCC 6301
MAARDIHFANRDRRPSPLVGAFLLRVREPKQVGRIKPGCPTEKRMDIRNGFIDTIGNTPLIRLNSLSEATGCNILGKAEFLNPGGSVKDRAALFIIEDAERQGKLRPGGTVVEGTAGNTGIGLAHICNAKGYRCLIVIPETQSQEKIDLLRTLGAEVRTVPAVPYRDPNNYVKVSGRLAEELDNAIWANQFDNLANRQAHYATTGPEIWQQTEGTVDAWVAATGTGGTYAGVALYLKEQSSKVRCVVADPMGSGLYSWVKTGEIHLEGSSVTEGIGNSRITANMQDVPIDDAIQIADPEALEIIYQLLHRDGLFMGGSVGINVAAAYRLAKEMGPGHTIVTVLCDGGARYQSRLFNAEWLASKGLQMPQVTT

SEQ ID NO: 5996 - protein, 964 aa, Clavibacter michiganensis subsp. sepedonicus
MSMTVDGREIPGEPAPGQSLRTWLREHEVFSVKKGCDSGDCGACAVLLDGEAVHSCILPAFRAAGREVTTAAGLGTPGDLHPVQARFVEAAGFQCGFCTPGMVVTAASLGDDELDDLPRLMKSSLCRCTGYRAIDEAIRGEHGGADHAHGDGCGGARPEGLGPVRATGSAAAAGSAATAADGSGDDARAAERAQTGRVGTSLHAPASERVVSGLEPYTLDVQVPGLLHASLVRSPHPHARIRSIDTSEALALPGVHAVLTHHDSPATLYSSARHEDRFDDPDDSRVFDDVVRFRGQRVAAVIADDVGIAEAAVRLVRVDYEVLPAVFDPDEARRPGAPLVHGDKDPAVSRLADPQRNIVAEMHGEHGDVAAGLARAAEVVSGTWSTQRVAHTHLETHATVGWMEEGRLVLRTSSQVPFLVQREICRLFELEPERVRVFTARVGGGFGGKQEILTEDVVTLAVLATGRPVQLEFTRSDEFTLSPSRHPMRVGVTVGATSDGLLTALAVDVLSDTGAYGNHGPGVMFHGCNESITLYRSPAKRVDAQSVYTNNLPSGAFRGYGLGQVIFAVDSALDELARRLGISGFEIRRRNAVVPGDPLIITEAEGPDLGFGGSYGLDQCLDLAERALGDGGGDPVPAGDRWLVGEGMAAAMIATMPPRGHFADVTVAMAADGTVTVSVGTAEFGNGTTTVHAQLAATALGTTPGRIRIRQSDTDVTRYDTGAFGSAGTVVAGKAVHVAATALADLLREAAAARTGIAAAAFALTPDALVAGDVSVPIAELAGPDGLAAQAHEDGALRSLAFNVHAFRVAVDPATGEVRILRSVQAVDAGTVLNPAQLRGQVEGGTAQAIGTAVYEEVVHDGEGRILTDVLRNYHIPQLADLPVTEVLFARTHDDLGPHGAKSMSEAPYNPVAPALANAVRDAIGIRPHDLPMSRDRVWRLLHGGGLQPRFDSPTTLGERGTRE

SEQ ID NO: 5997 - protein, 239 aa, Triticum turgidum subsp. dicoccoides
MAAANAPFAIVSRLSPAARLPIRAWRAARPAPLSTGGRTRPLSVASAAQENRDNSVDVHVSRQDGGNQQGNAVQRRPRHAGFDISPFGLVDPMSPMRTMRQMLDTMDRLFDDAVGFPTARRSPAAASETPRMPWDIMEDDKEVKMRFDMPGLSREEVKVMVEGDALVIRGEHKKEAGEGQGEGGDGWWKERSVSSYDMRLALPDECDKSQVRAELKNGVLLVSVPKRETERKVIDVQVQ

SEQ ID NO: 5998 - protein, 239 aa, Triticum turgidum subsp. dicoccoides
MAAANAPFAIVSRLSPAARLPIRAWRAARPAPVWTGRTRPLSVASAAQENRDNSVDVQVSQAQNAGNQQGNAVERRPRRAGFDISPFGLVDPMSPMRTMRQMLDTMDRLFDDAVGFPTARRSPAAASETPRMPWDIMEDEKEVKMRFDMPGLSREEVRVMVEDDALVIRGEHKKEAGEGQGEGGDGWWKERSVSSYGMRLALPDECDKSQVRAELKNGVLLVSVPKRETERKVIDVQVQ

SEQ ID NO: 5999 - protein, 214 aa, Diospyros kaki
AFGADLVLTEPTKGMGGTVKKAYELLESTPNAFMLQQFSNPANTQVHFETTGPEIWQDTNGKVDIFVMGIGSGGTVSGVGQYLKSQNPNVKIYGIEPEESNVLNGGKPGPHDITGNGVGFKPDILDMDVMEEVLMVSSEDAVNMARTLALKEGLMVGISSGANTVAALRLARRPENKGKLIVTVHPSFGERYLSSVLFQELRKEAENMQPVAVD

SEQ ID NO: 6000 - protein, 748 aa, Arabidopsis thaliana
MEDVRRRNRGHPLLRSKKRGEGYNHGFSPSQIQSLAVICQTFLPPETTSEQQAVNSFHVASSTQPPFTDEVAEMIVKNGRSEAVKVLRIILMILSFRFGTLLLCGSLCLDKSWPFVLRFSQLPLDKREAILRNWSRQSGFLLPFRITFFLAKFYTLFYFFSQTDENLKNPALEAIGYCIDGTERSSNKKSEADEKRRPLEKGIIETMHESDVTITQSLTEKGVHVARDDGDNVYRIRCDAVVVGSGSGGGVAAANLAKAGLKVLVLEKGNYFTAHDYSGLEVPSMLELYEKGGLLTTVDGKFMLLAGSAVGGGTAVNWSASIRTPDHVLQEWSEGSKIKFFGSQEYQSAMDEVTIRIGVTERCVKHGFQNQVLRKGCERLGLQVESVPRNSPEDHYCGLCGYGCRAGAKNGTDQTWLVDAVENGAVILTGIKAERFVLVDNTSSSNERKKRCVGVFASSVGGKIGKKFIIEARVTVSSAGSLLTPPLMLSSGLKNPNIGRNLKLHPVLMTWGYFPEKDSEFSGKMYEGGIITSVHHMNDTESGCKAILENPLIGPASYAGLSPWVSGPDLKERMIKYGRTAHLFALVRDLGSGEVMMENEVTYRTTKKDRENLRAGLRQALRVSVAAGAVEVGTYRSDGQKMKCEAITKEAMEEFLDEVDAVGGVGTKGEYWTTYFSAHQMGSCRMGVTAEEGALDENGESWEAEGLFVCDGSILPSAVGVNPMITIQSTAYCISSKIVDSLQNKTKV

SEQ ID NO: 6001 - protein, 242 aa, Triticum turgidum subsp. dicoccon
MAAANAPFAIVSRLSPAARLPIRAWRAARPAPLSTGGRTRPLSVASAAQENRDNSVDVHVSRQDGGNQQGNAVQRRPRHAGFDISPFGLVDPMSPMRTMRQMLDTMDRLFDDAVGFPTARRSLAAASEMPRMPWDIMEDDKEVKMRFDMPGLSREEVKVMVEGDALVIRGEHKKEAGEGQGEAAEGGDGWWKERSVSSYDMRLALPDECDKSQVRAELKNGVLLVSVPKRETERKVIDVQVQ

SEQ ID NO: 6002 - protein, 214 aa, Diospyros kaki
AFGADLILTDPTKGMGGTVKKAYELLESTPNAFMLQQFSNPANTQVHFETTGPEIWEDTCGTVDIFVMGIGSGGTVSGVGRYLKSQNPDVKIYGLEPAESNVLNGGKPGPHHITGNGVGFKPDILDMDVMEEVLMVSSEDAVSMARELALKEGLMVGISSGANTVAALRLARKPENKGKLIVTVHPSFGERYLSSILFEELKKEAENMEPVPVD

SEQ ID NO: 6003 - protein, 742 aa, Idiomarina baltica OS145
MNKNQWLKILFYVNVVIVGLVIGYKIYLNFSQPEFEVVHSEQVASISSRLQGDSDYQFAVLGNINNSIGIFEQRIIPELNQADIDFVVSAGNAVSGGGEDKYRALYGSLSHLNKPYLLTFGDNEYDEFGSFRYYEHFGPHFFSFVADSTRFIFLDSTGKTPWQWQLRWLTDILRADESKHRFIFVSHPPVQPKNETLFATEDDFLQPLGFRSGLLQLVEQHSVDAVFSSHLSIYDKVMYKGTPFYITGGAGGLVLNHDNSFYHYLMVHVTDAGIEVNVNELEVGQHPVLKILESLWFFIYSLLYAGYINFILIVSALLLVSVKLYQMVFVGKSYYPDYDIDPKPWLSKPLNIVMFTNNYLPFIGGVPISIERLRVGLKHLGHKISIVAPKYANARTDEAHVIRMPNWFSFGENSEFQFAHLFSRVVRQKVKALKPDIIHVHHPFWIGSLGVYMAKRLKVPVVYTYHTRLEHYAHYVMLPGNLFRNIIAHIMVRRFANKCDSVIVPTQSVEEYLRMIGVTRPIYVQPTGIEYQRFQKVSRDKIDSIKTSQSMSDDECILVSVARLSDEKNIDFMIDAMVDIRKRANKPVRLLQIGEGHQRDYLQQRIDDNGLTDCVQLVGAVPPKDMPEWYALGDLFVFASQSETQGMVILEAMAAGMPVVAVRSSGIEDVVEDDINGYKTPAKQDRWSEQVVKLINDDELRERLGKQALKFAADYSVEAFTRHVECVYGETLARFNNKDKRD

SEQ ID NO: 6004 - protein, 317 aa, Zea mays
MVFGALIIAKLLCVPLVMSYHTHVPIYIPRYTFSWLVKPMWLIIKFLHRAADLTLVPSVAIGRDLQAARVTAANKIRLWNKGVDSESFHPRFRNMEMRSRLTNGEPEKPLVFYVGRLGVEKSLDFLKRVMDRLPGARIAFIGDGPFRAELEQMFSGMPVVFTGTLQGEELSQAYASGDVFVMPSESETLGFVVLEAMSSGVPVVGARAGGIPDIIPEDQEGRTSFLYTPGDVDDCVGKIKRLLSSEELREAMGRAARKEMEKFDWRAATRKIRNEQYSAAIWFWRKKRAQVLRPLQWVLRLLRRTMPGAADAAAKQS

SEQ ID NO: 6005 - protein, 238 aa, Triticum turgidum subsp. durum
MAAANAPFALSRLSPAARLPFRAWRAARPAPVWTGRTRPLSVASAAQENRDNSVDVQVSQAQNAGNQQGNAVERRPRRAGFDISPFGLVDPMSPMRTMRQMLDTMDRLFDDAVGFPTARRSPAAASETPRMPWDIMEDEKEVKMRFDMPGLSREEVRVMVEDDALVIRGEHKKEAGEGQGEGGDGWWKERSVSSYGMRLALPDECDKSQVRAELKNGVLLVSVPKRETERKVIDVQVQ

SEQ ID NO: 6006 - protein, 379 aa, Corynebacterium efficiens YS-314
MNAGSRRRTLVVTNDFPPTVGGIQSYVRDFLATQDPDLITVFASTQDAPAATAFDASLAYEVIRWPRTVMLPTPTTAYAMGEIIRARGIDNVWFGAAAPLALMAPQARAAGATRIIASTHGHEVGWSMTPGARQMLRRIGEQADVLTYISDYTLRRFRPAFGSHPQFVHLPSGVDTDVYRPATAQDRVTTRIRWGLAPDTPVITCISRLVPRKGQDKLIQAMPTVLGEHPDAVLIIVGAGRIEQRLRSMAHPLGDAVRFAGRLDHAEMVAVLAASDIFAMPARTRGGGLDVEGLGIVYLEAQACGVPVIAGQSGGAPETVTPATGLVVDGRDVDKLAAAVAGLLSDAEARANMGQAGRRHVEESWTWDVMGARLREILS

SEQ ID NO: 6007 - protein, 704 aa, Candida tropicalis
MNTFLPDVLEYKHVDTLLLLCDGIIHETTVDQIKDAIAPDFPEDQYEEYLKTFTKPSETPGFREAVYDTINATPTDAVHMCIVLTTALDSRILAPTLTNSLTPIKDMTLKEREQLLASWRDSPIAAKRRLFRLISSLTLTTFTRLASELHLKAIHYPGRDLREKAYETQVVDPFRYSFMEKPKFDGAELYLPDIDVIIIGSGAGAGVMAHTLANDGFKTLVLEKGKYFSNSELNFNDADGVKELYQGKGALATTNQQMFILAGSTLGGGTTVNWSACLKTPFKVRKEWYDEFGLEFAADEAYDKAQDYVWKQMGASTDGITHSLANEVVVEGGKKLGYKSKEIEQNNGGHPDHPCGFCYLGCKYGIKQGSVNNWFRDAAAHGSKFMQQVRVVQILNKNGVAYGILCEDVETGVRFTISGPKKFVVSAGSLNTPTVLTNSGFKNKHIGKNLTLHPVSTVFGDFGRDVQADHFHKSIMTSLCYEVADLDGKGHGCRIETILNAPFIQASLLPWRGSDEVRRDLLRYNNMVAMLLITRDTTSGSVSADPKKPDALIVDYEINKFDKNAILQAFLITSDMLYIEGAKRILSPQPWVPIFESNKPKEQRTIKDKDYVEWRAKAAKIPFDTYGSAYGSAHQMSTCRMSGKGPKYGAVDTDGRLFECSNVYVADASVLPTASGANPMISTMTFARQIALGLADSLKTKPKL

SEQ ID NO: 6008 - protein, 199 aa, Trichodesmium erythraeum IMS101
MTDECLRVGQKAPDFTATAVVDQEFETIKLSDYRGKYVVLFFYPLDFTFVCPTEITAFSDRYKEFELLNTEILGVSVDSEFSHLAWIQTDRKSGGIGDLNYPLLSDIKKEISTAYNVLDLEAGIALRGLFIIDREGIIQHATVNNFAFGRNVDEAIRTLQAIQYVQIHPNEVCPVGWKPGDKTMNSDPIKSKEFFAAVS

SEQ ID NO: 6009 - protein, 399 aa, Caulobacter crescentus CB15
MGGRRMRIVDVAEFYSPTGGGVRTYIDRKLEVAEQLGHELFVIAPGPEDRFESRRSGGVIWVRAPRLPFDANYYMFWDAAPVHKHLDALAPDLVEASSPWRGAWVVAGWRGRAARAMFMHADPVAIYPQRWFGGVASPERVDRWFEWFWRYLRSLRRHFDTTVAGGHWLAKRFEQHGLGPVAGIPLGIDRAAFSPDFRDPALRARLLEACGMPQDAKLALAVGRFHPEKRWPMVIEATVKASKATPIGLVVVGDGIDRARVRRAAAGQPNVHLIPPIRDRPLLAAHLASADVLVHGCDSETFGLLPAEAMASGLPLVGPDRGGFADLAQPESAEIYRSGDTNAAAAALLRLLARDPAQLRTAALQAAAGVRPDVDHFAELFEHYRTIADRALAGGEARP

SEQ ID NO: 6010 - protein, 455 aa, Caulobacter crescentus CB15
MPALSHGLSRFRGEAKPPGPSPRRSRESMAMDSKASMFTHGARPARIALFSGNYNYTLDGANKSLNRLVDHVQRTTGAQVRIYSPTSPTPAFAPVGELVSVPSVTIPFRRDYRLALGLPAAVRRDVEAFAPDLIHLSAPDLLGAAALKLGRRLKTPVVASLHTLFDSYLDYYGLGGLRALARRRLWQFYGACDFVMTPTPAIGEELRAQNLGVQVRTWARGVDADLFNPARRSADWRAAQGFDPDRPVIVFLGRLVMEKGLAAFADTIDRLAASGPSPQVLIIGDGPARAWFQERLPMATFAGFLTGEALATALASADIFLNPSTTETFGNVNLEAMASGLAIVCADAPNTRALLRDGRDAILCAPSDPASYAQALLSLCQDQNRLRRMGAKALDRSAAYRWTEILDEVVDIYAEALDARASAPSRAEVSPHELRARTGRRAGLIDAQAAALSTP

SEQ ID NO: 6011 - protein, 456 aa, Xanthomonas campestris pv. vesicatoria str. 85-10
MAIHSSVLELIGNTPIVKAQRLDTGVCELFLKLEANNPGGSIKDRIGLSMIEAAEQRGDLKPGATLVEGTAGNTGLGLALVAQQKGYQLILVVPDKMSREKIFNLKAMGANVVLTRSDVAKGHPEYYQDLAARIAAETPGAYFINQFGNPDNPAAHEFGTGPEILAQMGGQLDAIVFGCGSSGTMTGLSRAFASASSHTELVLADPVGSILTQYIEEGTVSEKSGSWLVEGIGEDFLPDISDFSRVKKAYSISDAESFHTARELLAKEGILGGSSTGTLLAAALKYCREQTTPKRVLVFVCDTGNKYLSKMYNDYWMLDNGFLERPQHGDLRDLILRPYNKRDTVVVGPKDLLTTAYQRMKLYDVSQLPVIDEGELVGIVDESDVLLHVYGDEARFRDPISTAMVSKLDRLDVASPIEALLPVFDRGQVAIVMDGTQFLGLITRIDLLNYLRRRVQ

SEQ ID NO: 6012 - protein, 766 aa, Oceanicola granulosus HTCC2516
MQKFGKSQPVKRVEDVRFLTGHGRYVDDIAPEGALHGFVVRSPVAHGEITVLDVAEARQAPGVVAVLTLADLEAAGMNVAMDTDPVKNLDGSRGATPERPVLARERVRFVGEPVAFVVAESLAEARDAAELIEFDVDELPVHVETAVGGPAIHPEAPDNRAYEFGLGEREAVAAAIDAAAHVVQCKVVGNRIIVNSLEPRGCFAEPLEGGRFHVCVNGQGVWGAKSDLAAAFGVDEAEVRVTNPDVGGGFGMKGSIYPEVYLVAAAARQLGRPVRWMGERTESMLSDNGGRDLVSTSTLAFDADHRITAYQVHTVSNLGAYNSNYAQHIQSTLFAKVMPGVYDIPAAWLHVEGVFTNTVQIDAYRGAGRPEAIYVLERSMDNAARVLGVDPLELRRKNFIPPAAFPYTSPTGVTYDVGEFDKVLARAEAEADFAGFAARRAESARHGKKRGLGVCYYIESILGDKAENVKVVFEDDGSVSLYVGTQSNGQGHETVYAQFLADQTGIPAERIKVIQGDSDLIAWGGGTGGSRSVTTQNNATLVAADVMVQRFTAFLADKEGVDAAEIGFDDETFRIPGSNMTPTMMDVAEMARAEGRDELLTIAERGELEQMSFPNGCHVAEVEVDPATGVTEVVRYTVVDDLGNLINPMLAEGQVHGGVAQGIGQAISELAVYDETGQALTASFMDYAMPRAIDMPWVNFHSEPTPSKNNPMGMKGCGEAGTVGACAAVANAVQDALWEDGVREVQMPFTPLRVWQMLNGAMGAAA

SEQ ID NO: 6013 - protein, 52 aa, Zea mays
DDDSGAIIGHFAELALQYVQENPDEVCPAGWKPGERSMKPDPKGSKEYFAAI

SEQ ID NO: 6014 - protein, 165 aa, Solibacter usitatus Ellin6076
MSNITLKVNGRTHTVDVEPATPLLYILRNDLGLQGPHFGCGLGQCGACTVIINGAAVRSCILPASSVKGEITTLEGIASNGKLHPLQQAWIEEQVPQCGFCQNGQILTAKAMLDKNPHPTDAQIREAMNGTLCRCMSYYRVQTAIKRAARTLAGASPNSGNEVVA

SEQ ID NO: 6015 - protein, 150 aa, Synechococcus sp. WH 5701
MALLKRESLKDVEDLFDRYALGLPWPFGRSSSALANGPLHDWHPRVDITESDTGYEVRADIPGVRKEDLKVTLQDGVLTIQGERQQEHKEESERMHRVERAYGSFSRSFTLPDDADAAAMTATANDGQLTVSLPRKGTSPSEEPVQIPVQ

SEQ ID NO: 6016 - protein, 112 aa, Rhododendron ellipticum
MRQMLDTMDRLFEDAMPFPGRSQSASEIRAPWDIKDDENEIKMRFDVPGLSKEDVKISIEDEVLVIKGEHKKEGGGDDSWSGKSYSSYDTRLRLPDNCEKDKVKAELKNGVL

SEQ ID NO: 6017 - protein, 112 aa, Rhododendron formosanum
MRQMLDTMDRLFEDAMPFPGRSQSASEIRAPWDIKDDENEIKMRFDLPGLSKEDVKISIEDDVLVIKGEHRKEGSGDDSWSGKSYSSYDTRLRLPDNCEKDKVKAELKNGVL

SEQ ID NO: 6018 - protein, 152 aa, Glycine max
AVPLFIESDKLSSSSKAFIGKPAPNFMADAVVNGDFKTISLEQFKGQYVVLFFYPLDFTFVCPTEIIAFSDKAGEFKKIGVQLIACSTDSKFCHLEWINKPRKQGGLGEMNIPVLADTSHKISRDSRVLMEEAGIAYRGLFIIDDQGVLRQI

SEQ ID NO: 6019 - protein, 175 aa, Pseudomonas putida KT2440
MSAISPNGAEEHPIGLTLNGQRLTLQVNPWTTLLDLLREQLDLVGTKKGCDHGQCGACTVLRDGKRVNACLTLAIMCDGAELVTIEGLASGDVLHPMQRAFITHDAFQCGYCTPGQICSAVGLAREGRAYTREAIREQMSGNLCRCGAYSNIVAAVEEALPLMTDLAPPQRGPNP

SEQ ID NO: 6020 - protein, 186 aa, Acinetobacter radioresistens
LINTEVKPFKATAYQNGQFIEITEADLKGKWSVFFFFYPADFTFVCPTELGDLADNYAEFKQLGVEIYSVSTDTHFTHKAWHDSSEEIKKIEYPMVGDPTWTLAKNFEVLIEADGLADRGTFVIDPEGKIQIVEINAGGIGRDASELLRKVKAAQYVHAHPGEVCPAKWKEGDATLAPSIDLVGKI

SEQ ID NO: 6021 - protein, 112 aa, Rhododendron hyperythrum
MRQMLDTMDRLFEDAMPFPGRSQSASEIRAPWDIKDDENEIKMRFDLPGLSKEDVKISIEDDVLVIKGEHKKEGGGDDSWSGKSYSSYDTRLRLPDNCEKDKVKAELKNGVL

SEQ ID NO: 6022 - protein, 150 aa, Sulfolobus tokodaii str. 7
MPPNIGEQAPDFEAESTLGKIRLSDYKGKFVVLYFYPKSFTPGCTREIQRFSELYEEFKKLNAEVIGVSADSITTQKRFAEKYNAKFPVVADKEKKIIETYGVLNEKGTSAQRVTFIIDPEGKIIQILKNLKKAEEHADKALEIIKNKKS

SEQ ID NO: 6023 - protein, 396 aa, Kineococcus radiotolerans SRS30216
MRVDLLTKEYPPEIYGGAGVHVEELVRALRAVPGGPEVQVRCFGAPRTEPGATAYPEPADLAGANAALRTLGVDLPMAAAVEGADLVHSHTWYANTAGHLASLLHGIPHVVTAHSLEPLRPWKAEQLGGGYRVSSWAEKTAFEAAAGVVAVSAGMRADILRSYPALDPARVHVVHNGIDATEWTPVEGRDLVRANGVDPDRPSVVFVGRITRQKGLPHLLRACAQLPPEVQLVLCAGAPDTPEIAAEVAGLVADLQRTREGVVWLDRHLSRPELLEHLSQATVFVCPSVYEPLGIVNLEAMACGAAVVGTATGGIPEVVEDGVTGWLVPIEQVTDGTGAPVDPDRFVADLAATLAEAVADPDVARARGAAGRARAVEHFSWDAIAARTLEVYRSLL

SEQ ID NO: 6024 - protein, 112 aa, Rhododendron kawakamii
MRQMLDTMDRLFEDALPFTGRSQSTSEIRAPWDIKDDENEIKIRFDMPGLSKEDVKISIEDDVLVIKGEHKKEGGGDDSWSGKSYSSYDTRLRLPDNCEKDKVKAELKNGVL

SEQ ID NO: 6025 - protein, 320 aa, Nostoc punctiforme PCC 73102
MRIAKDITELIGRTPLVQLNKIPQASGAVARIVVKLESMNPASSVKDRIGASMVEMAEEAGLIHPGKTVLVEPTSGNTGIALAMVAAAKGYHLILTMPDTMSHERRSMLKAYGAQLELTPGVEGMRGAIGRAEQILAQTPNAYMLQQFRNPANPKVHAETTAEEIWNDTDGEVDILVAGVGTGGTITGVAEVIKGRKPSFQAIAVEPSSSPVLTGGKSGPHKIQGIGAGFVPAIYRPELVDEVIQVADEQAIAYSRRLAKEEGLLSGISTGAALYAAIQVAQRPENAGRLIVMIQPSFGERYLSTSLFKDPEENEWLSKV

SEQ ID NO: 6026 - protein, 200 aa, Mannheimia succiniciproducens MBEL55E
MVLVTRQAPDFTSAAVLGNGEIVDNFNFKQHIAGKPAVIFFYPLDFTFVCPSELIAFDHRYEEFKKRGVEVVGVSIDSQFTHNAWRNTAVDQGGIGQVQYALAADTKHEIAKAYGIEHPEAGVALRASFLIDANGVVRHQVVNDLPLGRNIDEMLRMVDALQFHEQHGEVCPAQWEKGKEGMKDSPEGVAKYLKQNADKL

SEQ ID NO: 6027 - protein, 173 aa, Anabaena variabilis ATCC 29413
MMRTNERLKPGSDSQENLRGVKDMTIIRWNPWQDLNTLQRQLNHLFEEDMLPSTVLERTLTRVPAAEIHETAEAIHLKLELPGIDAKDVDLQVTDKAVYISGERKSETKTEDKGVVKSEFQYGKFQRVIPLPTRIQNTNVKAEYKDGILNLTLPKAEAEKNKVVKVNIESAVG

SEQ ID NO: 6028 - protein, 510 aa, Sorghum bicolor
MAVFISSSGSPGRATATTTTTTTLLLAVLAAAAAAGLLLAPVAARGSPPEHDKQLQLQQQEDDRIPGLPGQPNGVAFGMYGGYVTIDDNNGRALYYWFQEADTADPAAAPLVLWLNGGPGCSSIGLGAMQELGPFRVHTNGESLLLNEYAWNKAANILFAESPAGVVFSYSNTSSDLSMGDDKMAQDTYTFLVKWFERFPHYNYREFYIAGESGHFIPQLSQVVYRNRNNSPFINFQGLLVSSGLTNDHEDMIGMFELWWHHGLISDETRDSGLKVCPGTSFMHPTPECTEVWNKALAEQGNINPYTIYTPTCDREPSPYQRRFWAPHGRAAPPPLMLPPYDPCAVFNSINYLNLPEVQTALHANVSGIVEYPWTVCSNTIFDQWGQAADDLLPVYRELIQAGLRVWVYSGDTDSVVPVSSTRRSLAALELPVKTSWYPWYMAPTEREVGGWSVQYEGLTYVSPSGAGHLVPVHRPAQAFLLFKQFLKGEPMPAEEKNDILLPSEKAPFY

SEQ ID NO: 6029 - protein, 150 aa, Bradyrhizobium sp. ORS278
MIKVKINGQEQSWDGDPSLPLLWYLRDELGLTGSKYGCGQALCGACTVMVDKEAARSCITAISDVAGREVTTIEGLHPTGDHPVQKAWRQVNVPQCGFCQAGQIMQAAALLNENPKPSHDQIRDAMSGNICRCGCYQRIENAVHLASTGV

SEQ ID NO: 6030 - protein, 395 aa, Frankia sp. EAN1pec
MRVALFTREYPPDVYGGAGVHVEYLARELARLVDLTVHCEGDPRPASGTAGAASTAAVEAHRPWPALDGANDALRIASMDLSMAAAVDRAGGADVVHSHTWYTNLAGHLTSLVQGIPHVMTSHSLEPRRPWKAEQLGGGYRLSSWCERVAISAAAAVVAVSEGMRADILDAYPEVDPGRVHVIRNGIDTDEYTPDNRTDVLERYGVDPDRPSVVFVGRITRQKGLPVLLRAAARLDPSAQLVLCAGAPDTPEQLAEVTGLVDGLRASRDGVVWLSGMLAKPEVIQLLSRATVFVCPSVYEPLGIVNLEAMACGTAVVASRVGGIPEVVASGETGLLVPPDDPAALAAAINEVLADPGRAAAMGRAGRDRAVAEFGWPAVAERTARLYEKVTGSSG

SEQ ID NO: 6031 - protein, 238 aa, Triticum monococcum
MAAANAPFALSRLSPAARLPFRAWRAARPAPVWTGRTRPLSVASAAQENRDNSVDVQVSQAQNAGSQQGNAVQRRPRRAGFDISPFGLVDPMSPMRTMRQMLDTMDRLFDDAVGFPTARRSPAAANEMPRMPWDIMEDDKEVKMRFDMPGLSREEVKVMVEDDALVIRGEHKKEAGEGQGEGGDGWWKERSVSSYDMRLALPDECDKSQVRAELKNGVLLVSVPKRETERKVIDVQVQ

SEQ ID NO: 6032 - protein, 296 aa, Magnetococcus sp. MC-1
MATLESLIGNTPLVDLDRVVKGCVEGVKLLAKVEGNNPGGSVKDRAAYGMFMGAEQRGVLNRETRIFEATSGNTGIALAMMAARRGYQLTLVMPETMTLERRATMAAYGADFLLVTAEQGMEGAIDLVNAKVANGEGIKLDQFSNADNWGAHYRTTGPEIWRDTQGQITHFVSAMGTTGTIMGVSRALKERNPQIQIIGVQPDEGSQIAGIRRWPQAYMPKIFEPSRVDTILDVNTAEAREMTRRLARDEGLFCGLSAGGAVAAALKVCQGLSQPGTVVVIIPDRGDRYLSTDLFL

SEQ ID NO: 6033 - protein, 165 aa, Rhodospirillum rubrum ATCC 11170
MPMVSMTVNGEVVSGEVETRTLLVDFLRHTLGLTGTHVGCDTSQCGACVIHMNGVAVKSCSVLTVMAEGAEILTIEGLSGNGPGDALHPMQEAFREHHGLQCGFCTPGMVMTALDLVARDPDPDEAAIRRGLEGNICRCTGYHNIVKAVREGASRLREAGRAAAQ

SEQ ID NO: 6034 - protein, 803 aa, Rhodospirillum rubrum ATCC 11170
MPSDSATVTDLQSAAQRSGIGVSVRRKEDRRFLTGQGTYTDDIVRPGMVHAFLLRSPHAHARIAALDVGPARAAKGVLAVFTGADMAADKVGSIPCGWAVANKDGTPMAEPPHPALAVDRVRHVGDAVAVVIARTLAQAKDAAELIEIDYQDLPVVVDPAQALNSPAIHDQAPGNLCYDWEIGDAAAVEAAFARAHHITRLDLINNRLVPNAMEPRSYIGEYDRATGEYTLTTTSQNPHVIRLLMGAFVLNIPEHKLRVVSPDVGGGFGSKIYHYAEEAIVTWAAPKVGKPIKWTSDRSEAFLSDAHGRDHVSHAELALAEDGTFLALKVDTIANLGAYLSTFSTAVPTYLYATLLAGVYRTPAIHCRVRSVFTNTVPVDAYRGAGRPEATYLIERIVDKAAREIGMDRVALRRKNFIPADAFPYQTPVALQYDSGDYEATLGKALVLADVEGFAARRAEAEARGKVRGLGYSTYLEACGIAPSAVVGSLGARAGLFECAVVRVHPTGSVTVLTGSHSHGQGHETTFAQLVSDTLGLPIENVEISHGDTNKVPFGMGTYGSRSLAVGGEALMKAMGKVVDKARKIAAHALEAAVEDVEFKDGSFTIAGTDKAMTFAQVALTAYVPHNFPHDQLEPGLEEQAFYDPMNFTYPGGCHICEVEIDPQTGVVEVVAMTAVDDVGRVINPMIVHGQIHGGLAQGIGQALIEGCAYDANGQLVTGSFMDYAMPRADRLPSFRVDNAVTLCAHNSLGVKGCGEVGAIGSPPAVINAVLDALAPLGVSDIAMPATPFRVWRAIEAARAAAQ

SEQ ID NO: 6035 - protein, 238 aa, Triticum monococcum
MAAANAPFALSRLSPAARLPFRAWRAARPAPVWTGRTRPLSVASAAQENRDNSVDVQVSQAQNAGSQQGNAVQRRPRRAGFDISPFGLVDPMSPMRTMRQMLDTMDRLFDDAVGFPTARRSPAAANEMPRMPWDIMEDDKEVKMRFDMPGLSREEVKVMVEDDALVIRGEHKKEAGEGQGKGGDGWWKERSVSSYDMRLALPDECDKSQVRAELKNGVLLVAVPKRETERKVIDVQVQ

SEQ ID NO: 6036 - protein, 395 aa, Blastopirellula marina DSM 3645
MKIESTTAPIEAGPLRVGFNANLLSDPAMRGWNRYAVNLLEHLPSANVQLVLYSMEPIAGQFLARFRDDSCVQSVSRKMNYTKWEQWWLPRQLRRDGIEVFHSPYHFGIPFATKCPCVVTLHDAIGQQRWPQFNGWRHAMQIGNWANYGSHVVARRKSTKVITVSRFSQSELVRRLSVDAQRISIIPEAADPIFATFPAEEKIQETAARFQLAKPYLFYIGGFEGRKNLDFLLKAFAAANLKDVVLALAGGDDDNRDRLRRLAAELEILDNVRFLGRVDDDDLPSLYRHAMAFVYPSLEEGFGLQLCEAMAMGCPILAANATSLPEVLGDGGALFNPTSVDDLTSLLRKIAEDPLLRHSLSQCSLHRGKQFSWQETARLTRVVYESIAPRMGAIR

SEQ ID NO: 6037 - protein, 303 aa, Bordetella parapertussis 12822
MSTPTYPTIEQTVGNTPLVRLQRIPGAAGQARGNVILAKLEGNNPAGSVKDRPALSMILRAEERGEIHPGDTLIEATSGNTGIALAMTAAMRGYRMVLIMPDNLSLERRAAMTAYGAELILTPAAKGGMEYARDLATAMQAEGKGKVLDQFGNPDNPRAHIEGTGPEIWNQTDGRVTHFVSAMGTTGTIMGVSTYLKSRNAAVQVVGAQPAEGSQIPGIRKWPEAYMPKIFDRSLVDAYESIAQAEAETMARRLAAEEGIFAGISSAGALVAALRVAERVENATIVFIVCDRGDRYLSTGVFN

SEQ ID NO: 6038 - protein, 309 aa, Lactobacillus acidophilus NCFM
MSTIFNSVTELVGNTPLLKLNRVVPEDAADVYVKLEFENPAGSVKDRIALAMIEKAERDGKLKKGGTIVEPTSGNTGIGLAMVAAAKGYHIIIIMPETMSVERRKLMKGYGAELILTPGSDGMKGSIAKAEELVKEKGYFMPMQFDNPENPNIHELTTGPEIIAAMNGIGKAIDAFVAGVGTGGTLSGIGRALKKENPNTKVYALEPSESPLLKDRKAGKHGIQGISAGFIPSNLDKNIYDGVIEVSTDEAMNTARKTAKKEGFLPGISAGANVHGAIELAKKLGKGHTVVTVIPDGGDRYLSTALFND

SEQ ID NO: 6039 - protein, 292 aa, Shewanella sp. MR-4
MSDFPTIEACIGQTPLVRLQRLDCGSSTVLLKLEGNNPAGSVKDRAALNMIIQAELRQEIAPGDTLIEATSGNTGIALAMAAAIKGYKMILIMPSNSTQERKDAMLAYGAELLLVDNMEAARDLALELQAQGKGKVLDQFNNQDNANAHFQTTGPEIWQQSQGKITHFVSSMGTTGTIMGVSKYLKSRNPDVTIVGLQPADGSSIPGIRRWPQEYLPGIFDAARVDAVMDIEEQDAKAMARTLAREEGICAGVSSGGAVFAALEIARQNPGSVVVAIVCDRGDRYLSSGLFS

SEQ ID NO: 6040 - protein, 156 aa, Vibrio fischeri ES114
MITPLAAGSTAPNVSLLDQNGESVSISDFKGKKVLFYFYPKAMTPGCTVQAQGLRDIKSELEAHNVVTLGVSIDAVKRLGKFIERDNLNFTLLSDEDHAAADAFGVWGEKKFMGKVYDGLHRISFLINEEGVIEHVFTKFKTKDHHEVVLDYLNNK

SEQ ID NO: 6041 - protein, 237 aa, Wolinella succinogenes DSM 1740
MACDTGVKAIDSNNEKTSVSNDQNLSTKENKNMSSSLVLRKMPAFETMAYDAATGHYKKVSSQDYEGKWTLICFYPADFTFVCPTEIAAMNAHLDEITGELGVEVLAASTDTHFSHKRFVETEPILKGLKMTIAADPKGDMARAFGVMIEEEGLALRGRFLVNPEGVVVAQEVQAPMVGRNVQELIRQIRAWQHATQTGEVCPAGWRPGKKTLPVNTDAEKMTGRVGDYITLEELLS

SEQ ID NO: 6042 - protein, 160 aa, Mesorhizobium loti MAFF303099
MAKVPVQFILNGSEKAEFIDSGTTLLNALRDKIGDTSPKGGCHQGTCGACSVIIDGELRLSCLTLAETCDGAAITTTSGLAEGGVLHPLQRAFLDTFATQCGFCTPGMIMAAKVLLDQTPNPSRDEVVEALSGNICRCTGYEPIIQAVLTAARANSQNAA

SEQ ID NO: 6043 - protein, 190 aa, Streptomyces avermitilis MA-4680
MAPSTSSAITLNINGEKHTLPVDHRTTLLDALRERLDLTGTKKGCDQGQCGACTVLLDGRRAVSCLQLAVAAEGRVITTIEGVADGEQLHPVQQAFLDLDGYQCGYCTPGQICSAIAVIEEHAAGWPSAVTADVRPEAGAPPLTADEIRERMSGNLCRCGAYVSIVQAVARAAEAHAADAQAAEVKGAAA

SEQ ID NO: 6044 - protein, 161 aa, Rhodopseudomonas palustris CGA009
MAKISLIVNGNPVTANVDPRTLLVQFLRENLRLTGTHVGCDTSQCGACVVHLDGKAVKSCTTLAVMADGHEVTTIEGLAADGAPLHPMQEAFREHHGLQCGFCTPGMIMTAVDMVHRKGHDLSDETIREELEGNLCRCTGYQNIVVSIAAGAKAMANSDRS

SEQ ID NO: 6045 - protein, 321 aa, Idiomarina loihiensis L2TR
MKVFNNVMEMVGNTPMVRVTNMDTGPCELYLKLELQNPGGSIKDRIAVEMVEQAEKQGKLKPGDTIIEATAGNTGLGLALVAASKGYPLKIVMPDKMSQEKVNNLRAMGAEVVQTRSDVQKGHPEYYQDMAARMAEENGYYYVNQFENPANVDAHYKTTGPEIWEQMEGKLDAFVCGVGSGGTLTGVGRYLREQKSDIDLVLADPAGSILEPLVNRNEEVEAGSWLAEGIGEDFIPTICDIKLANTAFAISDKEGMQTARKVLEKEGVMVGSSSGTLIAAALRYCQQQTEPKRVVTLACDTGNRYLSKLFNDDWMREQNLL

SEQ ID NO: 6046 - protein, 317 aa, Salinibacter ruber DSM 13855
MSTAPASPSASTAAPAASSLVDDIGRTPLLRLDRVADDLPDSVAVYGKAEHLNPGGSVKDRPALRMIEAGLDAGAFRPEQTLIDATSGNTGIAYAMIGAAKGLDVALALPENASAERKKVLRAYGAELILTDPMAGTDGAQRRVKEIVDAHPDRYFYPDQYNNDANWRAHYDGTGTEILDQTDGAVSHFVTGLGTTGTFTGVTRRLKAHDASIRCVAVEPETALHGLEGLKHMETAIVPGIYAPDLADAHRTCSTEAAVDMTRRLAREEGLLVGPSAGANVAAALDVARSLDAGTVVTILCDTGTRYLSDDFWEEES

SEQ ID NO: 6047 - protein, 762 aa, uncultured bacterium
MRSKSCWPSGRSRRRSCRPRHDGDTTMKFDTPATTNPIDQLKVIGQPTNRIDGPRKTTGTAPYAFERHDVAPDAAYGYIVGAGIAKGRIASMDLRAARAAPGVIAIVTARNAGKLGQGDFNTAKLLGGPEVQHYHQALALVVAKTFEQARAAAQLVRIDYAPSPGKFDLAAEKQAATPPKASDFSGPPETKVGDFEGAYAAAPVQFEGTYTTPDQSHAMMEPHASVAVWKGDQLTLWTSNQMIAWSTGDVAKTLGIPRAKVRLISPFIGGGFGGKLFVRADAVLAALGARAAKRPVKVALQRPLMANNTTHRPATIQRIRIGATRDGKIAALSHEGWSGDLPGGQPETAVNQTRLLYAAPHRLTSTRLAVLDLPEGNAMRAPGEASGMMALEVAMDEVAEQLGLDPVEFRVINDTQVDPEKPDRPFSQRQLVQCLRTGAERFGWGRRNPKPAQVRDGRWLVGMGTAAAFRNNLVMKSGARVRLDQHGVVTVETDMTDIGTGSYTVIAQTAAEVMGVPLSKVAVRLGDSDHPVSAGSGGQWGANSSTSGVYAACMKLRETVARKLGITSPDVVFSDGLVRDGERAVPLGEAAGAEGLVVEDSIEFGDLDKKYQQSTFGAHFVEVGVDAVTGEVRVRRMLAVCAAGRILNPKSARSQVIGAMTMGVGSALMEELHVDKRRGFFVNHDLAGYEVPVHADIPHQEVIFLDETDPISSPMKAKGVGELGLCGIAAAVANAVYNATGVRVRDYPITLDKLLTRLPVVA

SEQ ID NO: 6048 - protein, 156 aa, Sulfolobus solfataricus P2
MVEIGEKAPEIELVDTDLKKVKIPSDFKGKVVVLAFYPAAFTSVCTKEMCTFRDSMAKFNEVNAVVIGISVDPPFSNKAFKEQNKINFTIVSDFNREAVKAYGVAGELPILKGYVLAKRSVFVIDKNGIVRYKWVSEDPTKEPNYDEIKDVVTKLS

SEQ ID NO: 6049 - protein, 239 aa, Oryza sativa
MAAPFALVSRVSPAARLPIRAAWRSEPTVGLPSSGRARQLAVASAAQENRDNTAVDVHVNQDGGNQQGNAVQRRPRRSSAFGRHLPFGLVDPMSPMRTMRQMLDTMDRMFDDVALGFPATPRRSLATGEVRMPWDVMEDDKEVRMRFDMPGLSREEVKVMVEDDALVIRGEHKKEEGEGAEGSGDGWWKERSVSSYDMRLALPDECDKSKVRAELKNGVLLVTVPKTEVERKVIDVQVQ

SEQ ID NO: 6050 - protein, 295 aa, Vibrio cholerae O1 biovar eltor str. N16961
MSDFPTLEDYVGQTPLVRLQRLNAGRSTVLVKLEGNNPAGSVKDRPALNMIVQAEARGSLQPGDTIIEATSGNTGIALAMAAAIKGYKMILIMPDNATQERKDSMRAYGAELILVSKEQGMEGARDLALQMQQEGKGKVLDQFNNLDNPDAHYRSTGPEIWQQSQGKITHFVSSMGTTGTIMGVSRYLKQQNPQIQIIGLQPSEGSAIPGIRRWPQAYLPGIFDAARVDQVLDVTQTDAEQTARALAREEGICAGVSSGGAVFAALQIAQQNPGSVVVAIVCDRGDRYLSSGLFS

SEQ ID NO: 6051 - protein, 426 aa, Oryza sativa Japonica Group
MEEAPPLLLDEAARPRRVALFVEPSPFAYISGYKNRFQNFIKHLREMGDEVIVVTNHEGVPQEFHGAKVIGSWSFPCPMYGKVPLSLALSPRIISEVAKFKPDIIHASSPGIMVFGALAIAKLLGVPLVMSYHTHVPVYIPRYTFSWLVEPMWQVIRFLHRAADLTLVPSVAISKDFETAHVISANRIRLWNKGVDSASFHPKFRSHEMRVRLSDGEPEKPLIIHVGRFGREKNLDFLKTVMDRLPGVRIAFIGDGPYRSELEKMFEGMPAVFTGMMQGEELSQAYASGDVFVMPSESETLGQVVLESMSSGVPVVAARAGGVPDIIPEDQEGKTSFLFTPGDLEDCLGKIQLLLTDKEFRDNMGMTARAEMEKCDWRAASKKIRNEFYNAAIWYWRKKRAELIKPLQWLAQMFLPAPEVNRITQH

SEQ ID NO: 6052 - protein, 311 aa, Dictyoglomus thermophilum H-6-12
MKIANSVIELIGNTPLVKLNKITKDCFAEILAKLESFNPGGSVKDRIALSMIEEAEKSGKLNKDKIIIEPTSGNTGIGLAMIGAIKGYKVILVMPESMSMERRALLRAFGAELILTPKEEGMRGAIKKMEEIISSDPEKYFVPMQFENPANPEIHRKTTAEEIWRDTEGKVDIVVCGVGTGGTITGIGEVLKNKNKDIKIIAVEPEKSPVLSGGTPSPHKIQGIGAGFIPKVLNINIIDEIITVSDEDAIETAKRLIKEEGILCGISSGAACFAALKVAKREENKGKRIVVILPDTGERYISTELFDEYRY

SEQ ID NO: 6053 - protein, 212 aa, Cupriavidus taiwanensis
MALRLGDIAPDFEQDSSEGRIRFHAWLGDSWGVLFSHPADYTPVCTTELGLTARLKDEFARRGVKAIALSVDTVDSHRGWIADINETQSTEVNFPILADADRKVSQLYDMIHPNANETLTVRSLFIIDPNKKVRLIITYPASTGRNFNEVLRVIDSLQLTDSHSVATPGNWQDGDDVVIVPSLKDEAVLREKFPKGYQAVRPYLRLTPQPNK

SEQ ID NO: 6054 - protein, 523 aa, Aspergillus phoenicis
MRITSAIASLLLVGTATSLQNPHRRAVPPPLTHRSVASRAVPVERRSNDFEYLTNKTARFLVNGTSIPEVDFDVGESYAGLLPNTPTGNSSLFFWFFPSQNPDASDEITIWLNGGPGCSSLDGLLQENGPFLWQPGTYKPVPNPYSWTNLTNVVYIDQPAGTGFSPGPSTVNDEEDVAAQFNSWFKHFVDTFDLHGRKVYITGESYAGMYVPYIADAMLNEEDTTYFNLKGIQINDPSINSDSVMMYSPAVRHLNHYNNIFRLNSTFLSYINGKADKCGYNAFLDKAITYPPPTPFPTAPEITEDCQVWDEVVMAAYDINPCFNYYHLIDFCPYLWDVLGFPSLGFGPDNYFNRSDVQKILHVPPTDYSVCSETVIFANGDGSDPSSWGPLPSVIERTNNTIIGHGWLDYLLFLNGSLATIQNMTWNGKQGFQSPPVEPLFVPYHYGLAELYWGDEPDPYNLDAGAGYLGTAHTERGLTFSSVYLSGHEIPQYVPGALTASWSSCLVELIVFPRRGTTPLNFS

SEQ ID NO: 6055 - protein, 792 aa, Desulfotalea psychrophila LSv54
MGRSKMSKLRSIAVPVRQKDGRARVTGEAKYYADYLFQGMLQTRILRSPYPSADIISINIEKAEAIAGVRLIMTHENFPKAFRGSLYYVGDLVAAVIADTKEIAEAARALIEVEYDKKKAVLSLEDAIKPGAPQVFAGEDNCHDWEFHAQLSDQDPETGLYKTKTPSDYNGFGDIEQGFAESDVIVEMKDLKYAYTKSPAMETRGCTVNYDGARLQVYTHSQGMHDEKYSLAQALGIGSDKVNYISPYTGSSFGGKNSNVLDRNLPSHYLLIASLACLQLKKAVHCAYSREEEMICSWSRGSQADVKIGFKKDGTMVAMDYSHWQETGAGGDKYPAKNAMLATGAVLYSHNCKHLRGKIRYVNTNRFPAVGWQGYGAPEGTYAVEVTMDVAAEKLGMDPIEIRKKNCMRTGDIDAGWDPLEYKSAYVSSAAIRECLDIGAERLDWQNSWQHPSKKSGRIRSGMGVGIFAMGAGRPGVGNSSEAMVKIFPDGSAALVCAIADIGQGQHTVQCQITAEVLGLPYEKVGIVCQDTDSTPFATLVANSCGTWIQGWATYEAALDAKRQLLKIAAPILNVQAEELALSEQGIYVVAEPERLISFAEAFGSIGHYGGRHEIIGYYCNNSPHDRCLKDGKKDEVYIPKEKGAQFVSLDIDTETGMMDNVKVYMIQDVGKALNPKIVEGQLLTCRHGVENAMLGNDCIVDKRNGWLMTPNFIDYRPATSLDCDVVPIIVENPGDPTHPFGATACGEGAACPSLAAFSNAIYNAIGVRLIETPFTPDKILNALGKIKGRKK

SEQ ID NO: 6056 - protein, 167 aa, Desulfotalea psychrophila LSv54
MSEERSSGKYITLTINGEKRPAWVESHHTLAEVLRNTFGLTGTKEACEEGACGACTILIDGVAQLACMLLATEQTGKEIETIEGLAANGELHPIQEAWLQEYAAQCGYCSAGMIMSTKSLLNKNPNPSQSEIREALGGNICVCSNYEHIFAAVDKAAKIMRGEEQNE

SEQ ID NO: 6057 - protein, 188 aa, Bacteroides fragilis
MEPIINSQMPEFKVQAFQNGSFKTVSSEDVKGKWAIFFFYPADFTFVCPTELVDVAEKYEQFQAMGVEVYSVSTDSHFVHKAWHDASESIRKIKYPMLADPTGILSRGFGVMIEEDGMAYRGTFLVNPEGKIKVAEIQDNNIGRNADELLRKVEAAQFVATHDGEVCPAKWKKGEATLKPSIDLVGKI

SEQ ID NO: 6058 - protein, 470 aa, Nocardioides sp. JS614
MTERYDVIVVGAGTSGLNLARELAAGGLHCLVLEAGGRYDRHTYPRTEVDGSAQLFWGGGLELNADASLAILRPKVVGGGSIVNQALMDRFDDVALDDFRAASGVDLFTETAMAPYYDRAEATICLQTVPERHRNGNATIFAEGFSRNGYRHAPLRRAQSDCRFEDGNSCIECLSGCRIDSKQSTAITALPAAERHGAVLLADVEVTRVAERPDRVSVTGLVGKPGSTRTEQTWTAARLVLAAGAIGNSRLLLSSGFGAELPALGRNFFTHPQYMNFGVFDEPVRAHSGPLQNYKSADPGFRRQGFKLENVFAGPSSIAMLMPGFGAAHLALMRRYDHLGCIEVCVRDTTPGRIRLNRKGAVVIEKRLGAEDLRRRDAGAAAIRNIFLSMGARRLVEGDLGIGLHLMGGCAIGTDPARSVVDPDFTLHGSRRIHAADSSVFPNAPGINPALTIAALSIRAGESILAAARR

SEQ ID NO: 6059 - protein, 258 aa, Glycine max
MACSATSASLFSANPTPLFSPKSSLSLPNNSLHLNPLPTRPSLSLTRPSHTRRSFVVKASSSELPLVGNTAPDFEAEAVFDQEFINVKLSDYIGKKYVVLFFYPLDFTFVCPTEITAFSDRHAEFEALNTEILGVSVDSVFSHLAWIQTDRKSGGLGDLNYPLISDVTKSISKSYGVLIPDQGIALRGLFIIDKEGVIQHSTINNLAIGRSVDETKRTLQALQYVQENPDEVCPAGWKPGEKSMKPDPKLSKDYFAAV

SEQ ID NO: 6060 - protein, 150 aa, Cyanobium sp. PCC 7001
MALLKRESLRDVEDLFDRYTLSLPWPFGRSGSALAGSALQDWHPRVDISESDHGYEVRADIPGVRKDDLKVTLQDGVLTIQGERHQEQKHESERLHRVERSYGSFSRSFHLPEDADAAAMSATACDGQLTVTVPRKGPAPGAEPVQIPVQ

SEQ ID NO: 6061 - protein, 592 aa, Burkholderia thailandensis E264
MRKPNFCMEPVFLQVPLSSVSCKAAYRRSDMSRMRARLWVPEFDGDSVRNMTTTAAAAVRMPFPGVARRRRRDVSPFSRTMQRERRNMSEPIRFYHRRAIREVSGADVTRTVLQYLREDAHCTGTKEGCAEGDCGACTVVVGELNEAGGVAFKAVNACIQFLPTLDGRALFTVEDLRQPDGALHPVQDALVECHGSQCGFCTPGFAMSMWALYEQHGHDAQRADRTTPSRAQIADALTGNLCRCTGYRPIVDAAVRMFDAPPPKVPVDVAALARTLQALRRDDTFHYAHAGQAFDAPRTLDALARLKAEKPAARVLAGSTDVGLWVTKQLRDLGDVLYVGQVPELRRIVERDDWIEIGAGATLEAAYAALAAHYPELAEMWKRFASLPIRNAGTIGGNVANGSPIGDSMPGLIALGARVVLRGGDATRELPLEDLYVGYQKKDMAEHELVVALKVPTRTGARANLRFRTYKLSKRFDSDISAVCAAFAFVADGDAIRAPRIAFGGMAATPKRALRAEAALADAVWDEAAALAAMRALGDDYAPLTDMRATRAYRLETAKNLLYRFWLETRPLDPLPASAVNVREVAAEPAAS

SEQ ID NO: 6062 - protein, 366 aa, Pseudomonas fluorescens Pf-5
MAAQPIVHLIHSGGFYGAERMLLDHCLGTPGQHRVVFINAPDALLQRFAEAGVASHNCHCLQELLAHLRQQPGLLNAHNFKAQVFAWVCARRLRLPLVMTQHGFTPRSLKQKFYTWLSLRLCRSRRVRRVACVAQSIALLHLEAGVAEGKLRVIPNGLPEPALELPASLDGPPLREPEVRRDEMEPLVGFVGRLSAEKGPDLFLDALIGLCQQRPALKAVLLGDGEQNQALRERINEAGLATRILLPGYQNDMQPWLKRLNVLVLSSRTEGTPMILLEAMQAGTPVVAFAVGGIPDVLQHRHNGLLAKPLDSAGLGRCIGQLLDDPVLAGELAKAAQVTQRKHYHLPTLARRWDELYRVARESSRV

SEQ ID NO: 6063 - protein, 203 aa, Eubacterium acidaminophilum
  misc_feature (47)..(47): Xaa can be any naturally occurring amino acid
MVSVGKKAPDFEMAGFYKGEFKTFRLSEYLGKWVVLCFYPGDFTFVXATEVSAVAEKYPEFQKLGVEVLSVSVDSVFVHKMWNDNELSKMVEGGIPFPMLSDGGGNVGTLYGVYDPEAGVENRGRFLIDPDGIIQGYEVLILPVGRNVSETLRQIQAFQLVRETKGAEVAPSGWKPGKKTLKPGPGLVGNVYKEWSVKEAFED

SEQ ID NO: 6064 - protein, 157 aa, Xanthobacter autotrophicus Py2
MSEPVQLQVNGTAHRFALPRSTPLIYVLRNDLGLNGPKFGCGLGECGACTVLMDGVAARSCVTTLGTAEGRAITTLEGLGTPEAPHPVQAAFIAEQAAQCGYCLNGMIMTTVAFLARTPAPTEDEARAALRYNLCRCGTHVEILRAVMRAAHGEASE

SEQ ID NO: 6065 - protein, 332 aa, Novosphingobium aromaticivorans DSM 12444
MMAPAIAPDTISLIGNTPLVRLKGPSEETGCEIYGKCEFTNPGASVKDRAALWIVRDAEERGILKPGGTIVEGTAGNTGIGLALVANARGYKSVIVMPETQSREKMDTLRALRSELVLVPAAPFSNPGHFVHTSRRIAEETEGAVWANQFDNIANRRAHIESTAPEIWEQMEHRIDGFTCAAGTGGTIAGVGMGLKAFDENITIALTDPHGAALYNYYAHGELKAEGSSVAEGIGQGRITANLDGAPIDTQFRISDEEGLHWVERLLAEEGLCLGLSSGINVAGAVALARQLGKGSRVATILCDTGFRYLSSLYNPEWLKTKGLRVFPWLEQ

SEQ ID NO: 6066 - protein, 216 aa, Brassica napus
MASSSSFFTFSSQTTLHSHLHRNTFLTKTQFPVPTKSSESNFFGLRLSPSTSRSPLSPCSFKSSIFAKVNKGQSAPDFTLKDQNGKPVSLKKYKGKPVVVYFYPADETPGCTKQACAFRDSYEKFKKAGAEVIGISGDDSASHKAFASKYKLPYTLLSDEGNRVRKDWGVPGDLFGALPGRQTYVLDKNGVVQLIYNNQFQPEKHFDETLKFLKPA

SEQ ID NO: 6067 - protein, 386 aa, Symbiobacterium thermophilum IAM 14863
MRIGIVCYPSVGGSGIVATELAAQLARRGHEVHLVSSAVPFRLNRFEERIRFHQVETPTYPLFQEPPYVLTLANKLVEVHRIAGLDVIHAHYAVPHATAAYLAREIIGAGGPRVVTTLHGTDITLMGADPSFTEIIAFSINRSDEVTAVSESLRTDTVTLLPVDRPVRVIPNFLDCARWRRQEAGELRRRLAPEGERLLMHMSNFRRVKRPWDVVEVFARVARRLPSRLILVGEGPELAPTLSLAARLGVRDRVLVLGNQEEVAPLLSAADLFLLPSEQESFGLAALEAMACGVPVVVSRTGGLPEVVAEGETGFLCRVGDVETMAERALQILEDGRLHARLSAAAVEWVRTHFCAERVVPQYEALYRTVTGQAAEDGDGEGRRPG

SEQ ID NO: 6068 - protein, 336 aa, Bradyrhizobium sp. BTAi1
MLCTTVSQLIGQTPVMPIAVPNRNASLVLKLEKNNPGGSMKDRMARSMVLAALEDGRLPPGGTIVESSSGNTGIGLAIIALELGLRFIAVVDHHAAPDKIRMMRALGAEIRYVEGDYREDEVAVVARQRLAAQLGAQLPGALFMNQSDNPANPAGYAGFVEELLTQLPDGVDAYVGCVGTGGSMTGIAQRLKKLNPAVRTVAVEPAGSIVFGKPGHPYYQSGTGTPAGDDIGKVLDYSCIDEGVQVTDTQAFETARFIARRYGLLVGGSTGGAIYKALEFIAAGKLSGTVLTPVADGGEKYLGSIFDDDWMAKRNLLDPAVAMQLEAWLPGRARAA

SEQ ID NO: 6069 - protein, 303 aa, Salmonella typhimurium
MNTLEQTIGNTPLVKLQRIGPDNGSEIWVKLEGNNPAGSVKDRAALSMIVEAEKRGEIKPGDVLIEATSGNTGIALAMIAALKGYRMKLLMPDNMSQERRAAMRAYGAELILVTKEQGMEGARDLALAMSERGEGKLLDQFNNPDNPYAHYTTTGPEIWRQTSGRITHFVSSMGTTGTITGVSRFLREQEKPVTIVGLQPEEGSSIPGIRRWPAEYMPGIFNASLVDEVLDIHQNDAENTMRELAVREGIFCGVSSGGAVAGALRVARATPGAIVVAIICDRGDRYLSTGVFGEEHFSQGAGI

SEQ ID NO: 6070 - protein, 377 aa, Mycobacterium avium 104
MSRVLLVTNDFPPRPGGIHSYLGEFVGRLAAAGSHELTVYAPDWKGAQAHDEAVGYRVVRHPGTLMLPGPAVDARMRRLIAEHVIDTVWFGAAAPLALLAQRARAAGARRVLASTHGHEVGWSMLPVARSVLRRIGEQTDVVTFVSRYTRSRFAPAFGPRARLEYLPSGVDTDRFRPDPAGRARLRERYGLGERPTVVCVSRLVPRKGQDMLIRAMPSIVQRVDGAALVIVGGGPHLQSLRALARDCGVAAQVTFTGGIPAAELPTHHALADVFAMPCRTRGAGLDVEGLGIVYLEASASGVPVIAGRSGGAPETVQHNKTGLVVDGRSVTEIADAVTELLSDPDRAAAMGAAGRQWVTSQWRWDTLAARLAGLLGD

SEQ ID NO: 6071 - protein, 192 aa, Schizosaccharomyces pombe
MSLQIGKPAPDFKGTAVVNGAFEEIKLADYKGKWVFLGFYPLDFTFVCPTEIVAFSEAASKFAERNAQVILTSTDSEYSHLAFINTPRKEGGLGGINIPLLADPSHKVSRDYGVLIEDAGVAFRGLFLIDPKGVLRQITINDLPVGRSVDEALRLLDAFQFVEEHGEVCPANWHKGSDTIDTKNPEKYFSKH

SEQ ID NO: 6072 - protein, 218 aa, Triticum aestivum
MPGLTIGDTVPNLELDSTHGKIRIHDYVGNGYVILFSHPGDFTPVCTTELAAMANYAKEFEKRGVKLLGISCDDVQSHKEWTKDIEAYKPGSKVTYPIMADPDRSAIKQLNMVDPDEKDAEGQLPSRTLHIVGPDKKVKLSFLYPSCTGRNMDEVVRAVDSLLTAAKHKVATPANWNPGECVVIAPGVSDDEAKKMFPQGFETADLPSKKGYLRFTKV

SEQ ID NO: 6073 - protein, 415 aa, Rhodococcus sp. RHA1
MRIALLSYRSKPHCGGQGVYVRHLSRELVELGHQVEVFSGQPYPDVDPRVTLTKVPSLDLYREPDPFRTPHPREFRDAVDVLEVATMWTAGFPEPLTFSLRAARLLKQRADEFDVVHDNQCLGYGLLQLQKAGLPVVATIHHPITRDRELDLASAKWWRQVTVRRWYGFLRMQKRVARAIPALLTVSQSSADDISAAFDVPADNLRTVPLGVDTEIFRPPAAARVPGRVVCVASADMPLKGVSTLLEAVAKVHTERAVELVLVTKLAPGGVTEKLIEELAIGDVVRTVSGIDDAELASLLASADVACVPSLYEGFSLPAVEAMACGTPLVASRAGAIPEVVGTDEEACVLVTPGDPQELADVLGALLDDPQRRARLGDGGRRRVLERYSWAAVAAKTAQTYAEAIAQTRQGGRPC

SEQ ID NO: 6074 - protein, 82 aa, Glycine max
  misc_feature (49)..(49): Xaa can be any naturally occurring amino acid
MMNCGEEIAEIEVKPDGSWRVKHGPMNCSSSLNGYALVPNTALGSGSIXQESSAGRSDADLNGGLVDNPLAFGGDDPSLQIF

SEQ ID NO: 6075 - protein, 1328 aa, Schizosaccharomyces pombe
MGIPKFFRWMSERYPLCSQLIENDRIPEFDNLYLDMNGILHNCTHKNDDHSSPPLPEEEMYIAIFNYIEHLFEKIKPKKLLYMAVDGCAPRAKMNQQRSRRFRTAKDAHDARLKAERNGEDFPEEQFDSNCITPGTTFMERVSRQLYYFIHKKVTNDSQWQNIEVIFSGHDCPGEGEHKIMEYIRTQKAQPSYNPNTRHCLYGLDADLIMLGLLSHDPHFCLLREEVTFGPASRNRSKELAHQKFYLLHLSLLREYLEFEFQECRSTFTFKYDLEKILDDFILLAFFVGNDFLPHLPGLHINEGALALMFSIYKKVMPSAGGYINEKGVINMARLELILLELENFEKEIFKAEVSETKNNGNSDKPSFDFLKYITESTNDIKAMTGEQKNYFLQIKKFLSSREPFIDFSANISSVDQRFLRRLCNDLHLSFSKIIKVDGTHLLRITFRDLEFNDEDEDEIEQDEIERVLQKYDNIPLLNEEQALKEKNVEKDFIQWKDDYYRSKVGFSYYDEEALKAMAERYVEGLQWVLFYYYRGCQSWGWYYNYHFAPKISDVLKGLDVKIDFKMGTPFRPFEQLMAVLPARSQALVPPCFRDLMVNSESPIIDFYPENFALDQNGKTASWEAVVIIPFIDETRLIDALASKDKFLTEEERKRNSFNAPTVFSLAEDYTSFYPSSLPSLFPDLVTRCIQKPYSLPSMEGKEYLVGLCPGVFLGAFGMVGFPSFHTLKHKAELVYHGINVFGNESRNPSVIVNVEDVKSALTSEQIAMQYVGKRIFVDWPYLREAYVESAMDESYMYLASNSTIEKRDLAEIEKSQWGRKCSHKIREYSKRFGVLFGDISLLLQVRPIKGLEYTREGALVKIFNESVLEDYPAQLVVEKIAIDDPRFTEREAPPVEVEYPPGTKAFHLGEYNYGRPAQITGCKDNKLIIWLSTAPGLDAQWGRVLVNDSKSKEKYYPSYIVAKLLNIHPLLLSKITSSFLISNGTKRENIGLNLKFDARNQKVLGFSRKSTKGWEFSNKTVALVKEYINTFPQLFNILTTHATKDNLTVKDCFPKDDTQQLAAVKHWIKEKGINSLTRVSLDEDALDSDIIKLIEEKASTIDSTYQVPKKVFGVPRYALLKPSQTRGILHSQEFALGDRVVYVQDSGKVPIAAYGTVVGIMLHHLDVVFDLPFMSGTTLDGRCSPYHGMQVEVSMVLNVTNPQFVVNTRAGKNRKTNVSANNVSQGTDSRLVTKPTSTFPSPPSPPSSSVWNKREHHPKPFSLHQVPPPESLIHKSKSKFSKGNHHSTNGTQSIRGRGGKRGKPLRSKELNRKHDHIVQPMGKLQIN

SEQ ID NO: 6076 - protein, 152 aa, Dechloromonas aromatica RCB
MIKLTINGKAHQLDVAPDTPLLWALRDTLQMTGTKYGCGQALCGACTVHVDGTPVRACTTPVSAVVGRKIRTIEAVDTERVGKVVQEAWRKLDVVQCGYCQSGQIMSAVALLSQNRKPTDADIDNAMSGNLCRCATYVRVRAAIHEAAKALA

SEQ ID NO: 6077 - protein, 156 aa, Synechococcus sp. WH 5701
MGKAIQVGDRAPLIVLKDQNGTERRSDQLAGRPLVLFFYPKDDTPGCTMEACAFRDNHAELQALGAEVWGVSGDDGASHGRFSQRHQLPYPLLVDQGNSLRQAFGVPGALLNLLPGRVTYVIDGEGVVRHVFNNLLDGPAHAREALAALKRLVPQA

SEQ ID NO: 6078 - protein, 346 aa, Robiginitalea biformata HTCC2501
MKQEIQAFNNILELIGKTPLVRLNRLTAGFPGEYYAKLEAFNPGHSSKDRIAHFIIEEAERSGILKPGSTVIETTSGNTGFSLAMVSIIKGYECILAVSSKSSRDKIDMLRSMGAKVYICPAHVSADDPRSYYQVAKRLHQETQNSIYINQYFNDFNIKAHYATTGPEIWEQTGGQITHLVACSGTGGTISGTARYLKEQNPDIRIIGVDAYGSVLKKYHETGEFDTEEIYPYRIEGLGKNLIPDATDFTVIDEFIKVTDEESAHTARELCHKEGIFAGYTSGAAMQALKQLQEDKTFDANSRVVVIFPDHGSRYMSKIYSDKWMEDQGFFDSKHVGEEQQIQVIK

SEQ ID NO: 6079 - protein, 301 aa, Zea mays
NLLTHSAIASANPRKGGNPSQLIPNPKPPIHPSPPHPLRAAMACSFAAATVVSSAPTPAARPLAVAPQSVSVSRSAAAAAARPLRLVASRSARATRLVARAGGVDDLPLVGNKAPDFEAEAVFDQEFINVKLSDYIGKKYVVLFFYPLDFTFVCPTEITAFSDRYEEFEKLNTEVLGVSIDSVFSHLAWVQTDRKSGGLGDLKYPLISDVTKSISKAFGVLIPDQGIALRGLFIIDKEGVIQHSTINNLAIGRSVDETMRTLQALQYVQENPDEVCPAGWKPGERSMKPDPKGSKEYFAAV

SEQ ID NO: 6080 - protein, 325 aa, Synechocystis sp. PCC 6803
MDIKHGFVDSIGHTPLIRLNSFSDETGCEILGKAEFMNPGGSVKDRAALGIIETAEKEGKLKPGGTVVEGTAGNTGIGLAHICNAKGYKCLIVIPDTQSQEKIDLLRTLGAEVRTVPAVPYRDPNNYVKLSGRIAAELDNAIWANQFDNLANRDAHYHTTGPEIWQQTDGKVDAWVAATGTGGTYAGVALYLKEQSEAVQCVVADPMGSGLYSFIKTGEINPSGNSITEGIGNSRITANMENVPIDDAVQIDDPEALRVVYQLLRRDGLFMGGSVGINVGAAYQLAKKLGPGHTIVTVLCDGGARYQSRLYNQEWLTSKGLTIPD

SEQ ID NO: 6081 - protein, 187 aa, Dechloromonas aromatica RCB
MSLINTQVQPFKVQAFHNGKFIEVTEASLKGKWSVMIFMPAAFTFNCPTEIEDAANNYGEFQKAGAEVYIVTTDTHFSHKVWHETSPAVGKAQFPLIGDPTHQMTRAFDVHIDEEGLALRGTFVINPDGVIKTVEVHSNEIARDVSETLRKLKAAQYTASHPNEVCPAKWKEGEKTLAPSLDLVGKI

SEQ ID NO: 6082 - protein, 212 aa, uncultured bacterium
MHDVLDTKLSRRDLLVAGAASAAAVAAPKPATAAPEPAGSMVPTAKVSLTINGELHTLELDTRTTMLDALREHLHLTGTKKGCDHGQCGACTVIVDGRRINACLTLAVMHPGAQVTTIEGMGKPQSLHPLQAAFVKHDGYQCGYCTPGQVCSAWGALDELKRGIPSHVSADLTARPLLSAEELRERMSGNLCRCGAYSNIIDAITEVAGGVA

SEQ ID NO: 6083 - protein, 489 aa, Agrobacterium tumefaciens str. C58
MKDAISFILNSETISLKDFGPTDTLLDYLRISKRLTGTKEGCAEGDCGACTVLVGRLLDGSLRYESVNACIRFLGSLHGTHIVTVEHLAVRDGALHPVQQAMVDFHGSQCGFCTPGFIMSLYGLWLSSETPGRADIEKALQGNLCRCTGYEPIVRAAEKIAAARPSALFDPLQRDRTDIMAKLWAVRENETIIVTHGEDRSIIPATLSDLTEIYAAEPKATIVAGSTDVGLWVTKQMRALNPVIFINNLGDLQTITVGEDGITLGAGVTYSQAFKTIAEHFPPLARLFDRLGGEQVRNMGTIGGNIANGSPIGDTPPALIALGATLTLRSSSGGRSLPLESYFIDYGKQDRLSGEFVEKLFIPFQKPESRYAVYKISKRRDEDISALCAAFNLTLDAEGTVEDILIAFGGMAGTPKRATHLEAALLGKEWSQETIDAARDALDEDFTPLTDWRATAEYRQLTAKNLLTRFFLETSGEKQELSRFSLEEA

SEQ ID NO: 6084 - protein, 533 aa, Shewanella sp. MR-4
MAIIDPIVTGLNSGWLHTDASQLQENQQFEADVVIVGTGAGGGVAAEILSQAGLSVIMIEAGPLKSSSDFNMEERVAYPNLYQQAAAMKTADKAIGIFQGRAVGGSTTINWTTSIRTPKEALAFWAQHKSVAGLDPDALAPWFEQMEQRLNIHEWNYEPNRNNGALKQGCINLGWDYTVIKRNVAGCWNTGYCGMGCPVNAKQSMLVTTIPTALEKGAQLFSRAKVVKIEHHNGQVFALKAQALDVNLRPTSVELLFKAKHYILSAGAIHTPTLMMRSDVPDPYQLLGKRTFLHPTVLSGGVFADAINAHSGAPQSIYSDEFVWKNGADGELGYKLEVPPVHPILIASKTLGYGASHAELMAQFNQLQVTIALIRDGYHPDSQGGQVHLTSTGFALDYPLSEAFWRAARRAYASMAELQFSAGALKVLPISDGMPYLSSWKEAKESIAQMDLAPLRTIVASAHVMGGCPFGEDEKLSMVNSYGQSHYLDNLSVMDGSIFPTSLGANPQLSIYGITARNATALAQKLTDGREPQ

SEQ ID NO: 6085 - protein, 152 aa, Sulfitobacter sp. EE-36
MKLTVNGVTHDVDVEEDMPMLWVLRDVLGITGPKYGCGIAQCGACTVHMDGIAVRSCQLAAGDVEGEITTIEGLGSPAVRHAVQEAWIDLQVAQCGYCQSGQIMQAASFLELNPTPTDDQIDAAMSGNLCRCGTYPRIREAVKSAAIKLKAV

SEQ ID NO: 6086 - protein, 263 aa, Oryza sativa
MAACCSSLATAVSSSSAKPLAGIPPASPHSLSLPRAPAAAARPLRLSASSSRSARASSFVARAGGVDDAPLVGNKAPDFDAEAVFDQEFINVKLSDYIGKKYVILFFYPLDFTFVCPTEITAFSDRYDEFEKLNTEILGVSIDSVFSHLAWVQTDRKSGGLGDLKYPLISDVTKSISKSFGVLIPDQGIALRGLFIIDKEGVIQHSTINNLAIGRSVDETMRTLQALQYVQDNPDEVCPAGWKPGDKSMKPDPKGSKEYFAAI

SEQ ID NO: 6087 - protein, 395 aa, Bordetella bronchiseptica RB50
MTMVQVTLEVNGRQVAHEAPPRMHLGDFLRDQARLTGTHLGCEHGVCGACTVLVDGQPVRSCITYAVACEGRQVTTIEGYDGDPVMARLRAAFTKYHALQCGYCTPGMLTTSRDIVLRLPDADEARVRVELSGNLCRCTGYMGIVGAVMSVLRDLREQPDAAVQALRAAAADGRLPAPRGEQPIAFQPFTPSAPAAAQAAPRPAAAASPASGKGNQIVDAFTVPFPAAEVWAFMVDLPAVAACLPGAVIEETDGQRVKGKIAIKFGPMAAAFNGAARLERDEAAMRAVFRGAGQDSLSQSRATGDIAYQVEAVSENETRVKVDLQYALQGPLAQFSRSGLVQDFVRRMIADFGKNVTARLRQPGGEALPQAQFNPVAMFFSVLWMRVKRWFGRGG

SEQ ID NO: 6088 - protein, 537 aa, Triticum aestivum
HIGRSSRFRSSQRILLPFGSANVAAAMAMANPSAAGAPGICSDALFRELWHACAGPLITVPRQGERVYYFPQGHMEQLEASTNQQLDQYLPMFNLPSKILCSVVNVELRTEADSDEVYAQIMLQPEANQGELTSLGPEPQELEKGTIHSFCKTLTASDTSTHGGFSVLRRHAEECLPPLDMSQNPPCQELVAKDLHGTDWHFRHIFRGQPRRHLLTTGWSVFVSSKRLVAGDAFIFLRGENGELRVGVRRHMRQVNNMPSSVISSHSMHLGVLATASHAISTGTLFSVFYKPRTSQSEFVVSVNKYLEAKKQNISVGMRFKMKFEGDEALERRFSGTIIGIGSTPMVSTSLWADSDWKSLKVQWDEPSSILRPDRVSPWELEPLDAANPQPPQPPLRNKRPRLPASSSVVPELAPKFGLWKSPAEPSQTLSFSEPQQARGLFTNSRFSSSSNVAFNQFYWPARESREDSYAGSTNKVTVERKLEPTAGGCRLFGIEIRSAVEETQPVLTVSGDGYDQTAASVDVDSGELSQPSNINN

SEQ ID NO: 6089 - protein, 187 aa, Azoarcus sp. BH72
MSLINTQVQPFKAQAYKNGKFIEVTDADLKGKWSVLIFMPAAFTFNCPTEIEDAAEHYAEFEKAGAEVYIVTTDTHFSHKVWHETSPAVGKAKFALVGDPTHALTNAFDVHIAEEGLALRGTFIINPEGVIKTMEVHDNAIARDVTETVRKLKAAQYVASHPNEVCPAKWKEGEKTLAPSIDLVGKI

SEQ ID NO: 6090 - protein, 79 aa, Triticum aestivum
VDSESFHTKYRRHEMRVRLSGGEPEKPLVIHVGRFGREKNLDFLKRVMERLPGARIAFVGDGPYRCTIPQSLAICYFFK

SEQ ID NO: 6091 - protein, 187 aa, Xanthobacter autotrophicus Py2
MSLVNTPVKPFKTTAFKQGKFIDVSEADLAGKWSVFFFYPADFTFVCPTELGDLADHYEDFKKLGVEIYSVSTDTHFTHKAWHDSSETIGKVQYAMLGDASGAITNNFEVMRAGQGLADRGTFIVDPNGIIQAVEVTAEGIGRDASELLRKIKAAQYVASHPGEVCPAKWQEGEATLAPSLDLVGKI

SEQ ID NO: 6092 - protein, 214 aa, unidentified eubacterium SCB49
MTFVGRKFPNLNVDAIDKTGANVKINILEKAQQENKKVILFWYPKDFTFVCPTELHAFQQAMDEFEKRNTLVIGASCDTPEVHFAWLNTPKNNGGIEGVTYPLIADSNRNLSNQLGILDITNERFDEESGSVLVDGDNVTYRATYLIDEEGTVFHESVNHMPLGRNVSEFLRLIDAYTHVQTNGEVCPANWKEGETAMNADRTGVAEYLTTQLN

SEQ ID NO: 6093 - protein, 382 aa, Thiobacillus denitrificans ATCC 25259
MTVHIVHVVHRFDTGGMENGMVNLFNTLPPERFRHTVVALTDYSAFRHRITAQRVDFHALNRPPGHDVGWALQLWRLLRRLKPDLVHTRNLAALEAQFVAAAAGVRATVHGEHGRDVFDLHGRNWKYNLLRRAARPLVTNYLAVSRDLEAWLRRDIGVPAHRLHQVYNGVDSVKFHPRSGPRPDFAHPESIVFGSVGRMVEVKNYPLLVRAFIQLMRQQPDRAERARLAIVGAGPAREACLEMLQGAGLDHLAWLPGERDDIAAVMQALDVFVLPSKNEGVSNTILEAFASGLPVIATAVGGNVELVEHGVSGLLVPSDDLDEMVRALLFYLDSPARIGAHGKAARERAEQRFSIPAMARAYADVYEQTLGRRRQTAVDRPE

SEQ ID NO: 6094 - protein, 328 aa, Prochlorococcus marinus str. MIT 9211
MSRIYKDNSFAIGNTPLVKLNSVTKNTKATVLAKIEGRNPAYSVKCRIGANMIWDAEQKGLLKQGQTIIEPTSGNTGIALAFTAAARGYKLVLTMPESMSLERRRVMAVLGAELILTEASKGMPGAIAKAKEIAQSDPQKYFMPGQFDNPANPEIHFKTTGPEIWNDCDGNIDVLVAGVGTGGTITGISRYIKGEKGKSMLSVAVEPSHSPVISQTLNGQEVKPGPHKIQGIGAGFIPKNLDLSVVDRVEQVTNEESIAMALRLAKEEGLLVGISCGAAAVAAVRLAEQEEFAGKTIVVVLPDLAERYLSSVLFADVPTGIIEGPEAT

SEQ ID NO: 6095 - protein, 156 aa, Geobacter sulfurreducens PCA
MIVFLVNGKEQRVDVSPDTPLLWVLRDKLGLTGTKYGCGEGLCGACTVHIDGRPERSCITPVGDVQGKKVVTIEGIPENHPVKKSWLAQDVSQCGYCQPGQIMSAVALLASKPSPTDADIDSAMSGNLCRCGTYGRIRRAIHAAGGRRARKGGSRS

SEQ ID NO: 6096 - protein, 768 aa, Clostridium difficile 630
MINKGIRKIDSTAIVTGKPLYTEDLIMHKDVLTLKLLRSPHAHAKIKNIDTSKAEKIPGVVGIYTYKDVPQVRYCVPGQTEPEASPYDRVLLEDTVRFIGDEVALVAAEDEKTALKALKMIKVDYEVLKPVFDAREAEGNEVVIHPEKDIVEPYPFGLDAKNNIVSKEFFEFGDVEAKLKESDFVVESSYKTQSQSHCMMETHRSYSYKDINDRIVVVSSLQSPHNVKRILRKVLGIPSSKIRVIKPRIGGGFGGKNIAATDIFTAFVTMKTGRPAKFVFTRSETFVGSNSRHEMFFDVKVGADKEGNLKAIELKSLNNTGAYGGNGVSVSSESGHNTLPIYNDIDAVRFNARTVYTNRLPAGALRGYGATQGIFAIDSAIDELAHKIGMDPLEFRIKNIIDRYTNGKAAEDEILSCELRQCIEKGKKLINWDDKYPCKDIGNNKVRAVGMAVANHGSGIPRVDMATVTIRMDEDGTYKLLSGLADLGQGADTIQAQIAAEALNTTVDRISVYTGDSDLCPYDTGAFASCTTTVTGNATIKTANKLKDILLSVAESKLGFKKEDLELGKDRVFVKNDNSKFVLLEELGRESVGGIGFASDDVPVVLEATESFGMLKKIKPFIAGFAEIELDKNTGEYKVINFACVPDCGTVINPTLARIQVEGGVMMGIGFAMYEDPVFDKDGRLLTDSFLQYKVPTKKEVGNILVDFAENFDPGGPYGAKSLGEIVIHTPAPAIANAIFNATGVRLRELPMTFEKVYMGMKNNNKQL

SEQ ID NO: 6097 - protein, 198 aa, Corynebacterium diphtheriae
MSILTVGEKFPEFNLTALKGGDLHDVNASQPEDYFETVSLDKYEGKWKVVFFYPKDFTFVCPTEIAAFGKLDEEFQDRDTQILGGSIDNEFSHFNWRATHPELKTVPFPLFSDIKHDLIKALGVENEEGVADRATFIIDPDGIIQFVSVTPDAVGCNVDEVLRVLDALQSEEVCACNWQKNDPTKNIDKFAELEKGLN

SEQ ID NO: 6098 - protein, 365 aa, Allium fistulosum
MPSISMEQPIHFPQPIHHPKHFDLGSAHEVPDSHTWPTIQPNPPNGPNESIPVIDLSSPDVISLIGHACESWGVFQVISHGVDLNLLHNLESQARRLFSLPTQQKLKAGRSPNSISGYGLAPISSLFSKLMWSEGFTISGSPLDHARSLWPDDYFNFCEVIEEYNKEMKRVAERLMQLMLLSLGLTEETIKWAGPMNELQDISSVLQLNSYPACPNPDRAIGLAAHTDSSLLTILYQSNTSGLQVLRPNKESSPTQWVTVPPIPGALVVNVGDLCHILSNGRFHSVVHRAVVNRTEHRYSAAYICGPPAHVKVSPIVKPVGPAYRPITWREYLGIKARLFDKALASVIISEEDHNDNSTCLLSCV

SEQ ID NO: 6099 - protein, 138 aa, Glycine max
TLKDQNGKNVSLSNFKGKPVIVYFYPADETPGCTKQACAFRDSYEKFKKAGAVVVGISGDDAASHKAFASKYRLPFTLLSDEGNKVRKEWGVPGDFFGSLPGRETYVLDKNGVVQLVYNNQFQPEKHIDETLKILQSL

SEQ ID NO: 6100 - protein, 194 aa, Prochlorococcus marinus str. MIT 9301
MSLRVGQEAPDFSATAVYDQEFKEITLSGLRGKWVVLFFYPLDFTFVCPTEITAFSDRYQDFSALNTEILGVSVDSKHCHLAWIQTPRNEGGIGDINYPLVSDLKREICQAYNVLNDDGEADRGLFLINPEGIVMHTTVNKAPVGRNVDETLRILQGYQYVAANPDEVCPANWTPGEKTMLEDPKGSKEYFSAL

SEQ ID NO: 6101 - protein, 370 aa, Azotobacter vinelandii
MDSTLGERLSARHQDAPLRIAHLLGSGGFYGLERMLLEHCQYAPGQHRVILLGGPESLAQRFREAGVELTRCGGLGSLLRQLGQSDARPALLNGHGFKGLVYGWLGALLLGLPLVATQHGFTPRSRKQRFYAWLSLQLCRTAQVRTVVCVATSIACLHRQAGVRAGKLQVLPNGLPPAPAVTYLRPPGAPAAPLIGFVGRLSAEKGPDLFVELAIELCCRDPRLHAVLLGEGPLRDELQEIIDAAGLHERILLPGYRTDLPAWLRALDALVISSRSEGTPMVLLEAMQAGVPVAAFAVGGIPDVLDHEASGLLSPPGEVGDLTRQVARLLFDKPLGRALSERARLAQQRHHHLPAQAERWRQLYRNAAGG

SEQ ID NO: 6102 - protein, 501 aa, Candida glabrata CBS 138
MDSRHNVIDLVGNTPLIELKKLPKAYGIRPRVFAKLELYNPGGSIKDRIAKSMIEYAEEQGIIHPSRSTLIEPTSGNTGIGLALIGAVKGYRTIITLPEKMSNEKVSVLKALGAEIIRTPTEAAWDSPESHIGVARRLEKEIPGAIILDQYNNMKNPEAHYFGTGREIQKQLEDLKLFSHLNAVVAGAGTGGTISGISKYLKEQNPEIKIVGADPVGSILAQPENLNETEITSYKVEGIGYDFIPEVLDRSLVDVWYKTDDKPAFKYARQLISNEGVLIGGSSGSAFTALVEYCNDHPELSEDDVLVAIFPDSIRSYLTKFVDDEWLKTNDLWDDEILKRVDFDEKKKPATDDVFKGATVKDLHLKPVVAVKDNALVSDVISILRDNAFDQLPVLTQDGKLTGLVTLSQLLKKLSTGKVNNTDTIKNLYLDFRKLNNFDEVSSYNENKSGKKKFVQFTSESTLAELNKFFEKNSSAVITDGLKPVHIVTKMDLLSYLASTA

SEQ ID NO: 6103 - protein, 772 aa, Cupriavidus taiwanensis
MNNDRQEAGMSRAIVGTSTPQVTAREKVMGRAQYAGDIKLPGMLHAKVLRSPHPHARIVRIDTAAARALPGVKLVATGYDVPARHWGPHRKEQRILACGVVRHVGEEVAAVVAVSEEIARDALDLVRVEYELLPALLTPAAALAAGAPEIHAGTGNIGHEMRIERGDVEAAFAACAAVYEATYDMHSQYPGYLEPMASVAAQDGNGRLTVWASTQSVFLARARLAEALDRPVSTIRVVQATTGGGFGAKIVEENNSLICAFLASRLERPVRLVNNRLEDFQGARASVPMQVWLRMGLSAEGVILAKDVRITAECGAYSGLAGDVMHVTAMRSDNMHRVQNVRSHAVLAYTNNPPRGAFRGFGGQQMQFPLNCHLTVLAGMLGIDPIEVHKRNAIGAGETSVHGWKISSTGMAECLDMTRRAIGWDEKRAAPRGTGTRRRGVGIAAAMHVSGNRTLGNWDGSTILLKMNEDGRVMLQTSECDMGQGANTMLSQICAQELGIPLSHVTVMAPDTDTAPFCLGSLASRVTIISGNAVLRAAREARQKLLALAAEKLGVQAQQLVIADGRIAVPGQPDKSATLAEIARLHIFRHGGEGIHVRATYDAPTVMHDADYYGNVAPAHSFAAQAVEVEVDTCTGQVTVIDSFVADDCGKAINPLAVHGQTHGATVQAIGWALYEHLQYEDGRLMNGNFADYTMPTADAVPMLRTDVVESNDPNGPYGAKGASETAILPGAAAIANAVFDAVGVRIQSLPITPEKVLAGLRALRETEAAHA

SEQ ID NO: 6104 - protein, 388 aa, Magnetospirillum magnetotacticum MS-1
MSRVLVITLPPFAGGVPAKCRILVDHLRSKGHEVTVAYYATLSDHPDLVAPSWKPWRRPSTLERTIWNGVPAVAVGCRFPELEFPYYLPSERWTRLIKAHDRHIAVGGTVLASYPLVVAGVPHITWCAATMIEDRQDRRRAMPWPRRLVDQGLIGPVQARMERLILADQGRIRPVSGHTARLFQSMGAGPCPVMPIPVDCERFRPPAQPAPAGVVGFAARLNDPRKNLGLLIDAVAGGADLRLRLAGDTPQGELAARLNDPRLKGRVELAGELSLDQLPGFYAGLDLFAIPSHQEGFGIVGMEAMASGLPVVSTRCGGPEDYVTPGETGFLADDAAEMAAILARLAADRPLRAQLGANARRLAESRYSHQKFAAILSQAWAECWGEEP

SEQ ID NO: 6105 - protein, 763 aa, Clostridium difficile 630
MVNKEVRKIDSEAIVTGKPIYTEDLIFHKDVLTIKLLRSPHAFAKIKNIDIKNALKVKGVVNIFTYKDVPNYRYSMVGESYPEASPHDQLILEDVVRYVGDEVAIIAAEDERAAIKAMKLIKVEYEVMTPILDARESEGNKILIHEEDDLFCPFDFGLDATKNIVSREKMGKGDVEKEFKESDVIVEHSYMTQSQAHCMMETHRAYTYIDTNGRLVVTSANQSAYHMRRQVSKALGIPLSKVRVIKPRIGGGFGGKNIAVTEIYASFVTWMTKRPAKLIYTREETFAMTNTRHQMFFDIKIGSDKEGNIKAIDMKALNNTGAYGDNGPSVCSESGHNVLPTYNNVPAIKFDGRTVYTNLVPGGALRGYGATQGTFALDCAIDELAHKLNMDPTEIKLKNIIKKQTEGGIMNFPIRSCALDECIIRGKKLIGWDEKYPVRDIGNNKVRAVGMSVGTHGSGIANIDMAIVNMRMDEDGTYKLFSGSSDLGTGSDTILAQIAAKALNTSIDRISVYTGDTDMCPYDTGAYASCTTYVTGNATIKSAESLKQKILKVAQKKLDLPIDDLILYEDRVCYSEDVEQFVLLSELGKESVGGGNQEVLYSSESYGIQESAKPFLAGFAEIELDKTTGEFKVINYACSTDCGTVMNPALARIQVEGGVTQGIGLAMYEDPRHGSDGKLQTSNLLQYKVPTKKDIGNIIVDFVDNYEPTGPYGAKSLGEIVIHTPAPAIANAIYNATGVRIRELPITSEKVYMAMKKLNQGGK

SEQ ID NO: 6106 - protein, 1006 aa, Saccharomyces cerevisiae
MGVPSFFRWLSRKYPKIISPVLEEQPQIVDGVILPLDYSASNPNGELDNLYLDMNGIVHPCSHPENKPPPETEDEMLLAVFEYTNRVLNMARPRKVLVMAVDGVAPRAKMNQQRARRFRSARDAQIENEAREEIMRQREEVGEIIDDAVRNKKTWDSNAITPGTPFMDKLAAALRYWTAFKLATDPGWKNLQVIISDATVPGEGEHKIMNFIRSQRADPEYNPNTTHCIYGLDADLIFLGLATHEPHFKILREDVFAQDNRKRNNLKDTINMTEEEKQFLQKQNSEQPFLWLHINVLREYLSAELWVPGLPFTFDLERAIDDWVFMCFFCGNDFLPHLPCLDVRENSIDILLDIWKVVLPKLKTYMTCDGVLNLPSVETLLQHLGSREGDIFKTRHIQEARKKEAFERRKAQKNMSKGQDRHPTVATEQLQMYDTQGNLAKGSWNLTTSDMVRLKKELMLANEGNEEAIAKVKQQSDKNNELMKDISKEEIDDAVSKANKTNFNLAEVMKQKIINKKHRLEKDNEEEEIAKDSKKVKTEKAESECDLDAEIKDEIVADVNDRENSETTEVSRDSPVHSTVNVSEGPKNGVFDTDEFVKLFEPGYHERYYTAKFHVTPQDIEQLRKDMVKCYIEGVAWVLMYYYQGCASWNWFYPYHYAPLATDFHGFSHLEIKFEEGTPFLPYEQLMSVLPAASGHALPKIFRSLMSEPDSEIIDFYPEEFPIDMNGKKMSWQGIALLPFIDQDRLLTAVRAQYPLLSDAERARNIRGEPVLLISNKNANYERFSKKLYSKENNNNNVVVKFQHFKSGLSGIVSKDVEGFELNGKIVCPIQGGSLPNLSTTLILKMSYRLIPLPSRNKSIILNGFIPSEPVLTAYDLDSIMYKYNNQNYSRRWNFGNDLKQNIVPVGPKGITQYKPRTGGYRAFFYFAELSRNNVQPAHNYGRNSYNSQPGFNNSRYDGGNNNYRQNSNYRNNNYSGNRNSGQYSGNSYSRNNKQSRYDNSRANRR

SEQ ID NO: 6107 - protein, 158 aa, Cupriavidus taiwanensis
MNPVTIELTVNGEEHQVQAPARRLLADLLRDDLNLTGTKRGCETGICGACSVLVDGEVVKSCLMLAVQARGRHVMTVEGLAADGQLHPLQQCFMDRGGLQCGYCTPGFLMASCALLANNPNPTEEDVRHGLNGNLCRCTGYVGIVESVLSAAEAMRGN

SEQ ID NO: 6108 - protein, 57 aa, Glycine max
TRDARDSLTDAAPLLLGVNDVRPDKASRQRSDSPFSFPRQKRSVRPRPYLSIGSDSE

SEQ ID NO: 6109 - protein, 155 aa, Clostridium difficile 630
MSFEVIYLIIKCTINNKEKELSIRPDDFLADTLRENGYVSVKKGCDTGSCGLCTVMVNDKAVLSCNYLTARVEGQHITTLEGVLDEAKKFGDFLADEGADQCGFCAPGFIMMVLAMKRELQNPTEEEVIDYVNGNLCRCTGYKGQLRAIHKYLNT

SEQ ID NO: 6110 - protein, 153 aa, Mesorhizobium loti MAFF303099
MRLTVDGQSFDIDADPDMPLLWALRDLIGKTGPKFGCGIAACGACTVHVDGQPVRSCSLPVGQVSGAVSTIEGIGTADRLHPVQQAWLEEQVAQCGYCQAGQIMSAVALLDEVADPSDADIDNATGGNLCRCGTYPKIRSAIRKAAALKTAGL

SEQ ID NO: 6111 - protein, 790 aa, Bordetella pertussis Tohama I
MTTEHTGAEVGAGSRQGVGARVPRKEDARHLHGKGNFVADMAMPGLCEVAFLRSPLAHARITDVRVPESVRDKVVLRSMMGDARDIAADSTLPTYQPSVQPPLASGKVRFVGEPVAMTFAPTRAEAEDHAELVEVDYDDLPVYADVAGAQQATSDLVHEHWRDNVFVTLNADRDFDEHAARAEVVVRRKIDLARQCMVPMEGKAVLAYWDHQADQLVVISATQVPHMIRSVLAQCLDLEQGRVRVVSPDVGGAFGYKCVLQQEELCVAWLAKTYKRPFRFIEDRREHLTAGANSREHHYEMTAYADKRGKLLALDARITIDGGAYSVWPFTIGLEPDQAVGNLPGPYGFRGYRCETRCVATNKPGFVPYRGRTGVCFAIELTMDAVAREVGREPWEVRLENLVQPEQMPYVNVTNKHFDSGDYPASLRKALEMIDIDGVRTRQARGEADGRRIGVGVATYTEQAAHGTSVFAAWGTPVIPGFDQATVRVTPDGGLEVRVGVHSHGQGMETTFAQIAHEILGIDVARIKVLHGDTGQTPFSTGTYASRSLVMSGGAVSQACKRLLPRMRHIAAHMLGVADDAVTLQDGIYRAGEKSVATGDVADAWYLRPQLLPPDVDPAGLEVNVGYKPKVDTGCFTYASHAAVVAVDPDTGAVEILDYVVVEDCGTMINPMVVEGQTIGGIAQGIGTAFYEETPYDANGQPLASTLADYMLPGPTEVPNMRLHHFETPSPHTEFGAKGMGEGGAIAPPAVLFNAVNDALRGLGAAELSRTPLTPIRVLQAIAQGAGEAA

SEQ ID NO: 6112 - protein, 494 aa, Pisum sativum
ETSLLLSFLIILSHFVVEIHGKNKQVEALDNLHKAEYIENSEIDKSEFEVQEIVYDIDAIADSQKGVKENDRIKKLPGQPFVKFSQFGGYVTLDKLSGSAFYYYFVEAHQSKETPPLLLWLNGGPGCSSLAYGAMQELGPFRVNSDGKTLHQNRYSWNYAANVLFLESPVGVGFSYSNKSTEYSSNGDKKTAIDNYLFLVNWLERFPEYKNRDFYISGESYAGHYVPQLAHTILYHNKKANKTIINLKGILIGNAVIHDTTDSTGMYDFLATHAIISDKAAYDVNKVCDFSSSDNLTAECNSAADEVNEDIAFIDLYNIYAPLCKNENLTSKPKKNTIVTDPCSKNYVYAYLNRQDVQEAIHANVTKLKYEWSPCSGVIRKWVDSSPTVLPLLHEFLNNGLRVWIFSGDTDGRVPVTSTKYSIKKMNLPVKTVWHPWFAYGEVGGYTEVYKGDLTFVTVREAGHQVPSYQPARALTLIKHFLDGTPLPSPKIKA

SEQ ID NO: 6113 - protein, 746 aa, Arabidopsis thaliana; identical to SEQ ID NO: 5611

SEQ ID NO: 6114 - protein, 395 aa, Bordetella pertussis Tohama I
MTMVQVTLEVNGRQVAHEASPRMHLGDFLRDQARLTGTHLGCEHGVCGACTVLVDGQPVRSCITYAVACEGRQVTTIEGYDGDPVMARLRAAFTKYHALQCGYCTPGMLTTSRDIVLRMPDADEARVRVELSGNLCRCTGYMGIVGAVMSVLRDLREQPDAAVQALRAAAADGRLPAPRGEQPIAFQPFTPSAPTAAQAEPRPAAAASPVGGKGNQIVDAFTVPFPAAEVWAFMVDLPAVAACLPGAVIEETDSQRVKGKIAIKFGPMAAAFNGAARLERDEAAMRAVFRGAGQDSLSQSRATGDIAYQVEAVSENETRVKVDLQYALQGPLAQFSRSGLVQDFVRRMIADFGKNVTARLRQPGGEALPQAQFNPVAMFFSVLWMRIKRWFGHGG

SEQ ID NO: 6115 - protein, 331 aa, Gossypium hirsutum
MASASTWILSLKLLLISTGILGIALGLKISVPLVLEFSVSQAPLWWSGFRSWLKPPYLYVVINGIIITIAASSRFNQNNGEKDQMEQMQPRPKISEDQQPIVEYDTKSGWGSDAVESSDFVYEENQRGEEVATRVSEEESNVAVEDDRDGNEFVISKSEWIPPSRTDSSEIPLDALLIQEKPAPSSRSGHRKPVKVNPEGGRALKAAKPKRHETLENTWKMITEGKSMPLSRHLKKSDTWENHGRDINVEALTSSPLMKKSETFRDRTNYQLPPEQVSSFPASGKLRKEPSLSQDELNRRVEAFIKKFNDEMRLQRQESLNQYMEMVNRGS

SEQ ID NO: 6116 - protein, 792 aa, Ralstonia metallidurans CH34
MNAPEKLIGSPVRRKEDYRFLTGNGQYTDDVVLPHQSYGYFLRSPHAHARIKSIDTSEAAASPGVIAVLTGDDMAADKVGGLPCGWLIHSIDGSPMKEPPHPSLAHGKVRHVGDQVALVVAESLQQARDASEKIVVDYEELPAVIGLANASSAASLVHDDVPANTCYTWGHGDKAATDAAFAKAAHVTTLQIVNNRLIPNAIEPRAVNASYTRQDDGYTVYVANQNPHVERLLMGAFVLGLPESRLRIIAPDVGGGFGSKIFLYPEDVALTWASKKVGRPIKWTAERSESFLTDAHGRDHVTKAELALDADGNFLAMRVHTIANMGAYLSTFASSVPTILYATLLAGQYATPAIYAEVHAVFTNTSPVDAYRGAGRPEATYVVERLVEAAARETNVDPATLRRKNFIRTFPYATPVGLTYDTGDYEPCLARAEELADVAGFPARRAEAKQRGKLRGLGYSCYIEACGLAPSNIAGALGARAGLFEVGEIRVHPTGTVTVFTGSHSHGQGHETTFAQIVADRLGIALDAVEIVHGDTGRVPFGMGTYGSRSLAVGGSAIMKALDKIEAKAKKIAAHLLEASDADIEFKDGVFRVAGTDRTKTFGEVALTAYVPHNYPLDKLEPGLNENAFYDPTNFTYPSGAYICEVEVDPDTGESHVVKFTAVDDFGNVINPMIVEGQVHGGIGQGLGQAMLEQCVYDPESGQLLTGSYMDYAMPRAGDLPDFTVETSTGTPCTHNPLGVKGCGEAGAIGSPPAFINAMVDALSPLGVHDLQMPATPHRVWQAIQSAQSGTA

SEQ ID NO: 6117 - protein, 456 aa, Chlorobium tepidum TLS
MTNDIFDISDNTPLVLMKQLTRQKRARFMAKLEYMSPCFSHYCRVSGAIVRDAEERGAIHPGMTLVDWTFGTSGIALAMAAVSRGYKVLLAAPESICREKQEVLRALGAELVLTPSEALPGDLQSCVDVAENLVRTLPNAWFANMYQNPVSRQVHQDGTGPEIFRQTEGKVTHLFVPMASGAMISGIGRYFKSVNPEVQIIGVEPEGSVYGDLHGGKSQGTPSAFQLEDIGAVRPTSFWDPNVIDRIVQVSDADAFNCGRELLRAEAVFAGGASGAAMAAALREGEAYGDDALVVVMMTDFGGYDLSRMYNDDWMRRQGFYRKSKTALDQITADDILQRKAHKDLIFAQPEQTLAEVFETMKQNDVSQMPIVSFGAPIGSISENRILSILIENDSAMNAKVVAFMEKPFPVCQPDATISELSEKLQTNASGVLISLSDGRLQLINKSDLIDVLTRK

SEQ ID NO: 6118 - protein, 154 aa, Thermoplasma volcanium GSS1
MYMELLKVGDQAPDFETVDQSGSKVRLSDFKGQPVVLYFYPKDNTPGCTTEACNFRDNFNSFKEAGIKVIGVSVDSPESHKRFAEKYQLNFTLASDKEKEICKKYGVLGLATAKRVTYIIDRDGKIVYVYPKVTPKDHAVEVMNKIKELGLIPS

SEQ ID NO: 6119 - protein, 386 aa, Anabaena variabilis ATCC 29413
MRVAYICADGGIPVFGQKGCSIHVQEVIRALKGQGGQVTLFANRLGGELPADLADVVVHQLPPIPKLERLQREQVALGMNPDLRLSLQKFGSFDLIYERYSLWSYGAMEYAQERGIPGLLEVNSPLIIEQAQHRGLIDRDGAEAVARRVFSAATALIAVSDGVKSYLLDYVDSSKVYVIPNGVNPRRFSPLRSVSQRESFTVGFVGSLKPWHGLPILTEAFSLLHQRVPHAKLLIVGDGPERENLEAELATRGLDAHTQFTGAVNPEQIPQLLTAMDVAVAPYAAQADFYFSPLKVYEYMAAGLPVVVSQIGQLTDLIDSGVNGMLCPPGDAIALANTLEQLWRSPNLRHSLGQAARETVIANHTWDAIARKILHIASSLPVEVKL

SEQ ID NO: 6120 - protein, 875 aa, Oryza sativa Japonica Group; identical to SEQ ID NO: 2537

SEQ ID NO: 6121 - protein, 149 aa, Bradyrhizobium sp. ORS278
MANLTINGKSYSLDVEPDTPLLWAIRENAGLTGTKYGCGIAQCGACTVHLDGTAVRSCGVTVSEAVGKHITTIEGLAGDNGLHKVQQAWLENDVPQCGYCQSGMIMAVAALLKDNPKPSDQDINDAITNICRCGTFAQVREAIHAAANA

SEQ ID NO: 6122 - protein, 406 aa, Thiobacillus denitrificans ATCC 25259
MKILHVFDHTLPLHSGYTFRSAAILRNQQKLGWQTFHLSGPKQVDCSVAEEDADGLHFYRTPRPEGVLARLPGGDPFAVMAAIEKRLLPLARELRPDVLHAHSPVLDAMPALRVGRKLGIPVVYEIRAFWEDAAVDHGSTTEGSLRYRLTRALETRAVKQADAVTVICEGLRADLVARGIPAGKITVIPNAVDVDKFAVGGQADPELKMKLGLGASRVLGFIGSFYAYEGLDLLIGALPAITARAPDVKVLLVGGGPQDAALKAQVMALGLKDRVVFAGRVPHAEVNRYYDLVDVLVYARHPMRLTELVTPLKPLEAMAQGRLMVASDVGGHRELIDDGKTGVLFRAGDADDLARKAVALLDNASDWERIKANGRRFVETERNWAASVARYRGVYQRLVQTEAVLD

SEQ ID NO: 6123 - protein, 160 aa, Ralstonia eutropha JMP134
MRKLIELVINGEPRELAVEPHATLLDALRNDAGLTGTKKGCDVGECGSCTVIVDGRPMNSCLMLAPEAHGCQLTTIEGVQPSPDTVHPIQEQFMQCGAAQCGFCTPGFVMMAKALLEANPHPTRDEIRFAIAGNICRCTGYTKIIEAIEKTAAAMANQEA

SEQ ID NO: 6124 - protein, 312 aa, Fusobacterium nucleatum subsp. vincentii ATCC 49256
MIFKKNKELYIFFNEFFYFFSFSYTIKLKIKFNRRVFMLANSVIDLIGNTPLVKINNIDTFGNEIYVKLEGSNPGRSTKDRIALKMIEEAEKEGLIDKDTVIMEATSGNTGIGLAMICAVKNYKLKIVMPDTMSVERIQLMRAYGTEVILTDGSLGMKACLEKLEELKKKEKKYFIPDQFTNVNNPKAHYETTAEEILKDMNNKVDVFICGTGTGGSFSGTAKKLKERLPNIKTFPVEPASSPLLSKGYIGPHKIQGMGMSIGGIPAVYDGSLADNILVCEDDDAFKMMRELSFKEGILGGISTGATFQSCS

SEQ ID NO: 6125 - protein, 902 aa, Mycobacterium abscessus
MKVNGKLIDASPRPGQCLRTFLREHGHVEVKKGCDAGDCGACTVLVDGASQHSCIVPAHRVTDAEIHTVRSLAGEHDLHPMQRGFIDHAGFQCGFCTAGMVLTAATLTGDQTEDLGNALKGNLCRCTGYRPIRDAVCGVVPPRGSVSAPAAARVVTGTEPYTMDELPAGVGHVAVLGSPHPSARITRIDTDRARLLPGVRAVLCYRDDPGVPFSTARHHERTDDPDDTLVFDRVLRFAGQRVAAVVADTPAIAHRALEHIDVEYEVLPAVFDPEMAQLPGAHLVHGDKGLGARIADPARNLVAEVHGEVGDVAAALARARESGAVVTGSWQTARVQHVHLETHGSVGWQDERGRYVLRTSSQVPFLVRDELCHVFGLAREQVRVFAPRVGGGFGAKQEMLTEDLVLLAVRVTGAPVVYEFTRSDQFTIAPCRHPMRVNVTAAADGDGVLTALAVDVLSDAGAYGNHSVGVMFHGCNESMAQYRCANKRVDAQAVYTNNIPSGAFRGYGLGQVLFGIESALDELARNLGIDPFEFRRRNVIVPGDSFVSWEVEEDDLAFGSYGLDQCLDLAQDALARGAADPARNGSDLPAGWKVGEGMAIAMIATVPPRGHVADARAELDARGRYRISVGSAEFGNGTTTVHAQLAAGVLGCAPDQVYIHQADTDAVSHDTGAFGSAGTTVAGLAVYRAAELLRDQIIRFAATKLAVPQSRCVLEPDGVRAGADLLGLTEIAASAPEPLSAVGHHEGTPRSVAFNVQAFRVAVRPQTGTVRILQSVQTADAGVVVNPQQCRGQVEGGVAQAIGSALYEEILVHDGFVSTTALRNYHIPRLVDVPDTEVYFADTYDTFGPLGAKSMSESPYNPVAPALANAIRDAVGVRVYRLPMNAARVWRVINDSGGGESS

SEQ ID NO: 6126 - protein, 532 aa, Pseudomonas putida KT2440
MPVPDPFRQGLERGWITHDASRLEHDLFLEADIAVIGSGAGGATSAQMLSAAGFKVLLIEEGPLKTSSDFHLLESEAYASLYQEGLGRMSKDGAITILQGRAVGGTTLVNWTSSFRTPPQTLAHWASVHGVNGLGEDELRPWFERMEQELGISPWALPPNANNDVLRRGCEQLGYRWGVIPRNVRGCWNLGYCGMGCPVNAKQSMLVTRIPATLEQGGELLYLARAERFAHNGERIQSLTCQALDAQGIHPTGRQVSVQARHYLLAGGGINSPALLLRSAAPDPHGRLGKRTFLHLVNFSAARFSERIDPYYGAPQSIYSDHFQWQDGADGPVGYKLEVPPLHPALASTLLGGQGHENAQRMAELPHTHVMLALLRDGFHPESQGGSVELRGDGSPVLDYPVTDYLRDGLRRAYRSMAHVQFAAGATHVTPVHSDASAASSLEQALTMIDKLRLEPFRTRLGSAHVMGGCALGEDPRHAVCDSLGRHHQLENLSIHDGSLFPTSIGANPQLSVYAISARLSEALVSRLAHSA

SEQ ID NO: 6127 - protein, 422 aa, Microcoleus chthonoplastes PCC 7420
MNSKHRQHIALISVHGDPAVEIGKEEAGGQNVYVRHLGEALAHLGWHVDMFTRKASADDPVIVEHSPRCRTIRLKAGPEAFVPRDKIFGYTGEFLDNLLRFQEWEGVRYSLVHTNYWISAWVGMQWKKRQSIPQVHTYHSLGAVKYQSVEAIPMIAGTRLDVEKAVLETAERTVATSPQEKDHIRSLVSSKGHIQIIPCGTDIQRFGAIDRTQARQQLGWNPDEKIIFYVGRFDPRKGIETLVRAVGCSQIRHDPQVKLIIGGGSRPGYSDGIERERIEAIVDELGMRDITTFTGRIRDELLSVYYTAADVCVVPSHYEPFGLVAIEAMACSTPVIASDVGGLQFTVVPEETGLLAPPKDEVAFAEAIDRILSHPDWRNQLGQRARWRVEEKFSWDGVAHQLSDLYLQLVRNSSQVLEQASA

SEQ ID NO: 6128 - protein, 322 aa, Prochlorococcus marinus subsp. marinus str. CCMP1375
MPIANDITSLVGQTPLVRLNRLPKAFGCKAEVLAKLESFNPTASVKDRIAGAMVVEAEKQGTIKPGETVLIEPTSGNTGIALAMVAAAKGYRLILTMPDTMSTERRSMLRAYGAELQLTPGKDGIQGAINLAKELVASISHSYLLQQFDNPANPQIHEATTAEEIWSDCEGKLDGLIAGIGTGGTITGCARVLKARNPALKIYAIEPSSSAVLSGKEPGPHSIQGIGAGFIPKVLDISLIDEVIEINDQEAMEAGRKLAKEEGLLSGISSGAALAAALKIGKRPEMENKRLVVVFPSFGERYLSTSMFNNLSTSQPKKDGYI

SEQ ID NO: 6129 - protein, 201 aa, Shewanella sp. MR-4
MSVLVGRPAPDFTAAAVLGSGEIVDSFNLTAAIKGKPAVVFFYPLDFTFVCPSELIAFDHRMEEFTKRGVEVIGVSIDSQFTHNAWRNTPVEKGGIGQVKYTLVADVKHDICKAYDVEHPEAGVAFRGSFLIDKEGMVRHQVVNDLPLGRNVDEMLRMIDALQFHEEHGDVCPAGWEKGDKGMNASTEGVAAYLAENASSL

SEQ ID NO: 6130 - protein, 162 aa, Dehalococcoides ethenogenes 195
MTLERWQPGWSLRPWRPFREILSPGLWSMLANERDWLPATEMLELKDKYLIKAEMPGINEEDIEVSVSDNVLTIKGEKKYTSEVSEENYYFSERSYGSFSRSMTLPNNTSIQNIAATLDNGILEISIPKVSEAKAKKVSVTKAAKTRKANINTKPGNPKTKS

SEQ ID NO: 6131 - protein, 300 aa, Burkholderia sp. 383
MAYKTIEDTIGNTPLVQLVRLPDDEIRARNNVVLAKLEGNNPAGSVKDRPALSMISKAEARGRIKPGDTLIEATSGNTGIALAMAAAIRGYKMVLIMPEDLSVERRQSMAAYGAEIILTPVKGGMELARDLADQMQREGKGVILDQFANPDNPIAHYEATGPEIWRDTEGRITHFVSAMGTTGTIMGTSHYLKEQNPAIEIVGAQPEDGSRIPGIRKWPEAYMPTIFDRSRVDRVENVSQAAAETMARRLASVEGIFAGISSGGACEVAMRIARQVENATIVFIVCDRGDRYLSTGVFPA

SEQ ID NO: 6132 - protein, 415 aa, Onion yellows phytoplasma OY-M
MKIGIFTDSYKPLISGVVVSCDSLREGLEALGHEVYIITTNCPKVKQEKDSRVIRIKGMPLPFKIFKDYRWVLSYKKHLFKIKALNLDVIHVHTEFGVGSLGLLAKQKLNLPLVYTTHTMYVAFFDTQKSFIVKCFKKPILKYVDYLFTKFIFNSDVNILPTKKVLYFLENRYSNKVNDTSKINYQIVPTGFNLEKFYCHNHSPEKVFSLKQQLGLKDSFVCLYVGRISAEKEIDYLMDAFTSFHLQNPKSKFLIIGDGPERKNLEKKAKKLNLDDKIIFLGFVAYDKLGIYYQLGNVFINASLFETQGLTYIEALAASLPCVVRFDQALEGVIKHEQNGFFYHNQEQLITILTSLYQNPDNFKQLSYQAQKSVNLYTQKTFVTNVLEVYNQAIDNHKLKKQKLIQHQKETSDKI

SEQ ID NO: 6133 - protein, 260 aa, Candida glabrata CBS 138
MSTFMRQYARNMARVPVSTRLNAQRFACANYRFYSEKTNYKQADQPRLRINSSAPNFDADTSHGKINLYDYLGDSWGILFSHPADFTPVCTTEMGAFAKMKPQFDKRGVKLLGLSVEDAESHRKWIKDIEEINGIDKFGFPIIADTKRHVAFLYDMCDEEGFGNINDGSLTTVRSVYVIDPAKKIRVIFTYPSQVGRNTAEVLRVIDALQTADKHGVVTPGNWSPNDDVIIPPKVSDAEASEKFGDFKTVKSYLRYTKLK

SEQ ID NO: 6134 - protein, 275 aa, Gossypium hirsutum
MATASTWILSLKVFLISTGILGIVLGLKISVPLVLEFSVSQAPLWWSGFRSWLKPPYLYVVINGIIITIAASSRFNQNNGEKDQMEQMQPRPKISADQQPMVEYETKSGWDSDAVESSDFVYEENQRGEEVETRVSEEESNVAVEDDRDGNEFVISKSEWIPPSRTDSSEIPLDALLIQEKPAPSSRFGHRKPVKVNPEGGRALKVAKPKRHETLENTWKMITEGKSMPLSRHLKKSDTWENHGRDINVEALTSSPLMKKSETFRDRTNYQLPPE

SEQ ID NO: 6135 - protein, 292 aa, Shewanella sp. MR-7
MSDFPTIEACIGQTPLVRLQRLDCGSSTVLLKLEGNNPAGSVKDRAALNMIFQAELRQEIAPGDTLIEATSGNTGIALAMAAAIKGYKMILIMPSNSTQERKDAMQAYGAELLLVDNMEAARDLALDLQAQGKGKVLDQFNNQDNANAHFQTTGPEIWQQSQGKITHFVSSMGTTGTIMGVSKYLKSRNPDVTIVGLQPADGSSIPGIRRWPQEYLPGIFDAARVDAVMDIEEQDAKAMARTLAREEGICAGVSSGGAVFAALEIARQNPGSVVVAIVCDRGDRYLSSGLFS

SEQ ID NO: 6136 - protein, 229 aa, Gossypium hirsutum
MATASTWILSLKVFLISTGILGIVLGLKISVPLVLEFSVSQAPLWWSGFRSWLKPPYLYVVINGIIITIAASSRFNQNNGEKDQMEQMQPRPKISEDQQPIVEYDTKSGWGSDAVESSDFVYEENQRGEEVATRVSEEESNVAVEDDRDGNEFVISKSEWIPPSRTDSSEIPLDALLIQEKPAPSSRFGHRKPVKVNPEGGRALKAAKPKRHETLENTWKMITEGKSMP

SEQ ID NO: 6137 - protein, 310 aa, Mycobacterium marinum M
MTIAENITQLIGGTPLVRLRRVTDGAAADVVAKLESFNPAGSIKDRIGVAMIDAAEKAGLIKPDTIILEPTSGNTGIALAMVSAARGYKCVLTMPDTMSIERRMLLRAYGAELVLTPGAEGMAGAIAKAEELAKTDDRYFIPQQFENPANPAVHAVTTAEEVWRDTDGKVDIFVSGVGTGGTITGVAQVIKQRRPSAQFVAVEPAASPVLSGGQKGPHPIQGIGAGFVPPVLDLALVDEVITVGNDDALELARRMATEEGLLVGISSGAAVWAARELAHRPENAGKLIVVVLPDFGERYLSTVLFADLSE

SEQ ID NO: 6138 - protein, 316 aa, Opitutaceae bacterium TAV2
MSAQLFPDIVSTIGNTPLIKLGRIAAKLPGKIYIKNEFMNPCSSVKDRIGRAMIEAAERDGLIGPESVIVEPTSGNTGIALAFVCAQRGYKLILTMPETMSLERRVLLRMLGAELVLTPASEGMPGAIAKAHDILSQHGARGYMPQQFENPANPEIHRRTTAEEIWEATGGKIDAFVSGVGTGGTITGVAEVIKSRAPLRAIAVEPAASAVLSGGKPGRHMIQGIGAGFIPKNCNTSIIDEIIKVSDDDALNTARQLAVEEGILGGISTGANVWAALQVAARPEFEGKTIVTIACSCGERYISTSLAERAWQEVRV

SEQ ID NO: 6139 - protein, 282 aa, Sulfolobus solfataricus P2
MYPPDFTYVRVSSSEEATKFLESHDDARPLAGGQSLIPMLKLRVISPNYIVDLNPITSLSYVRSSFNSTKIGALTRYNEILKNDLVRVNVPLLHQAVRVVGDMQVRNLGTIGGSAANADPSADIPTVLTALNAEIILSSASGNRSVNALDFFKGAFATDLRKGEIISEIVLPNLEGYRTIYKKVVRRAGDFALVSLALAIKLRQNEIEDIRLAYGGVGERPFRALEVEKSVMGKRLNDELVEEIVSKVSSQVNPPSDTRGSSWYRREVMKVITRKALKEVSG

SEQ ID NO: 6140 - protein, 216 aa, Pyrococcus abyssi GE5
MVVIGEKFPEVEVKTTHGVIKLPDHFTKQGKWFILFSHPADFTPVCTTEFYGMQKRLEEFRKLGVEPIGLSVDQVFAHIKWMEWIKENLGVEIEFPIIADDRGELAEKLGMIPSGATITARAVFIVDDKGIIRAIVYYPAEVGRDWDEILRLVKALKISTENGVALPHKWPNNELIGDKVIIPPASTVEEKKQREEAKAKGEIECYDWWFCYKKLK

SEQ ID NO: 6141 - protein, 163 aa, Sulfolobus solfataricus P2
MLMVNQGEKIKIKVKVNGVLYERYVSPRILLVDFLREELGLTGTKIGCDTTTCGACTVLLNGKSVKSCTLFAVQADGAEITTIEGLSVDSKLHPIQEAFKENFALQCGFCTPGMIMQAYFLLKENPNPSEEEVRDGLHGNICRCTGYQNIVKAVLDASRRLRA

SEQ ID NO: 6142 - protein, 289 aa, Geobacter metallireducens GS-15
MYMPDFEYHTPETLTEACALLDELGEQATVLAGGTDVLHKMKVGKLAPGHLVSLKNLDDLRTISHEPGRGIVMGALTSHNAIYTSRLLQKRYLSLPMAAHTMASNQICNMGTVGGNIVNGVPSADLPPILIALNASIRLVSSKGERTMPLEDFFHGSAETVIAPGELLADITIPDQPTTGSTYMKFGLRRSGALAVVGVAVSVTVKGDILEDVRIVLASAAPTVMRARKAEDRLRGKKISDELLAEAGEEAAAESRPRDSIRGSAEYRRNLVGVLTKRALRKAIDEGHS

SEQ ID NO: 6143 - protein, 171 aa, Geobacter metallireducens GS-15
MLQSITDKDGVKRYLITLKVNGDAKTVLVKGNAILTNVLRDHLDLTGTKKGCELGDCGSCTVLLDGKPVDSCLMLAVEADGREITTIEGVAANGALDAIQESMINHAAVQCGYCTPGMVLSAKALLTRNPHPTEPEVREAIAGNLCRCTGYVHIVEAVLAASQGRTAPAEH

SEQ ID NO: 6144 - protein, 173 aa, Ralstonia metallidurans CH34
MRAPTQETSMAIPIRLTVNGKPVDAQVEPHTLLVQFLREHLRLTGTHVGCDTAQCGACTVHLDGRAVKSCNVLVVQADGGSVTTIEGLAVNGEMHPVQQAFRECHGLQCGFCTPGMVMAATALLKDRPNADAQAIRDQLEGNLCRCTGYHNIVRAVQQGQAAMQGSAAVASAE

SEQ ID NO: 6145 - protein, 198 aa, Helicobacter pylori
MLVTKLAPDFKAPAVLGNNEVDEHFELSKNLGRSGAILFFWPKDFTFVCPTEIIAFDKRVKDFQEKGFNVIGVSIDSEQVHFAWKNTPVEKGGIGQVTFPMVADITKSISRDYDVLFEEAIALRGAFLIDKNMKVRHAVINDLPLGRNADEMLRMVDALLHFEEHGEVCPAGWRKGDKGMKATHQGVAEYLKENSIKL

SEQ ID NO: 6146 - protein, 531 aa, Pseudomonas aeruginosa PAO1
MPVPDLFAEGLARGWKTYNGSRLDDDLELEADVVVVGTGAGGGTTAEILSAAGLKVLLVEEGPLKTSSDFKMQEADAYPELYQEGIGRMSKDGAITILQGRAVGGTTLINWTSSFRTPEPTLQHWAQVYGVKGHSAEDMAPWFEKMEQRLHVAPWALPPNANNDVIRLGCEKLGYHWKVIPRNVLGCWNLGYCGMGCPVNAKQSMLVTTIPATLDKGGELLYLARANRLLLDGDKVTGLECLGMDERCVAPNGRRIRVRARHYVLSGGGINTPAILLRSKAPDPSQRVGKRTFLHTVNFSAGLFDRVINPFYGAPQSIYSDHFQWDDGVTGRMSYKLEVPPLQPSLASVLLGGFGSDNALRMEQLPHTNMMLALLRDGFHPDSAEGSVGLRGDDTPVLDYRMTDYTWDGIRRAFHTMAEIQFAAGAREVRPVHSDARSAKNLQEARGIIDGLRLEIYRTRLGSAHVMGGCAMGEDPAVAVADSLGRHHHLRNLSIHDGSLFPTSIGANPQLSVYGLTAQLASALAERLARA

SEQ ID NO: 6147 - protein, 749 aa, Sulfolobus solfataricus P2
MSYVGKPVKRIYDDKFVTGRSTYVDDIRIPALYAGFVRSTYPHAIIKRIDVSDALKVNGIVAVFTAKEINPLLKGGIRPWPTYIDIRSFRYSERKAFPENKVKYVGEPVAIVLGQDKYSVRDAIDKVVVEYEPLKPVIRMEEAEKDQVIIHEELKTNISYKIPFKAGEVDKAFSESDKVVRVEAINERLIPNPMEPRGIVSRFEAGTLSIWYSTQVPHYMRSEFARILGIPESKIKVSMPDVGGAFGAKVHLMPEELAVVASSIILGRPVRWTATRSEEMLASEARHNVFTGEVAVKRDGTILGIKGKLLLDLGAYITVTAGIQPLIIPMMIPGPYKIRNLDIESVAVYTNTPPITMYRGASRPEATYIIERIMSTVADELGLDDVSIREKNLVTELPYTNPFGLRYDSGDYVGLLREGVKRLGYYELKKWAEEERKKGHRVGVGLAYYLEICSFGPWEYAEVRVDERGDVLVVTGTTPHGQGTETAIAQIVADALQIDISRVRVIWGDTDTVAASMGTYGSRSVTIGGSAAIKVAEKILDKMKRIAASTWNVDVQEVQYEKGEFKLKNDPSKKMSWDDVASIAYRSHDPGLVEKIIYENDVTFPYGVHIATVEVDDTGVARVLEYRAYDDIGKVVNPALAEAQIHGGGVQAVGQALYEQALLNENGQLIVTYADYYVPTAVEAPKFTSVFADQYHPSNYPTGSKGVGEAALIVGPAVIIRALEDAIGTRFTKTPTTPEEILRAIASKR

SEQ ID NO: 6148 - protein, 768 aa, Geobacter metallireducens GS-15
MSDNHKVIGRSVPRIDGPEKVTGAAKYTGDLKFPNMLYGKILTSPHAHARIISIDTSEAEKLPGVKAVITHKDVPELKYGLSPARWDENIFCIDKVRFVGDKVAAVACVDEDTCYRAMKLIKVEYEELPAVLDFRHAMDEGQPLVHEEYERNINTEIHQEFGDVAKALAEAHHVRTDVFVGQRTYQAPIEPHSAISMWEGEKLTIYSSTQSPHYFQYYIAREFGMPMGDVRIIKPYLGGGFGGKLEPTGLEFAGAVLAKRTGRPVRTFYDRAEMFAHNRGRHAQYMEITTGVDKDGKILAAKANFIMDGGAYTSLGIASAYYAGALLPMTYEFDNYQFDMFRVYTNLPACGAQRGHGAPQPKYAFESHLDNVAADLGIDPMDIRIRNARRPDTVTPNDFRVNSCMMRECLEQVRQISDWDEKKKNLPHGRGIGVATGSFVTGAGYPIYRTDLPHAAAFIKVHEDGTAATLYTGSVDIGQGSDTILCQMAAEAMGYRYEQMKIVAADTEITPLDFGAYASRQTYMSGAAVKQAGEEVKKQLLDLASTMLSLPADDLECAEGVIFSKSREGKTLTFEEVARKHFVLKGPLLGRGAYTPPKLGGSFKGAAVGTSPAYSFGAQVGEVSIDEETGEITVVGIWDVHDCGKVINPRLLHGQVHGALYMGMGESVWEEVLFDDKGRIKNAELANYRLLTAVDMPPIQSEVVNSYEPTGPWGVKEVGEGATNPTLGMFSNAIFDAMGVRVNSLPLTYEKVWRALKEKREREETKAA

SEQ ID NO: 6149 - protein, 337 aa, Flavobacteria bacterium BBFL7
MKNILYIGNKLADKGRTATTIDILGPLLQQEGFKLRYASSVQNTSARLLHMMRLTFLSRNWAHFVLIDTYSTRNFWYAITIARLCKSLKIRYIPILHGGNLPDRLLKNPKAFQAFINNAHTVVSPSDYLIDAFAKANYKQLIKIPNHIDLKKYTFKKRAEIKPRLLWVRSFADIYNPEMALEVLDVLSEKFPDAQLCMVGPDKDGSMKKCISIAAQKNLTVEFTGLLDKEDWITLSDNYDIFLNTSNFDNLPVSVIEAMALGFPVVSTDVGGIPYLIKNSENGFLTKPFQVDEMVSHITYLINNRIECEQVSENARATAENFDWNKVKLLWLQLFEG

SEQ ID NO: 6150 - protein, 757 aa, Ralstonia eutropha JMP134
MTHAVIGHSVKRTDLLDKVTGNAKYVADMPFAGLLFGKIKRCEVAHAKIRRIDTSRALALPGVKAVLTHENVPRVLHAGSPHPRSASVTCDQYILDDKVRYWGEGVAAVAATSEDIAAHAIELIEVEYETLPAVFTTEDAERSDAPRIHDREPGGNLVLPPVIVKRGDVEAGFAEADFILEGIYEGGRPTPAYMEPNVCTCNWDGNGNLTVWISTQTAFMVRGIMAEVLGLPLHKVRVLVDHMGGGFGAKQDLFQHEFLCALMARETRRPVRMEYTREETFLGGRTRHPARIWLKQGFRNDGTITARQAKVVFNSGAYGSHGPGVTNVGTAAMVSLYRCDNVLLEGRCVYTNSPIAGAFRGYGVVQTYYALDVQMDEAAEHLGMDPADLKLKNAVREGDIAPSNHPLIGHGLEACISKGMEATRWAALRQRPRDTEGPIRTGWGIGCEMHGSSAYPGIKEQGNAIIKMNEDGTVVLLTGAAGLGTGAHTALAQIVAEELTLPFESVSVVHGDTDVVPWDIGAFASHTTYMVGKAAQMAAGEIKRQLFDRAAKLLECTPDALMLTAGVIAVRDREGPTLTVREAVMPRKGIPAAQLVGTATYHPTKSYSFAAHFVQVEVDTETGFITVKQVVPVHDVGKVIHPVAAAGQIEGGIQQGIGHTLYEDYQIDMRTGRSLNANFVDYKMPLAMDMPEIHTIILEAAPDPGGPFGAKGVGEDPIVAIGPAISNAVFDAIGVRFRHYPIRPEQVLQALAKKAAA

SEQ ID NO: 6151 - protein, 198 aa, Helicobacter pylori
MLVTKLAPDFKAPAVLGNNEVDEHFELSKNLGKSGAILFFWPKDFTFVCPTEIIAFDKRVKDFQEKGFNVIRVSIDSEQVHFAWKNTPVEKGGIGQVTFPMVADITKSISRDYDVLFEEAIALRGAFLIDKNMKVRHAVINDLPLGRNADEMLRMVDALLHFEEHGEVCPAGWRKGDKGMKATHQGVAEYLKENSIKL

SEQ ID NO: 6152 - protein, 409 aa, Brucella melitensis
MKCAYFVRPHIGGTYSVFTRLRASLARSGMDLRWLAAGAPGEAVAVPREQGLEDAMRRGDIIDRMGVLDEETRAKRFVDFLRENRFEAVFVNVLSHRFETNLVRYLPADIVRVMIVHSITPGTYAAAQAIRDHVHATVGVSKRCRDDLVRGYGFDPSRTLVIPNGLTPDPHVRCAAPEIEGGRLRLLYLGRIDDSSKGVFWLPAILRRLQCDYHLTVAGDGPDLAVLRIKLAPFGNRISFTGWVAPSDVSWLVSQHDVMVMPSRYEGFGSTLIEAMSQGCPVVASRIPGVTDTIVTDGEDGFLFPIGNCRQAAQQIERLAADPRLRVAMGAAGVRKVIAEFDSEIVGRAYAGLLQHLRENRPPITPPLALSQWSMPNALHKNLRSRLPQPVKNWLRRVRERVHTVWSTA

SEQ ID NO: 6153 - protein, 709 aa, Streptomyces coelicolor A3(2)
MTATDAVLGAPVERREGREKVTGTARYAAEYPQPGRAQAWPIPATVVRGRVTGVDTAAALALPGVLAVLTHENAPRLGAPDDPTLAVLQGPHVPHRGWFVGLVVAESLEAARAGAAAVRITYETEPHDVALTASHSGAYVPDSANGGFPAVTEHGDPDGAFAASATRVDVAYTVPPLHNHPMEPHTSTAHWDGERLTVHSSSQGTSAVRAELARLFALPEDRITVRAEHVGGGFGSKGTPRPEVVLAAMAARETGRPVTVALPRRYLPAVVGHRAPTLHRLRLGADAGGRLTSLVHEVTTYTSRVKEFVEQAAVPARVMYGTPALRTAHRVAALDVPTPSWMRAPGECPGMYALESAMDELAAELGVDPVELRIRNEPESEPDSGKPFSSRHLVECLREGARRFGWEDRDPRPRSREEGPLLIGSGVASATYPVLVSPCVASARALPDGGFLVRVNATDIGTGARTVLAQIAADALGTPLDRVRLDVADSGIGFAPMAGGSSGTASWGSAVHAACVRLNGRLAEHSGRLPDEGIAAEADTSGTAGAESPFARHAFGAHFAEVGVDTVSGEVRVTRLLGVFAAGRILNARTARSQFIGGMTMGLGMALTEDSTMDPVFGDFVQRDLAAYHVPAHADVTDLEAHWVEEEDDHLNPMGSKGIGEIGIVGSAAAVGNAVHHATGIRFRELPLTPDRVLTALLAHEHPAGMLGV

SEQ ID NO: 6154 - protein, 306 aa, Carboxydothermus hydrogenoformans Z-2901
MRIYEDITQLIGKTPLLKLKRVTRGVKATVVAKLEYFNPGGSVKDRIAFNMIKAAEEQGLLDKDTVIIEPTSGNTGIGLAMVAAARGYRLIITMPETMSVERRMLLKAYGAEIVLTPGELGMTGAVNKALELAKEFPKAFIPQQFENPANPEIHRKTTAIEIWEDTDGQVDIVVGGVGTGGTITGVGEVLKAKKPEVKIIAVEPADSPVLSGGKPGPHKIQGIGAGFVPKVFNRDVVDEIIQVESDDAFAMAKKIAKEEGVLVGISSGAALWAALEVAKRPENEGKLIVVVLPDTGERYLSTPLFS

SEQ ID NO: 6155 - protein, 211 aa, Aquifex aeolicus VF5
MDVKEIAKKIITDCPVRVGQKVPNFEMETYDPSTGKFGKVVLEDLLKERKWVILFFYPADYTFVCPTELADLAEKYDELKEMGCEVISVSTDTKFVHLAWHRDEPLLKNVKYPMGADPTGQVSRLFGVYDENTGLALRGTFIINPEGVLVGSEVNFYNVGRNADELVRKMKANVYLMSHPEEACPAKWEPGKKTLKPSEELVGRVGEVLNE

SEQ ID NO: 6156 - protein, 789 aa, Triticum aestivum
  misc_feature (220)..(220): Xaa can be any naturally occurring amino acid
MSAIQSYTRPVSIGAQGYESVGQGTAVGQPMVHMSAILQVPRVPEYVDDTPTPPNILHAALVLSKKAHARILSIDDSVAKCSPGFAGVFLSKDVPGSNHIGPIIHDEEVFASDVVTCVGQIIGIVVADTHDNAKAAANKVNIEYSELPAILSISEAVKAGSFHPNTTRCLSNGDVEQCFASNTCDKIIEGEIRVGGQEHFYMEPQCTFVWPVDSGNEIHXSSTQAPQKHQKYVANALGLPLSKVVCKTKRIGGGFGGKETRSAIFAAAASVASYCLRRPVKIVLDRDVDMITTGQRHSFLGKYKLGFTNDGKIQALDLEIYNNGGNSLDLSLAVLERAVFHSENVYAIPNIRVSGKVCFTNFPSNTAFRGFGGPQGMLIAENWIHHMATELKRSPEEIKELNFQSEGTELYYGQLLKNCTMHSVWDELKASCNILEARKAVNVFNSENRWRKRGIAMVPTKFGISFTAKFMNQAGALVQVYTDGTVLVTHGGVEMGQGLHTKIAQVAASSLDIPLSCVFISETSTDKVPNASPTAASASSDLYGAAVLDACQQIKARMEPIASRGNHKSFAELAQACYMERVDLSAHGFYITPDIGFDWIAGKGSPFNYFTYGAAFAEVEIDTLTGDFHTRTADIVMDLGYSINPAIDIGQIEGAFIQGLGWAAMEELKWGDDNHKWIRPGYLFTCGPGSYKIPSVNDIPLNFKVSLLKGVPNPRAIHSSKAVGEPPFFLASAILFAIKDAIAAARAEEGHLDWFPLDNPATPERIRMACVDSITKKFACVYYRPKLSV

SEQ ID NO: 6157 - protein, 157 aa, Bacillus licheniformis ATCC 14580
MTVEIGQKVPDIELLGDHGEKVKLSDFEGKYVVLYFYPKDMTPGCTTEACDFRDRHESFAELDAVIIGVSPDDQARHEKFKQKHDLPFLLLVDDEHKLAESFDVWKLKKNFGKEYMGVERSTFLIDKEGRLVKEWRKVKVKDHVAEALQAVKEIAEA

SEQ ID NO: 6158 - protein, 198 aa, Helicobacter pylori
MLVTKLAPDFKAPAVLGNNEVDEHFELSKNLGKNGVILFFWPKDFTFVCPTEIIAFDKRVKDFQEKGFNVIGVSIDSEQVHFAWKNTPVEKGGIGQVTFPMVADITKSISRDYDVLFEEAIALRGAFLIDKNMKVRHAVINDLPLGRNADEMLRMVDALLHFEEHGEVCPAGWRKGDKGMKATHKGVAEYLKENSIKL

SEQ ID NO: 6159 - protein, 388 aa, Synechococcus sp. PCC 7002
MKIAYVCADPGIPVFGCKGASIHVQEMIRAFQNQGATVTLFAARLGGEPPADLADVPVHCLPKVPKGDLASREQGLFEQNQTLQNLLTQASPYDLVYERYSLWSQAGMTFARNWQIPGILEVNAPLIEEQATHRGLINRDLALQVAATAFGKATALIAVSEGVKAYLQQWVPGDRLFVVPNGINPTRFSNVSKPSAGMPFTVGFVGSLKPWHGLDLLIEAFAQLRQTVPEARLLIVGDGPQRPALEQAIAQRKLTAQVQWTGAVSPEAVPHWLSQMSVAVAPYPASENFYFSPLKVVEYMAAELPVVASRIGQLPDIIDDGVTGILYPPGEVTALVQALEHLWRSPQYRKQLGLAARGFVLKHHTWDHIAAQILAIAKASFFNVEVKS

SEQ ID NO: 6160 - protein, 322 aa, Neptuniibacter caesariensis
MNIYEDNSLTIGNTPLVHLKRLAPGLNIFGKIESRNPAGSVKCRIGANMIWSAEKSGALKPGMTMVEPTSGNTGIALAFVAASRGYDIVFTMPSSMSLERRKIMKALGATIVLTEPAKGMKGAIEKAQEIVDQNPDTHMMLQQFENPANPEIHEKTTGPEIWNDTDGTVDILVAGVGTGGTITGTSRYIKKEQGKAITSVAVEPVDSPVITQTINGDEVKPSPHKIQGIGAGFVPKNLDLELVDQVEQVSNEDAIATARLLMEKEGIMAGISCGAALCAALRVAKQPGNEGKNIVVILPDSGERYLSSALFEGMFSDNEMVQ

SEQ ID NO: 6161 - protein, 197 aa, Ashbya gossypii ATCC 10895
MVAQVQKQAPAFKKTAVIDGVFDEVSLEKYKGKYVVLAFIPLAFTFVCPTEIVAFSDAAKKFEDLGAQVLFASTDSEYSLLAWTNIARKDGGLGNVNIPLVADTNHSLSRDYGVLIEEEGIALRGLFVIDPKGVVRHITINDLPVGRNVDEALRLVEGFQWTDKNGTVLPCNWTPGAATIKPDVAASKEYFSEAHKD

SEQ ID NO: 6162 - protein, 198 aa, Campylobacter lari RM2100
MIVTKKAIDFTAPAVLGNNQIVEDFNLYKNIGPKGAVVFFYPKDFTFVCPSEIIAFDKRYQDFKDRGIEVIGVSCDNEFSHFAWKNMPVNQGGIGQVKFPLVADLTKQIARNFDVLFGEAVALRGSFLLDADGTIRHAVINDLPLGRNIDEMIRMVDTMLFTNEHGEVCPAGWNKGDEGMKADPKGVADYLSKNEGKL

SEQ ID NO: 6163 - protein, 855 aa, Oryza sativa
MAAAAAEAARGHPLLRGGERRERYTHGLGAAQMEALRAICGAFIPSLPEAAAALAEADDEGRGGGDKDLERFYLASAADAAVPDEVAELMVNRCAWEAVALVTVVLWLLATRAGTLALCGAAACVASSAAGGWLPSVRRFADLPPERREAALRRWSSARWLFPLKITFTVIKIICHFVFYTKLDEKSRNPSWKAIGYAAPAAAAAAVEQRRPASPSRRPLEDGVVETRRMDDNALLRSLVEKGLAVKTGTAAHHTVQCDAVVVGSGCGGGVAAAVLASKGYKVVVVEKGDYFATEDYTSLEGPSMERLYEKGGVFGTSNVTTILFTGATVGGGSAVNWSACIRTPAEIREEWSREHGLPVFASTAYAQAMDAVCDRIRVTGGCEEEGFQNRVLRRGCDALGMRADAVPRNSSEGHFCGSCNLGCPTGDKKGTDTTWLVDAVERGAVILTGCKAEHFILERNAGGRGGRSKRCVGLMATCTSSGITKKLRIEAKVSISACGALMTPPLLRNSGLKNRHIGRNLHLHPVSMAWGYFPDSTAELPGKCYEGGIITSMHRVTDRTIIETPALGPGAFSAVVPWESGRDMKERMRRYARTAHAFALVRDRGAGAVDGEGRVRFSPSRDDAEELRAGLRRALRILVAAGAAEVGTHRSDGLRLRCKGVRDADVEAFLDEVTIEKGPMYPGSDKWAIFCSAHQMGSCRMGASPRDGAVDGAGESWEAEGLYVCDGSLLPTAVGVNPMITIQSIAYCLSNGIADTLSHYWKLGPGRAISYASAVKNMEINRAAPRGWRDQPEPGRLSRGGATRRRFTSGNDKTARRGNHLPTGRDGTFARRGCRAPRHWVFDWPESGTKSAIN

SEQ ID NO: 6164 - protein, 308 aa, Streptococcus agalactiae 2603V/R
MSKIYNSITDLIGNTPIIQLHHIVPEGAAEVYVKLESFNPGSSVKDRIALAMIEDAEQKGILKAGDTIVEPTSGNTGIGLAWVGKAKGYNVIIVMPETMSIERRKIIQAYGAQLVLTPGSEGMKGAIAKAKEISAEQNAWLPLQFNNQANPEIHEKTTGREIIETFGEKGLDAFIAGVGTGGTITGVSRALKKVNPDVAIYAVEADESAILSGEQPGPHKIQGISAGFIPETLATDSYDHIIRVTSDDAIETGRIIGGLEGFLAGISASAAIYAAIEVAKQLGKGKKVLALLPDNGERYLSTSLYDFE

SEQ ID NO: 6165 - protein, 199 aa, Porphyra purpurea
MISGHNCLQVGQIAPDFSATAVYDQEFKTIKLSDFKNKYVILFFYPLDFTFVCPTEITAFSDKYSDFSELNTEILGVSVDSEYSHLAWLQTDRESGGLGDLEYPLVSDLKKEISIAYNVLNSGGVALRGLFIIDPKGIIQYSTVNNLEFGRSVEETLRVLQAIQYVQAHPDEVCPANWKPGDRTMNPDPIKSKNYFAAA

SEQ ID NO: 6166 - protein, 186 aa, Streptococcus pyogenes MGAS10394
MSLIGKEIAEFSAQAYHDGKFITVTNEDVKGKWAVFCFYPADFSFVCPTELGDLQEQYETLKSLGVEVYSVSTDTHFVHKAWHDDSDVVGTITYPMIGDPSHLISQAFEVLGEDGLAQRGTFIVDPDCIIQMMEINADGIGRDASTLIDKIHAAQYVRKHPGEVCPAKWKEGAETLTPSLDLVGKI

SEQ ID NO: 6167 - protein, 181 aa, Idiomarina baltica OS145
MLTVGDKLPDFSVVAAKPKFNMPEENGESAFETVTQDSFTGKWKIIFFYPKDFTFVCPTEIVEFAKLNEEFADRDAVVLGGSTDNEFVKLAWRREHPDLDRLNQYSFADNGSLVDGLGVRDKEENVALRATFVVDPHNVIQHVSVNNLNVGRNPAEILRILDGLQTDELCPCNRAVGGDTL

SEQ ID NO: 6168 - protein, 325 aa, Thauera sp. MZ1T
MSTWYPDNAESIGRTPLVRLNRVLDGAQATVLAKIEGRNPAYSVKCRIGAAMVKDAIAHGRLGPGQEIVEPTSGNTGIALAFVCAARGIPLTLTMPETMSVERRKLLVAYGARLVLTEGPKGMNGAIAKAKEIVDSDPGRYVLLQQFENPANPAIHETTTGPEIWNDTDGGIDILVSGVGTGGTITGISRYIKRVRGKDIRSIAVEPAASPVISQTLAGQPLTPAPHKIQGLGAGFVPKVLDLSLIDAVEQVSNEDAVLYARRLAREEGILAGISCGAAVAAAARVAKQPENAGKTIVVILPDSGERYLSSILFEGLFDEKGMAI

SEQ ID NO: 6169 - protein, 182 aa, Burkholderia thailandensis E264
MNRKLASGAAAALFALHAVAAYAVLKAGDAAPDFSAQASLGGKTYTYSLADALKKGPVVLYFYPAAFTTGCTIEAHAFADAVDAYKQYGATVIGVSADDIGTLTKFSVSECRSKFPVAADPDAKIIREYDAKLPAISKANRVSYVISPDGKVLYEYTSLSPDKHVENTLNAVKAWAASHRQR

SEQ ID NO: 6170 - protein, 1522 aa, Candida glabrata CBS 138
MGIPKFFRYISERWPMILQLIEGTQIPEFDNLYLDMNSFIHTCTHGNDDEGVTQKMSDEELYSRIFTYIDHLFLMIKPKKVFYMSIDGVAPRAKMNQQRSRRFRTAMDTEKALQKAMDEGEEIPKGDAFDSNCITPGTEFMAQLTRNLNYYIHDKVTNDANWRDIEVILSGHEVPGEGEHKIMDFIRNITAQEDYDVNTRHCIYGLDADLIMLGLSTHAPHFALLREEVTFGRRNNSRNKNLEEQNFYLLHLSLLREYLELEFKEIGDDLQFEFDFENILDDFILVMFVIGNDFLPNLPDLHLNKGAFPVLLQTFKEALLHVDGYINERGQINFKRLKVWLDYLSQFELMNFENDDIDVAWFNQQLENISLEGERKRQRMGKKLLIKQQKKLVGMVKPWLLKEINKEIPANLEDSDIPQLPLSVDTETLKENLDFLKKFALDLGLIIVHSKSKDTYSLKLDIDAINPSETDEQRQNRINETRKTIKKYQSAIIVEDKEELEEEKDIYNERFENWKAEYYRSKFGIKRDEPERIVEIANNYVEGLQWVLYYYYQGCPSWSWYYHFHYAPRISDLAKGLDQIIKFEQGSPLTPFQQLMAVLPERSKNLLPAAYRPLMYDPKSPILDFYPSEVQLDKNGKTADWEAVVLLPFVDENRLIEATNHCLAKLSPEEKQRNSFGKNLTFMYNPQVDNVYRTTLKGIFSDIQHNHCVALEYQPKPMEGKQFRYGLLPNAKLKTQLLAGFPTLYSLPFTNSLEYNESYVFQQPSRQQSMVLRITDIYKENNLTMKDIADRYLNKIVYTRWPYLRESKLISITDGETIHECIPNPAKNTVKIITRPLENNERKQFNSTKNSMLRSYGKQKAVILKKIDIIVQVLAVTGLVRKPNGAYVKTYASQPDYYPMQLVVENVSNHDERYIERPPKPIEKEFPINSKVIFLGDYAYGGEATVDGYSSESRLKITVKKRFLKTEPTIGKDRLKMDESMIKYYPSYVISKELQLHPLFLSKITSKFLVTDCNGSHVNVGIPIKFEARHQKVLGYARRNIKGWDYSNVAVALIKRYREMFPAFFAKLSKTSGDIPVMQDLFPDLSSRAIMSMLDDIKQWIKFSTENFVVVSLESNSLTKASIRACEDYIEKYSSSIEQHETKQLAKVPREAVLSPRVSFSQLRAQKFDLGDRVVYIQDSGKVPLFSKGTVVGYTTLGLSLSIQVLFDHEIVAGNKFGGRLRTKRGIGLDASFLLNITNRQFIYHSKASKKVSQVDNSKSAKQQKNTNAKPKPETKQAKQPRREKPEDPAAKELLSYIKKGDKTQKNSTERKTSEKSFKDPQAKNNTEVVEIEQLNLTENQAEPTLANAANLYSAVTNQYDSSTGNPIIPMSNTGAAPGVSLPYFVPNGQIPYGVPPNPPMFPMGVPMQGPPMPNGMMPPPQFANPNMHMNPLPPTSNISIAIDKEGSKDLLKSVRRKPDQRNKDNNSGRNENKSGHFGSKSNRKTDTNAPKKSSGKPRKPGKKIASGFESKKNEPDTRAEF

SEQ ID NO: 6171 - protein, 149 aa, Prochlorococcus marinus str. MIT 9301
MQIGDKIPEFSLLDQNGVKRSNRGLKNPLVLFFYPKDDTPGCTIEVCGFRDKYDLFKVLGAQVWGVSNGSTSSHLAFANKNKLQYPLLCDTNDSLRKTFKVPKVLGFMDGRVTYVIDRKGTVRHIFRDLLNGPEHIKEAIRVLKEIQNQ

SEQ ID NO: 6172 - protein, 313 aa, Streptococcus pyogenes MGAS315
MTKIYKTITELVGQTPIIKLNRLIPNEAADVYVKLEAFNPGSSVKDRIALSMIEAAEAEGLISPGDVIIEPTSGNTGIGLAWVGAAKGYRVIIVMPETMSLERRQIIQAYGAELVLTPGAEGMKGAIAKAETLAIELGAWMPMQFNNPANPSIHEKTTAQEILEAFKEISLDAFVSGVGTGGTLSGVSHVLKKANPETVIYAVEAEESAVLSGQEPGPHKIQGISAGFIPNTLDTKAYDQIIRVKSKDALETARLTGAKEGFLAGISSGAALYAAIEVAKQLGKGKHVLTILPDNGERYLSTELYDVPVIKTK

SEQ ID NO: 6173 - protein, 167 aa, marine gamma proteobacterium HTCC2143
MIQLTVNGVQQSVDAAPDTPLLWVLRENLSLTGTKFGCGISQCGACTVISNGKSIRSCVMPISLFEGANITTIEGLADDNGFHPLQQAWIDEQVPQCGYCQSGQIMSAVALLNDNPQPSDQDIDKAMSGNICRCGMYDRIKRGIKRVADATPVQMFDPNSEREVQNG

SEQ ID NO: 6174 - protein, 715 aa, Solibacter usitatus Ellin6076
MANTPDYSWPPMADRKIMGKPFKRLDGPLKAAGRAKYTSDLKMKDMLFAAYVLCPHGHARVTAIDTSAAEKMKGVMSVHVIAPAGTEVQWHGKEIAALAATTEEIAREAIRKVKVDYEVLPHFVNEADLGKAGSRGKAAGEKVTGDPEKAFQDAEAVSDGVYGIPVVTHSCLEPHGCVIQWQGDQVMAWPSTQFVTGWANTLAPNLKVPAANIKVKMDYIGGGFGSKFSPGAWAEIGAILSQKAGGKPVKIYLDRVAEQTIAGNRPSAFGKIKVAGKKDGTITAWQSDTWASGGFAGGGQPPLPYVYTNIPNTRLNHTSISVNAGPSQAWRAPNNQQASYLTCSAIEDFAAKAGCDPMDVFHKNAGYTPRAEQYQYQLGKAAELSEWKKLWKPRGQQTGAVRRGLGIGVNAWAGNGHGCTSRVTINSDGSVLVEMGTQDLGTGTRTIMTQVAAETLGLSMGQVKLVIGDNSLPPGGSSGGSTTVGGVSSATRKAGINALAKLYEVAAPALGVQPDDLEAVDGNIRSKSNHAKTMTWAAACKKIPAAQGKIVETGANDTRNPMGLFSGGAAGVQVADVSVDTETGLVKINRFVAVQDCGLIINPRLAESQIFGAIIMGISTALFEERIMDNNTGRMMNPDLEFYKLAGIKDIGDIVVHLDIREVNDKRGVIGLGEPPAIGICAAVGNAVANAVGMRVPNMPMSPMNVLNTLEGRNA

SEQ ID NO: 6175 - protein, 198 aa, Helicobacter pylori
MLVTKLAPDFKAPAVLGNNEVDEHFELSKNLGKSGAILFFWPKDFTFVCPTEIIAFDKRVKDFQEKGFNVIGVSIDSEQVHFAWKNTPVEKGGIGQVTFPMVADITKSISRDYDVLFEEAIALRGAFLIDKNMKVRHAVINDLPLGRNADEMLRMVDALLHFEEHGEVCPAGWRKGDKGMKATHQGVAEYLKENSIKL

SEQ ID NO: 6176 - protein, 373 aa, Dechloromonas aromatica RCB
MSIAIAFVTETFPPEVNGVAMTVGRLVGGLRERGHRVSVIRPSQSKADASSEHELTLPGFPLPGYPGLRFGWPASRRLARQWRQNRPDLVHVVTEGPLGWSAVNVARRLGIPVTSGFHTNFDRYSVHYGLGWMRPAVAAYLRTLHRRTLATMVPTAALAADLAGEGLRGVRVVGRGVDAALFDPARRSPELRARWGVEADGPVCLYVGRMAAEKNLALVEKSFAAIQVWHPKAKMIWVGDGPSAKQLAADHPDQHFAGMRTGEDLAAHYASADLFLFPSLTETYGNVVAEAMASGLPVLAYRSAAAAELIVDGENGRLVAPGDEDGYKRAALDLVSNLENLPVLGRAARGSMLNHHWAMVVERFETVMREAMA

SEQ ID NO: 6177 - protein, 453 aa, Kluyveromyces lactis
MKWIYTFIAAVSATVTFHPENVEYSLSAKELDPASLGIDTVNQWSGYLDYQDKKHSFYWFFESRNDPANDPVILYLNGGPGCSSMDNLFFETGPASIGPDLKPIHNPYSWNNNASIIFLDQPVNVGFSYSEERVKTTNDAARDVYNFLDLFFTKFPNLTANAFHIAGESYAGHYIPRIAHEIVSVHKDDTKFNLSSIVIGNGLTDPLVQNQYFKPMACGEGGYPAILNPSKCRTMSVSNLACKGLTSLCSKTKLTPGRAYLLLHFCWKSLIQPAFDSAVNPCDIRGPCEDPESGLCWKTLGYIRSYLNQEFVQDALGTKVSSYNGCNTSVGSDFFLTGDNSRPFQQYVTELLDLNIPVLIYAGDTDYICNWLGNMAWTDALTWKDHISYETLPLNPWYSLNGSVQFGEVKNHGPFTFLRVFEAGHTVPYYQPLATMEMINRWISGDLSLGYSN

SEQ ID NO: 6178 - protein, 186 aa, Synechococcus sp. WH 8102
MRRRDLFIKSGLLLTALSITPTKAWSLGGVVLEQGAEVPSFDLPGSSRREPDRDRWSSDDLRGRWLAVYFYPRDFTGGCTIEARGFESLHSDFLAAGAEVVGISADSVDDHASFCESEGLSFPLLSDPDGAVSKAYGSWMAPYSLRHTFLIDPSGILRQRWVAVRPSGHAQEVLDAITDLQNNTSI

SEQ ID NO: 6179 - protein, 157 aa, Bacillus subtilis subsp. subtilis str. 168
MTIEIGQKAPDLELKGDHGETVKLSDYKGKYIVLYFYPKDMTPGCTTEACDFRDSHESFAELDAVIIGVSPDSQEKHGKFKEKHNLPFLLLVDDEHKLAEAFDVWKLKKNFGKEYMGIERSTFLIDKEGRLIKEWRKVKVKDHVAEALQTLKDMSEK

SEQ ID NO: 6180 - protein, 198 aa, Helicobacter pylori
MLVTKLAPDFKAPAVLGNNEVDEHFELSKNLGKNGAILFFWPKDFTFVCPTEIIAFDKRVKDFHEKGFNVIGVSIDSEQVHFAWKNTPVEKGGIGQVSFPMVADITKSISRDYDVLFEEAIALRGAFLIDKNMKVRHAVINDLPLGRNADEMLRMVDALLHFEEHGEVCPAGWRKGDKGMKATHQGVAEYLKENSIKL

SEQ ID NO: 6181 - protein, 349 aa, Yersinia pestis KIM
MSINLQVNYRFSMKIIYDGIINSLQNMGGVTVYFSELVSRLPATDFYWYSYADEISGFGVGNVKIKSRLLERYRNFSLDTINYNSLSVFHSSYYRLPDFDIPIVTTVHDFTYEKFVNGPAKWVHSWQKNRAVNNSDLIICVSENTAKDLQMYCSVPSNKIRVIYNGVSDKYHYIKGVKITTNKVIFVGARGGYKNFDIAVKAISKTPHLELSVVGGGAFTSKELSLLNHYLPGRYHGLGRLSDEALNEAYNSAYALLYPSSYEGFGIPILEAMSAGCPVISVNVSSIPEVAGDAAILVQKPTIDELVDGLLAVESERSKLIGYGMKQAAKFSWDKCYQETLDVYKELNK

SEQ ID NO: 6182 - protein, 393 aa, Dechloromonas aromatica RCB
MRVLMVSDVYFPRVNGVSTSIETFRRTLVAQGVEVRLVVPRYGDEPDEEGVIRVAGRPVLGDPEDRLVGWRAMHRAVLDAARDCDLVHIQTPFIAHYAGLKAARQLGLPVVATYHTLFEEYLQHYARFIPAGWLRGQARAFSRRQCNQLDAVIVPSTAMRQRLDAYGVTSPMHVLPTGIPLAQFAAGDGMVFRLRHGIAEDRPVALFVGRVAHEKNIGFLLEALAHARQTRPDTLLVIAGEGPAMSDLKAQTAALGLQDSVIFIGYLDRKQALPDCYAAADVFVFASRTETQGLVLIEALAAGVPVIALSEMGTTDILAPGRGTFSPPADPKAFGETLGHFLNHPAAWRHLYDEAPRYAQEWTDVAMAERLATLYHQLAGVQCSPEMPLTAAA

SEQ ID NO: 6183 - protein, 398 aa, Cryptococcus neoformans var. neoformans JEC21
MSNSATQPQHHWHGVLSSALDAVGHTPLIRLDRIAAEEGFKCNLLGKCEFFSAGGSVKDRIAKRMIEHAEKSGQLIPGKSIVIEPTSGNTGIGLALACALKGYKCIITLPAKMSLEKEVMLKALGAEIVRTPTEAAFDSPESHIGVARTLQQAIPDSVILDQYSNPNNPLSHYFGTYEEIMYALETSNLPRKDMTLLVAGAGTGGTITGLARAIRDSEAHVYPSGSDCSNPINGKSNGFKASRTLILAVDPVGSILGGGEPGNYEVEGIGYDFFPDVLDREPQLIDEWLKTTDDESFEATKRLIKREGLFVGGSSGSAFAGALYYLQSPAGRHIAEDPEANVVILFPDGVRNYMSKPWFLTENNAREGQELRAKIKDVIGRDLGDVHGGRATNNVNKH

SEQ ID NO: 6184 - protein, 187 aa, Burkholderia pseudomallei K96243
MPIINSPIKPFKATAYHNGDFVQVSDETLKGKWSVVVFYPADFTFVCPTELGDLAERYAEFQKLGVEIYAVSTDTHFTHKAWHDTSDTIAKIKYPMIGDPTLAISRNFDVLIEEEGLALRGTFVINPQGEIKLCEIHDNGIGRDAGELLRKVQAAQYVAAHPGEVCPAKWTPGADTLTPSLDLIGKI

SEQ ID NO: 6185 - protein, 186 aa, Synechococcus sp. CC9605
MNRRELLVKSGLFLAALTLTPSRASALGGVVLETGTTVPDFDLPGSSQSEPDRKQWSSRDLRGRWLAAYFYPRDFTGGCTIEARGFESLHNDFLQAGAEVIGISADSVDDHESFCESEGLSFPLLSDPDGTVSKAYGSWMAPYSLRHTFLIDPDGVLRERWVAVRPNGHAREVLDSLVTFQSEAAV

SEQ ID NO: 6186 - protein, 1364 aa, Solanum lycopersicum
MEEKQKKVSLVLAVNGERFELPCVDPSTTLLQFLRSETCFKSPKLGCGEGGCGACVVLVSKYDPSHKKVEDFSVSSCLTLLCSLNGCSITTSEGLGNTRDGFHSIHERFAGFHASQCGFCTPGMCMSFFSALVNADKGNKPNPPSGFSKLTSSEAEKAITGNLCRCTGYRPIADACKSFAADVDIEDLGFNSFWKKGDSKEVKVSKLPPYDPTKNFSTYPEFLKSESTTNSDSSRRYPWYSPVSIEELRSLLYSNVMENGASFKLVVGNTGTGYYKETQPYDHYVDLRYIPESSIIERDQNGIEVGATVTISKLISFLKEENIVNIGSYGTLVSQKLARHMEKIASPFVRNSASVGGNLVMAQKNGFPSDIATLFLGLSATVRLMTSHGFEKLSLEELLSRPPLDSKTVLLSVCIPFKNAQSSLQTNSKLLFETFRASPRPHGNAIAYVNAAFHADVSHCKNGVLINNIQLAFGAYGTKHATRAKKVEEYLEGKILNVHVLYEALKLVKLAVIPEDDTLHPEYRSSLAVSYVFKFLHPLTDVHSAISGGLLNGISDISVEELSKSCNDGRISQGREQTLLSSAKQVVEYSSTEYYPVGEPMKKVGAAMQAAGEAVYVDDIPSPPNCLHGSFIYSTKPLAGVTGIQLESNRLTDGVTAVITFKDIPSGGENIGVLTKFGTEPLFSDDLARYAGDRVAVVVADSQMSADVAARTALVEYDTENIDPPILTVEEAVEKSSFFQIPPFLNPKQVGDFSKGMAEADHKILSAEIRLGSEYYFYMETQTALAIPDEDNCMVVYTSSQYPEYSHRVIASCLGVPEHNIRVITRRVGGGYGGKAIRAMPVSAACALAAYKLRRPVRIYVNRNSDMIMTGGRHPMKVTYSVGFKSSGKITALHLDILINAGISEDVSPIVPSNVIKALKKYDWGALSFNVKLCKTNLSSKSAMRAPGEVQGSYIAEAIMERVAGLLSMEVDSVRNKNFHTFESLNLFYGNIVAEGEYTLPSIMDKLAVSSSFFQRSKMIEQFNQNNTWKKRGISRVPIVYEVMQRPTSGKVSILQDGSIVVEVGGIELGQGLWTKVRQMTAYALGFIDSSWAEDLVEKVRVIQADTLSLVQAGFTAGSTTSESSCEAVRLCCDVLVERLTPLKKQLQEQNGSVDWPMLILQAQTQSVNLAANSYYVPESGSMSYLNFGAAVSEVEIDILTGETAILQSDIIYDCGQSLNPAVDLGQIEGAFVQGIGFFMHEEYLTNEDGLMVSNSTWKYKIPTIDTIPRNFNVHVLNSGHHEKRVLSSKASGEPPLLLAASVHCATREAVKAAREQLKLWGNLDGSVSEFYLDIPAILPVVKTQCGLDYVEKYLESILAQKSN

SEQ ID NO: 6187 - protein, 88 aa, Zea mays
  misc_feature (26)..(26): Xaa can be any naturally occurring amino acid
  misc_feature (49)..(49): Xaa can be any naturally occurring amino acid
  misc_feature (70)..(70): Xaa can be any naturally occurring amino acid
TRAPDLEGRSCVRTRSSSTGKLSDYXGKKYRHFWSFYPWNFTFVCPTEXTAFSDRYEDFEKLTLRVLGVXIDRVFSPPLMVANKQNAG

SEQ ID NO: 6188 - protein, 198 aa, Helicobacter pylori
MLVTKLAPDFKAPAVLGNNEVDEHFELSKNLGKSGAILFFWPKDFTFVCPTEIIAFDKRVKDFQEKGFNVIGVSIDSEQVHFAWKNTPVEKGGIGQVSFPMVADITKSISRDYDVLFEEAIALRGAFLIDKNMKVRHAVINDLPLGRNADEMLRMVDALLHFEEHGEVCPAGWRKGDKGMKATHKGVAEYLKENSIKL

SEQ ID NO: 6189 - protein, 84 aa, Glycine max
TCTLTYSVAYFTGLLDPWSPMRSMRQILDTMDRIFEDTMTFPGRNVGAGEIRAPWDIKDEEHEIRMRFDMPGLANEDVNVSVED

SEQ ID NO: 6190 - protein, 205 aa, Ehrlichia canis str. Jake
MNLITKQAIDFTAKAVMPDDKICEFNLKEYVNGKCAILVFYPRDFTFVCPTEIISLHNRIPQFMEKNTEIIGISTDSEFCHSHWRNVSVNKGGIDKISFPLIADDSHFISSSYGVLHNNSIALRATFIIDDKFIVRHQSINDLPIGRNVDELLRIIDAIKHYQIHGEVCPAGWMKGDPAMEASQHGIEDYLKSHIDNLEKSIMDK

SEQ ID NO: 6191 - protein, 285 aa, Salmonella enterica subsp. arizonae serovar 62:z4,z23:--
MTPDNGSEIWVKLEGNNPAGSVKDRAALSMIVEAEKRGEIKPGDVLIEATSGNTGIALAMIAALKGYRMKLLMPDNMSQERRSAMRAYGAELVLVTKEQGMEGARDLALSMAERGEGKLLDQFNNPDNPYAHYATTGPEIWRQTAGRITHFVSSMGTTGTITGVSRFLREQDKAVTIVGLQPEEGSCIPGIRRWPADYMPGIFSAPLVDEVLDIHQQEAENTMRELAVREGIFCGVSSGGAVAGAIRIAKANPGALVVAIICDRGDRYLSTGVFGEEHFSQGAGI

SEQ ID NO: 6192 - protein, 145 aa, Synechococcus sp. PCC 7335
MALSEGTKAPSFTSTDDAGNSVSLSDFSGKTVVMYFYPKDDTPGCTKQAQSFRDSYSEYEDKDIVVLGISMDDETSHKAFKEKFDLPFPLIVDSDGKIAKAFDVEGGGYAKRVTFIIDGEGTITKVYDSINTETHANDVLAGLAT

SEQ ID NO: 6193 - protein, 111 aa, Persea thunbergii
MLDTMDRIMEDPSTYPLMREEGGGGYRRGRTLWEIKEGENEYKMRSDMPGMTKKDVRVWVEEKMLVVKAEKQAEEEEEWSPKSCGRYSSRIALPENIEMEKIKAELKNGVF

SEQ ID NO: 6194 - protein, 404 aa, Synechococcus sp. RS9916
MAHIAWLGKKSPFCGNVTYGLSTTEALRQRGHQTSFIHFDNPGSPGSSNTSLLANDPDVSLPYLVKSQVYTIPSPRAQRELRESLERLQPDLVHASLTLSPLDFRLPDLCQQLGVPLVATFHPAFDAGLRNLTAGTQQLTYQLYAPALARYDRVIVFSEIQADVLARLGVREDRLAVIPNGVDQEQWAPASPSIDALHHGGPSARGLSSAGLSERQKVRQQLGNQRIFLYMGRVSTEKNVEALLKGWKLVNPAGCILVIVGDGPLRATLQNTHTTDNVVWWGYESNLDTRVALLQEAEVFVLPSLVEGLSIALLEAMSSGCACLATDAGADGEVLADGAGIVLSTQGVTTQLRTLLPVLRDQPVLTAELGRRARERVLERYTLSRNIDALEELYSGLLAAPIAA

SEQ ID NO: 6195 - protein, 153 aa, Nocardia farcinica IFM 10152
MQTGSLAPNFALPDQTGTTRTLDELLGAGPLVLFFYPAANTPICTAEACHFRDVSAEFAALGASCAGISTDSVDTQAGFATGRRLDYPLLSDADGAVAARFGVKRGLLGRIAPVKRRTFVIDTDRTVLTVISSELKADTHADEALAFLRARVK

SEQ ID NO: 6196 - protein, 772 aa, Ustilago maydis 521
MSVATKGGIPMPKIIKAEEVWSAAQREAFLAFADAIVPELDGADAADVLSHLPAEATDRQRELAPRFAKEGFKSSPRLLDCAAQQCLASLSSNVAGQINLFLTLLSTRAGTIALSGYVGPFTQLDRLTREKVILGWLTSRLTLLRMASAGLKGIILLVYYRNHQPAWEAIGYPDGRADDWTRPTQGGEVTPPTPVYDYKFENDKIAAQATGSEIIVDTEVLVIGSGSGGGVAGSYLAQRGIRTLIVDKGIYLHPDKVVGREDQGYSLLYEGEGILPSENGSINILAGSTFGGGSSINWSASLKPRHFVRRTWAEKYGVPYYNSPYFTSDLNAVCTRMGVAVAPIRHNIGNSLLALGAQRAGHPVEPVPQNSGGHTHYCGKCQLGCISGHKQGGIVSWLKDAAEAGAAFMTNCYVERILFDKNKRAIGALATVDGRKIKILAAKGVVVASGSLQTPALLLRSPELKTNKMIGQTLRLHPATVVTGYYNFPIKPWEGGLLTMVDNSAEMVDKDGWGCKIEVIASSPSIHAAFNNFASAKEHKSRMLQYSHSYTMVIICRDRDGGRVVLDEKGLARVDYTISSFDQRSLVQGILRGADAHLMAGAEVIGTAQTAVPAFVASSLSSAKPPTNGAPALPPPPSDSIYTETTQVPATFTPVQTVPRDLNDPAYKEWQKKVSAAGAQPYILSMGSAHQMASCRMGANPKMSALDPEGRVWGAKNLWVADASAMCEASGVNPMITAMATARGVARNVARDIGAVAPAPLRSEVAGEQARL

SEQ ID NO: 6197 - protein, 420 aa, Clavibacter michiganensis subsp. sepedonicus
MRIAFVSLHTSPIQTPSTGDAGGLNVYLLELARSLGRQGHEVRLITRATDPADPAVLPVAPGVELLSLRAGPVGPLAKEELPGITDAFADALAALPPADVVHAHYWLSAVAALPVARAWGVPHVLTLHSVSAGKNRRLVAGDTPEPASRLADEGRLVRASDLVVASAASEKRLLVEAYDADPAAVHVVAPGVEEAFLREPSGRDGGGRVRIVLLGRIQPLKGQDVALRAMALLDPATRPLLVIAGGISPGRDAYAASLHALVRSLGLEDDVVFVGALDREATARVLAGAHLALMPSAAETYGLVALEAAACGTPVVASRTEGLVDSVRDGVSGVFVPTRDPADWARAIRDLLADRPALARLSASARAHAARRTWDVAAADVAEEYRALRERLQEPSRERSRGRGAAGAAGRADPAAVARD

SEQ ID NO: 6198 - protein, 155 aa, Nostoc sp. PCC 7120
MAITRWEPFREIERLEPFREMDTLQRQINRLFDRLMPTDGAEKVGFAFVPAAELEEKDDAIHLKLEVPGLEATDIHVEATPESISITGERKSETKTEENGITRSEFRYGKFQRVIPLPSLIQNDKVQAEYKNGILRLTVPKAESERNKVVKVNIG

SEQ ID NO: 6199 - protein, 185 aa, Vibrio parahaemolyticus RIMD 2210633
MINTKIKPFAATAYKNGEFVEVTEQDVLGKWAVFFFYPADFTFVCPTELGDLADHYEELQKRGVEVYSVSTDTHFTHKAWHDSSETIGKIQYYMLGDQTGNITNNFGVMREGQGLADRATFLIDPEGTIQAMEITAEGIGRDAEDLLRKVKAAQYVAAHPGEVCPAKWKEGEETLAPSLDLVGKI

SEQ ID NO: 6200 - protein, 136 aa, Borrelia hermsii DAH
MWLTNYKKSFIDFLNDDFDFMRSGGVQNVPVNIKDKGKSFALEAYLPGIKRDDISIVIKNDYLTISYESKDEAEEQNDQYLRVERRDISFSRSFRLSGNIDQNKIKSELKNGVLLINLPKKPEVVEKTQEKKIVIE

SEQ ID NO: 6201 - protein, 307 aa, Geobacillus kaustophilus HTA426
MKLYDSILDLIGGTPIVKLQRLPDPDGADVYMKLESFNPGGSVKDRPAWEMIRRAEAEGKIAPGKSTIIEPTSGNTGIGLAMVCAARGYRCIITMPDNATVERVKILKAYGAEVYLTPAEKRMQGAIDEANRLAGEIPDSFIPMQFENPANPDAHRHTTAVEIYEAFDGRLDAFVLTAGTGGTVTGTGEELKKRIPNLRIYVVEPYGSPVLSGGKPGPHKIPGTGPGFIPKILNRSIYDDIFLIKDEDAQQMARELAAKEGILVGASAAASAYYAIKVAKQLPKGARVLCMAPDSGERYLSSDLFAD

SEQ ID NO: 6202 - protein, 310 aa, Neisseria gonorrhoeae FA 1090
MKIANSITELIGNTPLVKLNRLTKGLKAEVAVKLEFFNPGSSVKDRIAEAMIEAAEKAGKINKNTVIVEATSGNTGIGLAMVCAARGYKLAITMPESMSKERKMLLRTFGAELILTPAAEGMAGAIAKAQSLVDAHPDTYFMPRQFDNEANPEVHRKTTAEEIWNDTDGKVDVFVAGVGTGGTITGVGEVLKKYKPEIEVCAVEAGASPVLSGGEKGPHPIQGIGAGFIPTVLNTKIYDSIAKVPNEAAFETARAMAEKEGILAGISSGAAVWSALQLAKQPENEGKLIVVLLPSYGERYLSTPLFADLA

SEQ ID NO: 6203 - protein, 1010 aa, Yarrowia lipolytica CLIB122
MGVPGLYRHLSQKCPKIVSDVIEDETTIVDGEEIPGSDYSAPNPNGELDNLYLDMNGIVHPCTHPEGEEAPPSEDEMLLAVFKYTERVLNVCRPRKVLMMAIDGVAPRAKMNQQRARRFRSAKDAAIEAESTLESELKAKTIELQSSGEKGKSLETILDEFKQGLVNKPGKWDSNAITPGTPFMEKLAAALRYWVGYKLNTEPGWRDLKVVISDATVPGEGEHKIMEFIRSQRGDPTYNANTSHCIYGLDADLIFLGLATHEPKFKLLREDVFRQNKTAGHQKKPFIWLNIDILREYLREDLRFTHPQTKIPFDLERAIDDWVFLCFFVGNDFLPHLPACDVRDGSINVLVNQWKNGMTRWKDYITCDGHVNLAQAQDLLKNFATQEQRILVHQEQDRVEYEKSQANKAAKQQAHRDSKKLRQQGEQAALESMPLYDTKGESVGDVQLTNRELVGQRNDITLANLANQDAADKLRFMLKRGSDTGAEEPAKRAKIEEEPKEAESNSSEATPPTANPSIANDADLSNPNVTVHETTGYADHVQFHKSGYTERYYMNKFHAKEDEVDNLRRQVAEEYMKGVCWVLMYYYHGCQSWSWFYPYHYAPLAGDFDQISNMKVEFGESAPFRPYEQLMSVLPAASGHNLPAVFRPLMSEENSPIIDYYPENFQLDLNGKKQEWKAVVLLPFINADHLLEHVQAKYTELTPEEKDRNTLREEIVIFHRLGKYAKTLEKRGLMEKGVIVSKKPLVLNSHETSGLAGTVERQNEADRTSSKPHLTFPLNVSTDQTMPSFEADKNMAMTLEYKIPKLEYENKSMLLQGYIPPKYTLSDEEREAIRNRERQRRGGQQDSRLFSNTDHRQQQELLMNGSYLAFKKLSLRDQPPPAKEDWMLNDPKLAGDRGNGGYNNRGGFNNHRGGRGGFNNRGRGGFNHGGGGFNNSRGGYGGGGGGYGGGGGQGYGGGQGYGGGQGYGGGQGYGGGGYGGGQGYGGGGYGGGYGGGHRGGHRGGRGGHRY

SEQ ID NO: 6204 - protein, 325 aa, Opitutaceae bacterium TAV2
MPESTDSISAPGSFRWQIYDDITAAIGRTPLVRLRRLAPPGGAELVAKVEGTNPLGSVKDRIGAAMIAAAERDGKLQPGGTVIEPTSGNTGIGLAFACAARGYRLILTMPESMSIERRKLVQMLGAELVLTPADKGMAGSVDKARELHRRIKGSFLPMQFENPANPQAHRETTAEEIWADTAGRVDLFVAGVGTGGTITGVAEVLKSRKPSVRAIAVEPEASPVLSGGRPGPHRIQGIGAGFVPPVLNRKIVDEVIAVRNEDAFATAQRVGLEEGILCGISSGAAVWAALQLAARPENTGKLIVVILPDSGERYLTTQLADVSRE

SEQ ID NO: 6205 - protein, 450 aa, Physcomitrella patens subsp. patens
MFLESIQGILEHAVKDLPGQPPVNFSQYAGYIDVGETKSKHLFYWFVEADNKSPSSLPIAFWFNGGPGCSSVGDGLLTELGPFRVSYSGNLTFNEHSWNKEANVVFVESPVAVGFSYSNKKSDYAAFSDAQTATDAYSFLVNWFTSYPEYLKNDMYIIGESYGGHYVPQLVQQVVKHNKSPGAQFLNLKGFAVGNAWTDAYFDNKGSIDYFHSHSLISDETYKSLIDNCDLGHEFPIDVPNTSAKCNNATLVLYNMDLSGLNVYNIYGPSCNLPYNNVSTQEIMNQVRSHLNFARHESAIDPCLDYVTPYLNKADVKRALHVSPDIEWTECSNTVFNKYAVSDILSSMLPVYRELLQTGLRIMVYSGDFDGRVPTTGTRAWISQLGIQVKKPWYPWVSGYAQVYEKNFTFSTVRAAGHLVPADQPKRALALFHSFLTGKPLEPFEYPARP

SEQ ID NO: 6206 - protein, 787 aa, Oryza sativa
  misc_feature (690)..(690): Xaa can be any naturally occurring amino acid
  misc_feature (700)..(700): Xaa can be any naturally occurring amino acid
  misc_feature (710)..(710): Xaa can be any naturally occurring amino acid
  misc_feature (719)..(719): Xaa can be any naturally occurring amino acid
MDQKAKEAAPAARGHPALRGPARRERYTHGLGAAQMGALRAMCGALIPALPAEEEDGARGGGDMDVERFYLATAAESTVPDEVAELTMTRCIWEAGVLVRIILWILATRVGTLALCGRRCVSGEFPYVRRFADMPVERREAALKRWNATRCRGPRDVLLAPINVLCHFVFYTAVDENLENPSWKAIGYSVPAAEEEPRKEEPTEATPTPAPATAPPCRPLDNGVVETKQLDDNALLMSLAEKGLALKTGASSPSAHHHTVLCDAVVVRSGCGGGVAAAVLASAGFKVVVVEKGDYFAARDYSSLEGPTMERLYENGGVFSTANVTTTMFAGATVGGGSAVNWSACIRTPANVLQEWSNDHGLPLFGGQGYVQAMDAVCARLGVTGRCREEGFQNKAVRRGCEALGLRVEAVSRNSSEGHFCGSCNLGCPTGEKRGTDTTWLVDAVGRGAVILTGCKAERFILETNTGGGGGRRKKCVGVVAKCLGKGITKKLRIEAKVSVSACGALMTPPLLRNSGLKNRHIGRNLHLHPVSMAWGYFPDSTAELPGKSYEGGIITSMHRVTDRTIIETPALGPGAFAAVVPWESGRDMKERMRRYARTAHAVVLVRDRAAGTVGGEGRVRFTPSRGDAGELRAGLRRALRILVAAGAAEVGTNRSDGLRLRCKGARDEDVEAFLDEVSLEKGPMHPGSXKWALLASAHXMGSCRMGRSXHKHGGVDGXAVESWEPEGLYVCDGSLLPTAVGVNPMITIESVAYCFAKGIAESLASRAARSVENRDVSTNPPLACES

SEQ ID NO: 6207 - protein, 354 aa, Populus trichocarpa
MGSLSLSLKVILLSTSVLFLSLCLKISVPLVHDFSVNQAPLLWSSILSWLKPPYLYVIINCIIITIAASSRFHHSHSSANSTTTHDQIEKIPMDEYLHDEMKISTVEIQTSHFGGLESRAEIDYQDREEEREEAAHHEQVVIEDKGIVNAVAVLEDSKNETVDDFVLSKSTWVPPFKRIDSSENNLLLPDNLSPVEKPLVSSRFGHRKFVKASPEGGRALRVAKPKRHETLENTWKTITEGRAMPITRHVKKSETFKDTWENHGSQFNTSVVDPHEVKKSTTFKDTTNYQLPLVNSSSPSSGKLRKEPSLSQDELNRRVEAFIKKFNEEMRLQRQESLNQYKEMTSRGRRHGIN

SEQ ID NO: 6208 - protein, 715 aa, Streptomyces coelicolor A3(2)
MTTATTGRTALRGVVGTAHTRVEGRDKVTGAARYAGEIPFADLAHGWLVLSTVARGRIRSLDTEAVLAMPGVLTVLHHGNAPRVDTDYVGLLGIPPDPTAAVFQQDRVHHVGWPVALVVAETSEQAREAAEALVVAYDEEPHDTTLTADHPGAHPAGGVMPGETAKGDLAAGLAASAFVVDEEYTTPEEHHSMMEPHAATARWDGGRLEVVDSNQGTTWIQTELASLFSLDASAVRVRSEHIGGGFGSKGLRAHQVAAVMAATELQRPVRVVMTRRQMFSLAGYRSPTVQRVRLGADADGRLRALEHRSLNQTSSVYEFVEPGAGVARVMYDAEAHHTANEVAPLDVPSPTFMRAPGEAPGSFAIESALDELAERGGIDPIALRLRNEPEVGPVSGLPFSSRNLDACFREGARRFGWAGRDPRPGVRRDGRWLLGTGTAAASFHSGAGPSTAVVTAEADGGFTVRIAAADIGTGARTALTLVAADALEVAPDRVRVRIGDSDFGPAMIAGGSMGTRSWAWAITEAARELRERLALGTTIPPEGITVRSDTTALLGALAQKERHSFGAQFAEVAVDTATGEVRVRRMLGIFAAGRIVNPLTARNQLVGGMVWGISMALHEEAVRDRTSGGLYAPDLAGYHVATNADVGDIQADWVDDPDPDDPVGIKGVGEIGIVGAAAAVANAVWHATGVRHRNLPIRPDRVLSAVPASSGAADA

SEQ ID NO: 6209 - protein, 198 aa, Helicobacter pylori
MLVTKLAPDFKAPAVLGNNEVDEHFELSKNLGRSGAILFFWPKDFTFVCPTEIIAFDKRVKDFHEKGFNVIGVSIDSEQVHFAWKNTPVEKGGIGQVTFPMVADITKSISRDYDVLFEEAIALRGAFLIDKNMKVRHAVINDLPLGRNADEMLRMVDALLHFEEHGEVCPAGWRKGDKGMKATHQGVAEYLKENSIKL

SEQ ID NO: 6210 - protein, 199 aa, Francisella tularensis subsp. holarctica
MVLVGKKAPLFNAPAVLGNGEIVDSYDFAKAIQGKYAIVVFYPLDFTFVCPSELIALDKRTAKLKELGVEVVSVSIDSHFTHNAWRNTPINDGGIGPVKYTMVADINQEIVKAYDVQAAGGMAFRGTFLIDKSGVVRHQVVNDLPLGRNMDEVIRMVEALQFHEEHGEVCPAGWKKGDQGMKASPQGVAEYLSDHVIDL

SEQ ID NO: 6211 - protein, 532 aa, Alcanivorax sp. DG881
MAFVRVARDGVPVTQAKDVALDASLGKRFTLKTDVVVVGSGAAGAMVAYEMAKAGRDVLVLESGRYYPSSAFTEHLGDTMTKIYQDQVGQVNTTADIIFVQGACVGGSTVIGACVMEEPGDDVLDGWAAKYGLDNLSAEKFRPYLDTVADQLQIHINEAHEINACAHKVIQGCEKMQFSWKPAQRNVKQCALTGHCLAGCPSDRKMSSLVTHLPWAAAHGARIFSDTEVVKVRTRNGRASGVEARVTDPDSGAHVADMQVDADLVVLAAGAIHSPLIMQRSEIADRSGQLGRNLSIQPFTQVMGKFKEPLYGFRGALVGVQVDEFTRTDGYTIFSGLAEPESLMAQGDMKAGKAHIDFMKDYKYYAGVNAFSTDLGRGYVQWDGDAYTGGKTIHWNPNREEFENMKASAALAARIFFSGGAEKVFMPTFQSLEVDSVFSLDEKLAQVDYGIKGMYTFRSNSFSPHGTCRMGADSYDSVVAPNGEVHGTAGLFVADASLIPEPMSAPPQWTVQALAKYVSDQINAKASSYFIG

SEQ ID NO: 6212 - protein, 133 aa, Triticum aestivum
  misc_feature (4)..(4): Xaa can be any naturally occurring amino acid
  misc_feature (6)..(6): Xaa can be any naturally occurring amino acid
  misc_feature (13)..(13): Xaa can be any naturally occurring amino acid
  misc_feature (21)..(21): Xaa can be any naturally occurring amino acid
  misc_feature (32)..(33): Xaa can be any naturally occurring amino acid
  misc_feature (40)..(40): Xaa can be any naturally occurring amino acid
  misc_feature (43)..(43): Xaa can be any naturally occurring amino acid
  misc_feature (63)..(63): Xaa can be any naturally occurring amino acid
  misc_feature (68)..(68): Xaa can be any naturally occurring amino acid
  misc_feature (71)..(71): Xaa can be any naturally occurring amino acid
  misc_feature (78)..(79): Xaa can be any naturally occurring amino acid
  misc_feature (87)..(87): Xaa can be any naturally occurring amino acid
  misc_feature (90)..(90): Xaa can be any naturally occurring amino acid
  misc_feature (92)..(92): Xaa can be any naturally occurring amino acid
  misc_feature (95)..(95): Xaa can be any naturally occurring amino acid
  misc_feature (97)..(98): Xaa can be any naturally occurring amino acid
  misc_feature (100)..(100): Xaa can be any naturally occurring amino acid
  misc_feature (102)..(102): Xaa can be any naturally occurring amino acid
  misc_feature (108)..(109): Xaa can be any naturally occurring amino acid
  misc_feature (114)..(115): Xaa can be any naturally occurring amino acid
  misc_feature (122)..(122): Xaa can be any naturally occurring amino acid
  misc_feature (124)..(124): Xaa can be any naturally occurring amino acid
  misc_feature (126)..(126): Xaa can be any naturally occurring amino acid
  misc_feature (130)..(130): Xaa can be any naturally occurring amino acid
  misc_feature (132)..(132): Xaa can be any naturally occurring amino acid
EAVXDXEFINVKXFDYIGKKXVIFFFYPLDFXXVCPTEIXAFXDRHEEFEKINPEIFGVSVDXVFSHXAWXQTERKFXXLGDFKYPXVFXVXKSXSXXFXVXIPDQGXXLRGLXXIDKEGVXQXSXINNXGXG

SEQ ID NO: 6213 - protein, 200 aa, Streptomyces coelicolor A3(2)
MAPAPSPTSSAVTLNINGEKHQLTVDHRTTLLDALRERLDLTGTKKGCDQGQCGACTVLVDGRRAVSCLNLAVAAEGREITTIEGMAEGDRLHPVQQAFLDLDGYQCGYCTPGQICSAIAVIEEHAAGWPSAATEDVRPEAGPPPLTPDEIRERMSGNLCRCGAYVSIVQAVNRAAEAHQTAARDDDRADQDETTEETAA

SEQ ID NO: 6214 - protein, 323 aa, Rubrobacter xylanophilus DSM 9941
MQGQSLLHRGLSESVLEAIGDTPLIEVEEGIYAKLEYLNPSGSIKARIAKYIVEKAEREGLLLPGHTIVEATSGNTGNAFSMVAAIKGYRMVVLMPEGLSTERVAISRAFGAHIEHVGEFYVTEALKRARELGKKEGYFCPAQFDSEWNVEENREWLGKEILGQLEEGGVGAPDALVMGVGTGGTLIGVGQAFREKNAEAKLIAVEPEESCTLLCGESGVHKIEGISDGFVPGIYERHAERLGVDEVYAVGSEEALGAMRWLARRRGLFVGPSSGANLVAARRLKEAHPELKSIVTLFCDEGEKYISEHFAGEGRTLETGERA

SEQ ID NO: 6215 - protein, 198 aa, Helicobacter pylori
MLVTKLAPDFKAPAVLGNNEVDEHFELSKNLGRSGAILFFWPKDFTFVCPTEIIAFDKRVKDFQEKGFNVIGVSIDSEQVHFAWKNTPVEKGGIGQVSFPMVADITKSISRDYDVLFEEAIALRGAFLIDKNMKVRHAVINDLPLGRNADEMLRMVDALLHFEEHGEVCPAGWRKGDKGMKATHQGVAEYLKENSIKL

SEQ ID NO: 6216 - protein, 355 aa, Oceanicola granulosus HTCC2516
MSRTTSGRGRLYESVTDTIGDTPVIRLNRIAPEHVTIYVKVEAFNPAGSVKDRLAVSIIEEAEASGALAPGQTVVEATSGNTGIGLAMACAATGHPLVVTMADSFSIERRKLMRFLGAKVVLTPRADKAVGMYKKAVELAEANGWFMARQFETPANALIHANTTAREILADFDGQRLNYFVTGYGTGGTFNGVAKVLKAERPDVKIVLTEPANAALVGSGTAQARGEGGSPASGHPAWEPHPIQGWTPDFIPAVLQEALDRGDHDALIPVTGADGMTWAQRLAREEGIFVGISAGATLAAAVAAAGEAPEGSVMLVMLPDTGERYLTTPLFEAIPEEMTGEEQALSRSTPGYQLA

SEQ ID NO: 6217 - protein, 198 aa, Helicobacter pylori
MLVTKLAPDFKAPAVLGNNEVDEHFELSKNLGKSGAILFFWPKDFTFVCPTEIIAFDKRVKDFQERGFNVIGVSIDSEQVHFAWKNTPVEKGGIGQVTFPMVADITKSISRDYDVLFEEAIALRGAFLIDKNMKVRHAVINDLPLGRNADEMLRMVDALLHFEEHGEVCPAGWRKGDKGMKATHKGVAEYLKENSIKL

SEQ ID NO: 6218 - protein, 380 aa, Carboxydothermus hydrogenoformans Z-2901
MKVAVFSDSYHPYVSGVVRSIDLFQEELSQRGVEFIFFIPAYGNFKKEKGFYRFFSVPAPTNKEFHLALPFSFKVSKTLREEKVDLIHVHSPFLLGRLGQKTGRKLNIPVVFTYHTLYEEYVHYFPFARKTARAVTSWYTLQFANKCSAVICPTETIRDYLCQKGLKTRSAVIPTGIDLEPFSKADSSWLKTTLSLKGKKVCLFVGRVAPEKNVDFLLESFRIVASTLNDVVLVIVGGGPELPHYQKKAEELGLGNSVKFIGPVPPEKVPLFYAGADLFLFPSVTETQGLVFAEAKAAGLPAVGVRAFGSKSMVFDGVDGFLTGPNPREYAEKVILLLRDEALRKLFSQNARKNAQNFSKEYTARLMYDLYQSLIVNPDQ

SEQ ID NO: 6219 - protein, 327 aa, Pseudomonas syringae pv. tomato str. DC3000
MILFLNFRYENMNSIELAIGNTPMVELKSFDLPPGIRIFAKLEFLNPGGSIKDRVVNHIFNDAEARGLLCRGSTVIENTSGNTGAAIAMLAAARGYRVILTMPDKVSKEKQDTLRALGAEVIMCPTSAAPDSPEHYVQVAKSLHADTPNSFMLHQYDNPLNPEAHKLTTGPEIWRDLKGGISVFVAAGSTGGTISGISRYLKSQDKTIRSVLLDPKGSIYYKYFYEGVIDPLVIGPYQVEGVGEDHLAKCMDFEMIDDVIQFDDAAAFGTCRLLAQKEGLLCGGSSGANVWGCLQVAKRLSSPANIVTVLPDSGVKYLSKIYNSPFT

SEQ ID NO: 6220 - protein, 187 aa, Azotobacter vinelandii
MSLINTEVKPFKATAYHNGKFIDVTEADLQGKWSVFFFYPADFTFVCPTELGDLADNYAEFQKLGVEIYAVSTDTHFTHKAWHDSSETIKKLQFPMVGDPTLAISRNFEVLIEEAGLAERGTFVVDPQGKIQIIELNAGNIGRDANELLRKIKAAQYVASHPGEVCPAKWKEGEGTLKPSLDLVGKI

SEQ ID NO: 6221 - protein, 390 aa, Synechococcus sp. WH 7803
MRHIAWLGKKSPFCGNVTYGLSTTEALRARGHQISFIHFANPGAPGSDTSLLANDPDVSLPYLVKSQVYTIPSPGAQRELRESLERLQPDLVHASLTLSPLDFRLPDLCQQLGVPLVATFHPPFDAGLRNLTAGTQQLTYQLYAPSLAKYDRVIVFSDLQAEVLARLGVREERLAVIPNGVDPDCWRPADTTLATVDSPLRSVRARIGNKRMFLYMGRVATEKNVEALLRAWRLVKPEGCRLVIVGDGPLHATLQNTYSNDEVLWWGYEAELATRVALLQSAEVFVLPSLVEGLSLALLEAMASGCACVATDAGADGEVLADGAGIVMSTQGVTTQLRTLLPVLRDQPVLTRELGRQARERVLERYTMTSNIDALERLYADVMRHEPMAA

SEQ ID NO: 6222 - protein, 323 aa, Salmonella enterica subsp. arizonae serovar 62:z4,z23:--
MSKIYEDNSLTIGHTPLVRLNRIGNGRILAKVESRNPSFSVKCRIGANMIWDAEKRGVLKPGVELVEPTSGNTGIALAYVAAARGYKLTLTMPETMSIERRKLLKALGANLVLTEGAKGMKGAIQKAEEIVASNPQKYLLLQQFSNPANPEIHEKTTGPEIWEDTDGQVDVFISGVGTGGTLTGVTRYIKGTKGKTDLITVAVEPTDSPVIAQALAGEELKPGPHKIQGIGAGFIPGNLDLKLIDKVVGITNEEAISTARRLMEEEGILAGISSGAAVAAALKLQEDESFTNKNIVVILPSSGERYLSTALFADLFTEKELQQ

SEQ ID NO: 6223 - protein, 344 aa, Arabidopsis thaliana; identical to SEQ ID NO: 5885

SEQ ID NO: 6224 - protein, 328 aa, Synechococcus sp. RS9916
MSRVYADNSQAIGNTPLVRLNNVTKGCKATVLAKIEGRNPAYSVKCRIGANMIWDAEKRGALTADKTIVEPTSGNTGIALAYTAAARGYKLILTMPESMSIERRRVMAALGAQLILTEAAKGMPGAIAKAKEIAESDSAKYFMPGQFENPANPEIHEKTTGPEIWNDCDGAIDVLVSGVGTGGTITGISRYIKNSAGKAIESVAVEPSHSPVITQTMNGEEVKPGPHKIQGIGAGFIPKNLDLSVVDKVEQVTNEESIEMALRLAQEEGLLVGISCGAAAAAAIRLAQQDAYAGKTIVVILPDLAERYLSSVLFADVPAGIIEEPVAV

SEQ ID NO: 6225 - protein, 183 aa, Synechococcus sp. WH 7803
MNRRQLLQSGLVAAAAITLRPGKTWALGGVAPEIGSSAPDFELAGTNLNDPEKNRWTLSDWSGRWLVLYFYPRDFTSGCTIEAHGFQDTLTEFQKLNCEITAISADSVEDHESFCNSEDLGFTLLSDHDGVVSRSYGSWMAPYSLRHTFLIDPSGVVQARWTGVRPVGHAQEVLEALKGLQTS

SEQ ID NO: 6226 - protein, 202 aa, Vibrio fischeri ES114
MVLVGRQAPDFTAAAVLGNGEIVDNFNFAEFTKGKKAVVFFYPLDFTFVCPSELIAFDNRLEDFQAKGVEVIGVSIDSQFSHNAWRNTAIEDGGIGQVKYPLVADVKHEICKAYDVEHPEAGVAFRGSFLIDADGLVRHQVVNDLPLGRNIDEMLRMVDALNFHEKNGEVCPAQWEEGKAGMDASPKGVASFLSEHADDLSK

SEQ ID NO: 6227 - protein, 383 aa, Borrelia hermsii DAH
MKIAIFTDTYLPNKNGVATSIKQIKEGFERKGHTVYIFCPQSQKSDLREEHIYRCFSIKLNRTLDANLAFPNEIKIKNIIQEYKPEIIHTHSEFTMGKIGKKLALQYNIPIVHTNHTMWDYYLHYLGILKYLIKPDKMMKQFYDQIHHFIYPSTKAHDKYFHLAKNADYKIIPNGVDRNLFIKNLSQEKRQEILNKYGISTNDKIIISVGRINKEKNICLLMEHLKKLLIENKNCKLILIGRGKEETKVRQFKKQYGLEKQIILIGTIPWEEMYYYYKISDVFASLSKSEVYPMTIIEALTAGIPAVLINDIIYKDVIHQGKNGFLINNYEDIYKYMKEIIENDEKLQTLKRTTEETSMMFSSSLFIEKIEQYYSEIINNSRY

SEQ ID NO: 6228 - protein, 411 aa, Frankia sp. CcI3
MRVAMLTREYPPDVYGGAGVHVEYLSRELARLVDLTVHREGPAPGGGSAGGGPAGAAPSTGAVDRPVVERAGAPGVAAVAAHRGWAALADANDALRTVSMDLSMAAAAVGADVIHSHTWYANLGGHLAALLGGVPHVMTSHSLEPRRPWKAEQLGGGYRVSSWCERVAIESAAAVVAVSAGMRVDILDAYPAVDPARVHVIRNGIDTDEYRPDTATDVLERHGVDPARPTVIFVGRITRQKGLPVLLRAAAAIDPRAQLVLCAGAPDTPALLTEITDLVEGLRAGRDGVVWLPGMLTKPEVIQLLSHATVFVCPSVYEPLGIVNLEAMACGTAVVASRVGGIPEVVDDGVTGLLVPPGDPGALAGAVNEVLADPVRAAAMGHAGRDRAVTEFGWAAIAERTARLYASLTGG

SEQ ID NO: 6229 - protein, 317 aa, Bacteroides thetaiotaomicron VPI-5482
MMAKIANKLTDLVGNTPLMELSGYSGKYGLNQNIIAKLEAFNPAGSVKDRVALSMIEDAEARGALKPGATIIEPTSGNTGVGLAMVATIKGYHLILTMPETMSLERRNLLKALGAQIVLTDGLGGMAASIAKAQELRDSIPGSVILQQFENPSNAAVHERTTGEEIWRDTDGEVAVFVAGVGTGGTICGVARALKKHNPDVHIVAVEPASSPILAGGQAASHRIQGIGANFIPKLYDASVVDEVIGVPDDEAIRAGRELAATEGLLAGISSGAAVYAARQLAQRPEFRNKKIVALLPDTGERYLSTELFAFDAYPLD

SEQ ID NO: 6230 - protein, 363 aa, Geobacter metallireducens GS-15
MGMEPDKKVCIIGPSPDSPYQGGVATHISTLKTLACFKDAEVIDPGSIHSNNKTGIVSIFRSLTGLKQRILLGRFTHVFVNTSIYTGSIIKLLLILAILPNADNTKIHVFYHGGRFQSLPAWLSVLLSTLCLRLMHKVRMHHFLSKIQQEGFVPVCKGCSVGLFANYAQGDDIWLRHLKSQNAPLKLLFVGRLVKEKGIFEALEAFNRLHGADGQVELTVAGDGPAYPELSTMCKYISDGALRFLGHVSGETLEQAYREADLLVIPSYHEAFPYAAIEAMRAGLPMISTSSGALEMLVEDGVTGFKIPPRDVSALEKAIRTILENRELLKPMSDNCYEYFKAHLSKSAAEQYYSRLLGTCTVA

SEQ ID NO: 6231 - protein, 156 aa, Pseudomonas fluorescens Pf-5
MITLKLNGQDHQLDVTEDMPLLWAIRDVAGYNGTKFGCGMGLCGACTIHIDGDPARSCITPIGSVQGKNVSTIDNLHTDPVGQVVQQAWLDTAVAQCGYCQGGQIMSATALLKVHPNPSDEQIEEAMLGNICRCGTYNRIKTAIRQASSHLQEAKA

SEQ ID NO: 6232 - protein, 1373 aa, Physcomitrella patens subsp. patens
MSSSRDCVEFEVNGEAVVVEHPDPNSSLGEYLRYGKGLSGLQLPCKQGGCGSCTVVLEGPDSMCGGVPVSSCLVPLCSVDGKKVTTVEGVGNVKEGLHPVQSAIVDHHGTQCGFCTPGFVMSMYGLLKSNPEPTAQQVEDQLDGNLCRCTGYRPIFDGFQTFAKRTTDNIHCSKAVNCTAAACQEDIEELGKSTSCMKKPRTLVFSKEGVTWARLTSLQELYGLLHGAKNRGDKVRVVRGNTSTGVYKPPSADFIADISEIPDLKKVSVDENGITLGGAVTITDFMDLLDLHKDLSPSYAPLHKHLKRVAHDQVRNVGSVAGNLVMAHGHGDFVSDVAAILMTAKAKIKVGSAYNNGQERILSLEEFYKISLDGLVILDIVIPVLGKNARVSTYKIALRRVNAHALMNAGFNMEVDTVKGTYCADRTRFISMCCWFRNSNCENFWCDLQVASFPGIIEGNPVIVYGGVRKNPQRARNTEDFLKGKSIYDEKVCGMALDILREELILDHAFGRTEYRSTLLGAFLYKALLSLLPEDAVPASLRSSIMEFPRNMGMSTLFKDFLRPYQYERPISTGEVNFDKVRSLVRARVADEVFEASARNPVVDPRLSLGGFRSLFQTRTLTTFQRNMFLGLSMYIVTGEAQYMDDMVVGGGLFATYVTSDVANAVIKSIDPSEALSKRGVLTFISAATVKDDGYCNLVSEYEELFSTERVLYFGQPLGLIVADSKRVADEAAKLVKVDYAGIQKPILTIDDAIAKNSFYLDRGVDWQHGDTKRGFQMADTVIEGQVNTGHQYHHHLETQRTLCIPGEDSTMDVFSSTQDPAQVQHCVAVALNQPQHKITVNVKRIGGAYGAKLNRSASHAMACSIAAAKLKRPVRLVLDMATNMQSVGARSPYRCDYKIGVNKNGRIESLDLKIVNNHGSHFDFEYPDMYMIASFIDNTYNIPHWNIKGNVARTNLPGCTYMRGPVFVETVFMIETMVEHVASALQIPADIVRETNMYKPGDITPCGQKLDYCNAREVFSTLKKSSNYESRLKSIKNFNSANHFIKRGISIVPVKFNASWEAQQQIALVNVYPDGSVGIHTSGCEMGQGLDVKVAQVAAMTLGSLVKDGLDLTSIRVNSVTTIVANNCSESGGSVTSELAAMAVQRACERIVSRLQSTSKMLTTSKGKPGWGDLIQSGVDNGVDLQARGRVNPAASKCGPYQYVSFGAGVSEVEVDVLTGDTRVLRVDILLDCGKSLNPAVDIGQIQGAFIQGLGYYLSEEYRYNTDNGKLVTDSTWEYKIPSSKDIPHDFRAALLPNSSNPSGFLRSKFSGEPPYGLACSVIFAVRQAVASAKEQWGDNSWCSLSAPATVEKVALAASVPISALKIHKIRS

SEQ ID NO: 6233 - protein, 446 aa, Moorella thermoacetica ATCC 39073
MRILMLSWEYPPQSVGGLARHVEDLAISLAARHDVHVLTIGRPGEAFESRENGLTVHRVEAYPVHPPDFLVWVLQLNARFMEEAMILMRRYGPFQIIHAHDWLVAFTGRALKHAYHLPLIATIHATEAGRNRGLHNDMQRYINSVEWWLTYEAWRVIVCSRHMRQEVQGLFQLPADKITIIPNGVYSKKFRAGTVDPEVRRRYAAPNEKILFFVGRLVIEKGVQVLLEAMPRILSSCPEAKLVVAGRGPMEGQLQNRARELGIGHKVCFAGYIDDRTRNQLYRAARVAVFPSLYEPFGIVALEAMAAGTPVVASETGGLAEIITHGVDGMRAYPGNANSLADNILAVLQDDALVAKLSANGRRLVAEVYDWENIARRTADVYQEVYNQYRRTPWPERTPVIARLWRFVPYVAGDQDREQPLPLGGRYDLARYRATLVNQHRGRSEG

SEQ ID NO: 6234 - protein, 299 aa, Geobacillus thermoleovorans
MARTVNSITELIGDTPAVKLNRIVDEDSADVYLKLEFMNPGSSVKDRIALAMIEAAEKAGKLKPGDTIVEPTSGNTGIGLAMVAAAKGYKAVLVMPDTMSLERRNLLRAYGAELVLTPGAQGMRGAIRKAEELVREHAYFIPQHLKRANPEIHRLTTGKEIVEQMGDQLDAFVAGVGTGGTITGAGKVLREAYPNIKIYAVEPADSPVLSGGKPGPHKIQGIGAGFVPDILDTSIYDGVITVTTEEAFRGPRAAREEGILGGISSGAAIHAALKVAKELGKGKKVLAIIPSNGERYLST

SEQ ID NO: 6235 - protein, 904 aa, Bradyrhizobium sp. ORS278
MSVIVDGKAVDAAPRPGQCLRTFLRDTGHFGVKKGCDAGDCGACTVLLDGEPVHSCLIPAFRADGKAVTTIEGLASDDGLHPMQQAFLDAQAFQCGFCTAGMIVTCASLNQAQKKDLGAALKGNLCRCTGYRAIEDALLGRSHVEDVAAGEAFGRSLPAPAGPELVRGQARYTFDTAIEGLLHVKLVRSPHAHARIRSIDKTAALAVPGVHAVLTHEDAPAVLFSTARHEQAWMDPADIRVLDDTVRFIGQKVAAVVAESEAAAEEACRSLVVDYEILPAVVDPAEAIAEGAPVIHAGRGSEHRIANVSRNIVAETHGEFGDVAAALATAAVTYEGTFTTQRVQHAALETHGGLAWLDDDGVLTVRSSTQVPFLTRRALAEIFDLASDKVRVFCERVGGGFGGKQEMFVEDILALAALKTKRPVKLEFTREEQFIATSTRHPMRVTVKAGADKDGRLTALQLDVLSNTGAYGNHAGPVLFHACGESISVYNCPNKKVDAVAAYTNTVPAGAFRGYGLPQTTFAVEAAIDELASQLGIDPFEIRRRNIVRPGDPMLAPPGAEHSDVLYGSYGLDQCLDLVERAMAEPTPTPDLPAEWRTGDGIALTMIDTVPPDGHFADATITLRDDGGFTLTVGTAEFGNGTSTVHLQIAATVLGTTVDRITLKQSDTAHGGHDTGAYGSTGTFVAGRATQAAAEALSDRLKRFAADRWNVDAGACRIADDAISCGAQRLSFASIASVSAAPLTATGSSQGTPRSVAFNVQGFRVAVNTHTGVVRILKSVQAADAGRVANPMQCRGQIEGGVAQSLGAALYEEVVIDEDGRVINPRFRDYHLPSYADVPRTEVLFAETTDAIGPLGAKSMSESPYNPVAAALGNALRAATGIRFTAVPFKPDRLFPQLQERFGA

SEQ ID NO: 6236 - protein, 226 aa, Methanothermobacter thermautotrophicus str. Delta H
MGEKVYELRKIKKKGRGMPLIGDKFPEMEVQTTHGPMELPDEFEGKWFILFSHPADFTPVCTTEFVAFQEVYPELRELDCELVGLSVDQVFSHIKWIEWIAENLDTEIEFPVIADTGRVADTLGLIHPARPTNTVRAVFVVDPEGIIRAILYYPQELGRNIPEIVRMIRAFRVIDAEGVAAPANWPDNQLIGDHVIVPPASDIETARKRKDEYECYDWWLCTQSRG

SEQ ID NO: 6237 - protein, 198 aa, Helicobacter pylori
MLVTKLAPDFKAPAVLGNNEVDEHFELSKNLGKNGAILFFWPKDFTFVCPTEIIAFDKRVKDFQEKGFNVIGVSIDSEQVHFAWKNTPVEKGGIGQVTFPMVADITKSISRDYDVLFEEAIALRGAFLIDKNMKVRHAVINDLPLGRNADEMLRMVDALLHFEEHGEVCPAGWRKGDKGMKATHKGVAEYLKENSIKL

SEQ ID NO: 6238 - protein, 204 aa, Desulfovibrio vulgaris subsp. vulgaris str. Hildenborough
MGVLVGKKAPFFEGGKTFSAVLGNGEVVDDFDFAKVTEGKYAVVFFYPLDFTFVCPSELIAFDHRLEAFRQRNVEVIGVSIDSQFTHAAWRNTPVDKGGIGPVGYPLVADIQHELARAYDVESEGGVAFRGSFLIDRAGVVQHQVVNNLPLGRDIDEMLRVVDALQFTEKHGEVCPAGWNKGKKGMKPTADGVASYLAESAANL

SEQ ID NO: 6239 - protein, 363 aa, Pseudomonas fluorescens PfO-1
MNTPSAPNAALPIMHLLSSGGFYGAERMLLDHCLATPGQHQVLFLDAPPELIARFREAGVDAQGCAGLAALLRHLRQRRGEQPLINTHNFKGLLFGWVGATLLRLPLVITQHGFTPRSRKQKFYTWLSLQLCRTASVDRVVCVAESIAVLHRQASVRAEKLQVIPNGLPAAAALLSDAPRQRWLAGYVGRLSSEKGPDLFLDALIPLCHQHPQLDAVMLGDGPEREDLQARIDAAGLQQRIRLPGYQTDMRHWWQQLDALVISSRTEGTPMILLEAMQAGVPVVAFGVGGIPDVLENRHNGLLAAPTDSAALARQLDTLLSEPGLARQLRDNAKRTQQDRYDLKALAERWSQLYIRTAREARA

SEQ ID NO: 6240 - protein, 405 aa, Cyanothece sp. PCC 7424
MKILLINDYGTATGGAELQMLSLRQNLIDRGHEVRLFSSKHTPVVNSPLLSDYECFGTDKRLQVLSQTVNPSAYFRLRHALADFQPDVVHIRMFLWQLSPLILPLLKNIPCLYQTATYIPICPSGTKLLPNGLPCSEQQGLPCLRHGCVTPQTWAVLMLQRQLFEQWRSGLDLVVALSHAMKEKIEAAGIKPVEVVYNGVPERPLRPPLPNLPLVAFAGRLVPEKGVSDLIKAFAQAKAFVPDAQLTIAGQGVEQNNLQALAEKLGIAQSINWLGHISRDELEKRFDAAWVQVVPSLWDEPFGNVTTEAMMRGTAVIANAVGAQPEIVQDGETGYIVPPQDIEALKDALVRLLMSRDLAEKMGQAGRDRAMAHFSENRRTENFLNLYQRIQGLYNYPSKETLSLI

SEQ ID NO: 6241 - protein, 173 aa, Nocardioides sp. JS614
MTEELHDVRLSVNGTTYDTRVPARRLLSDALRHDLGLTGTHVGCEHGVCGACTILVDGEPMRSCLMFAVSAVDHELTTVEGLTNEDGSLSPVQQAFSECHGLQCGFCTPGFLTTITAGLRDNPTPTHEEARDMIAGNLCRCTGYQNIVKAVERAAELVELAELVETPAPEAGR

SEQ ID NO: 6242 - protein, 803 aa, Nocardioides sp. JS614
MTTKLMGQKVQRVEDQRFLRGQGRYVDDVGVSGSTQLLHAAVLRSPHAHARILDIDVEAVLDLEGVHAVWTYDDLAGLAAPMAEPLPLLIPHPALTHGRTQYALARDEVNYAGEAIAFVVADDRYLAEDAVGRIRVSYEPLPPVVGIDAAREARALVHEDVPGNIGARLEQNVGDAPAAIKAAPHTLSLDLTVERSACTPLEGRGTVARWDPDINRLQVWTSTQSSTGVRAAVAVKLGLDLGQVDVITPDVGGGFGVKINHPWPEELLVPLAARALGRTVKFTEDRREHFISSAHERGQVQHIEVGFDDDGRLLGLDVEFWHDHGAYTPYGLIVPIITSTQLLGPYKPHNYRVVFESLYTNTVMVTPYRGAGRPQGCYAMERTMDAIAAYLGKDRADVRAVNFIQPDEFPFDQGLIFQDGRELEYDSGDYPASLEKIKALVGWDEFPAFQREMAAQGRRVGIGLACYVEGTGVGPYEGAHVHIETSGKVKVATGLTTQGQGHATVFAQLVADELGVKFEDVEVVTGDTRRMAYAVGTFASRAAVMSGSAIHLAAKRAKEKVLKIAADALEAAPEDLEIVDGVVSVKGSPGASIDLGTVSVLSNPLRYAFDEASKAATQFSVGDPGKPPVAEDDEPGLEGKDFYSPERATFASGMHAVIVETDPETAEIKILKYAVVHDCGHLINPMIVEGQIHGGVAQGVGGALYERMAYDESGQLLNASFMDFLMPYVTEVPDGIDIDHLETPSPLNPLGIKGAGEAGVIPSAAVFAAAIEDAERVDRPALAITAMPISPSELYTLRQEHPR

SEQ ID NO: 6243 - protein, 457 aa, Pseudomonas aeruginosa PAO1
MTSDSRPAVLDLIGNTPLVRVTRFDTGPCTLYLKLESQNPGGSIKDRIGVAMIEAAERDGRLRPGGTIVEATAGNTGLGLALVGRAKGYRVVLVVPDKMSTEKVLHLRAMGAEVHITRSDVGKGHPEYYQDVAARLAQDIPGAFFADQFNNPANPLAHECGTGPELWAQTGHDLDAIVVGVGSSGTLTGLTRFFQKVQPELEMVLADPEGSIMAEYSRSGTLGTPGSWAVEGIGEDFVPAIADLSSVRHAYSISDEESFAMARELLRVEGIPGGSSTGTLLAAALRFCREQKEPKRVVSFVCDTGTRYLSKIYNDQWMTDQGLLQRKHYGDLRDIIARRFEEGRVISVGPDDTLLTAFQRMRLADVSQLPVLDDGKLVGVIDESDILLGVHADAPRFRDAVSSAMNAAPETLAPGASLAQLQAVLDRGLVAIVADASGFHGLITRFDLLNHLRRKLA

SEQ ID NO: 6244 - protein, 1280 aa, Vitis vinifera
  misc_feature (153)..(153): Xaa can be any naturally occurring amino acid
  misc_feature (1204)..(1204): Xaa can be any naturally occurring amino acid
MGKRSHQDLHRNKTRTCSRQQTRLQMGPTSPQDGIGGKGEDWLRFQSFGSKRNAGHWRSRRDESGPIRGLISPGCRDGFSDFMQVGLLATLFHSHTVGQIGIFSNKGAQGRTDSTWSFKAGKEAVEVRGRVARAVVEWGWVPVEVAEVVDCGXYWMIAGGGNGAGCRIRMVHGGEWCGVGFGGGGSGSRDLVDRILAILSDEQEYPVKAVVAGTSSISRQSWLHFDMSNLEASKGAKGVLLAMKPDITWGARWHVSGATDLASKGQVLSDSSNVKFKEELEDSYNDMKIRCPCGSALPNETMLKCDDLKCQVWQHIGCVIIPEKTMEGIPPTPDPFYCEICRLSRADPFWVTVAHPLLPVKLTTTSIPTDGFGEASLRYLLDGVEACCREANNRVWVIGWEEGNRKYRLERRLNEAGRREGTVFWMEFLGRGVERPWCGPDRWLTGKQRSRGFVEGEGGLEGPVEGERGYADAVKSSPGRVGESIWLEVGEREVRGRLDELRQCLHWALKGNLRVTVLGRGLLLFDFELPSEAERVLAKGLRNIKENFIILDKWNPEVGCLCKDFIANEVWVRVVRLLLHLWRTEVFKRIGDGCRGFVAVDEDTVSSSELQWARILVKRADREFPTIQISEIFTNPVQSVEKTFHLTRADRDMVSKHEYDVQAWCILLNDKVSFRMQWPQYADLQVNGMAVRAINRPGSQLLGANGRDDGPVITPCTKDGINKISLTGCDARIFCLGVRIVKRRTVQQILSLIPKESDGERFEDALARVRRCIGGGGATDNADSDSDLEVVADFFTVNLRCPWQCPICLKNYSLENVIIDPYFNRITSSMQSCGEDVTEIQVKPDGCWRVKPENERGILAQWHNADGTLCPLAEGEFKPKMDVLKQIKQEGISECHSSLKLQIKNRNGVWEVSKPDEMNTLTCNRLQEKFEDPGQQVIPMSSSATGSGRDGEDPSVNQDGGGNYDFSTNPGIELDSISLNIDNNAYAFPERNTPAPMGDTELIVLSDSEEENDTLMSSGTLYNNSRADAGGINFSIPTGIPDSYAEDPTAGPGGSSCLGLFSTADDDFGMSGSLWPLPPGTQPGPGFQFFGTDTDVSDALADLQHNPINCPTSMNGYTLGPEVVMGSAALVPDPSIGRTDTDMNDGLVDNPLAFGGDDPSLQIFLPTRPSDASVPTDLRNQADVSNGSRPDDWISLRLGGSSGXHAESPAANGLNTRQQLPSKDGDMDSLADTASLLLGMNDGRSDKTSSRQRSDSPFSFPRQRRSVRPRLYLSIDSDSE

SEQ ID NO: 6245 - protein, 1272 aa, Oryza sativa Japonica Group
MHIITVEGIGNRQRGLHPIQERLAMAHGSQCGFCTPGFVMSMYALLRSSEQPPTEEQIEDSLAGNLCRCTGYRPIIDAFRVFSKRDDLLYNNSSLKNADGRPICPSTGKPCSCGDQKDINGSESSLLTPTKSYSPCSYNEIDGNAYSEKELIFPPELQLRKVTSLKLNGFNGIRWYRPLKLKQVLHLKACYPNAKLIIGNSEVGVETKFKNAQYKVLISVTHVPELHTLKVKEDGIHIGSSVRLAQLQNFLRKVILERDSHEISSCEAILRQLKWFAGTQIRNVASVGGNICTASPISDLNPLWMATGATFEIIDVNNNIRTIPAKDFFLGYRKVDLKPDEILLSVILPWTRPFEFVKEFKQAHRREDDIALVNAGMRVYIRKVEGDWIISDVSIIYGGVAAVSHRASKTETFLTGKKWDYGLLDKTFDLLKEDVVLAENAPGGMVEFRSSLTLSFFFKFFLHVTHEMNIKGFWKDGLHATNLSAIQSFTRPVGVGTQCYELVRQGTAVGQPVVHTSAMLQVTGEAEYTDDTPTPPNTLHAALVLSTKAHARILSIDASLAKSSPGFAGLFLSKDVPGANHTGPVIHDEEVFASDVVTCVGQIVGLVVADTRDNAKAAANKVNIEYSELPAILSIEEAVKAGSFHPNSKRCLVKGNVEQCFLSGACDRIIEGKVQVGGQEHFYMEPQSTLVWPVDSGNEIHMISSTQAPQKHQKYVANVLGLPQSRVVCKTKRIGGGFGGKETRSAIFAAAASVAAYCLRQPVKLVLDRDIDMMTTGQRHSFLGKYKVGFTDDGKILALDLDVYNNGGHSHDLSLPVLERAMFHSDNVYDIPNVRVNGQVCFTNFPSNTAFRGFGGPQAMLIAENWIQHMATELKRSPEEIKELNFQSEGSVLHYGQLLQNCTIHSVWDELKVSCNFMEARKAVIDFNNNNRWRKRGIAMVPTKFGISFTTKFMNQAGALVQVYTDGTVLVTHGGVEMGQGLHTKVAQVAASSFNIPLSSIFISETSTDKVPNATPTAASASSDLYGAAVLDACQQIMARMEPVASRGNHKSFAELVLACYLERIDLSAHGFYITPDVGFDWVSGKGTPFYYFTYGAAFAEVEIDTLTGDFHTRTVDIVMDLGCSINPAIDIGQIEGGFIQGLGWAALEELKWGDDNHKWIRPGHLFTCGPGSYKIPSVNDIPLNFKVSLLKGVLNPKVIHSSKAVGEPPFFLGSAVLFAIKDAISAARAEEGHFDWFPLDSPATPERIRMACVDSITKKFASVYYRPKLSV

SEQ ID NO: 6246 - protein, 241 aa, Oryza sativa
  misc_feature (87)..(87): Xaa can be any naturally occurring amino acid
MAAPFALVSRVSPAARLPIRAAWRRARPTVGLPSSGRARQLAVASAAQENRDNTAVDVHVNQDGGNQQGNAVQRRPRRSSAFGRHLXPFGLVDPMSPMRTMRQMLDTMDRMFDDVALGFPATPRRSLATGEVRMPWDVMEDDKEVRMRFDMPGLSREEVKVMVEDDALVIRGEHKKEEGEGAEGSGDGWWKERSVSSYDMRLALPDECDKSKVRAELKNGVLLVTVPKTEVERKVIDVQVQ

SEQ ID NO: 6247 - protein, 182 aa, Ralstonia eutropha JMP134
MKTVGDKLEAFHVVGVKPGFNNHEENGQSAFEDITEKSFEGKWKIIYFYPKDFTFVCPTEIVAFAKLNGDFADRDAIVLGGSTDNEFVKLAWRREHKDLNKLNQWQFADVTGSLIDQLGVRDQAAGVALRATFVVDPHNVIQHVSVNNLNVGRNPDEVLRILDGLQTDELCPCNRAVGGATL

SEQ ID NO: 6248 - protein, 413 aa, Kineococcus radiotolerans SRS30216
MRILIAADTYAPDVNGASTFAQRLAAGLTARHEVHVVAPARGPRSTRATVAGIVEHRLRAVPVVVGGTGLRFCPPVGLARAATRVLREVRPDVVHVQSHFLVGRALVGAANRLGIPVVATNHFMPENLTHHVPVGVRARAALHGWAWADAAAVFTRADVVTAPTPYAAALAERAGIPGPVLPISCGMDLHRFAPDPSGALRAGFRARHGIPDRPTIGYVGRLAPEKNVSELVEALALVRRLRPELDAQLLLVGDGAQRAGLLRRAAELGVADRVVSTGFVPEADLPAAYLACDAFANAGTAELQSLVVLEAMASGLPVLGVDACALPHLVRDGENGFLFPHARPDALAARLALVLGEPALAARMGARSLELAAEHDESRTLARFEELYALRRTARTTARSLQVTVPAPSGDRV

SEQ ID NO: 6249 - protein, 765 aa, Shigella flexneri 2a str. 301
MEAREATATGESCMRVDAIAKVTGRARYTDDYVMAGMCYAKYVRSPIAHGYAVSINDEQARSLPGVLAIFTWEDVPDIPFATAGHAWTLDENKRDTADRALLTRHVRHHGDAVAIVVARDELTAEKAAQLVSIEWQELPVITTPEAALTEDAAPIHNGGNLLKQSTMSTGNVQQTIDAADYQVQGHYQTPVIQHCHMESVTSLAWMEDDSRITIVSSTQIPHIVRRVVGQALDIPWSCVRVIKPFVGGGFGNKQDVLEEPMAAFLTSKLGGIPVKVSLSREECFLATRTRHAFTIDGQMGVNRDGTLKGYSLDVLSNTGAYASHGHSIASAGENKVAYLYPRCAYAYSSKTCYTNLPSAGAMRGYGAPQVVFAVESMLDDAATALGIDPVEIRLRNAAREGDANPLTGKRICSAGLPECLEKGRKIFEWEKRRAECQNQQGNLRRGVGVACFSYTSNTWPVGVEIAGARLLMNQDGTINVQSGATEIGQGADTVFSQMVAETVGVPVSDVRVISTQDTDVTPFDPGAFASRQSYVAAPALRSAALLLKEKIIAHAAVMLHQSAMNLTLIKGHIVLVERPEEPLMSLKDLAMDAFYHPERGGQLSAESSIKTTTNPPAFGCTFVDLTVDIALCKVTINRILNVHDSGHILNPLLAEGQVHGGMGMGIGWALFEEMIIDAKSGVVRNPNLLDYKMPTMPDLPQLESAFVEINEPQSAYGHKSLGEPPIIPVAAAIRNAVKMATGVAINTLPLTPKRLYEEFHLAGLI

SEQ ID NO: 6250 - protein, 407 aa, Enterococcus faecalis V583
MKIGFFTDTYFPQVSGVATSIKTLKDELEKHGHEVYIFTTTDPNATDFEEDVIRMPSVPFVSFKDRRVVVRGMWYAYLIAKELELDLIHTHTEFGAGILGKMVGKKMKIPVIHTYHTMYEDYLHYIAKGKVVRPSHVKFFSRVFTNHTTGVVCPSERVIEKLRDYGVTAPMRIIPTGIEIDKFLRPDITEEMIAGMRQQLGIEEQQIMLLSLSRISYEKNIQAIIQGLPQVIEKLPQTRLVIVGNGPYLEDLKELAEELEVSEYVQFTGEVPNEEVAIYYKAADYFVSASTSETQGLTYTEAMAAGVQCVAEGNAYLNNLFDHESLGKTFKTDSDFATTLIDYIQANIKMDQTILDEKLFEISSTNFGNKMIEFYQDTLIYFDQLQMEKENADSIKKIKVKFTSLRK

SEQ ID NO: 6251 - protein, 788 aa, Sulfitobacter sp. EE-36
MDIAGLALKVGRNTKMMIKGCRQMEKFGKSQPVKRVEDVRFLTGEGRYVDDIAPTDALHAYFFRSPVAHGVITTLDVTDAAEAEGVHAVLTIEDLEAAGMDISMAATVLQNRDGTEGAKPLRPVLAKGRVRFVGEPVAVVIAETLNQARDAAELIAFDVDDLPTHMTLERGGEMLHPEAPDNMAFDWGMGDEAATQKAFDAAAKSVSLNVGDNRIIVNAMEPRGCYAEWNDGKVHLANNGQGVWVHKGNLKRVFGLDDDHVQVTNPDTGGGFGMKAAAYPEYFSVAQAARALGRPVRWMSDRTEAMLSDNGGRDLTSLAEFAFDENNKITAYRVRTKCNLGAYNSQFGQPIQALLFSKVLMGVYDVQTTWLQVEGYYTNTVQTDAYRGAGRPEAIYVLERLMDRAARELGVDPWELRRINFIKPEQFPYTSATGELYDVGEFNRLLTRVAVEADHDGFAARKAADAAKGLLRGQGLCYYIESILGDPAEGAKVAFNEDGTVFIYVGTQSNGQGHETVYAQFLSDQTGIPAELIHVIQGDSDLIKQGGGTGGSRSVTTQSTATLATVAKMTEAFTAFLSDEMGVPAAQISFDDERFRADGSNMTPTMLEVAEMARQKGRDDLLVHHERATLPGRSYPNGAHVSEVVIDPETGVVTVDRYTVVDDFGNLINPMLAEGQVHGGVVQGIGQAIQEHVVYDEDGQLLTASFMDYAIPRAADVPFVSFNSEPVPSTANLMGMKGCGEAGTVGALAAVSNAVQDALWERGVRQADMPFTPHKVWALLNDSAIAAE

SEQ ID NO: 6252 - protein, 1159 aa, Zea mays
MSMYALLRSSKQPPTEDQIEDCLAGNLCRCTGYRPIIDAFRVFAKTDNLAYTNSCSEDAKDQAICPSTGKPCSCRNETDVNVNESSLSSSVERYSPYSYNEIDGSAYNERELIFPPELQLRKVMPLKLNGSNEIKWYRPLKLKQLLHLKSCYLDAKLIIGNSEVGVETKFKNAQYKVLIAVTHIPELNTLKAKEDGIHIGSAVRLAQLQNFLKKVVAEHDLPETSSCQAIVRQLKWFAGTQIRNVASIGGNICTASPISDLNPLWIAVGAKFHIIDVNGNVRTTLAKDFFLGYRKVDIKPEEILLSIILPWTRPFEYVKEFKQAHRREDDIALVNAGMRVYLQETERNWIISDVSIVFGGVAAVPLSASRTENFLTGKKWDSGLLDDTFNLLKEDISISENAPGGMIEFRRSLTLSFFFKFFLSVTHEMKIKGLLADGLHADHLSAVQPYSRPVTVGTQSYELVRQGASVGQPMVHMSAMLQVTGEAEYTDDTPTPPNTLHAALVLSKKAHARILSIDDSLAKSSPGFAGLFLSKDIPGVNHTGPIIHDEEFFASNIVTCVGQIIGIVVADTHDNAKTAANKVHIEYCELPAILSIEEAVKIGSFHPNTKKCLVKGDVEQCFLSGACDRIVSGQVHVGGQEHFYMEPQCTLVWPVDSGNEIHMVSSTQAPQKHQKYVASVLGLPQSKVVCKTKRIGGGFGGKETRSAIFAAAASVPSFCLRRPVKLVLDRDVDMISTGQRHSFLGKYKVGFTNEGKILALDLEIYNNGGHSLDLSLAVLERAMFHSENVYDIENIRINGQVCFTNFPSNTAFRGFGGPQGLLIAENWIHHIATELQRSPEEIKAGALVQVYTDGTVLVTHGGVEMGQGLHTKVAQVAASSFNIPLSSVFISETSTDKVPNASPTAASASSDLYGAAVLDACQQIKVRMEPIASKGTHNSFAELAQACYMERVDLSAHGFYATPNIGFDWTIGKGTPFNYFTYGAAFAEVEIDTLTGDFYTRTADIVMDLGFSINPAIDIGQIEGAFIQGLGWAAIEELKWGDDNHKWIRPGHLFTCGPGSYKIPSVNDIPLNFKVSLLKGVPNPKAIHSSKAVGEPPFFLGSAVLFAIKDAISAARAEEGHLDWFPLDNPATPERIRMACVDSITKKFAGIDYRSKLSV

SEQ ID NO: 6253 - protein, 292 aa, Shigella flexneri 2a str. 301
MFDFASYHRAATLADAINLLADNPQAKLLAGGTDVLIQLHHHNDRYRHIVDIHNLAELRGITLAEDGSLRIGSATTFTQLIEDPITQRHLPALCAAATFIAGPQIRNVATYGGNICNGATSADSATPTLIYDAKLEIHSPRGVRFVPINGFHTGPGKVSLEHDEILVAFHFPPQPKEHAGSAHFKYAMRDAMDISTIGCAAHCRLDNGNFSELRLAFGVAAPTPIRCQHAEQTAQNAPLNLQTLEAISESVLQDVAPHSSWRASKEFRLHLIQTMTKKVISEAVAAAGGKLQ

SEQ ID NO: 6254 - protein, 159 aa, Shigella flexneri 2a str. 301
MNHSETITTECTINGMPFQLHAAPGTPLSELLREQGLLSVKQGCCVGECGACTVLVDGTAIDSCLYLAAWAEGKEIRTLEGEAKGGKLSHVQQAYAKSGTVQCGFCTPGLIMATTAMLAKPREKPLTITEIRRGLAGNLCRCTGYQMIVNTVLDCEKTK

SEQ ID NO: 6255 - protein, 767 aa, Cryptococcus neoformans var. neoformans B-3501A
MGSTGTFGAIPQAPLTPPLTPDILASNTDTNMDAVMSSVQDLPLSTLATIPEISLHSGLSYEDEGDVNVRLCSHTEDSKSCKPEKEDEYLWRENMTDEERDRREEWLASSRGRKGLRIVIVTENFLPKVDGVTRTLSRLLVHLQTSGHSCILLGPSSTIATYASHPIIGTLGIPLYCYPGLKLNFARPKFWEVVNRWEPDVVHFVDPIWLGAQMICGMGWGLGGGKWVGDREERGELGGAVVASYHTNLATYATLFNLPFLTPLIWSFQRLLHSRVRLTLCPSPSTKAMLEEQGWVSEKDGEVGKVRIWSRGVDLHQFGRSKRSWKRREMWGVGLAPGEKQSEDSPLLKVEKDNPAISMEEKVVGLHWNGSKEEGMMTPPLSPENGPEDKKTYHSQIQSQSDLYPPYERGDVHGEVKQPFKASLAGVYPPDTSLDLPERVVLLYVGRISWEKNIHLLLSAYSHLSSFLPSSSSSSPGPINFMPKLIFVGDGPARKELETKCKEANYDAEFLGHKQGEELAECYASADVFAFPSFTETFGQVVLEALASGLPVVGLDAEGTRDLVTHQSTGLLLSPPHAHSSDYSNKESTSIPWPRACNTSSPYFKTLAKEYAKLLAEVVLDHQKRKEMGERGSTEGIGGRTWWDAMEKCVDSYREAMRIARSKRSIRIVPHSPTSPETLIPSFNHDPTVTRDSDYSLNEKRRQGSFVNRFGFTNKPLTQRGFDEKGRFGKDYIRQEDNGLFWIMNDNRDATESDGCTCFGLCCMEAP

SEQ ID NO: 6256 - protein, 1460 aa, Ustilago maydis 521
MPVPAPTTTVVDGFKLPSQFTQTASKLVFTVNNIRFQLSPAKGDDLDLTLLEFIRSKGFTGTKLGCGEGGCGACTVVVGKYDTHLATSSSSSSSKAPYRYKSVNACLLPLVAVHGCHVLTVEGIGSSSNPHPIQERIGKLFGSQCGFCTPGIVMSLYATVRNGYGHLTEQDIEHSLDGCLCRCTGYRPILDAAKSFATVKSTKIGSSSSSSNVYSDDSDDAEPTTPPEADLITRTPCAKGADCCMVNGKSKGCTPSTTSTAPGISTTAHAIQKVLDPTQFKPYDAASELIFPSYLAKDTFDSQDLVFIEQPPQLDDLESESESETVAAKSDSTRQVWLRPGSLQSLIDCMKLYGLDAGGKIRSGNTETGIEVKFKHLKYSVSIFVSDHIKDLAFYRSDERGITVGANLSLTDLVRQLKAERPSSAYAQQVKRSILDNLAYFASNQIRNVATLAGNIATASPISDLNPVWVATGAELFYVDTTSSQEKSVNMRSFFLGYRKTALPAGAVITKLFVPWSDDAGSVVQAFKQSKRKDDDIAIVNACLRVSVREDKIIDATLAFGGMGPTTMQSVEVQRFLQGRQFSAPETLAEALQILAKQDFPLSYGVPGGMPIFRKTLALGFLTRFWGLAAPRLGLPKLATALELLPDLEELATSTVERPTTTGQQDLENVAIKQPVGDSIPHLSAMKQVTGEAVYIDDLPPVANELHAGFVLSQRAHAVLKKVDASEALQMPGVVDFITYKDIPEGGSNIWNPPSMDETFFAEDKVYTVGQIIGLIVADTKRHAQAAAHKVKIEYQDLPHILTIEEAIAAGSFFKPRPVIHHGDSSEESWSQYDHVLEGETRMGGQEHFYLETNACLVIPGKEDSEIEVISSTQNPSETQIFCASILGIPNNRVVTRVKRMGGGFGGKESRTIAFAAPLTLAAKKLGRPVRVMLDRDEDMLTTGQRHPFLCKWKLGFNSSGKLERLDAKVYNNGGWSQDLSQAVLERAMFHIDNCYNIPHIHVEGFICKTNTMSNTAFRGFGGPQGMFFTEDFVSKAAAVIGMRPETMREMNLYKENDKTHFRQKLIDWNVPTLWEQLKSSGDLEARSRAVDEFNSTHRYKKRGIAMIPTKFGISFTAIFLNQAYGVVHVYHHDGSVLFSHGGTEMGQGLHTKMAQVVATELEIPVSMVHLTETNTSQASNTSATAASASSDLNGMALKDACVQINESIAPFRADAAAKGLAGVEAWKDAIHAAYFNRVQLSAIGHYRTPGIGYNWTNGTGTPFYYFTQGVAISEVELDTITGDHRIVRADVHMDIGRSINPSIDVGQIEGAFTQGFGLFTMEETLYLNNGQLATRGPGNYKIPAFLDTPTDMRVSFLKVQDANDAKVAKHNKHLGTIQSSKGIGEPPLFLGSSVFFALRHAIGAARAQYGGDGSKDGFHLVAPATAERIRVAINDPLVRLAHESTPRTDAEKPFFVSIS

SEQ ID NO: 6257 - protein, 328 aa, Synechococcus sp. WH 7803
MSRVYADNSQAIGNTPLVRLNHVTKGCKATVLAKVEGRNPAYSVKCRIGANMIWDAEKRGALTEGKVIVEPTSGNTGIALAFTAAARGYKLVLTMPESMSIERRRVMAVLGAEIVLTEAAKGMPGAIAKAKEIAASDPAKYFMPGQFENPANPEIHFKTTGPEIWNDCDGAIDVLVSGVGTGGTITGVSRYIKNEAGKAIESVAVEPSHSPVITQTLNGEEIKPGPHKIQGIGAGFIPENLDLSVVDKVEQVTNEESIAMAQRLAKEEGLLVGISCGAAAAAAIRLAQQDAYAGKTIVVVLPDLAERYLSSVMFADVPTGIIEQPVAV

SEQ ID NO: 6258 - protein, 153 aa, Prochlorococcus marinus str. MIT 9303
MALQVGDKAPAIDLVDQNGKKRRSNDLKGKVLVLFFYPKDDTPGCTAEACSFRDNYSVFEKLGSEVWGVSGDDDISHRQFAERHSLPYALLSDKDNTLRRAFEVPRTLGMLPSRVTYVIDGQGTIRHIFNNLLDGPAHMREACRVVEEIKKKR

SEQ ID NO: 6259 - protein, 187 aa, Salmonella enterica subsp. enterica serovar Typhi str. CT18
MSLINTKIKPFKNQAFKNGEFIEVTEKDTEGRWSVFFFYPADFTFVCPTELGDVADHYEELQKLGVDVYSVSTDTHFTHKAWHSSSETIAKIKYAMIGDPTGALTRNFDNMREDEGLADRATFVVDPQGIIQAIEVTAEGIGRDASDLLRKIKAAQYVAAHPGEVCPAKWKEGEATLAPSLDLVGKI

SEQ ID NO: 6260 - protein, 400 aa, Nostoc punctiforme PCC 73102
MKLCIVTHKIKKGDGQGRVNYEVANEAIRRGHQLTLLASEVAPELEANSQVNWIPIPVKDYPTEFVRNFVFAQKSTDWLRKHRSEIDLVKVNGAINLAAADVNAVHFVHSSWLRSPVHISRNRRDFYGFYQWLFTAFNARWEKQAFQKAQVVVAVSEKVAHELVNIGVPRSRIRVIVNGVDLDEFTPGESDRQKLGLPENVTLALFAGDIRTPRKNLDTVLHALVKVPDLHLVVVGHTQNSPFPQLAASLGLSKRVHFVGFRRDIPQIMQAVDLFVFPSRYEACSLVLLEALSSGLPVITATATGGGELVTPECGIVLSNSDDSDALALALLTLVSSPTLIKQMGKAARSVAEQHSWTTMAQTYVDLFEELSKNAEHRSDTNLSPSTRPITLPFSATEAN

SEQ ID NO: 6261 - protein, 253 aa, Glycine max
  misc_feature (11)..(11): Xaa can be any naturally occurring amino acid
  misc_feature (118)..(118): Xaa can be any naturally occurring amino acid
AQWARPDGSLXVSTDEVKSMENIKLKQEGVSDSPIGVLKLGIRKNSNGVWEVSKPENTNTSSGNNRLNEDLENHEHVIIPMSSSDTGSGRDEDDPSVNQGGGEHIDYSTTNGIEMDSXFNNNIDSAYGYNVNNASALMGDAQVIILSDSEEDNDVLMSHTRITGYKNNQTSDAVDVYSVLQPGIIDPYREDHNPGGNPTLGVFNNPSEDDFGMPPLWPLQSGTPAVSGFQLFSSEVEDVSDALIDLHHGNINC

SEQ ID NO: 6262 - protein, 320 aa, Verrucomicrobium spinosum DSM 4136
MSFYPNIVETVGRTPLVKLNRIAAGLPATIALKGEFKNPLGSVKDRIGRAMIEAAELTGELKPGATIIEPTSGNTGIALAFVAAAKGYPIILTMPESMSLERRTLLALLGATLVLTPAKDGMKGAIRRAEELAAETPGSWVPQQFNNPANPEVHRRTTAEEIWADTDGEIDIFVAAVGTGGTLTGVGEVLKGRKPELRAIAVEPNDSPVISQTLRGEPVVPGPHKIQGTGAGFVPKNLNTSIIDEVVRVTNEDAIETARRLATEEGILVGISTGANVWAALQVAARPENRNKLIVTVGCSTGERYLSTALAEEARNKVAA

SEQ ID NO: 6263 - protein, 373 aa, Pseudomonas putida KT2440
MLIVHIADITMFYAPASGGVRTYLDAKHHRLDAIQGVRHSLLIPGASAQHGDGIYQVPAPPLPFGKGYRFPVRLAPWCNTLRTLKPDLIEVGDPYLTAWAALEARRQLDVPVIGFYHSDLPLLVSNRMGNWFAPNVEAYVSKLYGNFDRVLAPSQVMADKLRRLGVRDVHVQPLGVDLATFHPSRRDPHVRAELGIADTSRLLIFAGRGSREKNLPVLLDCMQQLGDPYHLLLVGSNMPASVPHNVSVIDHFCPAAEVARLIASADLLVHAGDQETFGLVILEAMASATPVVAVRAGAFPEIINEQCGRLCTPNDGRAMASAVREAFEAGIRELGVQARHHVEQHYSWDNVVAGLLQHYQAVLGHQPQVRAHA

SEQ ID NO: 6264 - protein, 149 aa, Pyrococcus furiosus DSM 3638
MKIGDKAPDFVLKDQHGKEFKLSDFRGKKILLSFHPLAWTKICEKQMKALEENYEKFESLNVIPVGISVDPIPSKKAWAEHMGLKKLRILSDFWPHGEVAKLYGVFREKDGFSERANILIDEEMKIIFYKVYPIRELPDLNEIFDILKI

SEQ ID NO: 6265 - protein, 218 aa, Triticum aestivum; identical to SEQ ID NO: 6072

SEQ ID NO: 6266 - protein, 320 aa, Cyanothece sp. PCC 8801
MKIAHNVTELIGRTPLVQLNRIPQAEGCVAQIVVKLEGMNPAASVKDRIGVNMINAAEREGLIIPGKTLLVEPTSGNTGIALAMAAAAKGYKLILTMPETMSKERRAMLKAYGAQLELTPGSEGMGGCIRRAYELVETLPNAYMLQQFNNPANPEIHRLTTAEEIWEDTNGRVDILIAGVGTGGTITGVAEVIKSRKSTFQAIAVEPANSPVLSGGGPGPHKIQGIGAGFVPEVLKLELIDEVVTVTDDEAMSYGRRLAREEGLLSGISTGAALAAAIKVAQRPENKGKLIVMIQPSFGERYLSTPLFQDLDPPELAMVK

SEQ ID NO: 6267 - protein, 425 aa, Nostoc punctiforme PCC 73102
MTKQKLRIALFTGLYAPFLTGVSVAVHQRVRWLLEQGHEVFLVHPQISDRYPKNVGDRPMPGLDEIESFPNFSAYAFPTEPLLFYKSLPQPLNYRHWSDTKLLDKFKPDIILVEEAAQMRGLYSFFLQGYGRPIGVEYAKRTGTPIISLFHTDIVAYIKYYFGDKFFNLVRPIIPTLVKQFSESYDFNYFSSKEQLTKYEELKCQRAEYVPYQGIDCEKFHPRNICYNPIPNDNRPTLLFVGRITPEKNVNQLLDIFPVIAAKIPDVHLVIVGSGPMDEEIRERAKKFGSGITIWGESHGTELLGWFARADIFVNPSVTENFCTTNNEALASGTPLVAVVAPSTSEQVFPGRNGFLAQPNNPTDFAQKVITILENPDLKADMTRHARPSILEFDWSACMQKLEDKLYQIVEGSQKVKVGTGSIRR

SEQ ID NO: 6268 - protein, 414 aa, Zea mays
MSQTGEVQVPLLQTEEADGEWSSKPRRIALFVEPSPFAYISGYKNRFQNFIKHLREMGDEVLVVTTHKGAPEEFHGAKVIGSWSFPCPLYQNVPLSLALSPRIFSEVNKFKPDIIHATSPGIMVLGALAIAKMISVPMLMSYHTHLPAYIPRYNLNWLLEPTWSFIRCLHRSADLTLVPSLAIAEDFETAKVVPANRIRLWNKGVDSESFHTKYRRHEMRVRLSGGEPEKPLVIHVGRFGREKNLDFLKRVMERLPGARIAFVGDGPYRAELEKMFMGMPAVFTGMLQGEELSQAYASADVFAMPSESETLGQVVLESMASGVPVVAARAGGIPDIIPKDKEGKTSFLFTPGDLDECVRKIEQVLNSKDLRETVGKAAREEMEKCDWRAASKKIRNEHYSTAISYWRKKMDKSN

SEQ ID NO: 6269 - protein, 779 aa, Alteromonadales bacterium TW-7
MRHFEMDKLKAQGGSVGQSKYHESAIKQVCGNANYADDNPEPHGCLHAYPVLAPITSGFIKSIDTSKALEVAGVKRILSADDVPGKLDIGPIFPGDVLLTNHEIQYHGQPVLVVVAKSYEMARRAARLVVIECEQTTPILDIKEAIKKEHWVRPPHSLNRGNSEQAINNAAHQLKGEIHIGGQEHFYLEGQIALAQPDNDGGIHVQCSTQHPTEVQHLVAKILKKPFSFVNVETRRMGGAFGGKETQGAPWACLAALAVYHLGCAVKMRLARSDDFKLTGKRHPFYNQYHVGFDQNGLIEGADVTVNGFCGYSPDLSDAIVDRAMFHADNAYYYPAATIKGNRCKVNTVSHTAFRGFGGPQGMIMGELIMDDIAAKLGKDPLEIRKLNLYKKGRDTTPYHQTVEQHILKDMISQLEESGDYWARKKAIKTFNASSPIIKKGLAMTPVKYGISFTVQHLNQAGALVHVYSDGSIHLNHGGTEMGQGLNTKIAQIVAHGFGVDFDAVSISATRTDKVPNTSPTAASSGTDLNGMAALNAINTIKERLINFISEHFEVDSQSIVFKDNLITFSKGEISFSELANLAYMNRISLSSTGYYATPKIHYDRAKGEGRPFFYYAHGVALSEVEVDTLTGENTVTRVDILHDVGSSINPALDIGQVEGAFVQGMGWLTTEDLQWNDKGQLASFGPANYKIPAIGDTPAEFNVNLYNSANPETTVFRSKAVGEPPFMLAFSVWSAIRNAISSVADYKYTAPLDTPATPERVLNAIERTASWFKEQQHG

SEQ ID NO: 6270 - protein, 500 aa, Alteromonadales bacterium TW-7
MIQFLLNDTPIEEQECSPSLTILDWLRTKKGKVGTKEGCATGDCGACTILVGEEKTNLNGNPVWHYQTMNSCLLLLGNAHAKHIVTVEAVTAGLYPTLDDLHPVQRALVECHGSQCGFCTPGIIMSMLALYINNPSYPGKKAAIHALGGNLCRCTGYSPILLAVEKAYSYERKNEPYSAMAAQFKASLNIGDDIPCLKNGPRTFYLPQSAAQLVELKARYPHAHLVAGGTDFAIELSQNMLLPDVIISLSQTSELCTLSDNNGELHIGAALPYSQFVEAFYTYYPESKELFERLGSNQVRNSGTLGGGIGNASPIGDPAPLLIALNATIDLLSTAGTRTINVADYFVDYKKTVIKSDEVISKITVPKRPESLKLACHKISKRFEDDISTVCLVLAIEQTQGVISNARCAMGGMAAIPKRAAHIEQKLNAQPLQVSTFIDAAAAINDDFSPMSDVRSSAHYRTTVSKNLLQRIGIEFCDAQPSSNKNNNNIAITRISHASL

SEQ ID NO: 6271 - protein, 200 aa, Saccharophagus degradans 2-40
MGVLVGKQAPDFTAPAVLGSGEIVDSYNFAEATKGKKAVVFFYPLDFTFVCPSELLAFDHRIAEFEKRGVEVIGVSIDSHFSHNAWRNTPVNEGGIGPVKYTLVADMTHAICKAYDVESEGGVAFRGSFLIDEDGLVRHQVVNDLPLGRNVDEMLRMVDALAFHQEHGEVCPAGWKDGDKGMTASPEGVAAYLSENASNL

SEQ ID NO: 6272 - protein, 208 aa, Treponema denticola
MPLLGDDFPQLAVSTTHGPMKLPCDLKGSWFVLFSHPADFTPVCTTEFVAFQKLMPEFEKLGVKLIGLSIDQIQSHLKWIEWIKEKLGVEITFPVIAANDSIANQIGLLHPGKGTNTVRAVFIVDPNGKVRLVLYYPQEIGRNMEEIVRAVKALQTSDKNKVALPADWPNNGLIKDRAIIPPPPTEAEAKKRLKEYDGYDFWFCHKSL

SEQ ID NO: 6273 - protein, 299 aa, Dechloromonas aromatica RCB
MYKTLQDFVGNTPLVRLVRIPGADNDKRGNVILAKLEGNNPAGSVKDRPALSMIVHAEARGDIKPGDTLIEATSGNTGIALAMAAAIKGYRMILVMPENQSVERRQSMRAYGAELVLTPKDGGMELARDVADKMRDEGKGIILDQFANPDNPLAHYEGTGPEIWRDTDGKITHFVSSMGTTGTIMGTSRFLKEANPAIEIVGCQPEDGSQIPGIRKWPEAYLPKIFDKTNVDRVEYVSQADAEAMTRRLAMEEGIFAGISSGGALAVALRLSQQLENAVIVSIICDRGDRYLSTGVFPA

SEQ ID NO: 6274 - protein, 407 aa, Microcoleus chthonoplastes PCC 7420
MQVLHINQSDITGGAAIAVHRLHQGLLAQGIDSRLLVDIVTTSSDRVAAIPPRRRLDYQIRRLTKHLGFNDIHLTSTFEIAKHPFYQAADVLHFHNLHSGYFNYLALPSLTKNKPAILTLHDMWGITGHCAYSFDCDRWKIGCGNCPYPDTYPPIQRDNTYLEWKLKHWAYSHSHLVAVATTSHWLAEQAKQSMLGRLPVHHIPYSIDTQAYQPLDPELCRSLLGITRGKKVLMFGAQSLTNPRKGGDLLLKALSGLPDSLKSEIVLLIMGNRGEKMVESLGIPSLNLGFVGSDRLKAIAYSAADLFLFPTRADAFGLVAQEAMACATPVVSFKVGGVPDIVRPGITGYLAQPEDASDFSAGIMQLLEDQALRDRLGQQSREIILEEYALEVQAQRYLQLYGKVLDS

SEQ ID NO: 6275 - protein, 181 aa, Idiomarina loihiensis L2TR
MLTVGDKLPEFSVIAAKPKFNMPEENGESAFETIDNNSFEGKWKIIFFYPKDFTFVCPTEIVEFAKLNEDFADRDAVVMGGSTDNEFVKLAWRREHPDLDRLNQYSFADDGSLVDGLGVRDKAENVALRATFIVDPHNVIQHVSVNNLNVGRNPAEIVRILDGLQTDELCPCNRALGGDTL

SEQ ID NO: 6276 - protein, 311 aa, Corynebacterium diphtheriae NCTC 13129
MAKIYDSILDTVGNTPLIKLNRLDKYLPGNVVVKVEFFNPANSVKDRIGKAIVDAAEASGDLKPGGTIVEATSGNTGIALALVGAARGYNVVLTMPETMSLERRVMLRAYGAEIVLTSGAAGMQGAVDKANEIVAERDNAILASQFKNAANPEIHRRTTGEEIWNDTDGQVDIFVAGVGTGGTVTGAGETLKKHNPEIKVYAVEPAASALLTTGKAGPHKIQGLGANFIPSVLNQKVYEEVITVTNEDAISTSRQLAAQEGILGGISAGANLKAALELAALPENEGKTIVTVVPDYGERYVSTVLFDDIRD

SEQ ID NO: 6277 - protein, 142 aa, Chlorobium tepidum TLS
MALTLYGKDPLKMFEDVFNERLTPFISSMGSMMAPAFKVDISEDEKAIYLSADIPGVKKEDVKVSIEDDVISISAERTQEEEEKKKNYHRVERSWGSLSRSFTIGDNVDSDNITANYDNGVLKVVIPKKEPEQKKSKEIAVS

SEQ ID NO: 6278 - protein, 301 aa, Staphylococcus aureus subsp. aureus Mu50
MITYDLIGNTPLVLLEHYSDDKVKIYAKLEQWNPGGSVKDRLGKYLVEKAIQEGRVRAGQTIVEATAGNTGIGLAIAANRHHLKCKIFAPYGFSEEKINIMIALGADVSRTSQSEGMHGAQLAARSYAEKYGAVYMNQFESEHNPDTYFHTLGPELTSALQQIDYFVAGIGSGGTFTGTARYLKQHHVQCYAVEPEGSVLNGGPAHAHDTEGIGSEKWPIFLERRLVDGIFTIKDQDAFRNVKSLAINEGLLVGSSSGAALQGALNLKAQLSEGTIVVVFPDGSDRYMSKQIFNYEENDYE

SEQ ID NO: 6279 - protein, 200 aa, Pasteurella multocida subsp. multocida str. Pm70
MVLVTRQAPDFTAAAVLGNGEIVDNFNFKQHIAGKAAVVFFYPLDFTFVCPSELIAFDHRYEEFQKRGVEVVGISIDSEFSHNAWRKTPVENGGIGEVKYALVADIKHEIAQAFGIEHPEAGVALRASFLIDKDGVVRHQVVNDLPLGRNIDEMLRMVDALQFHEEHGDVCPAQWEKGKEGMTGSPEGVAKYLKQHADQL

SEQ ID NO: 6280 - protein, 427 aa, Listeria monocytogenes EGD-e
MNIGIFTDTYSPQISGVATSIMIMENELRKQGHTVYIFTTTDPNADRESEEGRVFRLPSIPFVFFPERRVAIAGMNKFIKLVGRLDLDIIHTHTEFSLGLLGKRIAKKYHIPSIHTYHTMYVDYLHYIAKGKILTPSMVGKMTKSFCDSYDAIITPTAKVRHHLEEQGIHKLMYTVPTGTDISSFAPVEKQRILDLKKLLGIGENDPVILSLGRIAHEKNIDAIINAMPEVLQTKTTAKLVIVGDGPVRKDLEKLVEEKQLADHVIFTGAVDWENISLYYQLGDLFVSASTTETQGLTYAEAMAASLPVVAKRDESIEGFLSDRETAFLFNEDDELASLLINILSDKNTATLVATNGRVKVESISADQFGINIESTYNEVREIYRVKRQNGTIKVKPTLIKSKIASQVFSLSSSTHVQRKERSSRRD

SEQ ID NO: 6281 - protein, 159 aa, Nostoc punctiforme PCC 73102
MTNIPQIGQPAPDFSTPDQNGNSVTLDDFSSQWVILYFYPKDDTPGCTTEAKDFTELYQDFSALGAKILGVSPDLGKSHCKFISKHNLSITLLSDPEHILTEAYGAWRLKKFMGKEYMGVARSTFLISPDKIIAYTWPNVKAKGHAQAVLTKLQELAAT

SEQ ID NO: 6282 - protein, 382 aa, Synechococcus sp. WH 7805
MKIAFFTETFLPKVDGIVTRLTKTVKHLVEAGDEVIVFCPEGCPEEYMGARLIGVPAMPLPLYPELKLALPRPAVSEAIDSFEPDLIHVVNPAVLGLGGIWLAKAKSVPLVASYHTHLPKYLEHYGMGMLEPLLWELLKAAHNQALLNLCTSTAMVQELSEKGIQHTDLWQRGVDTELFRPELRSPELRQRLLGGYDDRGALLLYVGRLSAEKQIERIKPVLEALPDARLALVGDGPHRQQLEKHFEGTATTFVGYLAGEELAGAYASGDAFLFPSSTETLGLVLLEAMAAGCPVVGANRGGIPDIITDGVNGCLYEPDGADSGAASLIEATQRLLGNDLERQALRNAARSEAERWGWAGATEQLRGYYRQVLKQPQLNEAA

SEQ ID NO: 6283 - protein, 313 aa, Streptococcus pyogenes MGAS8232
MTKIYKTITELVGQTPIIKLNRLIPNEAADVYVKLEAFNPGSSVKDRIALSMIEAAEAKGLISPGDVIIEPTSGNTGIGLAWVGAAKGYRVIIVMPETMSLERRQIIQAYGAELVLTPGAEGMKGAIAKAETLAIELGAWMPMQFNNPANPSIHEKTTAQEILEAFKEISLDAFVSGVGTGGTLSGVSHVLKKASPETVIYAVEAEESAVLSGQEPGPHKIQGISAGFIPNTLDTKAYDQIIRVKSKDALETARLTGAKEGFLVGISSGAALYAAIEVAKQLGKGKHVLTILPDNGERYLSTELYDVPVIKTK

SEQ ID NO: 6284 - protein, 149 aa, Prochlorococcus marinus subsp. pastoris str. CCMP1986
MQIGDKVPQFSLLDQNGTKRSNNGLKTPLVLFFYPKDDTPGCTIEVCGFRDKYDLFKVLGAQVWGVSNGSSSSHLAFANKNKLQYPLLCDKNDSLRKAFKVPKVLGLLDGRVTYVIDRNGFVKHIFRDLLNGPEHIKEAIRVLKEIQNQ

SEQ ID NO: 6285 - protein, 225 aa, Glycine max
MALARLALKNLQQRVCASSFLSGNVHKQRWNNELLRRFGTAAGDKGKSEGTEVAVTEGKKSNRMFPRRRGRRWAWRNEDHDDFPPALYELFPSGLGSALMQASNNINRLFENMNLTPWSLTSGRVKEKDDHYKLRYEMPGIAKEDVKITIDDDGVLTIKGEHKEEKDDDEQYWSSSSYGYYNTSLILPDDAKADDIKAELKDGVLTLIIPKTQNPQKDVKQVTIE

SEQ ID NO: 6286 - protein, 189 aa, Clostridium perfringens str. 13
MQMSLINKKVLDFKVQAYQNGEFKEVTSEDLKGHWSVFVFYPADFTFVCPTELGELADNYESFKEIGCEVYSISTDTHFVHKAWADASDTIGKIKYPMLADPTGKLARDFEVMIEEEGLALRGSFVINPEGEIKAYEIHDNGIGRNAEELLRKVQAAQFVAEHGDQVCPAKWKPGEETLAPSLDLIGKL

SEQ ID NO: 6287 - protein, 211 aa, Cyanothece sp. PCC 7424
MALQLGDTVPDFTQESSEGTISFHEWAGDSWVVLFSHPADYTPVCTTELGTVANLKPEFDKRNVKVLALSVDDVESHKGWINDINETQKTTVNYPILADPDRKVADLYGMLHPNSLTNLTVRSVFIIDPNKKLRLTITYPASTGRNFDEILRVIDSLQLTDNYQVATPANWKDGEDCVVVPSIPTEEAKQKFPKGVTEVKPYLRMTPQPNK

SEQ ID NO: 6288 - protein, 101 aa, Oryza sativa
KLRNSSSTVGLLAISKSFGVLIPDQGIALRGLFIIDKEGVIQHSTINNLAIGRSVDETMRTLQALQYVQDNPDEVCPAGWKPGDKSMKPDPKGSKEYFAAI

SEQ ID NO: 6289 - protein, 243 aa, Candida albicans
MREKKQTKKKKSFFFATYTTMSQQPHLRLGSTAPDFKADTTNGPISFHEYIGDSWAILFSHPAARTSVCSTELSAFARLEPEFTKRGVKLLAISADPVEANSDWIDDMEDFSGSRVKFPIIADAERKVATLYDMIDHQDATNLDDKGLQLTIRAVFIIDPSKKIRLIMTYPASTGRNTAEVLRVLDSLQLVDKQKVITPINWVPGDDVLVHMGVPDDEARVLFPKYRAIKPYIRLTPLEKEDK

SEQ ID NO: 6290 - protein, 399 aa, Agrobacterium tumefaciens str. C58
MKLAYFVIPHIGGTYSVFKHLRKGLAAYDIDVRWLGVCKETYGLPLDLQGETAFGQLLRMPVNLSERDCAARMAAAIENGGFDGVIVNVLGDQLQTNIARYLPEGILRILVVHNISPGTYAAARSVRDYAHVTIGVSERCRADLVARNGFPKDRTYAIPNAVDSDAFRSQAVRRVNRGPELKVLFVGRIEDASKGVMWLREILDGSPEAVRLTIVGDGPDMGKLRRRLASHDDRVSYAGSVQLSDIPVIMASHDVLIMPSRFEGLGMTMIEAMAGGCVPVVSHIRGVTDTIVEPGRNGFLFPIGNYTAAANAIGRLHADRDLLERMSIAGKEMVLNRFSIERMAARYNEVIAMTLNDRPGLSTVLRMEDWSIPAGLRPGLRTYLPLPLKNWLRVVRERL

SEQ ID NO: 6291 - protein, 493 aa, Mesorhizobium loti MAFF303099
MAKVNIRNEIRFILNGRDVVLSSVAPDATLLDWLRLDRSLRGTKEGCAEGDCGACTVLVGRLSAGGLIYESVNACIRFLGSLDGTHVVTVEHLRGQPGQLHPVQQAMVDFHGSQCGFCTPGFVMSLYGLWMKSPDPSNAAIEKALQGNLCRCTGYEAIMRAAHAISSYGKAAKDPLAVERKAITARLEALRDGARVEIGSAKARLIVPANVDDFATVLDQEPGATIVAGSTDVGLWVTKHMRDISPAVFIGNLDGLCTVSEDKGVISIGAGVTYTEAFSMLAKRIPALGPLFDRIGGEQVRNMGTIGGNIANGSPIGDTPPPLIALGARLTLRKGQKRRTIPLEAFFIAYGRQDRQPGEFVEAVHVPVPAKGEKFAVYKITKRRDEDITAALGAFLLTLAKDGTVADVRIAYGGMAATPKRASFVEKALLGKPWTEETVETAMAQYAGDFTPLTDMRASAEYRALAAKNLLLRFFVETTGTRAPFQVSRNEAA

SEQ ID NO: 6292 - protein, 188 aa, Bacteroides thetaiotaomicron VPI-5482
MEPILNSQLPEFSVQAFQNGAFKTVTNNDLKGKWAILFFYPADFTFVCPTELVDMADKYAQFQEMGVEIYSVSTDSHFVHKAWHDASESIRKIKYPMLADPTGALSRALGVYIEEEGMAYRGTFVVNPEGKIKVVELNDNNIGRDASELLRKVEAAQFVATHDGEVCPAKWKKGESTLKPSIDLVGKI

SEQ ID NO: 6293 - protein, 782 aa, Mesorhizobium loti MAFF303099
MMNKHATSNLKAEKIVGGVATDQRHDSAHKHVSGTAVYIDDMPEPSGTLHGCLGLSAAAHATITRMDLSAVRAASGVVDVLTAKDVPGENDISPTGRHDEPVLADGKVEFFGQSIFCVIAETREQARRATRLAKVEYSQLPFVTDIGELDPRKDKLVTPPLTLKRGDAAAAIKAAPRRLKGKMRVGGQEHFYLEGHIAMAVPGEDQDVTIYSSTQHPSEVQHMVSHALGVPSNAITVEIRRMGGGFGGKETQGNQFAALAAIAAKKHHRAVKIRPDRDDDMIATGKRHDFLVDYEVGFDDEGNILGVDFMFAARCGFSSDLSGPVTDRALFHCDNTYFWPAVHAQSAPLYTNTVSNTAFRGFGGPQGMVGAERVIDEVAFAVGKDPLEIRKKNFYGTSDRNITPYHQTVEDNIIQRIVAELEESAGYARRRREISAFNANSRFIKRGLALTPVKFGISFTATHYNQAGALVHVYTDGSVHLNHGGTEMGQGLYLKVAQVVAEEFQIDLDQVKITATTTGKVPNTSATAASSGSDLNGMAAQNGARQIKNRLTDFAAEKYQVPRDQVLFLPNRVRIGNQEIAFADLVKQAYMARIQLSAAGFYKTPKIHWNRDKGEGRPFYYFAYGASCSEVSVDTLTGEYVVERTDILHETGRSLNRAIDLGQIEGGFIQGMGWLTTEELWWDDKGRLRTHAPSTYKIPLASDRPKIFNVALADWPEAGEPTIHRSKAVGEPPFPLGMSVLHALSDAVASVADHRICPRLDAPATPERVLMTIERLKGEAKA

SEQ ID NO: 6294 - protein, 405 aa, Cryptococcus neoformans var. neoformans JEC21
MVDYKFPIFFRNPAVVSPELISSSLHISSKSIQNMVVSRSASILRSVCPTFISSRAYATAAPAFGKPVNGFVGAIGNTPLIRLSRLSEETGCNILAKAEFMSPGGSIKDRAALYLVQDAEEKGLIRPGGTVVEGTAGNTGIGLAHVCRSKGYKCVIYMPDTQSQEKIDLLRMLGADVRPVPAVAFDNPQNYNHQAARYAASLENAVWTNQFDNVANRNAHIVSTGPEIWEQTDGGKLDAFICSTGTGGTLAGVTRYLTEKSNGRVEAWLADPPGSVLFNLVENGEIKREGNGSITEGIGQGRVTNNLAPDLSLLSGAIHVPDSASINMIYRLLDEEGLYVGASSALNVWSAVELAKRKGKGSTVVTVLCDGAYRYQARLFSRVWLESKGLVSHIPDHLQKYIVLP

SEQ ID NO: 6295 - protein, 531 aa, Oryza sativa Japonica Group; identical to SEQ ID NO: 3576

SEQ ID NO: 6296 - protein, 185 aa, Herbaspirillum seropedicae
MSLITHYQAVKARLHDGKFVDITEATLKGKWSVFVFYPADFTFVCPTELEDLADNYAEFKKLGVEIYGVSTDTHFAHKAWHDTSEAIKKVQYPLVGDPTATLARNFEVLIEEEGLALRGTFVINPEGQIKVLEIHDNGIGRDASELLRKVKAAQYVASHPGEVCPAKWEEGAATLKPSLDLVGKI

SEQ ID NO: 6297 - protein, 153 aa, Burkholderia sp. 383
MSVEVDRQVPDFTAPATGGDISLSDLKGKKLVLYFYPKDNTPGCTTEGLQFRDLYPKFKKAGAEVIGVSRDSLRSHDNFKAKLELPFPLISDADEALCALFDVIKMKKMYGKEVRGIERSTFLIDADGVLRQAWRGIKVPGHVDDVLSAVQAL

SEQ ID NO: 6298 - protein, 300 aa, Clostridium perfringens str. 13
MVFNSLLSLIGNTPILKANNLFEGNNVFVKLEKFNPGGSIKDRAALGMIEEAEKNGLLKENGVIVEPTSGNTGIAIAMIGKIKGYKVIITMPETMSKERRDMIKAYGAEIILTEGSKGMKGAIEEAERLASTKGYFMPQQFLNEANAKKHYETTAEEIIRDIPDLDVFIAGVGTGGTITGVGRKLKEYNPNIKIVAVEPSDSAVLSGENSGPHKIQGIGAGFIPKIYDSSVVDEIIKVKNEDAYTMAKNFADKEGVLVGISSGAALKGAKDILENIAKDKKVLVIAPDGGEKYFSTGLYE

SEQ ID NO: 6299 - protein, 494 aa, Herbaspirillum seropedicae
MSETHSSIQFYFRGQTHSVAGHSPTRTVLQHLREDLHCTGTKEGCAEGDCGACTVVVGELQGEQLALKTVNACIQFLPTLDGRALFTVEDLKQADGSLHPVQQAMVECHGSQCGFCTPGFVMSLWGLYLRHEQDGVTPSKREIDDALSGNLCRCTGYRPIIDAARRMGELPKVEFDREAIKAALRSIDQQQPLALTHAGQTFHAPRTLAQLAQLRADLPQARILAGSTDVGLWVTKQMRELGDLLYIGRVEELRAMQVRDEMLEIGAGVCLEEAYAEAARHYPEELSELWQRFASLPVRNAGTLGGNLANGSPIGDSMPWLIALGAQIVLYSVRGQRVMPLEDFYLAYQKSALQADELVQAVRIPLPRKELRFRVYKLSKRFDQDISAVCAAFALQMQGDTIVQARIAYGGMAATPKRAAQAEAVLQGGPWSEAQAQAAMAALAQDYAPLSDMRASAAYRLRTAQNLLYRYWLETRSDAPLARQELRACAVDAA

SEQ ID NO: 6300 - protein, 219 aa, Mesorhizobium sp. BNC1
MGLRINDTAPDFTAETTHGTIHFHEWIGDGWAVLFSHPKNFTPVCTTELGAMAGLEGEFKKRNAKIIGISVDPVQDHLRWKDDIEKATGFRVDYPLIGDKDLRVAKLYDMLPAEAGDSSEGRTPADNATVRSVYVIGPDKKMKLILTYPMTTGRNFDEILRAIDSIQLTAKHQVATPANWKQGEDVIITAAVSNEDAVKRFGAFDTILPYLRKTKQPTA

SEQ ID NO: 6301 - protein, 189 aa, Colwellia psychrerythraea 34H
MNQSIINTKLLPFNATAFHNGEFVELSEKDLADKWSVVFFYPADFTFVCPTELGDMADHYDELQKMGVEVYSVSTDTHFTHKAWHDTSDTINKIKYPMIGDPTGAITRNFGVMIEEAGLALRGTFVINPEGEVKIAEVHDLGIGRSAAELLRKVKAAQYVAEHDGEVCPAAWQPGAETLAPSLDLVGKI

SEQ ID NO: 6302 - protein, 910 aa, Desulfitobacterium hafniense Y51
MINKSIIINGVRQTLIVDEEVTLANVLRGQLHLTGTKIGCGKAQCGACSVIMDGKVIRSCVTKMKRVPDEAQITTIEGVGTQKELHPLQLAWMIHGGAQCGFCSPGFIVSAKGLLDENTNPTREEVRDWFQRHRNACRCTGYKPLIDAVMTAARLIRGEVKVEELWEKLPQDGSIWGSNYIRPSALAKVTGTCDYGADLGIKMPCGTLQLKLVQAKVSHANILSIDTSEAEKMPGVYKVITHKDVKGKNRITGLITFPNNKGDGWDRPILCDEKVFQFGDAIAIVAADTEEHAQAAVEKVKVELEILPAYMSAPAAMADDAIEIHPGTPNIYWETKVIKGEETAPIMEDSEVVVVQDDFYVGRQPHLPMEPDVGFAYIDDQERVVVHSKSIGIHLHHAMIAPGLGLEPDKLVLVQNPAGGTFGYKFSPTIEALLGVAAMATGKPVFLNFDYYQQITYTGKRSPFFINLKYGATKEGKLLAMEADWSVDHGPYSEFGDLVTLRGSQFIGASYMIPNIRSNGRTVCTNHAWGSAFRAYGSPQSLFATEVLMDELAEKLGMDPFELRYKNIYRPGDTTPTGCQPDVYSLVEMMDKLRPLYDAAKEKARAESTADKKRGVGISLGAYGAGLDNPDGSEAWADYTETGVTIFNAWEDHGQGADMGTLATAHQALLPLGIKPEQIKLVMNDTSITPASGPAGGSRSQVMVGNAIKIACEELLKGIQKPDGTYRTYAEQVEAGLPTHFIGKYGTPAGYNGCDLETGQGAPFTTYMYAAFMSEVEVDVQTGKTKVLGMTGIFDVGTLANKLVVDGQMYGGMIQGLGLALSEDFEDLNKHIDLISCGLPYPKDIPEKLVVDYVMTPREHGPFGASGVGEAPLTSPHASIINGITDACGVRITRLPALPEKVLAGLKAKQ

SEQ ID NO: 6303 - protein, 200 aa, Synechococcus sp. RS9917
MTANGCLRVGQQAPDFTATAVVDQEFKEISLSQYRGKYVVLFFYPLDFTFVCPTEITAFSDRYADFSSKNTEVLGVSVDSQFSHLAWIQTPRNQGGLGDIAYPLVADLKKEIASAYNVLDEEEGVALRGLFIIDPEGVIMHATINNLPVGRNVDETLRVLQAFQYVQSHPDEVCPANWTPGEKTMKPDPVGSKEFFAAVN

SEQ ID NO: 6304 - protein, 214 aa, Sulfolobus metallicus
MKLYQKFPETQVLTTQGVIDFYKDIFGKGKWLFLFAHPADFTPVCTTEFVEFSKAYNDFANLGVQLVGLSVDSVYSHIEWLKDIQEKYGIKVPFPVIADPDKKFARLLDIVDEASGQTIRGVFLVSPDGVIRFIAYYPLEAGRKISELLRITKAMIVNYKAKVVLPANWEPGQDVIVPPPNVFDEATMRMKMPKAKSWYLLFKDYNELPQDQKV

SEQ ID NO: 6305 - protein, 215 aa, Sulfolobus metallicus
MKLYQKFPETQVITTKGPLDFYRDVFEKGKWLFLFAHPADFTPVCTTEFVGFSKVYEEFKRLNVELVGMSVDSIYSHIEWLKDIQERYGIQVPFPLIADPDKRLARLLDIIDEASGVTIRAVFLVNPEGIIRFMAYYPIEYGRKIEELLRITKAALVNYKAKVSLPVDWEPGQEVIVPAPSTIDEAQIRMKLPNAKTWYLTFKKYDELPQDQRVV

SEQ ID NO: 6306 - protein, 373 aa, Porphyromonas gingivalis W83
MNPPKRLLVIHRALAPYRIELLNTLSAAFDTHIYFEFASPIEQRFDAGELAKRVHFQSSVLPPAPKIPGLKNFRPYAASLVRSLRPDVVLCSEFNLLTLTLTAASRLFSPKTKLYVLCDDNEQMAEAELHYGRGLKHRMLSYVEGVILCDSRACDLYASRFATLDRERFVYLPIVQDEKVLRPLYEQVFGIGRDLRHALIPAGARMILYVGRLSEEKNLPALIDNLSTLPDDVHLVIVGDGPMQSALMNQVQATGHPERIIFAGKKEGAELYAYYTQADCLVLPSMRECFGSVVNEALIAGVPVVCSDIAGASCLVTESNGRTFSPMLPNALSQACNDLLGSIAPFCGDSLRPSLMPFTFERAIAPVLSLLSR

SEQ ID NO: 6307 - protein, 321 aa, Rubrobacter xylanophilus DSM 9941
MDVLQGSRHRGLSESVLEAIGDTPLIEVEEGIYAKLEYLNPSGSIKARIAKYIVEKAEREGLLLPGHTIVEATSGNTGNAFSMVAAIKGYRMVVLMPEGLSTERVAISRAFGAHIEHVGEFYVTEALKRARELGKKEGYFCPAQFDSEWNVEENREWLGKEILGQLEEGGVGAPDALVMGVGTGGTLIGVGQAFREKNAEAKLIAVEPEESCTLLCGESGVHKIEGISDGFVPGIYERHAERLGVDEVYAVGSEEALGAMRWLARRRGLFVGPSSGANLVAARRLKEAHPELKSIVTLFCDEGEKYISEHFPAGRRGDATK

SEQ ID NO: 6308 - protein, 216 aa, Arabidopsis thaliana
MAASSSSFTLCNHTTLRTLPLRKTLVTKTQFSVPTKSSESNFFGSTLTHSSYISPVSSSSLKGLIFAKVNKGQAAPDFTLKDQNGKPVSLKKYKGKPVVLYFYPADETPGCTKQACAFRDSYEKFKKAGAEVIGISGDDSASHKAFASKYKLPYTLLSDEGNKVRKDWGVPGDLFGALPGRQTYVLDKNGVVQLIYNNQFQPEKHIDETLKFLKAA

SEQ ID NO: 6309 - protein, 423 aa, Porphyromonas gingivalis W83
MKILLLNTSDARGGAAVAAMRLMETLQEAGAEVRMLVLNRNTTNPDIMALHSGRCGKTADKYRFLAERLHIYMCNGRDRSRLFHVSTALIGYDVSCHPWVRWADVIHLHWINQGFLSLRGLERLTRCGKSVVWTMHDMWPVTAICHHARECLRYRTECGACPQISSQKEKDLARLVWNRKSRVISLLRPTLIGCSHWLADLARQSALTDGLRIESIPNPIDTNLFAPGSRSDARRIMDLPTDRILLLFGAVQADDPRKGIYELSQAMKRLRERQPDLSKRIALVVFGSLRDEVRSLFPNYKLISIGYIREPSRMAELYRAADLFVIPSLEENLPNTIMEALSVGTPCVAFRVGGIPEMIVSGSTGYLAAFRDPSDLAEGITKTIALQETSPEAVASACRSFVLRHYSREVVSSRMLQLYRELL

SEQ ID NO: 6310 - protein, 463 aa, Frankia sp. EAN1pec
MDVYDHVTDLVGDTPLVRLTPVIADTVTPVLGKLEYLNPGGSVKDRIALSMVAAAERDGRLTPGGTIVEPTSGNTGVGLAMVAARRGYRCVFTMPDKISEEKRAVLRAYGSEVIVCPTAVAPDDPRSYYSVARRVLSETPGAWSPDQYSNPDNPAAHEASTGPEIWRATDGRVTHFVAGIGTGGTISGTGRHLKAVSGGTVQVIGADPEGSVYSGGSGRPYLVEGVGEDIWPTTYDKSVVDRVEAVSDRDSFLMTRELARRAGILVGGSCGLAVVAALRVARELDAAGTTDACVVVLLPDSGRGYLSKIFNDEWMYDNGFLDPPSDEPTVASVLAHKAAQTSGPPNLVHVHPDETVGAAISYLREYGVSQMPVVRHEPPVRAAEVAGAVLERELLDAVFADRGTVDAPVADHMSPPLPTVGAGEPVSVLVSALGENPAALVLDEGNPTGILTRADLLGFLAVR

SEQ ID NO: 6311 - protein, 199 aa, Zea mays
MASTRFPQIGKPAPEFGGQAVVDGQFKNINLSDYKNKYVVLFFYPLDFTFVCPTEIIAFSEAAEQFRAINTELIACSNDSHFSHLAWVNLPRKQGGLGKMEIPLLADKSGKIARDYGVYIEEEGISFRGLFIIDGNGVLRQITINDLPVGRSVEETLRLVQAFQFTDEHGEVCPANWKPGKKTIKPSVENSKDFFQDSA

SEQ ID NO: 6312 - protein, 216 aa, Arabidopsis thaliana
MPGITLGDTVPNLEVETTHDKFKLHDYFANSWTVLFSHPGDFTPVCTTELGAMAKYAHEFDKRGVKLLGLSCDDVQSHKDWIKDIEAFNHGSKVNYPIIADPNKEIIPQLNMIDPIENGPSRALHIVGPDSKIKLSFLYPSTTGRNMDEVLRALDSLLMASKHNNKIATPVNWKPDQPVVISPAVSDEEAKKMFPQGFKTADLPSKKGYLRHTEVS

SEQ ID NO: 6313 - protein, 152 aa, Nostoc punctiforme PCC 73102
MPIKVGDTAPNFTLPAQNGSTVSLQDFRGTKAVVLYFYPKDDTPGCTAESCAFRDQYEVFKSVGAEVVGVSADSSESHQKFAAKYNLPFTLLTDKGDQVRKLYGATAAFGLFPGRVTYVIDQQGVVQYVFDSMLNFKGHVEEALKTLQQIAK

SEQ ID NO: 6314 - protein, 673 aa, Oryza sativa
MAAAMEMAANPGGSGTCSDALFRELWHACAGPLVTVPKRGERVYYFPQGHMEQLEASTNQQLDQYLPMFNLPSKILCSVVNVELRAEADSDEVYAQIMLQAEADQSELTSLDPELQDLEKCTAHSFCKTLTASDTSTHGGFSVLRRHAEECFPQLDMSQNPPCQELVAKDLHGTEWHFRHIFRGQPRRHLLTTGWSVFVSSKRLVAGDAFIFLRGESGELRVGVRRLMRQVNNMPSSVISSHSMHLGVLATASHAISTGTLFSVFYKPRTSRSEFVVSVNKYLEAKKQNLSVGMRFKMRFEGDEAPERRFSGTIIGIGSVPAMSKSPWADSDWKSLKVQWDEPSAIVRPDRVSPWELEPLDASNPQPPQPPLRNKRARPPASPSVVAELPPSFGLWKPPSEAAQTLSFSEPQRAREIFPSARGSIFSASSHVEFNSKNEPSRVSNQFYWSMRDSKTDSFSASTNKARVERKQEPTTMGCRLFGIEISSAVEEALPAATVSGVGYDQTVLSVDVDSDQISQPSNGNKSDAPGTSSERSPLESQSRQVRSCTKVIMQGMAVGRAVDLTKLNGYGDLRSKLEEMFDIQGDLCPTLKRWQVVYTDDEDDMMLVGDDPWDEFCSMVKRIYIYSYEEAKLLAPKSKLPVIGDTIKLSSMNSSHESVDLDNHASVTNRDC

SEQ ID NO: 6315 - protein, 316 aa, Haemophilus influenzae R2866
MTIYADNSYSIGNTPLVRLKHFGHNGNVVVKIEGRNPSYSVKCRIGANMVWQAEKDGTLTKGKEIVDATSGNTGIALAYVAAARGYKITLTMPETMSLERKRLLLGLGVNLVLTEGAKGMKGAIAKAEEIVASDPSRYVMLKQFENPANPQIHRETTGPEIWKDTDGKVDVVVAGVGTGGSITGISRAIKLDFGKQITSVAVEPVESPVISQTLAGEEVKPGPHKIQGIGAGFIPKNLDLSIIDRVETVDSDTALATARRLMAEEGILAGISSGAAVAAADRLAKLPEFADKLIVVILPSASERYLSTALFEGIEG

SEQ ID NO: 6316 - protein, 153 aa, Nostoc sp. PCC 7120
MPVKVGDSAPDFTLPAQNGSSVSLSDFRGKKAVVLYFYPKDDTPGCTAESCAFRDRYEVFQTAGAEIIGVSGDSNESHQKFASKYNLPFTLLSDKGDQVRKLYGATAAFGLFPGRVTYVIDQQGVVQYVFDSMFNFQGHVEEALKTLQQLASK

SEQ ID NO: 6317 - protein, 378 aa, Anabaena variabilis ATCC 29413
MRIALFTETFLPKVDGIVTRLRHTVDHLQRLGNEVLVIAPDGGVTEHKGAKVYGVSGFPLPLYPELKMALPRPAIGYALEEFQPDIIHVVNPAVLGLSGIFYSKVQKIPLVASYHTHLPKYLQHYGLGMLEGLLWELLKGAHNQATLNLCTSTAMVAELSGHGIERVDLWQRGVDTELFHPDLASLEMRSHLSQNHPENPLLLYVGRLSAEKEIERIKPILEAIPQARLALVGDGPHRQALEKHFSGTNTHFVGYLTGRELGAAFASADAFIFPSRTETLGLVLLEAMAAGCPVVAARSGGIPDIVTDGVNGYLFNPKADIQDAINATVRLLENAQERDTIRQNARREAERWGWAAATRQLQDYYQKVLITENLAKVS

SEQ ID NO: 6318 - protein, 387 aa, Thermosynechococcus elongatus BP-1
MALHIAWLGKKSPPCGNVTYSREITNGLLDRGYQVSFLHFAQEDEQEAEGEGEMPDVTLPCLYKSQVYTLPSLRANKVLVESLKKLKPDIVHASLTLSPLDFFLPDICEELKIPLVATFHPAYSEKYRTLTAGTALMTYQLYAPFLARYDRVIVFSQSQKELLIRLGVGPETLRVIPNGVDTRKYTPGPSTAKEDFKARYLYVYQGRMAIEKNVEALLRAWCAAEMPSDCKLLMVGGGALMPSLMANYGPEQNILWLGAIVNDQERLQILRGCDVFILPSQIEGLSLSLLEAMACGLACLATDVGADGEVLTGAGIVLNPQYVKTQLQALLPIFYQHPEMIRLLGNKARQRVLERYSLSHNLDRLEACYQELMTAYSLVRPAAKVKS

SEQ ID NO: 6319 - protein, 499 aa, Thalassiosira pseudonana CCMP1335
MSNNNNLLCIQVIWLNGGPGCSSMIGLLVENGPITLPTFPSGIPPGKNPSSSMGALFTSNPFAWTRKSAMLYVEQPGGVGYSSASSKWRGEDADVRTEKDVALDFYRFLQNFYRVFDDEETKKLFIAGESYAGMYIPSIARGIIKGNERLMAANEVINLQGVAIGNGWIDAYIQGPTVIDYAFWHGMIDLRTVNSLHEKWDECIKNKITSSESEPFHPFTTPDECGVTMAVMEASGSSNMYDVTTYDTYPVHVDPHGTIAEFFNDADVRMALNAPSSDVLSTWEACVPGNLILLANDRTSVVPYIAELLDEAKVRILFYNGDLDLSCSSQSTEMVLDSMKWSGNEAWLNPDTTQWKEWIVEDQVAGHTKRYSNLEFVVVYNSGHFVPVNQARNSLNLIGRMLDDVSFGDESLPQFPSSRGRAKEPLVSPVMTIPGEDENETYRTVSITTALWGCVLGALISSLVTSHILLKKRKRASQHSQSGLTEITPLKARQSKTID

SEQ ID NO: 6320 - protein, 202 aa, Vibrio vulnificus CMCP6
MVLVGRQAPDFTAAAVLGNGEIVDNFNFAEFTKGKKAVVFFYPLDFTFVCPSELIAFDNRYEDFKAKGVEVIGVSIDSQFSHNAWRNTPVENGGIGQVKYPLIADVKHEICQAYDVEHPEAGVAFRGSFLIDEDGLVRHQVVNDLPLGRNIDEMLRMVDALNFHQKHGEVCPAQWEEGKAGMDASPQGVAAFLSEHAADLKK

SEQ ID NO: 6321 - protein, 807 aa, Deinococcus radiodurans R1
MTRDPIQITHLSERPARSAVGEHAIHESAALHVTGHALYTDDLGVRLAGLLHAWPLQAPHAHARLTRLDVTPALAVPGVVRVLTAADVPGENDSGVKHDEPLFPTEVMFHGQAVCWVLAESTEAARLGAQAILAEYEPLPALVTLREAIAAESFQGNQPTLRRGDVTLGFEQATHIFEGEFEFGGQEHFYLETNAALAQVDENGQVFIQSSTQHPTETQEIAAHVLGVPSHLVTVQCLRMGGGFGGKEMQPHGYAAVAALGAVLTGRPVRVRLNRTQDLTMTGKRHPFHAVWKVGFDAEGKLTALQATLTSDGGWSLDLSEPVLARALCHIDNAYYIPHVEVLGRVAKTNKTSQTAFRGFGGPQGMLVIEDILGRCAPLLGLEAHELRQRNFYQPGEATPYGQEVRHAERLARVWDELLASSEFAARQQDIASFNAAHPHARRGLAITPVKFGISFNFTSYNQAGALVHVYKDGSVLINHGGTEMGQGLHTKMIQVAATALGVPTSCVRLAPTRTDKVPNTSATAASSGADLNGGAIKDACEQIRARLAAVAAGALLPLARQKVGALGVHPDDVRFEHGRVFAVGHPGLALDFRQVVHDAYHLRTPLWAAGFYRTPGLHWDREAMQGTPFKYFSYGAGVTEVEVDGFTGAYKLRRVDLLHDVGESLNPLLDLGQIEGGFVQGAGWLTLEDLRWDESQGPGRGRVTTASASTYKLPSFSEMPEVFHVSLLQGAAESGVVYGSKAVGEPPLMLALSVREALRQACAAFGDGGREQPLASPATPEAVYWALTAAREAGAAAPVPSVAGAD

SEQ ID NO: 6322 - protein, 795 aa, Arthrobacter ilicis
MVESISAPKMVGQAIPRKENAGLLTGAALFVDDVVLEGMLHAKILRSPTAHANLLSVDASRARTMPGVHDVVTGPEMTGVLKRFGGLVKGLPFNDRIVMADDKVVFEGQEIAAVAAESPYEAWDAVEAIKVAYDELEPVVDIEFAASSEAKAIWDYNGTNVWENYKLKIGDAQSAHGAVTVGGKFRTNRPAAVAMEPHVCIADFDRITKSLTLYTSTQFTHLLVGIIADVLQIPPAKVRVATLNVGGSFGSKGDLFPHEVIACLLSLRTGRPVKLVLSREEVFKAVGGRCAQVTTAELKMDQDGSIVSYGAKVLHNTGAVSPFGGQIMKIGLHIGMLPYPIPNIDINASAVSTTTISGGPVRGFGVPQVLFVKEQLIDMAAEELGLDPIEVRLKNIPANAEEGYVTPSGIRIDSTTAHFCLRKVADEIGWWDRHEKREAYVGYGAGLAVKYTSARHPSLDTDLSTIRLLLTPDGRVTIFSGDVPHGQGHHTMLSQIVADATGAKFDEIGLVAADTATTPFSLGTFGSRSAAVLGSAAMRAGELLAERIRTVAASIMKCPADILELRESMVWVKGSTEPALPFEAVAAVALFATSGLSGGSVAGPIEAQATYDTPTEREREDGGGNWAATYSAGAHAARVEVDPSTGQFKILDYVMAHDSGNIINPLIVEGQHHGGFAHGLAMVTEDLQIGSDGKLLNASLATYGVLTAHDVPNLHQLYDVDVPSTVIPIGSKGAGETATGAVPAVIANALADATGIRFTRLPITPEDVVLALAEKERQGVDRLVWPLTETQGDTQ

SEQ ID NO: 6323 - protein, 390 aa, Azoarcus sp. BH72
MNNTLSIALVTETYPPELNGVSLTVERTLRHLRAAGHRVSLVRPRQQADGDAAEGTGETLVHGLPLPRYPGLQFGLPAPRRLLRLWQAERPDVVHIVTEGPLGWSALAVARHLGIAVTSDYRTHFQKYSGYYRLGVLSWPIAAALRTFHNRCDATFVPTRALAAEMEAQGYRRLVCVGRGVDADLFSPFRRSPMLRARWGASEWQPVLMHVGRLAPEKNPLLVRAAFRAVRAERPDALLVWVGDGPMRARLERDAEGEIFVGTCRGEDLARHYASADIFLFPSLSETFGNVVLEAMASALPIVAFDNGAAGEHLIDCISARVVPVAAGETGFIDAARSLALHSAQQRFLGAVARDTTRRLTWPQVLERFEAELATCAARHSPVGHVAPAA

SEQ ID NO: 6324 - protein, 1249 aa, Oryza sativa
MATTRPPASHPAKSWRNLSPSPQPPGGFPPPTAVAPRRRAPPPPPPPPADADAASSSRGPGDDEGSGRAGASQEAGGGGCGVTPYEQARKALALRSPFDGDEAVGRDALLPARVARWAAVGDVRKKHKKAQQPEAAAAAAAAAVEQQPKPSSGSKEFWDLMEPYFREINWDDFEALMQAPLLGFNGPLDPCFLVPFVGSGKEFGENYDPSCVVVEDESSHLNSNLGKDSDELESSIVRSKQDSHGSSDFVGGNMDPVINNGANDEHGEQDMQEVVLQEEQPMEIEQDHGRSDAIALPPDTEESDVSLNWLLGARDRFVLTSERPNKKRKLLGADAGLERLVQLPPLEGEAGTTCDEKGALKPVKRDSGQIADGGNLKFVHLFCSLWTPEVVVEDLNSMEPVTNVGDIQENRTKLVCSLCKVEMRAFCLKHSTVQETISIQNDRICAEEDTSQIELDDASLATQKIQQLRLTRNNKDKFTSSMIASSCSSSLKQTTELATSPSTARSVESQETQITDMAVDRPIGDRCLVSNSGDVSTALRKLIDQGMVNVGDIESELGVSSESLEAALVPETSTFSPGLKLKIIKLLQNTIRVPSVQEKCSKEGSLALQGTVFTGESKSLTDTQICSELEEGISSFDHCCPEGDNTNKDWADSVENGFHNCGEDCISGKCFLNSSTKLEQLADIAVADQVSKAKSSGILEHSPHDEIEGELLHLQSRLLDDVGGAKQRYEDLVLKIVQSLSHDLDSFNKRKWDHIIANQFLRDLREAKKRGNTERRHKEAQAIMAAAARCILPTSRNAPVRKVAECDVLSAKQELFVCLQSVPVAVPAKQEVHSPKQESIPKFNTGSSRVSQLISVQQANDSSPNSKVSADANIGSFDLAKFSKKNALPCDICMRSETVLNRIFVCSSCKAAVHLDCYRSVTNPTGPWKCELCQEMPSDVVAGSQSDCDGSKPCLLQCDLCHGTSGAFRKTIKGRCIHAFCAEESLPKDKDTCAICHRNVGSCLKCSTVDCQITFHPTCARDAGFYMDTKTIGSTLEHKAYCGKHGIEQRKADLLQLHGPEEVKNMKQMRVDLEVLRLICERVVKREKLKKDLVVCGHDTLAARRNSIAYSTRTSYCGSGPGASSESATTSVNNSYSGLMQRTDDVAVDSIISRKPTVRFSLNNSDADRNTADSSTSSISYKQKLDDRESLADKNLPKKPATAMQISEEGETKSSDKKNQRPPKSIVYTRRSALSKKRQLSQNVEGPGG

SEQ ID NO: 6325 - protein, 403 aa, Thermus thermophilus HB27
MRLYRVGLFTDVYFPNPNGVTTSVYLLLRELRRMGHEAWVIAPAHPEAPENEEGVARVPSVAYPFYEGQQIALPSARHLPTEFELVHTHTPLTLGVWGLRIARNKNLPHVSTFHTHYEKYAHYVPGLAFLDKYTGIVPRLAKAFYNRVEVVIAPTEPVKRLAESYGIERPIRVIPTGIDNRLLEEAPLPSPSPWPEGKRRLITVGRLGKEKSFDVVLKAVAELAREEDVFLVHIGEGPELPHLKALAKELGVADRVLFLGPVPYRRIGGYYRLAELFLFASETETQGLVIWEAQAMGVPVVAVGAEGVLEGVEDGKTGFLVPPGDFRALAEKALELLKDEERRRRFSLQARAFALKRSAETIAEQIVAVYDEASEILRVEPRRLIFPFPRLPRSSLEDRPGGF

SEQ ID NO: 6326 - protein, 465 aa, Oryza sativa
MMMMNYRALWLWLSVAIVFSVQSCRALAAGEGSKEADKIAALPGQPPDVKLQQYSGYINVNETSGKSLFYYFVEASVDAAHKPLLLWLNGGPGCSSMGIGAFQEIGPFRVDTDGKTLCRNPHSWITAANLLFLESPVGVGFSYAAVKPQEVYSTIGDNMTAHDSHTFLLRWLDRFPEYKTRDLFIVGESYAGHYVPELAVTILDNNLLPHATPIKLKGIAIGNGILEFAAEQTQLYEYLWQHAFISDSAHALITQSCKYPDDHPSALCESARKAAYSRIGNIDIYNIYSSTCHEQKVRPSASKCMDLADPCSQYFVEAYMNQPQVQKTIHANTELKYPWTRCRVYNLDHFGDSPKSMLPYIKAVITGRIRIWIFSGDLDAMVPVTATRQSMERLQLRVAADWRPWSADGKDVAGYVIAYDGLVFATVRGSGHMAPIDQPERALVLVSSFIRGQPLPPPQPDQHDA

SEQ ID NO: 6327 - protein, 377 aa, Azoarcus sp. BH72
MHVCDATMFYSARSGGIRRYLQEKRRWLQARPGYRHSLVLPRLAAGAAECAIEVPSVPLPFSQGYRLPLMRESAVRALAELRPHVIEAGDPYQFAWAALDAGQRLGVPVVGFYHSDVPRLFGRVGGAQVERLAESYLRRLYSRFDLVMAPSACMTERLRELGLEHVVRQPLGVDTRLFRPRPARNRKLWRGRLDAGDEDRLLLFVGRFAHEKNLPVLQAMMDRLGPGYLLVLVGNGTPPAAREDTRVVPYIAEPARLASLIAACDLFVHAGDQETFGIAPLEAMACGLPVVAARAGGLAETVDAQVGRAVPVDVPPADNPEPLAAAMADAVRELFDYGLQPLRSAARKRAESYDWERILPDIVGRYAALAGTPALPQ

SEQ ID NO: 6328 - protein, 154 aa, Bordetella pertussis Tohama I
MTPLIGKPAPLFTAESTIGPVSLDQCQGRAVVLYFYPKDNTPGCTTESQDFRDLYEDFLAASTIVLGVSRDSLKSHENFKTKYELPFPLISDADETVCNLYGVIKQKNMYGKQVRGIERSTFLIDAYGVLVQEWRGVKVPGHAKEVLQAAKSIG

SEQ ID NO: 6329 - protein, 371 aa, Alkaliphilus metalliredigens QYMF
MTKKIALLTTNFFNPTGSRIIMGGAERYQVDLCRLLRKLGLHVEVWQIGDQWTKEFDGVKIHGIATNKTEYNTFPELNMAFYENSMSFDYSIYFILSLAYPIAHEKSIAISHGAYWDSPGFHTTTGRQEIQQEWLRRMGGALAGPQKLISVDTNTINYFNTTLPSFYHKWEYLPNYVDTGIFYPMEHTENSHNTVRVLFPRRLVPVRGINETMRAAEILTARYPEIEFHFCGRGHDDNIEMLMSQWATSQERCFYYWKSFEMMPEIYQQADIVLVPSRSTEGTSLAALEAMACGKPVIAGLAGGLSDIVLHGYNGYLIKPSVENLVTAIEELVKDKKKRNQMGKRGREIAMSFSKEIWEERWTNVMSTVFR

SEQ ID NO: 6330 - protein, 153 aa, Moorella thermoacetica ATCC 39073
MLKKISFTVNDTPVTLEVDAGETLLEVLRNRLGYTGVKKGCGVGECGACTVLIDGTPVDSCIYLAVWAEGKKIITIEGIAKNGELSRVQKAFIEEGAIQCGFCTPGYVLTATALVESGKKYSREEIKRELAGHLCRCTGYQNILRAVEKALND

SEQ ID NO: 6331 - protein, 1003 aa, Debaryomyces hansenii
MGVPALFRWLSRKYPKIISPVVEDDVTQEIGAAQFSDPNPNGELDNLYLDMNGIVHPCSHPEHKLPPETEDEMFLDVFKYTDRVLLMARPRKVLMIAVDGVAPRAKMNQQRSRRFRSAQDAKIAHEEKERQIRERESRGESIDDAIKGKKSWDSNAITPGTPFMDSLAQALRYWVAYKLATDPGWANLQVIISDATVPGEGEHKLMSFIRSQRSDPEYDPNTKHCIYGLDADLIFLGLATHEPHFRVLREDVFANQSRQMRISDQLSMTQDQKDSIAEQDAKKPFLWLHVNVLREYLEIELYNPHLSFPFDLERAIDDWVFMCFFVGNDFLPHLPSLDVRDNGIDILVNCWKRMLPKLRDYITCDGNLNLESVEKLLSSLSYKEDEIFRKRHEGEKRREENDKRRKLAQEEEKALKNQYIPQVSKGSDKAPLTADINMPLLSTSGDAVEGYAQLSNKDIVENRDVITKANMSNADAAAALKKLLDSKNNKESDKNVSASAAIQEQQNKSDINTTENSKKRPIDQVEAELPKPDENGDSVRMWEPGYRQRYYQSKFGVVSEEEINKIRRDMVRCYLEGISWVLLYYYQGCPSWQWYYPYHYAPFAADFVNINDIIGEQGIKFTLGEPFKPYEQLMSVLPAASGHNLPEVLRILMSDPSSEILDFYPEEFQIDMNGKKMSWQGIALLPFIDENRLLEALEKRYHLLTDDERERNTLKNEVLFISNQNKNYKRFYNELYDNNVKELKFRFSRSSLAGTVIKNEYFVPDGITKFPLSEGDMPDLNNIEFFQSSYKMPTKKMGKSMLINGYISHTRTLTQEDRDSILHGNQRNGGYNRFRTPNDNSGYVNKGPSGKEDYLIYSMRRGGYRAFMHNLKNQNQQHQQPVPMNAMANNSYDNQYNSYSNNNNYNNNYNGGYPNQSNNNYSNQNSYNNYSNQNSYNNYNNQNSYNNYNNRNNHGNYNNYNRYNNQGSNYDRQGQGNASSNRSGYIPAPNRTGNFRNRNGYNR

SEQ ID NO: 6332 - protein, 763 aa, Moorella thermoacetica ATCC 39073
MASTAVGKSVTRVDAVAKVTGQAKYTGDFMFRDMLVGKVLRSPYAHAIVKNIDVSQARALPGVEGVLTYKDVPRNKFPTAGHPYSLDPAHGDKADRTILTDKARFVGDAIAAVIARDELTAAEALKLIKVEYEVLEPLLTPEAAMREGAPLIHEDCPGNILSASGYAIGDVDEAFKEADYIFEDELETSIVQHCQLENHISCAYVDSDGRIVIITSTQIPHIVRRIVGQALGIPWGRIRVIKPYVGGGFGSKQDVCTEPLAAAMTLAVGGRPVKLELSREECMIATRTRHAFKFKIKTGVSRDGRLIGMHIKAISNTGAYASHGHSIAMAGGSKFRILYPMKALKYEPFTVYTNLPVAGAMRGYGSPQITFAVESHLDNIASKLNIDPIEFRLKNLVKEGYVDPLNGNAVRSCGIRECIARGKELIKWDEKKARYKNQTGSRRRGLGMACFSYGSGTYPVGLEIGGARIVLNQDGSVQLQVGATEIGQGSDTVFAQMVAEVLGIPVDMVHVLSTQDTDISPFDTGAYASRQTYITGMAVARAAAEVKEKILDFAWGMTDIPAHALDIKDANIVYKHSGEVVMPLAEVALHTYYDTVFAKPITSDTSNNARVNAFVFGVTFAEVEVDLKTGRIEVLEIYNVHDSGRIINRQLAAAQVHGGVGMGIGYALSEQLLFDEKTGQPLNNNLLDYKLPTIMDIPAIGVDFVETFEPTSPFGCKALGEPPIIPVAPAIRNAVFDATGVAFDRLPMNPQRVFEKFKEAGLI

SEQ ID NO: 6333 - protein, 199 aa, Crocosphaera watsonii WH 8501
MTMEGCLRVGQLAPDFTATVVIDQEFQTKKLSSYRGKYVILFFYPLDFTFVCPTEVIAFSERYEEFSKINTEILAVSVDSEFSHLAWIQTPRTEGGVGDVAYPLVSDLKKDISNAYNVLDPESGVALRGLFIIDKEGIIQHSTINNLSFGRSVSETLRTLKAIQHVQNNPEEVCPADWQEGDKTMIPDPIKSKIYFSAV

SEQ ID NO: 6334 - protein, 161 aa, Moorella thermoacetica ATCC 39073
MPGFKLKVNGREYQVEAPADITLLELLREYLGLTGTKEGCGKGECGACTVLLDGQAVNSCLIPAAKAEGAEVLTIEGLASPDGKLHPLQEAFITEGAVQCGFCTPGMILSAKALLDSNPRPGREEIKMALSGNLCRCTGYAKIIAAVEKAAAVMAAAGRKN

SEQ ID NO: 6335 - protein, 408 aa, Bifidobacterium longum NCC2705
MVNMKNRFTFRIHRTVSGNTRFSNQSHSPFVWERRFTNATQQNPHNPSNEGLHMTIHNSLAELIGNTPLVKLNHIPQAAGVKATIAVKVEYFNPGGSSKDRIAERIIDAAEQSGQLKPGGVIVEPTSGNTGVGLALVAQQRGYRTIFTLPDKVSESKRAVLRAYGAEVIVTPTDAGPDDPRSYYQVAERLANTIPGGFRPNQYDNPNGPLSHYYTTGPEIWEATDHKVTHFVAGIGTGGTISGTGKYLKEASNGAVKVIGSDPEGSIYSASSRDEVHQYDIEGVGEDFYPKAFDRNITDDIVRVSDAEAFEMTRRLAGEEALLVGGSSGMAVASAIKYALANDLDENQIVVVLAPDSGRSYLEKIFNDDWMRANGYGDIVERTSKPSLAEQYLNGAPSDEGAGDGLHN

SEQ ID NO: 6336 - protein, 328 aa, Prochlorococcus marinus str. MIT 9301
MAKIYEDNSFAIGNTPLVKLKSVTKNAKATVLAKIEGRNPAYSVKCRIGANMIWDAEKSGKLTKDKTIVEPTSGNTGIALAFTASARGYKLILTMPESMSIERRRVMAVLGAEIVLTEASKGMPGAIAKAKEIAESNPSQYFMPGQFDNPANPEIHFKTTGPEIWDDCDGEIDVLVAGVGTGGTITGVSRYIKQEKGKNITSVAVEPSHSPVITQTMNGEEVKSGPHKIQGIGAGFIPKNLDLSIVDKVEQVTNDESIEMALRLAKEEGLLVGISCGAAAAAAVRLAEQDEYAGKTIVVVLPDLAERYLSSIMFTEVPSGIIQEPVKA

SEQ ID NO: 6337 - protein, 1359 aa, Arabidopsis thaliana
MGSLKKDGEIGDEFTEALLYVNGVRRVLPDGLAHMTLLEYLRGLTGTKLGCGEGGCGACTVMVSSYDRKSKTSVHYAVNACLAPLYSVEGMHVISIEGLGHRKLGLHPVQESLASSHGSQCGFCTPGFIMSMYSLLRSSKNSPSEEEIEECLAGNLCRCTGYRPIVDAFRVFAKSDDALYCGVSSLSLQDGSTICPSTGKPCSCGSKTTNEVASCNEDRFQSISYSDIDGAKYTDKELIFPPELLLRKLTPLKLRGNGGITWYRPVCLQNLLELKANYPDAKLLVGNTEVGIEMRLKRLQYQVLISVAQVPELNALNVNDNGIEVGSALRLSELLRLFRKIVKERPAHETSACKAFIEQLKWFAGTQIRNVACIGGNICTASPISDLNPLWMASRAEFRITNCNGDVRSIPAKDFFLGYRKVDMGSNEILLSVFLPWTRPLEYVKEFKQAHRRDDDIAIVNGGMRVFLEDKGQQLFVSDASIAYGGVAPLSLCARKTEEFLIGKNWNKDLLQDALKVIQSDVVIKEDAPGGMVEFRKSLTLSFFFKFFLWVSHNVNNANSAIETFPPSHMSAVQPVPRLSRIGKQDYETVKQGTSVGSSEVHLSARMQVTGEAEYTDDTPVPPNTLHAAFVLSKVPHARILSIDDSAAKSSSGFVGLFLAKDIPGDNMIGPIVPDEELFATDVVTCVGQVIGVVVADTHENAKTAAGKVDVRYEELPAILSIKEAINAKSFHPNTEKRLRKGDVELCFQSGQCDRVIEGEVQMGGQEHFYLEPNGSLVWTVDGGSEVHMISSTQAPQKHQKYVSHVLGLPMSKVVCKTKRIGGGFGGKETRSAFIAAAASVPSYLLNRPVKLILDRDVDMMITGHRHSFLGKYKVGFTNEGKILALDLEIYNNGGNSLDLSLSVLERAMFHSDNVYEIPHVRIVGNVCFTNFPSNTAFRGFGGPQGMLITENWIQRIAAELNKSPEEIKEMNFQVEGSVTHYCQTLQHCTLHQLWKELKVSCNFLKARREADEFNSHNRWKKRGVAMVPTKFGISFTTKFMNQAGALVHVYTDGTVLVTHGGVEMGQGLHTKVAQVAASAFNIPLSSVFVSETSTDKVPNASPTAASASSDMYGAAVLDACEQIIARMEPVASKHNFNTFTELVSACYFQRIDLSAHGFHIVPDLGFDWISGKGNAFRYYTYGAAFAEVEIDTLTGDFHTRAADIMLDLGYSLNPAIDVGQIEGAFVQGLGWVALEELKWGDAAHKWIKPGSLLTCGPGNYKIPSINDMPFNLNVSLLKGNPNTKAIHSSKAVGEPPFFLASSVFFAIKEAIKAARTEVGLTDWFPLESPATPERIRMACFDEFSAPFVNSDFYPNLSV

SEQ ID NO: 6338 - protein, 1364 aa, Arabidopsis thaliana
MEQNEFMEAIMYVNGVRRVLPDGLAHMTLLEYLRGLTGTKLGCGEGGCGSCTVMVSSYDRESKTCVPSYTVHTGNFYCRHYAVNACLAPLYSVEGMHVISIEGVGHRKLGLHPLQESLASSHGSQCGFCTPGFVMSMYALLRSSKNSPSEEEIEECLAGNLCRCTGYRPIIDAFRVFAKSDDALYSGLSSLSLQDGSNICPSTGKPCSCGSKTTSEAATCNEDRFQSISYSDIDGAKYTDKELIFPPELLLRKLAPLKLGGNEGITWYRPVSLQNLLELKANFPDAKLLVGNTEVGIEMRLKRLQYPVLISAAQVPELNALNVNDNGIEVGSALRLSELLRLFRKVVKERPAHETSACKAFIEQLKWFAGTQIRNVACIGGNICTASPISDLNPLWMASRAEFRIINCNGDVRSIPAKDFFLGYRKVDMGSNEILLSVFLPWTRPLEYVKEFKQAHRRDDDIAIVNGGMRVFLEEKGQQLFVSDASIVYGGVAPLSLRARNTEELLIGKNWNKCLLQDALKVIQSDVLIKEGAPGGMVEFRKSLTLSFFFKFFLWVTHHVNNVNPTIETFPPSHMSAVQLVPRFSRIGKQDYETVKQGTSVGLPEVHLSARMQVTGEAEYTDDTPLPPCTLHAALVLSKVPHARILSVDDSAAKSSSGFVGLFLAKDVPGNNMIGPIVADEELFATDVVTCVGQVIGVLVADTHENAKTAARKVDVRYQELPAILSIKEAINAKSFHPNTERRLRKGDVELCFQSGQCDRIIEGEVQMGGQEHFYLEPNGSLVWTIDGGNEVHMISSTQAPQQHQKYVSHVLGLPMSKVVCKTKRLGGGFGGKETRSAFIAAAASVPSYLLNRPVKLILDRDVDMMITGHRHSFVGKYKVGFTNEGKILALDLEIYNNGGNSMDLSLSNLERAMFHSDNVYEIPHVRIVGNVCFTNFPSNTAFRGFGGPQGMLITENWIQRIAAELDKIPEEIKEMNFQVEGSITHYFQSLQHCTLHQLWKELKVSSNFLKTRREADEFNSHNRWKKRGVAMVPTKFGISFTTKFMNQAGALVHVYTDGTVLVTHGGVEMGQGLHTKVAQVAATAFNILLSSVFVSETSTDKVPNASPTAASASSDMYGAAVLDACEQIIARMEPVASKHNFNTFSELASACYFQRIDLSAHGFHIVPELEFDWVSGKGNAYRYYTYGAAFAEVEIDTLTGDFHTRKADIMLDLGYSLNPTIDIGQIEGAFVQGLGWVALEELKWGDAAHKWIKPGSLLTCGPGSYKIPSINDMPFQLNVSLLKGNPNAKAIHSSKAVGEPPFFLAASAFFAIKEAIKAARSEVGLTNWFPLETPATPERIRMACFDEFSAPFANSDFCPKLSV

SEQ ID NO: 6339 - protein, 380 aa, Mycobacterium abscessus
MRIAIVAESFLPNVNGVSNSVLRVLEHFRRTGHEAIVIAPDTPRGQAPAATEYAGVPVHRVPAIMFPKVSTLPLGVPQPRMVRIFREFAPDVVHLASPFVLGYGGLRAAQHLDVPVVAVYQTDVAGFADSYGAGFAARAAWRWTKHLHGRADRTLAPSSSAMEDLAMHGIPRVFRWSRGVDIERFAPSARDDELRRAWSPKGKPIIGFVGRLAPEKHVERLAVLAGRDDLQLVIVGGGVEREALEKLMPTAVFTGELTGSALSRAYASLDVFIHPGEHETFCQAVQEALASGVPSIAPDAGGPRDLVIPGRNGMLLPVADFEARLGMAVDHLVQPATRSRFSAAARRGVLARTWPAICDELLEHYAAAAGTTLGRGIMTA

SEQ ID NO: 6340 - protein, 402 aa, Alkalilimnicola ehrlichei MLHE-1
MSAARPLATAAPGDERPLVAHIIHRLDVGGMENGLVNLINHMPAERYRHAIVCMTRYTDFSQRIHRDDVSLHALHKREGKDLGVHRRLHRLLRSLRPAIVHTRNLATLEAQATAAAAGVRARIHGEHGWDIGDLDGARTKHRLMRRLARPLVGRYIALSRQQLDYLAGAIGVPEGRLHHVCNGVDTHRFRPRRRDEASPLPDGFAPEGSLVVGSVMRMQAVKAPEDLVDAFIALRERAPARFPRLRLVLVGDGPLSERVARRLAEAGVADQAWLPGARDDVAAVMRALDLFVLPSLAEGICNTVLEAMACGLPVVATEVGGNPDLVRPGETGTLVPAGDPSTLARHLQAYLDDPERRQREGEAARARAEAVFSMEAMVEGYMRVYDQALAEHPLPAVPGRRG

SEQ ID NO: 6341 - protein, 769 aa, Silicibacter sp. TM1040
MNQRVEKFGKSQPLARVEDQRLLTGQGRYIEDTMPAGALRAYVFRSPVAHGEITTLNVDDARAAEGVHLVITQADLVDAGIEATLDGALVKNIDGSKAAAPERPVLAGHRVRYVGEPVAVVIADTMDQARDAAELIEFDYEDLDVKLDLAAGGAEIHPEAPQNRAFNWGLGDKAATDAAFEAAAHTVSLQVDDNRIIVNAMEPRGCHATWQDGRMHFYYGGQGVWSMKEQLAKKMHLPAEDVHVVTPDVGGGFGMKAMPYPEYFAVAYAAKVLERPVGWMSDRTEAMLSDNGGRDLTSLAELAFDADLKITAYRVHTHCNLGAYNSHFGQPIQTQLFSRVLAGVYDIQTAWLEVDGIYTNTTQVDAYRGAGRPEAIYVLERVIDRAARDLGVDPMDLRRRNFIAPQKFPYKTVTDETYDVGDFNLVLDRLIKESDLAGFEARRAQDAAEGRYRGAGLCYYIESILGDPSETADVEFLEDGRVNIYVGTQSNGQGHETVFATFLADQTGIPVSAISVVQGDSDRIAKGGGTGGSRSVTTQANATLATVDKMVAAFTPFLAEEMGVDEEAVDFDGETFRAPGSNLTPTVLEAADLAREKGRVDLLRHQAEASLPGRSFPNGAHLAEVVIDRETGQARVDRYTVVDDFGNLINPMLAEGQVHGGVAQGLGQAMLEHVVYDADGQLLTATFMDYAMPRAEDMPWVDFTSEPVPSTQNPMGMKGCGEAGTVGALAAVANAVQDALWDQGIRQVDMPFTPVKLWELMRDVSQAAE

SEQ ID NO: 6342 - protein, 386 aa, Triticum aestivum
  misc_feature (321)..(321): Xaa can be any naturally occurring amino acid
  misc_feature (334)..(334): Xaa can be any naturally occurring amino acid
  misc_feature (363)..(363): Xaa can be any naturally occurring amino acid
  misc_feature (372)..(372): Xaa can be any naturally occurring amino acid
MASAPGGDPVLAACKDKLKHFRLKELKDVLCKIGLSKHGKKQELVDKIVAILSDQQDQASKIDGLPNRLMVGKETVVKIVEDTFRKMREPANAVSASGNQNELGYSVMPMKNPDDSAQLDIKVRCPCGSSMATGSMIQCDHPRCSVWQHIDCVIIPEKTADTAPQELPSSFYCEMCRVSRADPFWVTINHPLLPVSVAPSNIMADGSYTVQYIEKTFPLSRANREMLQKADYDIQVRCILLDDKVPFRMHWPLHSDMQINGNPVRVVSRQATQPLGDNGRHDGLMLTQFLKEGPNKIVLFRSDSRAFCLGVRIAKRRSLEXVLNLVPKEQDGEXFDDALSRVRRCVGGGTEADNADSDSILKXVADSVSVNXRCPMTGSRIKELVG

SEQ ID NO: 6343 - protein, 180 aa, Bacillus subtilis subsp. subtilis str. 168
MAERMVGKQAPRFEMEAVLASKEFGKVSLEENMKNDKWTVLFFYPMDFTFVCPTEITAMSDRYDEFEDLDAEVIGVSTDTIHTHLAWINTDRKENGLGQLKYPLAADTNHEVSREYGVLIEEEGVALRGLFIINPEGELQYQTVFHNNIGRDVDETLRVLQALQTGGLCPANWKPGQKTL

SEQ ID NO: 6344 - protein, 385 aa, Microcoleus chthonoplastes PCC 7420
MRGGPSQAVLAMVKALCTQGIDAEIATTNDNGSDLLDVPLQQPTEYKKVPIWFFSRFSPDVASIREFAFSGQLTAWLWQHITEYDLLHIHAIFSYASTAAMAIARLRGIPYIVRPLGQLCQWSLQQSAGKKQIYLNLIERANLQHSQAIHFTSLQEQREASELNLKPPSFILPHGVSVPAFIPDAHYQLRQRLNVPEDEPIILFISRLHPKKGLEYLIPALGKLADQRFTFVLAGSGSCQYEAEIDALLIAAGIDKRTYRSGFVTGEMKDLLLQGSDVFALTSHSENFGVVVLEALAVGLPVLVTPGVALASVVKQHQLGYVAELDVAAIASAMKQLLNHRQETKVMGNRARQLILEQYTWNRIALNLIEVYTAIIQKYPVPFFY

SEQ ID NO: 6345 - protein, 684 aa, Glycine max
MSLNRGGGGEEDELYEQLWKACAGPHVEVPRTGQRVFYFPQGHMEQLEVSTNQELNQRIPLFKLASKILCRVVNVHLLAEQETDEVYAQITLVPESNQAEPMSPDPCPAELPSPRVHSFCKVLTASDTSTHGGFSVLRKHATECLPALDMSKSTPTQELVAKDLQGYEWRFKHIFRGQPRRHLLTTGWSNFVTSKRLVAGDTFVFLRGNNGELRVGVRRIAPVQSSMPSSVISSQSMHLGVLATASHAVATQTLFVVYYKPRTSQFIIGVNKYLEAMDRFSVGMRLKMRFEGDDSAETDKRFSGTIVGVEDISPHWVNSKWRSLKVQWDEPAAVPRPDRVSPWEIEPFVASASTPSVQPTMVKTKRPRPPSETPDVDTTSAASVFWDAGLQQADMAQKNVLAESKRNDSTGTWHHMQTDMNSKSNSGNAMLRNQTEGSWLSSPHSSCPSHLFQDATDDSKSVSAWPVSKPHSSRLNNDHVLDQVDKESKVETATSYRLFGIDLIDHSRNSPSVEKASAQAGNAPKVTTEGCTSTLTRTDAGHLSDVPMASSKERKQEQQQVSPKETQSKQICRSRTKVQMQGVAVGRAVDLTMLDGYDQLINELEEMFDIKGQLQHRNKWEIVFTDDEGDMMLVGDDPWPEFCNMVRRIFICSSQDVKKMSCGSKLPISSVEDGTVISSDTTET

SEQ ID NO: 6346 - protein, 736 aa, Arabidopsis thaliana
MVGGRRLGKRGSPLLRWSVKQESFSHGFSKSDLQALSSICDAIMPPVPLESLNLEMKLKVLRNDALLSFFKSSSSESHVRPDEVVAELLATKAIPLTVLVVRIVLRILTFRLGTLLLCGEKVLQRWNTQWYNPLARIGFMMIKAIFLFYYFTWTNENSENPVWDAINYSVEIGENEDMEQKERPLDEGIIETAKEDEMTIKQRMINKGLKVTEDRERDTYKIECDAVVVGSGCGGGVAAAILAKSGLRVVVIEKGNYFAPRDYSALEGPSMFELFESNSLMMTHDGRFRFMAGSTVGGGSVVNWAASLKTPDAIIEEWSVHRGISIYSSEKYKAAMGIVCKRLGVTEKIIREGFQNQILRKGCEKLGLDVTIVPRNSTEKHYCGSCSYGCPTGEKRGTDSTWLVDAVNNNAVILTQCKAEKLILADNDANKREESGRRKRCLGVAASLSHQTRKKLQINAKVTIVACGSLKTPGLLASSGLKNSNISRGLHIHPIMMAWGYFPEKNSELEGAAHEGEIVTSLHYVHPMDSTTPNITLETPAIGPGTFAALTPWVSGSDMKERMAKYARTAHIFAMVRDEGVGEVKGDIVKYRLTKADEENLTIGLKQALRILVAAGAAEVGTYRSDGQRMKCDGIKQKDLEAFLDTVNAPPGVVSMSKHWTQSFTAHQIGCCRMGATEKEGAIDGKGESWEAEDLYVCDASVLPTALGVNPMITVQSTAYCISNRIAELMKKRKKD

SEQ ID NO: 6347 - protein, 693 aa, Sulfolobus tokodaii str. 7
MKRLDVIDLIKGKGNYIDDYPFKGKYAVFVRSPYPHARIKKIDTSEAEKKGALVLTGKDIIARRVEAGEREGAGLSTMLMATNKALYVGQPVALVIANDPYEATDLAELIQVDYEPLEPIPNIEKALKGEVYVFDELRSNVVREQSFEFGKISNQGKELELDLYWSRSSGNPIETFGAIVIPTTQGLEIISNQQAGNFVISELEKALGVKVIHKNARQGGSFGSKFSLVRYLSVLAFASLKFKVPIKWIETRTEHLLASNSSGPERKFKIKAYYDSRGKVNFLDIHIWEDVGASLEAGQPFKPLGHLTGPYKIPGIRYTATLVATNKNPPGAFRGAGTPPHTWALERVMDAIADELGLDRAEVRKTNVIDSFPYDSGFAYYDSGNPSGLLEMALSRKDIFSMRDEKTGVGLALSTDPSTPSGSERVKLKIKNGKVVVGLGFGPEGQGNEHTAVLLVSKLLGIPTDLVTYEILDNNELTSSFGPGGSRMAAFTYGAISGAVEELKAKLKREAESLIGNAEYKDGYFLGEHGKIGITQFEGEEVTFTFSLQGKYRFNAYPFACDLAVVRIEDGKIKPIKHVVYIDPGNPIDEDLVKEQVIGGTAIGISIALYESYVYDDQGNLLTTSLADYGLPTALDLPEIEINIVPTPSPVTPGGVKGIGEIPVGVAAAAVTSAVEDVLKRRVKKVPIRLDDF

SEQ ID NO: 6348 - protein, 162 aa, Dehalococcoides sp. BAV1
MTLERWQPGWSLRPWRPFREVLSPGLWNMLTNERDWLPATEMVELKDKYLIKAEMPGINEEDIEVSVSDNVLSIKGEKKCDCEISEESYYFSERSYGSFSRSMTLPNNTDPQNIAATLDNGILEITIPKSSEAKPKKVSVIKAAKPKKTDLNTQSIKPKAQS

SEQ ID NO: 6349 - protein, 535 aa, Aspergillus nidulans FGSC A4
MSSKTTPTVPPVALDSITQHIGNTPLVRLNKLPQNLGINATVYAKLEYFNAGGSVKDRIALRMIEEAERSGRIKPGDTLIEPTSGNTGIGLALVAAVKGYKTIITLPEKMSAEKVSVLRALNATIIRTPNEAAYDSPESHIGVAKRLEKELPNAHILDQYGNENNPLAHELGTAQEIWSQTKGQIKAIVAGAGTGGTITGLSRGLKKHNSNVQVIAADPQGSILALPAALNEEHANEPYKVEGIGYDFIPQVLDQHAVDKWYKTDDKESFQYARRLIAEEGLLVGGSSGSAIAALVKAARDNMFKEGDVVVVILPDSIRSYLTKIQFADDDWLAANDLLPSLPTEVILQSSNKQTQGQDDAFAGSKVSSLRLKPVTTVHSNVPCETAIEVMRDKGFDQLPVLAPSGRKLVGLVTLGNVLSRLTHNRATGRSPVADVMFDFRTISEVVTDPRDMGLASLEPNQNGRDAPKPQTRSRKFVEITMDTSLSVLNRFFEWNSAAIVTERDEGGTLRPVAVVTKVDLLTWMLHHKKNGASE

SEQ ID NO: 6350 - protein, 335 aa, Chlorobium tepidum TLS
MAARKLSEQHEVSLIYRKEAVGKHFDLPKFRLPCLSHIDLYTLFRMVAIIRQNGIEVVIPTKRKDYLLGGLAGKMTGAAMILRLGADRKLKWPWQRFMYHTLSNGIIVNASKIKKTLLETGYIPEAKIRVIYNGLDIAELDRRRSEQTVAKPFPVTITGLGRLTWNKGYDFLIRSFSRFVEASGNRDAGIVLIGDGAQKKEFAKLADELGLADRVLFPGFQQNPYSWLAASDIFAVTSTNEGLPNALLEAMYLGNAPISTRAGGVEEVIDDGRNGLLLDYGDEEALASALQLLVKSPERRAEFARQATTRIVEQFSMERMASEIASFCREVAAKR

SEQ ID NO: 6351 - protein, 154 aa, Prunus persica
MALSLFGGRRSNVFDPFSLDIWDPLEGLGTLANIPPSARETTAIANTRIDWKETPEAHIFIADLPGLKKEEVKVEVDDGKVLHISGERSREQEEKNDKWHRIERSTGKFSRRFRLPDNAKIDQVKASMENGVLTVTVPKEEEKRPQVKAIDISG

SEQ ID NO: 6352 - protein, 642 aa, Arabidopsis thaliana
  misc_feature (197)..(197): Xaa can be any naturally occurring amino acid
  misc_feature (458)..(458): Xaa can be any naturally occurring amino acid
MANRGGEYLYDELWKLCAGPLVDVPQAQERVYYFPQGHMEQLEASTQQVDLNTMKPLFVLPPKILCNVMNVSLQAEKDTDEVYAQITLIPVGTEVDEPMSPDPSPPELQRPKVHSFSKVLTASDTSTHGGFSVLRKHATECLPPLDMTQQTPTQELVAEDVHGYQWKFKHIFRGQPRRHLLTTGWSTFVTSKRLVAXGDTFVFLRGENGELRVGVRRANLQQSSMPSSVISSHSMHLGVLATARHATQTKTMFIVYYKPRTSQFIISLNKYLEAMSNKFSVGMRFKMRFEGEDSPERRYSGTVIGVKDCSPHWKDSKWRCLEVHWDEPASISRPNKVSPWEIEPFVNSENVPKSVMLKNKRPRQVSEVSALDVGITASNLWSSVLTQPHEFAQSCITSQWSSPQQCHRDANEDAKKSDWLNNSYSVSNVAKDSTLNDQMVSPVEQKKPETTANYRFIXLFGIDLMSSSLAVPEEKTAPMRPINISKPTMDSHSDPKSEISKVSEEKKQEPAEGSPKEVQSKQSSSTRSRTKVQMQGVPVGRAVDLNALKGYNELIDDIEKLFDIKGELRSRNQWEIVFTDDEGDMMLVGDDPWPEFCNMVKRIFIWSKEEVKKMTPGNQLRMLLREVETTLTTTSKTDNHSN

SEQ ID NO: 6353 - protein, 327 aa, Oryza sativa Indica Group
MVVLAGPPAVDHIPLLRSPDPGDVFSGVPVVDLGSPGAARAVVDACERYGFFKVVNHGVATDTMDKAESEAVRFFSQTQPDKDRSGPAYPFGYGSKRIGFNGDMGWLEYLLLALDDASLADACTVPSCAVFRAALNEYISGVRKLAVRVMEAMSEGLGIAQADALSALVTAEGSDQVFRVNHYPPCRALQGLGCSVTGFGEHTDPQLVSVLRSNGTSGLQIALRDGQWVSVPSDRDSFFVNVGDSLQVLTNGRFKSVKHRVVANSLKSRVSFIYFGGPPLAQRIAPLPQLLGEGEQSLYKEFTWDEYKKAAYKSRLGDNRLAQFEKK

SEQ ID NO: 6354 - protein, 168 aa, Bacillus sp. YN-1
EFIEVSEESFKGQWSVLCFYPADFTFVCPTELEDLQNEYAALKELGVEVFSASTDTHFTHKGWHDSSETIGKITYAMIGDPSQTLSRNFDVLNEVSGLADRGTFIIDPDGVVQAAEINAEGIGRDASTLVNKIKAAQYVRNNPGEVCPAKWQEGDETLKPSLDLVGKI

SEQ ID NO: 6355 - protein, 195 aa, Mycobacterium avium subsp. paratuberculosis K-10
MPLLTIGDQFPAYELTALIAGDLSKVDAKQPGDYFTTVTSEDHAGKWRVVFFWPKDFTFVCPTEIATFGKLNDEFEDRDAQVLGVSIDSEFVHFNWRAQHEDLKNLPFPMLSDIKRELSLATGVLNADGVADRATFIVDPNNEIQFVSVTAGSVGRNVEEVLRVLDALQSDELCACNWRKGDPTLNATELLKASA

SEQ ID NO: 6356 - protein, 911 aa, Physcomitrella patens subsp. patens; identical to SEQ ID NO: 2658

SEQ ID NO: 6357 - protein, 315 aa, Synechococcus sp. PCC 7335
MKIANSVTELIGHTPMVRLARIPESEGCVAQIVVKLEGMNPSASVKDRIGISMIEAAEEAGDIVPGKTTLVEPTSGNTGIALAMAAAAKGYRLVLTMPETMSSERRAMLRAYGAELELTPGIEGMSGCIQRAQTLVDTLPDAYMLQQFDNPANPLIHRRSTAEEIWQDTEGQADFLVAGVGTGGTITGVGEVIKQRKPSFRVIAVEPVNSAVLSGRMPGPHKIQGIGAGFVPKVLKQDLIDEVVTVTDDEAIAFGRRLAKDEGILSGISSGAALCAAVKIAKRSENKGKLIVMIQPSFGERYLSTPLFQDPKPIG

SEQ ID NO: 6358 - protein, 229 aa, Rhodopseudomonas palustris CGA009
MHDLVRRVTQHSTNVQETVPMSLHIGDIAPDFTADTTKGKISFHDFIGNSWVFFFSHPADFTPVCTTEMGKTAKLAQPFASRNVKPIGLSTDTVDEHLKWIADVNDTQQTDLQFPIIADPELKVAKLYDMIHPNQSDTAAVRSVFIIDPNKKIRLTMTYPMNVGRNFDEILRVIDALQFADKHTVAAPADWRPGDKVIIPLSVKGEAATKAFPQGWEEPRPYLRLTTIK

SEQ ID NO: 6359 - protein, 723 aa, Sulfolobus solfataricus P2
MAREIGRPVKRIIEDPSLITGKGRFVYDIDFKGTLYAVFIRSQYSHAKIKSIRCPEGALCYTAKDLPELIGLAKEEAIYQGQPLAVVLAEDEYKARDLAEQVEVEYEPLPSVINVEEALKDVKKAKSDLSSNIVLQDNVEIGDVNSAFKKAYKVVEAEIINQRVIPSAMEPRGAVAYFDGRRLTVWSSTQNVFGLKDTLLQFLSKYGVNDVRVVQPFVGGAFGSKIYIYPEEVIISYLAVLTGKPIKWFNTRTEEFMSTNHGRDMRLKFKAAFDKEGKLLGIEGTLIMDLGAPIMEIYEDSFGMATTAARLLVGRYKVNAIKVKVLGIATNKTFIGPYRGAGRPEATYFIERILNLGARALGVDQFEIREVNIIDEVSHYNTPTGMYYDSGKYREALKIAKPSYHELLRKRDELRAKGKLAGVGVAIVSEIASFGTGTARVQLTPNGRIQVVSGFTPHGQGDATAFAQIAAEVFDVDVGKVDVLWGDTDLISHGGLTGGSTTLTVGGSAVYEASIRLKEKLLRVVGEKLGVRPEEIEYKNGKFYHKKGEMSLADTAREALRMGVYPEEQYSYTIRPYTSPYGIHMALVEVDRETGFVKVLEYKAFDDVGVVVNPLLAEGQVHGGALQGISQALYEETVYSPEGSLITSNFSDYVIPTAMEAVKVEWKSLALAKSDTPLGSKGIGELPTIASTPTILHAVEDAIGKNIYTMPTKPELILKLLNS

SEQ ID NO: 6360 - protein, 342 aa, Brucella suis 1330
MFNSVLDTIGNTPLIRLSKASELTGCDIYGKAEFLNPGQSVKDRAALYIIRDAEKRGLLRPGGVIVEGTAGNTGIGLTMVAKALGYRTAIVIPETQSQEKKDALRLLGAELIEVPAAPYRNPNNYVRLSGRLAEQLAKTEPNGAIWANQFDNTVNRQAHIETTAQEIWRDTNDQIDGFVAAVGSGGTLAGTAIGLKERNHNIKIALADPHGAALHAFYTTGELKAEGDSITEGIGQGRITANLEGFTPDFSYQIPDAEALDILFALVEEEGLCLGGSSGINIAGAIRLAKDLGPGHTIVTVLCDYGNRYQSKLFNPAFLRGKSLPVPRWLEKKTEIDIPFEG

SEQ ID NO: 6361 - protein, 152 aa, Streptomyces avermitilis MA-4680
MAIQVGDKAPDFELKDNHGATVRLSDFRGEKNVVLLFYPFAFTGVCTGELCALRDELPKFVNDDVQLLAVSNDSIHTLRVFAEQEGLEYPLLSDFWPHGNTSRAYGVFDEDKGCAVRGTFIIDKEGVVRWTVVNGLPDARDLNEYVKALDTL

SEQ ID NO: 6362 - protein, 444 aa, Streptococcus pyogenes MGAS315
MRIGLFTDTYFPQVSGVATSIRTLKEELEKEGHEVYIFTTTDRDVKRFEDPTIIRLPSVPFVSFTDRRVVYRGLISSYKIAKHYNLDIIHTQTEFSLGLLGKMIGKALRIPVVHTYHTQYEDYVSYIANGKIIRPSMVKPLLRGYLKDLDGVICPSRIVLNLLEGYEVTIPKRVIPTGIPLEKYIRDDITAEEVTNLKAELGIAGDETMLLSLSRISYEKNIQAIINQMPAILAENAKIKLIIVGDGPYLQDLKHLAMQLEVDKHVTFTGMVPHDKVALYYKACDFFISASTSETQGLTYIESLASGTPIIAHGNPYLDDVVTDKMFGTLYYAETDLTDAIIDAILKTPVMDKRLLAKKRYEISAQHFGKSIYTFYLDTLIARNSKEAQKLSLYLNHSGKSSSLKLVQGAIHLPKRAAKVTAITSVKVVKAPIKLVHAIKDFLD

SEQ ID NO: 6363 - protein, 153 aa, Burkholderia sp. 383
MPTSFVLNGKNVTLDADPSMPVLWAIREHAGLTGTKFGCGMAQCGACTVHLEGQAVRSCVLPLAGIAGKHITTIEGLQSKPAHAVQAAWVKLQVPQCGYCQSGQIMSATALLEQNPKPTDADIDAAMNGNLCRCATYARIRAAIHDAAATLGA

SEQ ID NO: 6364 - protein, 566 aa, Zea mays
MGTSFLMGVNIFHGYGFGIAKPGGKLLEMLSQIEHPGLCWLRGRASHVPCLDSGLADWLAGLQSAALPMQTSTPPLRTARMGARGKIPTPTPARRTTSTRYYSVDRLDSRSHRLTGRRVQGQAARRTRWGPHTRHCGRILVGGLVPGQLFSPSSTAVSRLISIGSWRESVRFPVCRSASFPFLWLRLGSFLRSSYFFSTTSFIFFFFLPPYTATTSPPQTTSPPSSSRFPYARPVASRCCCWVRPRVAVKGEAASARRRRHLPRVGCKSSSRLGRGRSRRGRAKRDKGGRGTRTQEADAEWSSKPRRIALFVEPSPFALVSAFSSRPFSAASQIRVDRIGVYISGYKNRFQNFIKHLREMGDEVLVVTTHKGAPEEFHGAKVIGSWRVMERLPGARIAFVGDGPYRSELEKMFTGMPAVFTGMLQGEELSQAYASGDVFAMPSESETLGQVVLESMASGVPVVAARAGGIPDIIPKDKEGKTSFLFTPGDLDECVRKIEQLLSSKDLRETIGMAAREEMEKCDWRTASKKIRNEHYSTAISYWRKKMGKTNQTSLFQDSSVAALSN

SEQ ID NO: 6365 - protein, 380 aa, Bacillus cereus E33L
MRVAIFTDTFTPQVNGVAKTLERLTRYFQKEKIAYSVFAPQHTAEDNFVANVNKMRSIPLTILYPECRFSFPTPRIRRELLSFKPDMIHIATPFNMGLCGLYYAKKLNIPVVGSYHTDFDAYLRYYKIEFLSNMLWNYLKWFHSHMQKNFVPSPETLHQLKHKGFQALSIWGRGVDCNLFHPSYNTDLFRKKYNITAKYVLSYVGRIAPEKDIDTLQNLIVKSAHTRNDIHWLIAGDGPLSTSLREAVPKTNVTFTGYLQGGDLAEAYACSNMMVFPSATETFGNVVLESLACGTPVIGANSGGVKNIITDGKTGVLCPPKNEDAFLSSIYFLLQNEEKLEQMGIAALSYAKSKSWDEIFRGLLNQYEEVLQHNASELLA

SEQ ID NO: 6366 - protein, 149 aa, Thermodesulfovibrio yellowstonii DSM 11347
MSIVKWSPLKEIEEIRKEMDRLFEEFLSPVRRRRAVTTEGVISPNVDIFERGREVVIQVELPGVNKDEVDLTITDDRLIIKGEIKKPEGISEDDYILNERSYGPFSRTVNLPTDVDKSSVKANIKNGLLEIVVLRKEESKPREIKIPLE

SEQ ID NO: 6367 - protein, 225 aa, Arabidopsis thaliana
MALARLALRNLQQKLSPSLMGQSCERGLVGNRHNPMKLNRFMATSAGEQEDKMNTEVSVSEKKSPRQNFPRRRGRKSLWRNTDDHGYFTPTLNGNTLIQATENMNRIFDNFNVNPFQLMGQVKEQDDCYKLRYEVPGLTKEDVKITVNDGILTIKGDHKAEEEKGSPEEDEYWSSKSYGYYNTSLSLPDDAKVEDIKAELKNGVLNLVIPRTEKPKKNVQEISVE

SEQ ID NO: 6368 - protein, 730 aa, Sulfolobus tokodaii str. 7
MYVGQRVKRKEDLKLITGSGRYIDDIEIPGNLYIAILRSSVAHAKLKKIEYSDVLKLNGVYGVITGLTIPVENRPRNFPMAKDEILYMGQPIAAVLAKDRYVAVDALDYISYDYEELPAVIDPEEAINSKVKAIEDYDNIIYKKTYSGGNAEEAYEKSDVKIEEKLVISRVYAAPMEPRGLVVDYQQDRLTVYASTQSPHYMRSFLLSAFGDKVNDIRVIQADVGGAFGSKLFPYPEDYIAVFAALTYKRPVKLVNTRRDDLFSTYHSRGQIHKVKVGASKDGKINSILDDLIIDLGAAWHGTYLADIPATLITGPYDIKNAKVNVFGVLTNKTPLDQYRGAGRPEAAFVYERIMDIVADELKIDPIELRRKNIIQSTPYKNVMGLTYDSGDYNALLTKAESYYREMEQRAEELRRQGKRVGVGLSFYIEQNNFGPWESASVRLLSNGKVEVVIGAAPHGQGTATGIAQIVADELEISIDDVEVTWGDTDKISNAFGTYGSRSLTLAGNAALLASRKLKENIMKLAAQFMKSDVEELQYKDGKVFNPKTGKSMTLKEIAIKVTSNLGGVWRYKAEPTLEATASFGFDNYTFPYGSHIAMVEVTDEGVVKVLDYVAIDDIGVVVNPMLAEGQVHGGVIQGFGETLLEQIVYDNNGNLLTSTFADYLIPSAVESFNMKWFYTEIGKSNAPLPAKGIGEGATIGAPPALIRAIERAIGKRLTALPVKMEELSK

SEQ ID NO: 6369 - protein, 379 aa, Cytophaga hutchinsonii ATCC 33406
MKIGIVCYPTFGGSGVVATELGKALAELGNPIHFITYSQPHRLDFFHENIFYHEVTVKSYPLFEFAPYEVILASKIVDVVKHEKLDLLHVHYAIPHASAAFMAREILKTQGIYIPIITTLHGTDITLVGKDPSFAPVVAFCINQSDGVTAVSEDLKKDTFEHFDIHREIEAIPNFIDVSRFRKQKKDHFKKAICPNDEKLIVHTSNFRKVKRVEDVVSVFNIVRQTVPSKLLLVGDGPERVLIEGMCRELGICNDVRFLGKLDAVEEVLSVADLFIMPSEKESFGLAALEAMACEVPVISSNAGGLPELNIQGKTGFLSNVGDVKEMAKNAIFILDNANLQEFRKNALERAKEFDSNHIVPKYLEYYQQVLDKSHSFVK

SEQ ID NO: 6370 - protein, 1012 aa, Bradyrhizobium japonicum USDA 110
MSPSRQRTRREVCRDMLQAVKSANPGSSDEPWVGRSIERVEDAALLSGRGRFIDDLGVQPGTLHATILRSPHAHADILSIDAEAAKRLPGVAAVLTGSDVKAVTTSLVVGVKAPVECWPIATDRVRYVGEPVAVVVATDRARAEDAAELINVEYRPRGAVVDPLGAIAPGASVLHDGFPGNLASDRSFRYGDPEEAFADAPHRFSIDIRYPRNSCTPIETYGVVASHDAGEDAFEVLANFQGPFSIHTVIARALKVPGNRLRLRTPPDSGGSFGVKQGVFPYIVLIAAAARVTGRPVKWIEDRLEHLTASVSATNRATTLSAAVGVDGKILALDWDQVEDCGAHLRAPEPATLYRMHGNLTGAYDISHVKVRNRVVVTNKTPTGLNRGFGGPQVYFALERLVQRIAIGLGLDPLDVIKRNLIEANAFPYRTAMGALLDSGNYHEAIARAVEQGRLAELKARRDEARAEGRLYGIGFTAVVEPSVSNMGYITTVLTAAERRKAGPKNGAQATATVGLDPVGSVTVHVASVPQGQGHRTVVSQVVADVFGLQPRDIRVNTEIDTAKDAWSIASGNYASRFAAAVAGTAKIAAERVAGKLARIAASQLNVEAPDIVFARGFVASKHNPENRIAFSRVAALSHWSPGSLRDDAGQTIRETVFWTPPELTPPDDEDRINSSLCHGFIFDFCGVEIDRTTLETRIDRYVTMHDCGTILHPGMVNGQIRGGFTQALGAALFEEYAYTEDGSFLTGTLADYLLPTTTEVPEPEIIHMETPSPFTPLGAKGVGEGNCMSTPVCLANAVADALGVADITLPLVPARLAEMVRGAEPPPPAGGATAAPVREGDRRLRGEGQASVKSAPEQVWAMLLDPATLQSVIPGCQSVDKVTETHFRADVTLGIGPVTGRYRADVELFDLDPPHAVTLRGGASGALGFGSADGRITLAPDGNGGTKLTYSYDAAIGGKVASIGGRLLDGATRVIIGQFFTALARKAGGGGAEGGGFSLFALLAGLFGGRR

SEQ ID NO: 6371 - protein, 231 aa, Glycine max
MAQALSTSSLLLSQKTGSYVKPQNNVIVPCMASFPSRKEFPRLGRVRAQASGDNKDNSVEVQHVNKGDQGTAVEKKPRRTAMDISPFGILDPWSPMRSMRQILDTMDRVFEDTMTFPGRNIGGGEIRAPWDIKDEEHEIRMRFDMPGLAKEDVKVSVEDDMLVIKGGHKSEQEHGGDDSWSSRTYSSYDTRLKLPDNCEKDKVKAELKNGVLYITIPKTKVERKVIDVQVQ

SEQ ID NO: 6372 - protein, 218 aa, Triticum aestivum
MPGLTIGDTVPNLELDSTHGKIRIHDYVGNGYVILFSHPGDFTPVCTTELAAMANYAKEFEKRGVKLLGISCDDVQSHKEWTKDIEAYKPGSRVTYPIMADPDRSAIKQLNMVDPDEKDGQGQLPSRTLHIVGPDKVVKLSFLYPSCTGRNMDEVVRAVDSLLTAAKHKVATPANWKPGECVVIAPGVSDEEAKKMFPQGFETADLPSKKGYLRFTKV

SEQ ID NO: 6373 - protein, 172 aa, Bradyrhizobium japonicum USDA 110
MTRLKADRRHAVRFALNGNPVEGEAEPRMLLSDFLRHQLGATGTHVGCEHGVCGACTIVVDGMLTRSCLTLAAQVDGCELKTVEGLAPSADRLGVLQQAFRRNHALQCGFCTAGILMSLDHYLANNPAPTEAEIRDLLSGHICRCTGYTPIIQAALEAAAELASSKNETSDA

SEQ ID NO: 6374 - protein, 396 aa, Thermotoga sp. RQ2
MNTLLITNLFPKVSNPNSGIFIVQRLKHYKTYGVNFDAVSPAYENSKLVVLLKKLLKKQNGEYPLEEYERVKFKPVLIHRNLHTVLMNKISRSYFVKIAERFVGAIEQSFDFREYDLIHAHGMYSVPAGLIAKILAEKYRKPFIVTLHGSDVNILMPRRREIYVSILESASATIFVSKALLEKAKSLGFSGKNAVVIPNGYDETIFKPMDKKAVRKELGIHREGYKYVGFVGNLIPIKRADKLGEIFHLIAKEIPEMFFIIVGDGPLRKKIEKETKGLNIVFTGRIPQKDVAKYMNAMDVMVLPSREEGFGAVVIEAQACGTCVIGSSNGGIPEAIGFPKCVVEEGDQFEERFAKRVVEVLKEGYDMNRILERVKEFTWKNIVGKEIDVYGRVVQT

SEQ ID NO: 6375 - protein, 832 aa, Arabidopsis thaliana; identical to SEQ ID NO: 4110

SEQ ID NO: 6376 - protein, 379 aa, Synechococcus sp. PCC 7002
MRIALFTETFLPKVDGIVTRLRHTVDHLQRSGDQVMVFCPDGGLREHKGAVVYGVKGNPLPLYPELKMAFPGPSVGRALEEFQPDLIHVVNPAILGLGGIFFAKKLHIPLIASYHTHLPQYLQHYGLGALEGLLWELLKAAHNQAELNLCTSTAMVEELHSHGIKNLDLWQRGVDTEMFQPSLKSEKMRDRLSQGHPEAPLLLYVGRVSAEKQIDQIKPVLEAIPGSRLAIVGDGPYRAELEAHFAGTNTHFVGYLQGLELASAFASADAFVFPSRTETLGLVLLEAMAAGCPVVAANSGGIPDIVTDGENGYMFDPQDPDGAVKATQKLLAMDATQREMLRVQARQEAEKWGWAAATAQLQSYYQQILEKSKPLSLAA

SEQ ID NO: 6377 - protein, 332 aa, Vigna angularis
MVVLSQPALNQFLLLKPCKSTPLFTGIPVVDFTHPDAKNLIVEACRDYGFFKLVNHGVPLELVANLENEALRFFKKSQSEKDRAGPPDPFGYGSKGIGPNGDVGWVEYLLLNTNPEVISPKSLSIFRESPHHFRAVVENYITAVKNMCYAVLELMAEGLGIAQRNTLSRLLKDEKSDSCFRMNHYPPCPEVPALNRNLVGFGEHTDPQIISVLRSNSTSGLQICLADGTWVSVPPDQTSFFINVGDALQVMTNGRFKSVKHRVLADTTKSRLSMIYFGGPALSEKIAPLPSVMVKGEESLYKEFTWWEYKKAAYTSRLADNRLAPFEKSATD

SEQ ID NO: 6378 - protein, 371 aa, Emericella nidulans
MFRQSVRRFATAALRSAAESPYNVRVSQAQGFVNGLTEKAIGNTPLIRLKRLSEETGSNILAKAEFQNPGGSVKDRAALYVVKDAEERGLLKPGGTVVEGTAGNTGIGLAHVCRSKGYKLVIYMPNTQSQGKIDLLRLLGAEVYPVPAVAFDNPENYNHKARRHAESLDNAVWTNQFDNTANRRAHIETTGPEIWAQTGGKLDAFTCSTGTGGTLAGITYYLKQASGGRVKSFLADPPGSVLHSYIQSGGKLVERSGSSITEGIGQGRITDNLQPDVGTLDGSLNISDEKTIEMIYRCLDEEGLYLGASSALNVVAAKEVAEKLGKGSTVVTILADGAYRYADRLFSKSWLESKGLRNAIPKHLEKYIVLP

SEQ ID NO: 6379 - protein, 307 aa, Flavobacterium sp. K3-15/DSM ID92-509
MKFQNALETIGNTPVVKINNLFNSDHEIWIKLEKSNPGGSIKDRIALAMIEDAEAKGLLNKDSTIIEPTSGNTGIGLALVAAVKGYKLILVMPESMSIERRKIMEAYGAEFVLTPREKGMKGAIEKANELAEETPNSWIPRQFDNPANVKIHVETTAQEILQDFPEGLDYVITGVGTGGHITGIAKALKEKYPNLKVIAVEPELSPVLSGGSPAPHPLQGLGAGFVPSILDITLLDGVITVGKDEAYEYAINAAKKEGLFCGSFHRSRLSRYRKTFTGNTAWSKNSLPLITTPEKGIFLLRDSSKIL

SEQ ID NO: 6380 - protein, 532 aa, Pseudomonas putida GB-1
MPVPDPFRQGLERGWITHDASRLEHDLSLEADIAVIGSGAGGATSAQMLSAAGFKVLLIEEGPLKTSSDFHLLESEAYASLYQEGLGRMSKDGAITILQGRAVGGTTLVNWTSSFRTPPQTLTHWASAHGVSGLGEEELRPWFERMEQELGITPWALPPNANNDVLRRGCEQLGYRWAVIPRNVRGCWNLGYCGMGCPVNAKQSMLVTRIPATLEQGGELLYLARAERFTHNGARVQSLTCQALDAQGIQPTGKQVSVRARHYLLAGGGINSPALLLRSAAPDPHGRLGKRTFLHLVNFSAARFSERIDPYYGAPQSIYSDHFQWQGGADGPVGYKLEVPPLHPALASTLLGGYGHENAQRMAELPHTHVMLALLRDGFHPESQGGAVELRGDGSPVLDYPVTDYLRDGLRRAYRSMAQVQFAAGAIQVTPVHSDASAASNLEQALAMIDTLRLEPFRTRLGSAHVMGGCALGEDPRQAVCDSLGRHHQLENLSIHDGSLFPTSIGANPQLSVYAISAKLSEALVARLAHSA

SEQ ID NO: 6381 - protein, 327 aa, Vigna angularis
MASLSKTTTEQYSYIKNRMASTFASTIPIVDLSKPDAKTLIVNACEEFGFFKVINHGVPMEAISRLETEALKFFSLPLNEKEKAGPPNPFGYGSKRIGHNGDVGWVEYLLLNNNQEHDFSLYGKNHEKFRCLLNSYMCSVRKMACDILELMAEGLKIQQKNVFSKLLRDKESDSVFRVNHYPACPELAVNGENMIGFGEHTDPQIISLLRSNNTSGLQIYLRDGSWISVPPDHNSFFINVGDSLQVMTNGRFRSVRHRVLANGFKSRLSMIYFGGPPLSEKIVPLPSLMKGKESLYKEFTWFEYKNSTYGSRLADNRLGHFERIAAS

SEQ ID NO: 6382 - protein, 322 aa, Vibrio angustum S14
MSKIYEDNSLTIGNTPLVRLNRVSNGKVLAKVEARNPSFSVKCRIGANMIWDAEKKGLLKEGVELVEPTSGNTGVALAFVAAARGYKLTLTMPESMSLERRKLLKALGANLVLTEAPKGMKGAIDKAEEIVNSDPSKYLLLQQFNNPANPEIHEKTTGPEIWDATDGEVDVFVSGVGTGGTLTGVSRFIKQQKGKAITTIAVEPLESPVITQTLNGDTVQPAPHKIQGIGAGFIPGNLDLSLIDEVQKVSSDDAIEMARRLMDEEGILAGISSGAAVVAANNIAARPEFADKNIVVILPSSGERYLSTALFAGIFTEKETQQ

SEQ ID NO: 6383 - protein, 161 aa, Mycobacterium smegmatis str. MC2 155
MSDTVDISVEVDGDPAHLTVEADLTLLDVLREELGRTEVRAGCRNGDCGTCTAVVDGRCVKTCLILAARADGARVKTIATPSDGDRPDAVQRAFMEQYGFQCGFCLPGMLLAATDLLDRDPNPSAAAIRDALSGNLCRCTGYTNAVRAVQRAAELRNQPPS

SEQ ID NO: 6384 - protein, 162 aa, Brassica napus
  misc_feature (155)..(155): Xaa can be any naturally occurring amino acid
MVSWLMTIKAVLISTGVASVGLLLKVSVPVAVDFSVSQAPILWSSLLSWLKPPYLYILTNGIIITIVASSKYYRSASHHEEEDDGIVYGGGGDYELQTELIVHDQASPRMLEEKDRQFDFVVSNLPSRQLEPETITAVMFKDAEEEKIKDVVETXEDEDETE

SEQ ID NO: 6385 - protein, 300 aa, Burkholderia vietnamiensis G4
MAYKTIEDTIGNTPLVQLVRLPDDEIRARNNVVLAKLEGNNPAGSVKDRPALSMISKAEARGRIKPGDTLIEATSGNTGIALAMAAAIRGYKMVLVMPEDLSVERRQSMAAYGAEIILTPVKGGMELARDLAEQMQREGKGVILDQFGNPDNPVAHYESTGPEIWRDTEGRVTHFVSAMGTTGTIMGTSRYLKEQNPAIEIIGAQPEDGSRIPGIRKWPEAYMPTIFDRSRVDRVENVSQAASETMARRLAAVEGIFAGISSGGACEVAMRIARQVENATIVFIVCDRGDRYLSTGVFPA

SEQ ID NO: 6386 - protein, 246 aa, Triticum aestivum
  misc_feature (203)..(203): Xaa can be any naturally occurring amino acid
  misc_feature (217)..(217): Xaa can be any naturally occurring amino acid
  misc_feature (223)..(223): Xaa can be any naturally occurring amino acid
  misc_feature (238)..(238): Xaa can be any naturally occurring amino acid
  misc_feature (242)..(242): Xaa can be any naturally occurring amino acid
MASVASSTTLISSPSSRVFPAKSSLSSPSVSFLRTLSSPSASASLRSGFARRSSLSSTSRRSFAVKAQADDLPLVGNKAPDFEAEAVFDQEFIKVKLSDYIGKKYVILFFYPLDFTFVCPTEITAFSDRHSEFEKLNTEVLGVSVDSVFSHLAWVQTDRKSGGLGDLNYPLISDVTKSISKSFGVLIHDQGIALRGLFIIDRXGVIQHSTINNLGIXRSVDEXMRTLQALQYIQENPXEVCXSRWK

SEQ ID NO: 6387 - protein, 213 aa, Dehalococcoides ethenogenes 195
MEEVTQPMPRIGDIAPQFEALTTHGVLKLEDFKGQWLIIFSHPADFTPVCTTEFIAFSEIYPELQKRGVELLGLSVDSNSSHIAWVRNVEEKTGIKIPFPIIADLNKEVSLAYGMIHPGQSKTETVRCVFILDPDQKIRLIMYYPMNVGRNMKEILRVIDALQTADENKVALPANWHPGDKVVVPPPSTQEMAEERMGQGYECIDWYLCKKNL

SEQ ID NO: 6388 - protein, 888 aa, Medicago truncatula; identical to SEQ ID NO: 2674

SEQ ID NO: 6389 - protein, 311 aa, Desulfitobacterium hafniense DCB-2
MSKIARSLTDLIGNTPLLELSNYNRTTELEAKVIAKLEYFNPLSSVKDRIGYAMIKDAEEKGLLNKDTVIIEPTSGNTGIALAFVSAARGYRLILTMPETMSVERRNLLKALGAELVLTPGPAGMKGAIQKAEELAAEYKNSFIPQQFNNPANPEIHRQTTAEEIWRDTDGEVDIFVAGVGTGGTVTGVGEALKQKKPGVKVIAVEPADSPVLSGGTPGAHKIQGIGAGFVPGVYSSEVIDEIFQVKNEEAFETSRKLSKTEGLLVGISSGAAAYAATQIAKRPENKGKNIVVLLPDTGERYLSTVLFQEG

SEQ ID NO: 6390 - protein, 345 aa, Brassica juncea
ILQTIKGLTSFSFLRSNQRGTNMEDGCMIKKDVTELIGYTPMVYLNRIVDGCVARIAAKLEMMQPCSSVKDRIAYSMIKDAEDKGLIKPGESTLIEPTAGNTGIGLACIGAARGYKVTLLMPSTMSLERRIILKALGAELHLTDMSIGIKGLLEKTEEMLNKTPGGFVPQQFENLANPEIHYQTTGPEIWRDSAGKVDIFIAGVGTGGTVTGVGRFLKEMNKDIKVIAVEPTESPVLSGGEPGRHLIQGIGAGIIPANLDLSIVDEIIQVTGEEAIETAKLLALKEGLLVGISSGAAAAAALKVAKRPENAGKLIAVLFPSGGERYLSTKLFDSVRFEAENLPVE

SEQ ID NO: 6391 - protein, 179 aa, Symbiobacterium thermophilum IAM 14863
MRLVGKPAPDFTMLSTKDLDKLDQKVSLSDYKGKWLILFFYPADFTFVCPTEITAFNDRVQEFQDANCEILGVSVDSVYSHRAWIKTPKEEGGLGPVNYPLASDITKEVSRAYGVLIEEEGVALRGLFIIDPDGIVRYQVVHDNNIGRNVDEVLRVLEALQAGGLCAANWKPGDALLKV

SEQ ID NO: 6392 - protein, 219 aa, Pyrococcus furiosus DSM 3638
MEELKSKGFDTSKAVVIENPVSEEFFNVEKREEPVILYPATLIPRKNQLGFLRAASTIKEELRDYKIIFTASGDKSYEMELRKLAEKSNLNVEFTGKVSYEKMLELYSKASIVALTSFEETFGMVIAEAMATGTPVIASRVGGIPYMIEDGETGFLVDPNNPKDIAEKLVTLLSDKHLRSKMGREGKKVAEERWKDEVIARKLLEMYFSAIEQDKNTKR

SEQ ID NO: 6393 - protein, 388 aa, Blastopirellula marina DSM 3645
MLRVFSHAQKSCGNSMQMNYRRGHRQPMNALRNLTRRIGETAYSSITSQKSTEVADGILQAIGRTSLVRFRRYLDRQDVTLYAKLESQNPGGSAKDRPARQMLEAAIKEGEISSNATIIESSSGNMGIGLAQACRYHGLRFICVVDPNAQPQNVAIMRALGAEIELVTKRVNGDFLAARLARVCRLLEEIPQSYWPNQYANPQNPIAHEQGTIREIDELLKGEFDYLFVATSSTGTAQGCRNYLQSRGRDVKVVAVDAMGSVLFGGTSGERKIPGLGAGREPKLARGQSFSQIVRVKDVDCVVGCRRAAEREALLVGGSSGGVLETVRFMQDELAGKRCVAILHDSGTRYLDTVFDDAWVQETLGVSSQEIEYLKNAKAFSFASGLTQ

SEQ ID NO: 6394 - protein, 153 aa, Mycobacterium avium 104
MLSVGTPAPDFTLRDQNQQRVTLSSFRGSKNVLLVFFPLAFTGICQGELDQLRDHLPEFENDDSAVLAISVGPPPTHRIWALESGFTFPVLSDFWPHGAVSQSYGVFNDEAGYSNRGTFVVDRSGIIRFAEMKQPGESRDQRLWTDALAALKA

SEQ ID NO: 6395 - protein, 151 aa, Erythrobacter sp. NAP1
MAVRLTINGEPKTVDAAPGTPLLWVLRDHLKMTGTKFGCGVAQCGACTVHIDGSPTRSCITPHDSLDGAEIKTIEGVDGRAADAIREAWIENQVPQCGYCQSGQIMSAAALLAENPSPSDADIDSAMSGNLCRCATYMSIRRAIKDAASKV

SEQ ID NO: 6396 - protein, 365 aa, Vibrio cholerae O1 biovar eltor str. N16961
MYHQGCTVRKNINLMIATDLKGQGGVATVVSTYADCGFLEENHIKLIASHSSLDHGQKWRMTLRFMLALCQLLYCFMRYRVGIVHIHMSSRGSYRRKSVIIRLVKLLKGKVILHLHGAEFRDFYRDECNMVQQRHIRHTFALADHVLVLSTQWLAWLQEVIGRTQGVSVLYNAVPSLALDRHLAQPGRIAFLGRLGTRKGVGDLIQAFALVKQRCPEAQLYLAGDGEIETYQAMAEQLGLNGSVHCLGWIAGEAKLKLLTQTDIYCLPSYNEGFPMGVIEAMSAGIPVVASRAGGIPDAISDGEQGRLIEAGDVVALAQALGDLIEQRAENQRIATAAKQKFAENFSLQAVIPRLQTLYDELLKS

SEQ ID NO: 6397 - protein, 389 aa, Pyrococcus furiosus DSM 3638
MRVLVMVNDFPNKDNSYTANIFVKEQVKALSEFVEEINVIVPIPRGIELYRKTSYRDYAIGENVHVHFVKYINPLFPIAYSKLRREWIWLEHRALTNFIKKKDIKFDIIHAHYTWPSGAVGVKLKEEYKVPLVITEHTSQTFNRYITTRDPLAREIWQKADIIVRVRKGDIDLFSRVGITPSKIRYIPNGFDGNKFYPIPQEIARRKLNLVEYEKIIINVANMYSRVKGHEYLLRAFSKVAENTSDAFLILVGSGKLLSHLKKLADNLYLGHRVLFAGSKPHDEIPLWMNAADLFVLPSLRESFGVVQIEAMACGVPVVATRNGGSEEIIISEDYGLLCEPANPKELAEKILIALEKEWDREKIRKYAEQFTWENIAKKTLEVYRGVLK

SEQ ID NO: 6398 - protein, 152 aa, Ralstonia solanacearum GMI1000
MVTLTINGRPVEVDADPSTPLLWALRDNLGLTGTKFGCGVASCGACTVHLNGQPTRSCVLPISAAVGAQITTSEHIADDKIGKAVLAAWIKHDVAQCGYCQSGQMMSAVGLLRSKKTPTDADIDSAMAGNLCRCATYQRIRAAIHDAAKALA

SEQ ID NO: 6399 - protein, 344 aa, Arabidopsis thaliana
MVSWMMTTKAVLISSGVATVALLLKLSVPVAVDFSVSRAPILWSSLLSWLKPPYLYVVTNGIIITIVASSKYYRSHHDRDEEDEIVVYGGGGYKIQKEEPIVNQHQASPRILEVKDLDTGAHFGFVVANLEAEELESEAVTAVVFDDEEEEKKIIDSAATAEDEIEEELKSVIMVENSDLVESDVIPPPMMIESENLPPIEKPLVTSRFGHRKLMKASQEGGRALRVTKPKKNETLENTWKMITEGKSTPLTRQLYRRSDTFGRGDSGGVDGEVKPVYKKSDTFRDRTNYYQLAETAKVRKEPSLSQEELNRRVEAFIKKFNEEMKLQRMESLRQYKEITSRGV

SEQ ID NO: 6400 - protein, 685 aa, Sulfolobus tokodaii str. 7
MLQEHLPIITGKSTYIDDINPKNVAYLHVVRSPIARGIIKSISKPQHALLTLTWDDVKTYMPARLFPDLARTSQVARMPVLADGRVNFVGQPVLAFVVEDRYETEDVAEEVSIDYEELKPVVDVEESLKEEPIHPGLKSNISIDQLLEGGDLSLKNRADVVVRRKIKQHRIVSNPMEPKGIICWWDNDVLNVYVSTQAPFGVRNDLREVLGIPPEKIRVYSPPNVGGGFGNKSGGYPEYVLAAIASLKLGRPIKWIETRSEMLVNTQSLGRGEVSDMKLYATKDGEILGMEGTIIANIGAYDYGLNFFTSLFVARLSNGPYKLKFASIRAMSVFTNTPPMGFYRGAGRPEAALIHETLVEDLAEELGMDPVEIRRKNLIDDNGYLTPLGSRLDPAGYHEVLDKAEKYYRKAKEVYKDKGISLVVFTEIVRTSPGEGAKVEIKNGKVYFSLGLGPHGQAYSSTFKKLASQALGIDESMIEVVTGSTETVKEGIGSFGSRAGTIGGSAVIAASKELLKKLGKDSLNGEDLIKYEGVSAEVFYKADDIFAPGAHVAVVDLDKETGFAKIIDYYAVDDVGKVLNKEEIEGQIIGGILQGASQVVIEAMRYDERGIPLCASIADCGVPTSLEAPLNISQEYVEYPSQLLSGSRGVGEAGTTGALPAVFIAFEKAAKKKFNITPIDPWIIV

SEQ ID NO: 6401 - protein, 248 aa, Triticum aestivum
MLGISSTHASEEQSDEEHTATHRAEFVTGHMALSRLCLKKALAGRAAAMARPASSSSHGGMDLRSLFSAAADSAATRAPLEGETNRREVAVADRSSSATARGGRWPWRDLRDFVPFRLVNGLGSALSHVAETLSRPLERWRPLFGKVREDEERYRLRFEVPGLGKDDVRVTVEDGALVIRGEKRVEDEHGGDGEWWSTSSYGCYHASLLLPEDARVDGIAAEVKDGVLYVTVPRVPGSQRSVTEVKVQ

SEQ ID NO: 6402 - protein, 216 aa, Polaromonas sp. JS666
MATLRLGDIAPDFTQDSTEGKISFHAWAGDSWVVLFSHPADFTPVCTTELGKTAALSREFAKRHVKPIAISVDPLESHGKWVHDINETQNTTVNFPILADADRKVANLYDMIHPNALSTGPTATVRSVFIIDPKKVIRTTFTYPASTGRNFDEILRVIDSLQLTDGYKVATPVNWKDGDDVIIVPSLQDPAELAQRFPKGFKAVKPYLRITPQPNK

SEQ ID NO: 6403 - protein, 173 aa, Microcoleus chthonoplastes PCC 7420
MASCLACLTWLNVTPAAYALGGKQPPLNEPAPEFTLPTNSGDGEVSLSDYRGKWVVLYFYPKDFTSGCTLEARRFQQDLPKYIERNAQIVGVSADDVDSHADFCDSEGLKFPLLADTDGSVSKAYGSWMGFVSLRHTYLIDPDGILREIFLGVRPAIHSTEVLAHLDELRSVT

SEQ ID NO: 6404 - protein, 1506 aa, Arabidopsis thaliana
MNVDQCQWRKKMMGRGVDGGCGAEEKPYRPFRRVALDKENGYEDMGSLEIDFLAQASKNLSERSPFDVPEDGSTSVLSVPTLPIALANLLKNHSDNKKRHKKSHSGADKKKKKSSRQGDKLRSGSIWLEHEDYFRRLDFPDLETLSDLASLRSLSSRNCFSIPSVEYDSIDIQQRETDASAKNEDVVCGDGVVLEQIKNLLTKDISEGTVRKEEDVVKPMGVDNVGNGISSGSDYSGSLEWVLGNRNRILLTSERPSKKRKLLGSDAGLGKLMVAAPCEGNALLCDFCCTGHHQLIVCTSCKATVHKKCYGLLEDSGKPWLCSWCELENGRADSERPCLLCPKKGGILKPVLSKTENGGPAEFAHLFCSLWMPEVYIEDLKKMEPILNFPGIKETRRKLLCNLCKVKSGACIRCCNGTCRTSFHPICAREAGNRLEVWGKHGCDTVELRAFCSKHSDIQESGKSVEGGESNAAESRSPICHLPSESVGEGHLSNDEMGVDVGTPGTGSDISRNSDLQELESPHSKFNLSATDNVESGMTGRSNEDERTLSKSLSFGLILKKLIDLGKVDVKDVAAEIGINPDALRAKLTVTHKTSHLPASNLYALIDGDLLPDLLGKVVKWLSQHAHMGSSDKGKNLKRKTTTKSERRAAICTEGIVMLDSDILDPAVAKAFSIERTHEINICNNTTNNTRCTLTENCTGNGIVVVEAKANGSVLKKEGSVSLAPDHSPEEKNSIVLDQKVHHGKSSVIPSDDHGEQSNSSSSGVMMENAFSLRPNSSQNRGNLNCPNPIILDLFNQEAYPGFNPHRYIHKELSELGKEQTLKSSTDSDVARMTTNFDGHLVTLTHLAGSEEGNKHLQGAETFLQLSKARKLGILDLSPEDELEGELLYYQLQLLGTAVSRKQLSDNLVYEVAKKLPLEIDEQHGRRWDDVLVNKYFHDVREARKQGRKEQRNKQAQAVLAAATAAAATSSRNTSLRKDMSEEPAQQEMSTSRRKVVGSSHLVPQTKESLLKMAVSGPPSEKRSDHHTPDFLVENPRTCDICRRSETIWNLIVVCSSCKVAVHIDCYKCAKESTGPWYCELCAESSSEPSFNFGEKPNSSTECTLCGGTTGAFRKTTNGQWVHAFCAEVKFPLRQQLLAGSGVLYSVLNIANNLVYNFWQWSLESTFRRGQINPVQGMCSYGNCQTTFHPSCARSAGFHMTGGGKHPHKAYCEKHSMEQKAKAESQKHGAEELKSLKHYRVELERLRLLCERIVKREKLKRELAISSHEILAAKRDHAARPLHVRNPFSPPEVSSDSATTSIKGHPDSNISGSEAIQRSDDITIDSTVTDKRRGKGPLLMDTDQKTDDSATSKSRFSRKLTERQILSGKTVPRKHCIVSPSVSEDGDNGSKPKKQHVETFAKELVMTSDEASFKNRRLPKGYFYVPVDCLQEDKPGNQKLASSDKPANQKTSSGDQSGFTNWLKAKEQMVLRYKRAVAATENQLKKAIVKLLGTRYKLCLLVMFEI

SEQ ID NO: 6405 - protein, 310 aa, Mycobacterium tuberculosis CDC1551
MSIAEDITQLIGRTPLVRLRRVTDGAVADIVAKLEFFNPANSVKDRIGVAMLQAAEQAGLIKPDTIILEPTSGNTGIALAMVCAARGYRCVLTMPETMSLERRMLLRAYGAELILTPGADGMSGAIAKAEELAKTDQRYFVPQQFENPANPAIHRVTTAEEVWRDTDGKVDIVVAGVGTGGTITGVAQVIKERKPSARFVAVEPAASPVLSGGQKGPHPIQGIGAGFVPPVLDQDLVDEIITVGNEDALNVARRLAREEGLLVGISSGAATVAALQVARRPENAGKLIVVVLPDFGERYLSTPLFADVAD

SEQ ID NO: 6406 - protein, 462 aa, Frankia sp. CcI3
MTDMQAFDHVIDLVGNTPLVRITPTIETTPTPVLAKLEYLNPGGSVKDRVALTMVSAAEEAGLLPPGGTIIEPTSGNTGVGLALVAARRGYRCVFTMPDKISEEKRAVLRAYGAEVVICPTAVAPDDPRSYYSVARRLVRETPGGWSPDQYSNPNNPAAHYATTGPEIWQATNGRVTHFVAGIGTGGTISGVGRYLKEASGGTVQIVGADPEGSVYSGGSGRPYLVEGVGEDIWPTTYDKTVVDRVEAVSDRDSFLMTRELARKCGLLVGGSGGLAVVVALRVARELGPDDAVVVLLPDSGRGYLSKIFNDEWMYEYGFLEPPSNEPTVSDVLRNKAEQTSGPPDLVHVHPAETVGAAISYLREYNVSQMPVVRHEPPLRAAEVAGSVIERHLLAAVFADRSAIDAPVADHLSPSLPMVGTGEPLARIVAVLGDEPAVLVHDEGNPVGILTRADLLSFLAVR

SEQ ID NO: 6407 - protein, 383 aa, Ralstonia eutropha JMP134
MSATAARRPRIAYLITNSEIGGAQAHVADLMQAMRQHADVTLLAGGDGHLFATAQAAGIPAIRLRTLDNALSPVRAVRTLRELNTALRQVAPDIIHAHSAKAGALGRVAGRMLGIPVIYTVHGFAFKPAAPWRQRLAARVTEWLLAPLTTRLICVADGERELARSLPIAASRISVIRNGLDDVTARATPGEPLRRVAMVARFARPKRPDVLLDAFAQAGLTDCELVMAGDGPQLAAIRARAQALAPAIVGLPGSVHDVPGLLASAQVFVLVSDHEAFPLSVLEAMRACLPVIASDLPGIREQLDDGRCGILLEDNRPQTLVRALQALAADAPRREALGRLARQRWEQQFGLTRMIQATWAVYQDTLASAPRYQASARQRHAEN

SEQ ID NO: 6408 - protein, 885 aa, Vitis vinifera
MTTLLGMVDKLAYFRIKELKDVLTQLGLSKQGKKQDLVDRILAILSDEQVSRMWAKKNAVGKEEVAKLVEDTYRKMQVSGATDLASKGQVLSDSSNVKFKEELEDSYNDMKIRCPCGSALPNETMLKCDDLKCQVWQHIGCVIIPEKTMEGIPPTPDPFYCEICRLSRADPFWVTVAHPLLPVKLTTTSIPTDGTNPVQSVEKTFHLTRADRDMVSKHEYDVQAWCILLNDKVSFRMQWPQYADLQVNGMAVRAINRPGSQLLGANGRDDGPVITPCTKDGINKISLTGCDARIFCLGVRIVKRRTVQQILSLIPKESDGERFEDALARVRRCIGGGGATDNADSDSDLEVVADFFTVNLRCPMSGSRMKVAGRFKPCAHMGCFDLEIFVEMNQRSRKATSIVLCLQWQCPICLKNYSLENVIIDPYFNRITSSMQSCGEDVTEIQVKPDGCWRVKPENERGILAQWHNADGTLCPLAEGEFKPKMDVLKQIKQEGISECHSSLKLQIKNRNGVWEVSKPDEMNTLTCNRLQEKFEDPGQQVIPMSSSATGSGRDGEDPSVNQDGGGNYDFSTNPGIELDSISLNIDNNAYAFPERNTPAPMGDTELIVLSDSEEENDTLMSSGTLYNNSRADAGGINFSIPTGIPDSYAEDPTAGPGGSSCLGLFSTADDDFGMSGSLWPLPPGTQPGPGFQFFGTDTDVSDALADLQHNPINCPTSMNGYTLGPEVVMGSAALVPDPSIGRTDTDMNDGLVDNPLAFGGDDPSLQIFLPTRPSDASVPTDLRNQADVSNGSRPDDWISLRLGGSSGGHAESPAANGLNTRQQLPSKDGDMDSLADTASLLLGMNDGRSDKTSSRQRSDSPFSFPRQRRSVRPRLYLSIDSDSE

SEQ ID NO: 6409 - protein, 695 aa, Treponema denticola ATCC 35405
MDKTFVSDLEFENQEWACLIRSSDVDAKIIDIEIPDLPEGFSFFSAKDIVGKNSIGFLKTEVPVFADEKIEYAGQAVGILTGPDKKKLLELSSLFQIKTQYLSRPKAQFTFEEEEKNYFDYPIVSRESLSSGNAEEVFEKSSQVVYSTFSFKQRYHYHAETACVKTNWADDRLEIHLATQWPYQVLTSVCNVLDVPKEKINVVSHAEAESLDGRIWFPALLAAQVSVASFLTKKNIVIEFSRQEDFLYTIKTPIVMIQHKTSVSELGKITAMDVSIIVDAGSFNPFITQMLKQMVVTAAGIYHLPVYMISAVAIKTEKGLTGLFSGWGDSYVSSALEKHISEIVEQLDLCPIQFRLQNNLKVGQKTITGIKKEEDFVFENILKAVCNTSDFYRKFYAYRLMNKGRKNRYDGNWRGIGVSVGCQYNGLHILVKSGMNYSAEITLTKDDKVLVKAEPTSEGLKRILKKQIAKELEVEDNQIIFLGASTDEMIPTGAATASCGISILPDLIEKCCTGIKNQRFRKPLPITVSKTYKLPRSKDWDNETLMGNPFISETPGACVIELELDPSTYQIIVRGIWFACDPGKIYSKKMVHRNIHKTIANAVSNISVEDIRENNLLPSNYKIIATGAIPPIRDFVLDSELKTRGLGELAESLVPAAYISALNQIMINHKRIDFLPVFTEDIFNAVTKSEAVDED

SEQ ID NO: 6410 - protein, 372 aa, Prunus subhirtella
MPARLSDAFKSHPLNLQLKHPDFSSLQELPDSYAWSQNDDQYPSSPGSFGAEQDSVPVIDLSDPNALKLTGHACRTWGVFQVTNHGIPSKLLDDIESAGRSLFSLPVQQKLKAARSPDGISGYGFARISSFFQKLMWSEGFTIVGSPLDHFRQLWPQDYNKFCNIIEEYEKVMKRLAGRLMWLMLGSLGISMEDVKWAGPKGDFRDASAALQLNSYPACPDPDRAMGLAAHTDSTLLTILYQNNTSGLQVLREGTGWVTVPPLPGALVVNVGDLIHILSNGLYPSVLHRAVVNRSRHRLSIAYLYGPPASVQISPLSKLLGPSQPPLYRPITWNEYLGTKAKHFNKALSSVRLCAPLNALVDVSDHNSVKVG

SEQ ID NO: 6411 - protein, 151 aa, Microcystis aeruginosa PCC 7806
MAAIKVGDRVPNFSLPSQTGTTVNISDLIGKKSLVIYFYPKDDTPGCTAESCAFRDSYEVFTDAGAEVIGISADSPQSHQQFAQKYNLPFTLLSDSDNRVRKLFGVPATLFVLPGRVTYIIDKEGIVRHIFDSMLDFKAHVTESLNTIKSF

SEQ ID NO: 6412 - protein, 400 aa, Methylobacillus flagellatus KT
MKILFISDVYFPRVNGVSTSIRTFVSQMQALGHEVHLIAPDYGVVTEDEAWIKRIPARRIYFDPEDRLMRYRAVLKLLPSLREENYDIVHIHTPFVAHYLGLKLARLLDIPCLETYHTFFEDYMHHYLPWIPQSMARKIAINTSRRQCNAVSAVIAPSQPMLDALRHYGIKTSAEVIPTGLLETSFEEADGGTFRDRYGISRQRPVALFVGRVAHEKNIDFLLRMANELRRQQPDVLLVIAGEGPAQKHLEALSAELVLGDNIKFIGYLDRKTELNACYKAADVFVFASKTETQGLVLLEAMAQGVPVVALAELGTKSILREGEGAMISPEDERIFASKVFSLLANPGKRAKLGEAARQCMMKRWTARLQAERMLQFYQRVQSRSAFHAMNMDNFKTRGS

SEQ ID NO: 6413 - protein, 427 aa, Physcomitrella patens subsp. patens
MLPGQPPQCYRDNHTSGILHVWRIHHSGLEGRKGALLFLRRGGGEARGEACGVLVQRPFSRPLSVNSATELGPFFVNPDGQSLRRNPHAGNRVANVIFVESPAGTGFSYSNISGDLLAAGDNRTASDDYAFVMNWFKRFPHYKSRPFFRAGESYAGYYVPELAKLIYEKSKNLTSHEKTNFKGFMVGNPVTDSYNDNWGYVKYVYYHAMISDETYAELKKECNFTHQNDPVSHKCIQLLYYEADDEYGNMDPYSIYAPACISNTSANSTGSKFGYDPCSHDYSLVYFNRPDVQKALHANTTGNPCVGCSDPLFENWQGTAATVLPIYLELLDAGLRLWVFSGDADSVVPVSGTRYALTSLNLSVVVPWYSWYRHQQVVGRLVVCQGNLTLVTVRGAGHEVPLLLPAQWLQVFKSFLEGSLLPSQPYV

SEQ ID NO: 6414 - protein, 359 aa, Methanococcoides burtonii DSM 6242
MKICLIADAISVHTVRWAEYFAQQGDEVHLITYESPIQDISGVTIHAIRSRFDSLYLAFIPRHLKIYSLVKRLKPDIVHAHFISKFGFHAAFLNFRPVVMSAWGDDILIIPYWSKVLWYFTKKSLKRADKIYAVSDDIAQKIIFDFGISADHVEVIPFGVDSKLFSPNEKEWPHEKVQVLSNRNFYEVYNIETLLHAIPLVVEKYENINFIIKGTGPLESSLKQLAKDLNIEKFIDFVGWIEYKEMPKYLHKGDIYVSTATSDGTPVSVLEAMACKKACIVTDVGGVKEWIEDGMNGILIPPRNPEILAEKILDLARFPDERERLGNQAYKVIDERGDWYRIMSSVRLDYENMVKEHEQ

SEQ ID NO: 6415 - protein, 601 aa, Arabidopsis thaliana
MANVEADFRTSGSNDDELYTELWKACAGPLVEVPRYGERVFYFPQGHMEQLVASTNQGVVDQEIPVFNLPPKILCRVLSVTLKAEHETDEVYAQITLQPEEDQSEPTSLDPPLVEPAKPAVDSFVKILTASDTSTHGGFSVLRKHATECLPSLDMTQPTPTQELVARDLHGYEWRFKHIFRGQPRRHLLTTGWSTFVTSKRLVAGDAFVFLRGETGDLRVGVRRLAKQQSTMPASVISSQSMRLGVLATASHAVTTTTIFVVFYKPRISQFIISVNKYMMAMKNGFSLGMRYRMRFEGEESPERIFTGTIIGSGDLSSQWPASKWRSLQIQWDEPSSIQRPNKVSPWEIEPFSPSALTPTPTQQQSKSKRSRPISEITGSPVASSFLSSFSQSHESNPSVKLLFQDPATERNSNKSVFSSGLQCKITEAPVTSSCRLFGFDLTSKPASATIPHDKQLISVDSNISDSTTKCHDPNSSNSPKEQKQQTSTRSRIKVQMQGTAVGRAVDLTLLRSYDELIKELEKMFEIEGELSPKDKWAIVFTDDEGDRMLVGDDPWNEFCKMAKKLFIYPSDEVKKMRSKSLLGDKGTIVNLESDQRTVHV

SEQ ID NO: 6416 - protein, 336 aa, Sinorhizobium fredii
MLHTTVTQLIGQTPVMSIDVPGRNATLVLKIEKNNPGGSMKDRMARSMVVAALEDGRLAPGGTIVESSSGNTGTGLALAALEFGLRFIAVVDHHAAPEKIRMMRALGAEIRYVEGDFRDDEVAVVERQRLAAQLGAQLPGALFMNQSDNPANPEGYAGLVDELVAQLPGGIDAFVGCVGTGGSMTGISQRLKRHNPAVRTIAVEPAGSIVFGKPGHPYYQSGTGTPAGDEVGKVLDYGCIDEGVQVTDTQAFETARYIARRKGLLVGGSTGGAIYKPPEFIAAGTLTGTVVTTVADGGEKYLGTIFDEEWMAKRRLLDPAIAAQLDGWLFGKARAA

SEQ ID NO: 6417 - protein, 367 aa, Solibacter usitatus Ellin6076
MSSHPRRAVLLMARELGLGGSERQLAEIALALDRERFEPHVGCFTNGGFRASDLHDAGVPILELGVRSLVSTSALAGAWRMGRYLRQHRIRLVHAFDVPLDLFAVPVARFFHTPVVLSSQRAHRSLTPGGTRQLLRLTDRMVDGIVVNSRAVARELQAEDDVPASMLRLAYNGLDTSIFQADGPRADLPWTDKGVVIGVICALRPEKGLLTLLEAFDRVRGSHPGVKLLIVGSGPMLEQLQARAGSDCHFEPAVRDVTPWLRAIDIFVLPSLSEALSNSLMEAMSCGCCPVASEVGGNPELVEEGRSGLLFPAGDSRGLAACLTRLLEDANLRRRLASNAAVRMRDHFTRADSARAMATIYEEFLGG

SEQ ID NO: 6418 - protein, 384 aa, Burkholderia vietnamiensis G4
MKVSIAVCGRFHFHNYIEKLDRAGILDTFYYSHRINNSAFSLSRGRAVNIWPKEYAVRAHAKFLKNRFSDLLYPAYHDLWQLGARSKWRPVQLLHVMAHGTSRQLVQKAKREGSIAIGEVVNTHPIYRERILATEEANRGLPRSKTINRQQQRLIEELAMYDYLLAPSSIVRDSLIQQGTPSDIIHVIPYAANVKRFYPLGQRQKPKDRLNILCVGQINLRKGQLYLLEAVKKLNSNFFHVTLIGKVDPQIESLLAPYRHLFTHIPRVDNAELNKHYNSADLFVLPSLEEGLAVVLCEALAAGLPIIATHESGASEIIEHGRSGTIIHAGSAAELANSINEIASFPEKLERFSVEAISAAARTHNWDQYVDKLVEVYADAYTRK

SEQ ID NO: 6419 - protein, 327 aa, Verrucomicrobium spinosum DSM 4136
MGQIYNNIVETVGRTPLVKLNRVTEGLDATIALKCEFFNPLGSVKDRIGMAMIEDAENRGVLTKDTVIVEPTSGNTGIALAFVAAAKGYKLILTMPETMSLERRTLLALLGADLVLTPGPQGMKGAIAKAEEIVNSTPNAWMPQQFENPANPAIHQKTTAEEIWADTEGKVDILVAAVGTGGTISGCVEVIKPRKESFQAVAVEPEASPVINQTLAGEPVQPGPHKIQGTGAGFVPKNLHLKDGAGNPQIVECVKVSNDDAFAMARRLAKEEGILVGISTGANVVAAIEVAKRPENKGKLIVTIACSTGERYLSTALADEARAKVGA

SEQ ID NO: 6420 - protein, 590 aa, Oryza sativa Japonica Group
MQVNENSENPYWKAIGYRVEEPRRDRAESMPSPSPSPVSRRPLDNGVVETRALTDTTLLRSLAAKGLAVRPGASDEHHTVRCDAVIVGSGCGGGVAAAVLASAGYKVVVVEKGDYFTKEDYSSIEGPSMERLFERGGVFCTSNVTTMIFTGATVGGGSAVNWSASIRTPAGVMQEWSREHGLAVFASPGYARAMDAVCERLGVTDACREEGFQNKVVRRGCDALGLRADAVPRNSSEGHFCGSCNFGCPTGDKKGTDTTWLVDAVERGAVILTGCKAEHFIVESNGGGGGRSKRCVGLVATCMSNGITKKLRVEAKVSISASGALMTPPLLRNSGLKNRHIGRNLHLHPVSMAWGYFPDNTPEPHIPGKCYEGGIITSMHRVTERTIIETPALGPGAFAALVPWESGRDMKERMRRYARTAHAFALVRDRGAGSVDGEGRVRYAPSRDDAEELRAGLRRALRILVAAGAAEVGTHRSDGARLRCKGARDADVEAFLDEVTVEKGPMHSTTDKWSVLCSAHQMGSCRMGASPRDGAVDVAGESWEAEGLYVCDGSLLPTAVGVNPMITIQSIAYCVAKGIADSMAHGKEQR

SEQ ID NO: 6421 - protein, 197 aa, Cyanothece sp. PCC 7424
MEGCLRVGQNAPDFTATAVVDQEFKTIKLSDYRGKYVVLFFYPLDFTFVCPTEIIAFSDRYEEFKKINTEVLGVSVDSEFSHLAWIQTDRKSGGIGDIAYPLVSDIKKEISTAYNVLDPEAGVALRGLFIIDKEGVIQHSTINNLSFGRSVDETLRTLKAIQYVQTHPDEVCPAGWQEGDKTMNPDPVKAKVYFASV

SEQ ID NO: 6422 - protein, 377 aa, Crocosphaera watsonii WH 8501
MRIALFTETFLPKIDGIVTRLRHTVDHLQRNGDQVLVFSPDGGLREHKGAKIHGVKGIPLPLYPELKLAIPTPQVGKALERFKPDLIHVVNPAVLGLGGIYFAKTLNIPLVASYHTHLPQYLQHYGLGSLEGLLWELLKLAHNQARLNLCTSTAMVEALETHDIERVDLWQRGVDTEMFQPHLVSKQMRSRLSGGNPEKPLLLYVGRVSPEKQIDRIKPILEAIPEAHLAIVGDGPHREALETNFAGTQTHFIGYLQGLELASAFASADAFVFPSTTETLGLVLLEAMAAGCPVVAANSGGIPDIVTDGVNGYLFEPTDPNGSIMATKRLLAATEEREQLRSNARQEAEKWGWAAATRQLKRYYESVLDQDVLPRVA

SEQ ID NO: 6423 - protein, 548 aa, Oryza sativa Japonica Group
MMLVVQSRDMSYLYFAEDLVLKIVQSLSHDLDSFNKRKWDHIIANQFLRDLREAKKRGNTERRHKEAQAIMAAAARCILPTSRNAPVRKVAECDVLSAKQESVPVAVPAKQEVHSPKQESIPKFNTGSSRVSQLISVQQANDSSPNSKVSADANIGSFDLAKFSKKNALPCDICMRSETVLNRIFVCSSCKAAVHLDCYRSVTNPTGPWKCELCQEMPSDVVAGSQSDCDGSKPCLLQCDLCHGTSGAFRKTIKGRCIHAFCAEWLLESTFTRGQYNAVDGMESLPKDKDTCAICHRNVGSCLKCSTVDCQITFHPTCARDAGFYMDTKTIGSTLEHKAYCGKHGIEQRKADLLQLHGPEEVKNMKQMRVDLEVLRLICERVVKREKLKKDLVVCGHDTLAARRNSIAYSTRTSYCGSGPGASSESATTSVNNSYSGLMQRTDDVAVDSIISRKPTVRFSLNNSDADRNTADSSTSSISYKQKLDDRESLADKNLPKKPATAMQISEEGETKSSDKKNQRPPKSIVYTRRSALSKKRQLSQNVEGPGG

SEQ ID NO: 6424 - protein, 157 aa, Pseudomonas putida GB-1
MQTTISLRINGQPVDVSAMPDTPLLLILRNDLCLNGPKYGCGLGECGACTVIIDGVAARSCVIPLAGAAGRDITTLEGLGNKAAPHPVQQAFIDEQAAQCGYCMNGMIMTAKALLDRIPDPTDEQIRNELSGNLCRCGTHVEILRAVRRAAETRRKA

SEQ ID NO: 6425 - protein, 166 aa, Bradyrhizobium sp. BTAi1
MPKTHITMKVNGSEVEGLAEPRTLLVHFLREQAQLTGTHIGCETSHCGACTIDIDGMSVKSCTMLAVQANGAEITTIEGMANADGTLSPLQEGFRMMHGLQCGFCTPGMIIRAHRLLKENPSPTEAEIRAGISGNICRCTGYQNIVKAIQYAAAKINGVEFQEAAE

SEQ ID NO: 6426 - protein, 767 aa, Desulfotalea psychrophila LSv54
MQYIGKSIAKIDGLALVKGTPAYTSDLDTNNSALVVKILRSPHAAARILSIDSSLAEAMPGVECVLTHKDVPEKSFTLAGQSFPEPSPYDRRILEDRVRYVGDEVAIVAAVDEITALEAIDKIKVKYEVTTPVLSLEEALDNAVQVHESQPYTHFDIGNDALRNIAASQDVGRGDVEAELAASEVIIDRTYNTQAQAHGMMETYRASTSLDVHGRLQVMTSTQVPFHIRRHLAHIFDIPRSKIKMLKPRVGGGFGGKQSAPVEIFPALVTLKTGKPARIVYSREETFTSTSTRHAMQMRVRLGADLAGNINAVDIYCLSDTGAYGEHAATVFWVAGEKTMPLYGKARACRYHGHALYTNKTPAGAFRGYGATQGTFALESAINELAEKLGMDPAALRLQNLIAEGESSAMLCGSTPEKPVVLKSSSLGSCIRRGKELIGWEENYPAKRISATKMRGYGMAVTMQGSGIAKIDTSTVLIKLNEDGFFTLSHSAADIGQGSDTVLNQIAAEVLEVGMDQINVTSFDLDTLPYDPGAYASSGTYVTGNATIRSAEDLLRQMRETAARHMDCSLTDISYHEGVFSAEAGQEISLSELAAILSSFAGMDQLVGKGSFGGDTSPPPFIAGFAEVEVDLETGESQVTDYVAVVDCGTVINKNLATIQVESGVVMGIGLALYEEVRYSAKGRLTTNSFMEYRMPCRQDVHGIQVAFEESYEPTGPYGAKSVGEVVCNAPAPAIIQAIYNATGFFCRDLPATAEKVLLGMNDGKLA

SEQ ID NO: 6427 - protein, 307 aa, Geobacillus kaustophilus HTA426
MRVAKSIHELIGHTPVVEITRFPLPEGVRLFAKLEYFNPGGSIKDRLGQELLREAFASGKLKEGGTIIEPTAGNTGIGLALAAIGKNVNIIFCVPEKFSIEKQQLMKALGAQIVHTPTEEGMEGAIRKAEELARTIPGAYCPQQFQNPANPRTYYKTLGPELWDDLDGQIDIFVAGAGSGGTFMGTATFLKEKNPAIKTVIVEPEGSILGGGKPGPHRTEGIGMEFLPPFMDPDYFDAIYTIADDDAFRRVSELARQEGLLVGSSSGAAFHAALMEAEKAKPGTNIVVIFPDGSERYLSKHIYEGGR

SEQ ID NO: 6428 - protein, 756 aa, Oryza sativa Japonica Group; identical to SEQ ID NO: 4557

SEQ ID NO: 6429 - protein, 806 aa, Bradyrhizobium sp. BTAi1
MNDMTPTREQREAALEGMGCRRKRVEDIRFTQGKGNYVDDVKLPGMLHGDFVRSPHAHARVKAIHTEEALKVPGVLAVITAETLKTVNLAWMPTLAGDVQMVLADGKVLFQNQEVAFVVATDRYAADDGVSKVVVEYEPLPVLVDPFKAMDPDAPVLREDLAGKTVGAHGPRKHHNHIFEWSVGDKELTDAAFKKAEVTIKEMISYHRTHPSPLETCQCVCAFDKIKGELTIWGTFQAPHVIRTVVSLIAKIPEQKIHVIAPDIGGGFGNKVGAYPGYICAAVASIVTGKPVKWVEDRIENLTATAFARDYHMTTEIAATKDGKVTGLRVHVLADHGGFDACADPSKWPAGFFNIVTGSYDFPVAHLSVDGVYTNKAPGGVAYRCSFRVTEAAYCIERAMDILAQKLGMDPAELRLKNFVKPEQFPYHSALGWEYDSGDYHTAMRKMMEAVDYAGLRKEQAEKRAAFKRGETREIMGIGVSFFTEIVGAGPSKNCDILGIAMFDSCEIRLHPTGAGIARMGTKSQGQGHETTWAQIIASEIGIPADNIMVEEGNTDTAPYGLGTYGSRSTPVAGAAIAMAARKIKAKAQMIAAYKLEVHEDDLEWDIDGFRVKGLPEKVMSMKDICWAAYNSVPPGMEPGLEAVSYYDPPNMTYPFGAYLCVMDIDVDTGVYKVRRFYALDDCGTRINPMIIEGQIHGGLTEAFAIAMGQEIRYDSEGNVVTGSFMDFFMPTAVETPHWETDFTVTPSPHHPIGAKGVGESPNVGGVPAFSNAVNDAFAFLGATHIQMPHDYWRNWQAAKNLGVVA

SEQ ID NO: 6430 - protein, 316 aa, Streptomyces avermitilis MA-4680
MRYDSPLAAVGNTPLVRLPRLSPSEDVRIWAKLEDRNPTGSVKDRPALHMIEQAEKDGRLTPGCTILEPTSGNTGISLAMAAKLKGYRIVCVMPENTSQERRDLLGMWGAEIVSSPAAGGSNTAVRVAKELAAEHPDWVMLYQYGNPDNAGAHYATTGPEILADLPSVTHFVAGLGTTGTLMGVGRYLREQKPDIKIVAAEPRYDDLVYGLRNLDEGFVPELYDASVLTTRFSVGSADAVTRTRELLQQEGIFAGVSTGAALHAAIGVGNKAVKAGETADIVFVVADGGWKYLSTGVYTAATTEEAIATLQGQLWA

SEQ ID NO: 6431 - protein, 155 aa, Synechococcus sp. PCC 7335
MAIKRWHPFGEIKRWEPFGEIDTLRQEMNRLLEQFTPNGLGESNGFAFVPSAELEETESEVLLKLEVPGMKAEDLDIEVMDEAVRVKGERKSETKTEEEGERRSEFYYGEFQRVIPMPKRVEKDQAVAEYKDGVLRLTLPKAPEETNESVKIKVA

SEQ ID NO: 6432 - protein, 324 aa, Pseudomonas fluorescens PfO-1
MSRIFADNAHSIGNTPLVQINRIAPRGVTILAKIEGRNPGYSVKCRIGANMIWDAESSGKLKPGMTIVEPTSGNTGIGLAFVAAARGYKLLLTMPASMSIERRKVLKALGAELVLTEPAKGMKGAIEKANEIVASDAGKYFMPAQFDNPANPAIHEKTTGPEIWNDTDGAIDVLVAGVGTGGTITGVSRYIKNTAGKPILSVAVEPVSSPVITQALAGQEIKPSPHKIQGIGAGFVPKNLDLSMVDRVELVTDDESKAMALRLMQEEGILCGISCGAAMSVAVRLAETPEMQGKTIVVVLPDSGERYLSSMLFSDLFTDQENQQ

SEQ ID NO: 6433 - protein, 347 aa, Ralstonia eutropha JMP134
MILWKVSDLIGNTPMLGIPVPDKDSVLLLKVEKNNPGGSMKDRMARNMVLAALKSGRLQPNGVIVESSSGNTGIGLALAAIEFGLRFIAVVDHHAAPDKIAVMRALGAEIRYVEGNFQENEVAVVERQRLAAEIASQTPGAVFMNQSDNAANAGGYLEFVRETFAQAREVNAFVGCVGTGGSMTGIARGVKQFNPDAVTIAVEPSGSIVFGMPGHPYYQSGTGTPQGDTVGLVLDYSCIDMGVQVTDAQAFETARYVARQTGLLVGGSTGGAIYKALEAIHDSQIRGNVVVPVADGGEKYLHTVFDEDWLRARNLLAPQVWQRLDAWLGKATCRDEVAPDVLRLNAA

SEQ ID NO: 6434 - protein, 307 aa, Bacillus cereus ATCC 10987
MRVAQSVSELIGKTPIVKLNRIVESDSADIYLKLEFMNPGSSVKDRIALAMIEDAEKKGLLKEGDTIIEPTSGNTGIGLAMVAAAKGYKAILVMPETMSIERRNLLRAYGAELVLTPGPEGMGGAIRKATELAKENGYFIPQQFKNQSNPEIHRLTTGPEIVEQMGDQLDAFIAGIGTGGTITGAGEVLKEAYKDIKIYAVEPADSPVLSGGKPGPHKIQGIGAGFIPETLDVEVYDEIVQVKTEQAFEYARRVAKEEGILVGISSGAVIYAATEIAKKLGKGKKVLVIIPSNGERYLSTPLYQFES

SEQ ID NO: 6435 - protein, 309 aa, Geobacter metallireducens GS-15
MAQIYENLTDLIGKTPLLRLRKVAAGIEADIVAKLESFNPGGSVKDRIGVSMIRDAEGRGLINKDTVIIEPTSGNTGIALAFVCAARGYRLVLTMPDTMSVERRNLLKAYGAELVLTRGAEGMKGAINKAEELAADIPNSFIPQQFRNPANPHIHRFTTAEEIWTDTDGKVDVFVAGVGTGGTVTGVGEVLKKRNPGVKIIAVEPFDSPVLSGGHPAPHKIQGIGAGFVPEVLNREAIDEIFTVRNEEALETARRLAREEGLLVGISAGAAAFAALEVARRPENKGKRIVVVLPDTGERYLSTVLFQDQ

SEQ ID NO: 6436 - protein, 164 aa, Magnetospirillum magnetotacticum MS-1
MIPWGRSNGNQVPSVLRDGDRDPFLSLHREVNRLFDDVFRGFGSNLPSLVGASAFSGGWPNVEISDGEKEIKVTAEVPGLEEKDIEVLLDDGVLTLKGEKRSETEDKDRQFSERFYGRFERRIPLGYEVKDDKVDARFRNGVLTVTLPKSEKAQSQVKRIAIKS

SEQ ID NO: 6437 - protein, 211 aa, Chlorobaculum tepidum
MPLLGDDFPELKVQTTHGPMNIPGDLKGSWFVLFSHPADFTPVCTTEFVAFQQRVEAFEKIGCKLIGMSVDQVFSHIKWVEWIKENLDVDITFPIVAANDRIANKLGMLHPGKGTNTVRAVFVGDPNGKVRLVLYYPQEIGRNMDEILRAVKVLQISDSNKVAMPADWPNNLLIKDHVIIPPANNVEDAKKRKEQQYDCYDWWFCHKPLDK

SEQ ID NO: 6438 - protein, 233 aa, Burkholderia sp. 383
MTTAQTAASAASASAAATGASAPSAASAAPASAPAPAVPASTPAAVERPLVRFQSKPLSININGKSVGPMQVPEGLMMIEFLHEYVGLTGSRLGCGQGICHACVVIVDKPDGTSEEMRTCITGAHFFHGRSIRTIEGHAKRNEAGEVVELSPIQQKFLEHFSFQCGYCTPGFVNAATVLIERLKREPVAKADVERTITEALDAHLCRCTGYVRYYEAVKDVVLTTPGLVKDAA

SEQ ID NO: 6439 - protein, 235 aa, Glycine max
MAHTLSTNLALNLPTSRYVRPSRPTQVKPMKVMMGDAREKLEHVHVPKHNKHHQPLPKNKVAPTPPVGLWDRFPTARTVQEMMETMERMMEDPFAFSTLEWPSSPLPSEGVGGYRRRGRAPWEIKECESEYKMRFDMPGMNKEDVKVWVEEKMLVVKAEKAQKKKQENEIVELQQEKQQEEEEWSAKSYGRYSSRIALPDNVQFENIKAEVKDGMLYITIPKATSYSNILDIQVQ

SEQ ID NO: 6440 - protein, 201 aa, Geobacter metallireducens GS-15
MCMCTLVTKEAPDFAADAVLPDNTFATIKLSSFRGKYVILFFYPLDFTFVCPSEILAFNKKLDQFKAKNCEVIGVSVDSKFTHLAWKNTKVEDGGIGNIQYPLVSDLKKEIATQFGVLFENGGVALRGLFLIDTKGIVRHAVINDLPLGRSVDEALRMLDALQFVETHGDQVCPANWREGDEAMKPTAAGVADYLAKHAAG

SEQ ID NO: 6441 - protein, 275 aa, Vitis vinifera
  misc_feature (49)..(49): Xaa can be any naturally occurring amino acid
  misc_feature (64)..(64): Xaa can be any naturally occurring amino acid
  misc_feature (113)..(113): Xaa can be any naturally occurring amino acid
  misc_feature (148)..(148): Xaa can be any naturally occurring amino acid
  misc_feature (224)..(224): Xaa can be any naturally occurring amino acid
  misc_feature (261)..(261): Xaa can be any naturally occurring amino acid
  misc_feature (267)..(267): Xaa can be any naturally occurring amino acid
MASDMPPKFTCNILSRFHMAIWVVKQVLLSVGIISTVLALNPTPKISYXFSLCYGIPSFWVWLXTWLSPPYAYIIINFILILIIIIASSSSSSSSSSSSSPVEEFTALDYSSXQDVLSEVSGDEEAHAKTSMVMDHGRRKCITGETAXKLESTAVAPGQNESLETTWKAILEEHGIPATRHLRKSETWDMPPCVDGSSSLGPREREREMRKSNTCVEARSSFRXTPIPYLRKDESLSHDELNKKIEEFIQKCRNEMRLERXESDQRXMDILNGGV

SEQ ID NO: 6442 - protein, 384 aa, Mycobacterium leprae TN
MSRVLLVTNDFPPRRGGIQSYLGEFVDRLINIGSHDVMVYAPQWTGADTFDNAAHDGGYQVVRHPGTLMLPGPAVDARMRRLIVDHGIDTVWFGSAAPLALLAPCARKAGATRVLASTHGHEVGWSMLPVARSVLRRIGDVTDVVTFVSRYTRSRVTAAFGPRAALEYLPPGVDADRFRPDPASRAELRNRYRLGERPTVVCLARLVPRKGQDMLIRALPSIRQRADGAALMIVGGGPYLGTLRKLAQGCGVADHVIFAGGVAAVEVPAHYTLADVFAMPCRTRGGGMDVEGLGIVFLEASATGVPVIAGKSGGAPEAVQHNKTGLVVDGRSVNMVADAVTELLTDRDRAAAMGAAGRHWVTAEWRWDTLAARLADLLCGNDSR

SEQ ID NO: 6443 - protein, 255 aa, Vitis vinifera
MASDMFWKSSSNSISRFHMAIWVVKQALLSLGIISTVLMLKPTSKISDIFNILCCSFPSIWVWLRSWLSPPYVYITINVILILIIILVSSSSLTEKSGADSSPEASCVLDSGEEEKESGGESIAGETAAKLEKHAVTALIHGWEDQNETLDATWKEIMEEDGNLSRRHLRKTDSWDVTPCVDGCNLAPSEIRKTNTFAEALSSLRETPYIRKDELLSHDELNQQVELFIRKCRNDMRLERLESDQRLMDLLNRGM

SEQ ID NO: 6444 - protein, 465 aa, Oryza sativa Japonica Group; identical to SEQ ID NO: 6326

SEQ ID NO: 6445 - protein, 369 aa, Oryza sativa Japonica Group
MGIGAFQEIGPFRVDTDGKTLCRNPHSWITAANLLFLESPVGVGFSYAAVKPQEVYSTIGDNMTAHDSHTFLLRWLDRFPEYKTRDLFIVGESYAGHYVPELAVTILDNNLLPHATPIKLKGIAIGNGILEFAAEQTQLYEYLWQHAFISDSAHALITQSCKYPDDHPSALCESARKAAYSRIGNIDIYNIYSSTCHEQKVRPSASKCMDLADPCSQYFVEAYMNQPQVQKTIHANTELKYPWTRCRVYNLDHFGDSPKSMLPYIKAVITGRIRIWIFSGDLDAMVPVTATRQSMERLQLRVAADWRPWSADGKDVAGYVIAYDGLVFATVRGSGHMAPIDQPERALVLVSSFIRGQPLPPPQPDQHDA

SEQ ID NO: 6446 - protein, 154 aa, Cupriavidus taiwanensis
MTTLSINVNGKTREVDVDPSTPLLWALRDNLAMTGTKFGCGMAACGACTVHVNGQATRSCVTPASAVAGARVTTIEGIGTDRVGRAVMDAWLKHDVAQCGYCQNGQVMSAVGLLRSKPRPTDADIDQAMAGNLCRCGTYQRIRAAIKDAARALA

SEQ ID NO: 6447 - protein, 370 aa, Haloarcula marismortui ATCC 43049
MRILRVAPWIYPDTKGGGDYHVHAMSRDQARMGHDVTVLTTREDESLPRLEETNGYTVLRVSPGVPLLGNDVSPAVARYLWHADSDDFDVMHAHSHCYFVTNLAALKRRLGDIPLAITNHGLYSQNAPERLFSLYLKTLGRWTFNQADVVFCYTDVDSQRVRDLGVTSRIEVVANGIDTERFTPEGPESDLINAEGPVVLFVGRFAEGKRPWLAVEAFAEVLAEYPDAELYLCGDGALREDLESQVAELGIEEAVTFLGHVPYDEMPNVYRSGDVLVLPSRAEGVPRTVLEAMASSTAIVTSQLEQIDDIVKTGGLTVEPTTGEALTKAIISLLDETAGTENRVVRNHRWKSTVEVTTDHLSTIINQHQQ

SEQ ID NO: 6448 - protein, 1526 aa, Yarrowia lipolytica CLIB122
MGIPKFFRYISERWPLISQQVIDTQIPEYDNLYLDMNSILHVCTHKDADVTFQLTEEQMFRAIFEYIEHLFSKIRPKKLFFMAIDGVAPRAKMNQQRSRRFRTALDAEKAKAKALEEGTILKEDQFDSNAITPGTEFMEKLTTQLNYFVHKKVSEDADWQNIDIVLSGHEVPGEGEHKINECIRINKAQPDYDPNTRHCVYGLDADLIMLGLGSHDPHFSLLREEVVFGPRRAGPKALEEQNFYLLHISLLREYLELEFQDLADEISFPYDFERILDDYILLFFFVGNDFLPNLPQIHINEDSHALFVELYKKVMKISDGYINDRGNINLQRLDLFLAEMEKFEIGIFEEQAIDLAWINKDLPELTQKYKSKRGEKLYLSPQQKELVVQKLRPFVDAHLKNKSKSDYDPDNLPEIVFDTLSEECESLVKEISLDLDCRFLKNSSTSCMLIVDYDGLRDEESPEEATQRFIGYSQTLKRYEAAPVKTAEALAQREEIYNQKFEEWKDDYYKKKFGWSTTTDEGKAELKALTENYVEGLQWILHYYYDGVPSWSWYYGYHYAPRVSDVRKGLQANLKFKAGQPFKPFQQLMGVLPERSKKLLPQAYWPLMADSNSPIYDFYPNDFELDKNGKKADWEAVVKIPFVDESRLLTAMATKETGLTAGENKRNAFGNNLLFKYSPQQDYVYPSSMPGVFQNLEHCHCVVEKFDLPSMDGLDVVIGKKDGSKWGKDMLSGFPSLKTLPYTYDIEAAGVRIFQQDSRNNTLVLNIINSYKNRSPESIARELMDQSIYVNYPYLREAKVIAVSDELFSYTFENGKVNKSPHSDTMAKEWATGSRKIKNDYIKKQGIKSGNIFVVLHVRFLAGMKKGDDGSLVKDFTGATGSFPVQTIVEKVVNEDERYKERAAQPIAAEFPLESRVILMSDFCYGAEAQVVNHIGNTKMDLQVKKSAPNSPAVVLADVGKKIARTEYATTKYYPSYQAAKMAGIQSSLLGRICSKCLIQKGDSKIDVGLNLRNEGKREKVLGYTRRTQQGWEYTQDAIALVKSYYNTFPKLVEGIGSNRDKGVPDISALVKGEPAEVNKMLESARRWLKENASRLTSVDIDTQSLSVKSISVLENYLVKNAADPDAVRFIPSVVKGTPRQAVLRPDEAFHQLRGQRFDLGDRVVYVQDSGKAAIFSQGTVIGIKAVGVDVRLDVLFDDEFVGGNNFQGRASTNRGLNVAANTVINLTNRQMMYRPKGGNRGGKANGQQTNGKTNNARGRNNGRQGSPAASAVPKPKQPSPGVKILQRPRDAAPVAETSTLGEVPTAVAAATAAVSESATVPPAPAPKTEEELKKQSEALLDSLKSKTSADAKKQVLGNVLNQYSNPQPQGPSQHQQQGPPMHYGGPQGGFVPPPPPGFPTQGFPPQGYLPQGHFPPGYYPPQPFYPGQGYPQGPGPQNQQHQQGAPQGTPQGNEDLSAQLMAALQVSDNSQQPATGLANEGGRGRGGRGRGRGGRGRGGRGRGGQGQGGQQDANNPRIPQVTPRP

SEQ ID NO: 6449 - protein, 199 aa, Wolbachia endosymbiont of Drosophila ananassae
MNLVTKSAIDFTASSVLSDGEIVDDFCLSKRIKNKYAVLFFYPLDFTFVCPTELISLNNRITEFAKRGVEVIGISVDSKFSHYKWRNTPVNDGGIGEISYTLVSDIKKSISRDYGVLYDDSIALRATFVIDDKFIVRHQSINDLPLGRNIDEFVRIVDAIKHNEEHGEVCPAGWKKGKPAMQASDEGVADYLNSYSEEL

SEQ ID NO: 6450 - protein, 156 aa, Rosa hybrid cultivar
MALSLFGTGRRSNVFDPFSLDIWDPFQGIGSLVNSSSTAGDTSAFAQTRIDWKETPEAHIFKADLPGLKKEEVKVELEEGNVLQISGERSREQEEKNDKWHRVERSSGKFLRRFRLPDNAKVEHVRASMENGVLTVTVPKAEEQKPQVKSIDISGA

SEQ ID NO: 6451 - protein, 323 aa, Mycobacterium smegmatis str. MC2 155
MTRYDSLLQALGNTPLVGLQNLSPRWDDEDGKPHVRLWAKLEDRNPTGSIKDRPALRMIEQAERDGLLQPGATILEPTSGNTGISLAMAALLKGYNMICVMPENTSIERRQILELYGARIIFSPAEGGSNTAVATAKELAAQNPSWVMLYQYGNPANSDAHYFGTGPELLADLPEITHFVAGLGTTGTLMGTGRFLREHVPGVQIVAAEPRYGEGVYALRNIDEGFIPELYDADVLTTRFSVGSFDAVRRTRELVTREGIFAGISTGAVLHAALGMAAKAVKAGERADIAFVVADAGWKYLSTGAYAGSLDDAEDALEGQLWA

SEQ ID NO: 6452 - protein, 199 aa, Synechococcus sp. WH 7805
MTANGCLRVGHQAPDFTATAVVDQEFKEISLSQYRGKYVVLFFYPLDFTFVCPTEITAFSDRYADFSSKNCEILGVSVDSKFSHLAWIQTPRNQGGIGDINYPLVADLNKEIGNAFNILDDEGKALRGLYLIDPDGVIVHATINNLPVGRNVDETLRLLQAFQYVQSNPDEVCPANWTPGSATMLEDPKGSKEYFSAIG

SEQ ID NO: 6453 - protein, 394 aa, Bacillus pumilus SAFR-032
MKVLWLTSVYPSEKHPSEGVFHETQVQELLKQGIQVTVICPNPVNPPILRMLKASYRQKKDLPEQEMRNGVTVYRPPYTALPGQLKWAQPSKRIAASVLGAMQRYQLSPDFIHAHFAMPSGGAAAVIQQKTKIPYLLTLHGSDVNVYPSYSKGAYAAFETAVKQASAVLTVSEELAKKTNDMTKVEAQCLPLGIPLQSFSKTEEDQQVIREKLGLPLHDKLVVFVGRLVKEKGLLELVEAISGMDGVKAVFVGKGPLAKELTERAGASIILPGQVPNDQVKDYLMATDLFTLPSYSEGMPTVVLEALALKVPVIATRVGGLPTLFSSYQHLLVDPHSANQLKEAIHAYLYENRWNEQVKSDLHQIVHTEYSSENNAKQLIQQYEKVLHQSRSIV

SEQ ID NO: 6454 - protein, 406 aa, Thermotoga maritima MSB8
MNIAMFSDTYAPQINGVATSIRVYKKKLTERGHKVVVVAPSAPEEEKDVFVVRSIPFPFEPQHRISIASTKNILEFMRENNVQIIHSHSPFFIGFKALRVQEEMGLPHVHTYHTLLPEYRHYIPKPFTPPKRLVEHFSAWFCNMTNVVIAPTEDIKRELESYGVKRPIEVLPTGIEVEKFEVEAPEELKRKWNPEGKKVVLYAGRIAKEKNLDFLLRVFESLNAPGIAFIMVGDGPEREEVEEFAKEKGLDLKITGFVPHDEIPLYYKLGDVFVFASKTETQGLVLLEALASGLPVVALKWKGVKDVLKNCEAAVLIEEENERLFAEKIKHILKNDRLREELSTKGREFVRKEWSVDRFVQRLEEIYTRAIEEGPVEINTSLMIKEFVKFEKLKEFFSKIEDRIWR

SEQ ID NO: 6455 - protein, 319 aa, Xylella fastidiosa Ann-1
MTIYNTILDTIGHTPVVKLNRIAPAHVDLYIKVESFNPSGSVKDRLALAIIIDAEQQGLLKPGDTIVEATSGNTGVALAMIAAARSYTFVATMVETFSIERRKLMRAYGAKVILTPAAERGSGMVRKAKELAEQHGWFLASQFSNPANPAYHRNTTAAEILRDFAGRRLDHFVSGWGTGGTLTGVGEVLKIARPDIKITASEPASAALLQGKEWQPHKIQGWTPDFVPEVLNRSVPHHILSVTDDDAITVARRLAAEEGVFSGISGGASVATALQIAQQAEQGAVILAMLPDTGERYFSTPLFADINEHSDDAWLASLG

SEQ ID NO: 6456 - protein, 457 aa, Pseudomonas aeruginosa UCBPP-PA14
MTSDSRPAVLDLIGNTPLVRVTRFDTGPCTLFLKLESQNPGGSIKDRIGVAMIEAAERDGRLRPGGTIVEATAGNTGLGLALVGRAKGYRVVLVVPDKMSTEKVLHLRAMGAEVHITRSDVGKGHPEYYQDVAARLAQDIPGAFFADQFNNPANPLAHECGTGPELWAQTGHDLDAIVVGVGSSGTLTGLTRFFQKVQPELEMVLADPEGSIMAEYSRSGTLGTPGSWAVEGIGEDFVPAIADLSSVRHAYSISDEESFAMARELLRVEGIPGGSSTGTLLAAALRFCREQKEPKRVVSFVCDTGTRYLSKIYNDQWMTDQGLLQRKHYGDLRDIIARRFEEGRVISVGPDDTLLTAFQRMRLADVSQLPVLDDGKLVGVIDESDILLGVHADAPRFRDAVSSAMNAAPETLAPGASLAQLQAVLDRGLVAIVADASGFHGLITRFDLLNHLRRKLT

SEQ ID NO: 6457 - protein, 408 aa, Thauera sp. MZ1T
MRTLDYTTEDLCRAPRLRIALVTETWAPEVNGVAMTLGRMVDGLIRRGHGVQLIRPRQRPGETAAHGEGLEEVLARGLRLPRYDGLKLGLPARVRLVREWSRQRPDLVHVATEGPLGWTAVTAANKLRIPVSSDFHTNFDHYSGHYGMGWLRQPVAAYLRRFHNRSAATFVPTAALAAQLSAQGYRSVEVISRGVDTALYSPARRDEALRRAWGLPPGGLAVISVGRLAPEKNLGLAMRAFAAIRRLRPDARMVLVGDGPQRAALARAHPDAVFVGMRHGEDLAAHYASADLFLFPSLTETFGNVTLEAMASGVCPVAYDYAAAAEVIRDLGNGASVACGDEEGFIARAVQMAGADALRAELARAARRSAEAIDWERVNDRFAAALLRVWRAGSGRPLDLSEPRPEET

SEQ ID NO: 6458 - protein, 323 aa, Escherichia coli O157:H7 EDL933
MSKIFEDNSLTIGHTPLVRLNRIGNGRILAKVESRNPSFSVKCRIGANMIWDAEKRGVLKPGVELVEPTSGNTGIALAYVAAARGYKLTLTMPETMSIERRKLLKALGANLVLTEGAKGMKGAIQKAEEIVASNPEKYLLLQQFSNPANPEIHEKTTGPEIWEDTDGQVDVFIAGVGTGGTLTGVSRYIKGTKGKTDLISVAVEPTDSPVIAQALAGEEIKPGPHKIQGIGAGFIPANLDLKLVDKVIGITNEEAISTARRLMEEEGILAGISSGAAVAAALKLQEDESFTNKNIVVILPSSGERYLSTALFADLFTEKELQQ

SEQ ID NO: 6459 - protein, 422 aa, Streptomyces sp. 139
MHVMVVHNRYASAQPSGENKVVDQEVALLREAGHRVGVFERRSDDIVARSLPAKAAIPLLVPWNPAVRARLAERLRAERPDVVHLHNVFPLLSPAVLAACADAGVPAVATLHNYTQVCPPGTLHRDGSPCTACVGRAPLPAVRHGCYRGSSLATVPLAVSLSVNRRRWWSGVERFFCISAAQREVLVGAGMPAGRLVVKHNFVPETDVRRTGPGEHLLYLGRLAEVKGVRLLMAAWDELTAAGGVGVPLVIAGTGPLEAEVAAWAAGRDDVRYVGLYDRVRCRRAVAEAVAVVAPSTWQEAFGLVVVEAMAAGVPAVASGHGAFTELVEDGATGLLHRPGDAASLAAALRRVTAEGGHNQEMGRAARLRYERGFSPEVGLERLVEGYRAAIAGHGGADGPSRGETQTDSRRGDLRERDGGNR

SEQ ID NO: 6460 - protein, 180 aa, Synechococcus sp. PCC 7335
MTLSRTVLAIYLTFILGLSTLFNLPAYALGGTQPKIDRPAPTFTLPSSGDGEIALSDYLGQWVVLYFYPRDFTPGCTLEAKRFQQDLPEYQARNAQILGVSADDVESHAEFCDSEALVFPLLSDPDGTVSQAYGSWMKPMSMRHTYLINPEGILKERFLGVRPAIHSQEVLARLDELSAS

SEQ ID NO: 6461 - protein, 144 aa, Cyanothece sp. ATCC 51142
MALAVGTVAPDFTTVDDEGNTVSLSDYKGKVVVLYFYPKDDTPGCTKEAQSFRDNYQQYQDKDMVVFGVSMDDQASHKAFKEKYGLPFQLLVDKDGKLTKAYDVEGGGYSKRVTYIINGEGKISYVDEKVKTDTHAQDILGVAG

SEQ ID NO: 6462 - protein, 218 aa, Medicago truncatula
MPGLTIGDTIPDLEVDTTQGKIKLHHFCSDSWTILFSHPGDFTPVCTTELGKMAQYASEFNKRGVMLLGMSCDDLESHKEWIKDIEAHTPGAKVNYPIISDPKREIIKQLNMVDPDEKDSNGNLPSRALHIVGPDKKIKLSFLYPAQTGRNMDEVLRVVESLQKASKYKIATPANWKPGEPVVISPDVTNDQAKEMFPQGFKTADLPSKKEYLRFTNV

SEQ ID NO: 6463 - protein, 524 aa, Gibberella zeae PH-1
MFPQTQPSAMSPYPSHDLSEFPETLKGKRILLCTESFGPVNGVSRTTLMLVNHLRANGAQVAVVAPHNHTEHNTFTPPPSPTLSPADKQPEVRVTGYPLPFNPELSIVYPVRNSTLFSKTFGDDSPPDLIYLASPASLGFQVMLQLRQQPREKQIPVICNFQTDLAGYCSILFPAPLSHVAVFAFAAVQSYLFSHSSIKTIFYPSSFVKRYLVGQNVPENKLELLTRGVNTELFNPRMRSEALRNKLAPNGEIIFVTVSRIAGEKGFDFLAKAAKELDARGLDFKLYIVGGNRNPDVEKEVQELFDPLREKGKVVFAGFQVGEDLAAAYASGDVFLHCSITETFGLVVLESMASGVPVVARDEGGPSDIVQQGDNGFLVPPNDLDGFVAKAMKLGRDHNLRAQMGHSARAYACEATWEKINNKVAWRMADTILERKRERGSPSSCTPSILRTSTESLIPIYGWLMMNDAIRETVTRGIVDARLMGGLGVILSFWMVTGWYMAFTECFLWAKGRWRSAERRLSVS

SEQ ID NO: 6464 - protein, 222 aa, Aquifex aeolicus VF5
MEVVSLPRLGEPAPAFEAQTTFGPVKFPDDFKGQWVVLFSHPADFTPVCTTEFVAFAKNYEEFKKRNVQLIGLSVDSNFSHIAWVMNIKEKFGIEIPFPIIADHNMEVAKKYGMIHPAQSTTFTVRALFVIDDKGILRAMIYYPLTTGRNIREVIRLVDALQTADREGVATPADWVPEPQTWEFTEENTKVIVPPPTTYEDAVKRLQEGYECADWYICKKKV

SEQ ID NO: 6465 - protein, 211 aa, Thermosynechococcus elongatus BP-1
MSLKLGDVVPNFTQASSMGNINFYEWAGDSWVVLFSHPADYTPVCTTELGEVARLRPEFEKRNVKVLALSVDSVESHLGWIKDIEEVNNVKVDYPILADEDKKVSTLYDMIHPNSLNNLTVRTVFIIDPQKRLRLTMTYPASTGRNFAEILRVIDSLQLTDNYSVATPANWQEGQECVIVPSLSDEEAKQKFPKGFNAVKPYLRLTPQPNK

SEQ ID NO: 6466 - protein, 380 aa, Staphylococcus aureus subsp. aureus Mu50
MKIGITCYPSMGGSGIIATELGIKLAERGHEVHFITSNIPFRIRKPLPNMIFHQVEVNQYAVFQYPPYDITLSTKIAEVIKEYDLDLLHMHYAVPHAICGILAREMSGKDIKIMTTLHGTDITVLGYDHSLQGAIKFGIEKSDIVTSVSKSLAQETHEIIETNKEIIPIYNFVRENEFPTKHNTALKSQFGIAPDEKVLIHVSNFRQVKRIDTIIETFAKVREKIPSKLILLGDGPELVPMRQLTKELNVEEDVLFLGKQDCVSEFYQLSDLVLLLSEKESFGLTLLEAMKTGVVPIGSNAGGIKEVIKHGETGFVVDVGDCDSASDYAIRLLEDKALYNKLQKNMLADIAERFGSELITDQYEYYYQKMLNEHNKSKGE

SEQ ID NO: 6467 - protein, 382 aa, Desulfovibrio desulfuricans subsp. desulfuricans str. G20
MSLYFCTPFKPPDHPRPSGDVTIAQDLCAFMRQQGQHVETVPYLPTDRIWRRPAMWPRLAWRRAALGLSLCRRRPGAWFTYHSYWRAPDLLGPAAAAHGVPYFIFAGAHSPKRAHDRASRWGHDKNLAALRAAAQIFVNKHRDLPALRSVLPESRLSFIAPGIRPDDFAFDRSSREELRRQWRVSTASVVLSVAMLRKGVKTEGIKQVISACARLRARGEDIILVVAGDGPEKEALERLAGYELAGNARFTGFVPREALYKYYSAADLFAFPGINEGLGMVYLEAQAAGLPVVAWDHDGAPELVKTGTTGIITPAWDTAAFAHAIGWLATDGRMRRTLGDNARNHVRAQHNLHTNYSRMLDIMNTLCGETRPDGTCTHPDFK

SEQ ID NO: 6468 - protein, 188 aa, Porphyromonas gingivalis W83
MTPILNTVFPEFKLNAYHNGEFKVITNEDLKGKWSLVVFYPGDFTFVCPTELEDLANKYEEFKQLGVEVYSCSCDTHFVHKAWADASPAIKKVQYPMLADPSGALTRDLGILIDDVHMAYRGSFVINPEGIIKIVELNDNSVGRDAEEILRKIKAAQYVAAHDGQVCPAKWREGQQTLKPSIDLVGKI

SEQ ID NO: 6469 - protein, 456 aa, Xylella fastidiosa Dixon
MVIHSSVLELIGNTPIIKAQRLDTGLCDLFLKLESANPGGSIKDRVGLSMIEAAECRGHIKPGATLVDGAASSTSMGLAFVARQKGYRLILVVPDNMGWEKISNLKAMGAEVILTRSDVSKGHPEHYQDLAEKLAAETPGAYFINQFGNADNPAAHEFGTGPEILKQMGGHVDAVVLGCDSAGTITGLSRAFDSVASDVELILADPVGSILTQYINEGTRSDKSGTWLVEGIGSDCLPPISDFRRIKKTYAISDAESFHTARELLSKEGILGGSSTGTLLAAALKYCREQIERKRVLVFVCDTGNKYLLNMYNDDWMLDNGFLKRPHYGDLRDLILHPYSQRHTVVVDPNDLLTVAYQRMKRYGVSQLPVIEDRQLVGILDESDVLLHVYGDETRFCDPVSTAMVSKLHRLDVKSPIEALLPVFERGQVAIVMEDDQFLGLITRIDLLNYLRRRMQ

SEQ ID NO: 6470 - protein, 538 aa, Yarrowia lipolytica CLIB122
MVTFFLHLSQATFLPPPHPHIFTTYTMTPPPVAQTVLEHIGDTPMVELQKIPQSLGIKCRILGKCEYFNAGGSVKDRIAKRMVLEAEKQGRIKPDAGYTLIEPTSGNTGIGLALVGAVRGYRTIITLPEKMSNEKVSVLKALGAEIVRTPTEAAWDAPESHIGVARRLEQEIPKAVILDQYGNEANPDAHLYGTGAEIWEQTEGKVTHLVAGAGTGGTITGIAKALKAKNKDVVVVAADPKGSILAVPESLNDSNEGYKVEGIGYDFVPDVLDRDVINSWIKTEDRESFLLSRRLIKEEGLLVGGSSGSALAAALQVAKDLTENDTVVVVFPDSVRSYITKFIDDDWMKNNGFVDDATLAEQAKRKQQYKGATIADLHLKPVVTVKGDSTVATAVELMREKGFDQIPVSSKSSGKLIGLVTLGNLLSYLSHGRATPETPVEKVMLDFRKLDSHQLTADAIASATASLSIGTPSGDKKASKQRQFVEVTVDTPLSALNKFFEHNSSVIVTEKDSDGVKPVHIVTKVDLLAYLVKNGSFE

SEQ ID NO: 6471 - protein, 322 aa, Prochlorococcus marinus str. NATL2A
MPIANDITYLVGQTPLVKLNRLPNEFDCRAEIIAKLESFNPTASVKDRIAGAMVMSAEKEGTIKPGHTVLVEPTSGNTGIALAMVAAAKGYRLILTMPDTMSTERRSMLRAFGAELQLTPGQEGIQGAIQLAKELVASIPNAYLLQQFDNLSNPEIHEKTTAEEIWEDCEGKLDALIAGVGTGGTITGCARFLKQKNPKIKVFAVEPSSSPVLSGGNPGSHAIQGIGAGFIPNVLDMNQIDEVIRINDNEAMDIGRRLAKEEGLLSGVSSGAAVAAALKVGNQPEFANKRLIVILPSFGERYLSTTMFTSIPAKPVKGNEYL

SEQ ID NO: 6472 - protein, 222 aa, Yarrowia lipolytica CLIB122
MATERAPLRLGSKAPDFEADTSNGPIKFHDFIGDNWTVLFSHPDDFTPVCTTELGAFAKLEPEFSKRGVKLIGLSANDTSSHKAWIKDIDEVNDSKLTFPIIADPTRQISLLYDMIDHQDATNVDAKGIAFTIRSVFIIDPKKTIRLILQYPASTGRNTAEVLRVIDSLQTGDKHRVTTPINWTPGQDVIVHPSVSNEEAATLFPKFKTIKPYLRTTPLSAE

SEQ ID NO: 6473 - protein, 300 aa, Helicobacter hepaticus ATCC 51449
MIAQNITELIGNTPILQLQQFAPNLYGKCEFLNPSHSVKDRPAYAMIDEALKTGKITKDTTIVECTSGNMGISLAMICASLGLKIIITMPESMSIERRKMIALFGANLVLTPASEGMQGALNKAQEILDSTPNSFMPSQFDNLANKEMHKRTTALEIYKSFEGSLDYFVAGFGTGGTISGVGEVLKEKIPSIKIIGVEPAASPLLSKGQAGPHKIQGIGANFIPKILNRDVIDSIEVVENEVAIKMAQNLGKIGVMVGISSGANVAAALEIAKNNPNKKVLTMLNDTAERYLSTDLFNTL

SEQ ID NO: 6474 - protein, 328 aa, Prochlorococcus marinus subsp. pastoris str. CCMP1986
MAKIYEDNSFAIGNTPLVKLKSVTKNAKATVLAKIEGRNPAYSVKCRIGANMIWDAEKSGKLTKDKTIVEPTSGNTGIALAFTASARGYKLVLTMPESMSIERRRVMAVLGAEIVLTEASKGMPGAIAKAKEIAESNPSKYFMPGQFDNPANPEIHFKTTGPEIWDDCDGEIDVFVAGVGTGGTITGVSRYIKQEKGKNIVSVAVEPSHSPVITQTMNGEEVKSGPHKIQGIGAGFIPKNLDLSIVDKVEQVTNDESIEMALRLAKEEGLLVGISCGAAAAAAVRLAEQDEYAGKTIVVVLPDLAERYLSSIMFTEVPNGIIEEPVKA

SEQ ID NO: 6475 - protein, 398 aa, Acholeplasma laidlawii
MRIGIFSEAYLPLISGVVTSVVNLKEGLEALGHEVYVITPIPSKDKFENDPSVIRIPGWVIPRKSLKGFRLVLFVKRYVRKMRKLKLDVVHIHTEFSMGKLGLAVAKKERIPSVYTLHTSYQDYTHYVSKLLTRFAPNAAKKLAGKINNQYTKNCHMTIVPTKKIYDKMIRLKHDGEFTIIPSGINLKPFYKSSYTSEQVQALKDKLGIRNDEFVAILVARIAKEKSIGDLVEAFVEFYKSYPNSRFIIIGDGPDKPVLDKLIDSKKASKYINTLGFVKNAEVGLYYQIADVFLNASTTETQGLTYVEALAASLPIIVRYDDVFDAFVEDGKNGIFFNKNEELVKHLIHIRQNPEILGTLSKNAEISTKPYAKEVYAKSCETLYLDLIDKNNKKLNKK

SEQ ID NO: 6476 - protein, 240 aa, Triticum aestivum; identical to SEQ ID NO: 5174

SEQ ID NO: 6477 - protein, 396 aa, Pseudomonas putida KT2440
MNTPALRITLVSETFPPEINGVANTLGRLSDGLRQRGHEVEVVRPRQAGEGHVHNDPQLMLCRGWALPGYPGLQWGEVSMHKLLRRWRRQRPDVLYIATEGPLGLSALRAARRLGVAVVSGFHTNFPQYSGQYGLGLLARLLTHYLRWFHRRTAITLVPSASQRLELERRGFERLELLARGVDACLFNPARRSQALRESWGLGPEDIAVLHVGRLAAEKNLGLLRPCFEALRKTYPQKRLRLIMVGDGPQRTKLEQEIPDAVFCGAQRGERLAEHYASGDLFLFPSLTETFGNVVLEAMASGLAVVAYDEAAAAQHIRHGHSGALAMPGDQAAFVDAACWLLEEVETLRRVRLNARQHASRQGWPAIVEQFEGYLNSACRQPGATAGRSAQCLQRL

SEQ ID NO: 6478 - protein, 261 aa, Saccharomyces cerevisiae
MFSRICSAQLKRTAWTLPKQAHLQSQTIKTFATAPILCKQFKQSDQPRLRINSDAPNFDADTTVGKINFYDYLGDSWGVLFSHPADFTPVCTTEVSAFAKLKPEFDKRNVKLIGLSVEDVESHEKWIQDIKEIAKVKNVGFPIIGDTFRNVAFLYDMVDAEGFKNINDGSLKTVRSVFVIDPKKKIRLIFTYPSTVGRNTSEVLRVIDALQLTDKEGVVTPINWQPADDVIIPPSVSNDEAKAKFGQFNEIKPYLRFTKSK

SEQ ID NO: 6479 - protein, 303 aa, Escherichia coli O157:H7 EDL933
MSTLEQTIGNTPLVKLQRMGPNNGSEVWLKLEGNNPAGSVKDRAALSMIVEAEKRGEIKPGDVLIEATSGNTGIALAMIAALKGYRMKLLMPDNMSQERRAAMRAYGAELILVTKEQGMEGARDLALEMADRGEGKLLDQFNNPDNPYAHYTTTGPEIWQQTGGRITYFVSSMGTTGTITGVSRFMREQSKPVTIVGLQPEEGSSIPGIRRWPAEYLPGIFNASLVDEVLDIHQRDAENTMRELAVREGIFCGVSSGGAVAGALRVAKANPGAVVVAIICDRGDRYLSTGVFGEEHFSQGAGI

SEQ ID NO: 6480 - protein, 422 aa, Oryza sativa
MAAWNTSILLPPPPPLLSRAAVATPALNPYPLRLHRRHPQKPLCLPSESYPADTDADASSASLDSRPRRIALFVEPSPFAYVSGYKNRFLNFIKYLREMGDEVIVITTHEGVPQEFYGAKLIGSWSFPCPWYQKVPLSLALSPRIIGEVARFKPDIIHASSPGIMVAQNFYYINTLSFNMPLTAFVSPKQLYTEIYIQLAGEAYVVDYNNGEPEKPLILYVGRLGVEKSLDFLKRVMDRLPGSRIAFVGDGPFRAELQLMFTGMPAVFTGTLQGEELSQAYASGDVFVMPSESETLGFVVLEAMSSGVPVVAARAGGIPDIIPEDQEGKTSFLYTPGDVDDCVSKIERLLTCEELRETMRKAARKEMEKFDWRAATRKIRNEQYSAAIWFWRKKRAQLLRPIQWVSRRLFRPTPAPSTMNQS

SEQ ID NO: 6481 - protein, 299 aa, Campylobacter jejuni
MKVHEKVSELIGNTPIIHLKKFGINVFAKCEFLNPSHSIKDRAAFEMIKDALDSKKINQDTTIVEATSGNTGISLAMICADLGLKFVAVMPESMSLERKKMITLFGARLELTPANLGMKGAVDKANEILLNTPNSFMVSQFENISNKNAHRKNTALEILRDLDNELDIFVAGFGTGGTISGVGEILKEKLEKVHIVGVEPLNSPLLSKGEAGSHKIQGIGANFIPAILNKEVIDQVITVSNEDAINTAKELAKIGLMVGISSGANVFAASMLAKKFPDKRILTMLNDTAERYLSTDLFA

SEQ ID NO: 6482 - protein, 316 aa, Coxiella burnetii RSA 493
MVLDNILQVIGKTPVVRLHRIGQSLPCELYGKCEFLNPGGSVKDRIGAAMIESAEKQGKIKPGDTLIEPTSGNTGIGIALAGAVKGYRVIITMPEKMSHEKQVVLEALGATIYRTPTEAAYDDPESHISLAKRLNQEIPNSYILDQYSNAENPDIHYQTTGQEILDDMGENLSMVVMGVGTGGTIIGVAKKLKEVNPSIQIIGVDPIGSILGGGDEIKPYLVEGIGYDFIPEVLDNNLIDEYIKINDKDSFLMARRLIREEGLLVGGSSGSAVWAACQAAQRLKEGERCLVILPDAIRNYLTKFVDDAWMKAQGFL

SEQ ID NO: 6483 - protein, 316 aa, Haemophilus influenzae
  misc_feature (42)..(42): Xaa can be any naturally occurring amino acid
MAIYADNSYSIGNTPLVRLKHFGHNGNVVVKIEGRNPSYSVXCRIGANMVWQAEKDGTLTKGKEIVDATSGNTGIALAYVAAARGYKITLTMPETMSLERKRLLCGLGVNLVLTEGAKGMKGAIAKAEEIVASDPSRYVMLKQFENPANPQIHRETTGPEIWKDTDGKVDVVVAGVGTGGSITGISRAIKLDFGKQITSVAVEPVESPVISQTLAGEEVKPGPHKIQGIGAGFIPKNLDLSIIDRVETVDSDTALATARRLMAEEGILAGISSGAAVAAADRLAKLPEFADKLIVVILPSASERYLSTALFEGIEG

SEQ ID NO: 6484 - protein, 786 aa, Micromonospora chersina
MSGVPEEGRIGSPARRIEDPRLLTGRGRYVADLTAPHLAHAAFLRSTVPHARITVDASAARTAPGVVAVFTAADLAGTLGPVSFDASIPGMTQLVHTALADDRVRLVGDPVAMVVAESRYLAEDALELIEVRYDELPPVPDVATALDPAAPALYDVAPGNVPYHDTARYGDVDGAFRRADRVIGRTLRQHRYMAAPLETRGGLAAYEPAGGELTYHASAHAPHLMRMVLAAHLRLPPHRVRVVVPDMGGSFGSKWGITREDLLVCAAAVRTGRPVRWIEDRRENLLVGGHARDESLHLEAAVRADGTLLGLRARLVMDVGAYSVIPMNPAFFTLALRLLIPGPYRVPAYDFEVSTVCTNKGPYVAYRGPWAVETWAREVLLDIIAGELGLAPEEIRRRNLVTPAEQPYRTAAGWRLDGTRASATLDRALELADLPRFRAEQRRARERGEVLGFGLATFIEPSPGGAEFLAMSGGGKETARVRVEPTGEVSLFTSQIPHGQGHETTLAQVVAAEFGLPYTAVRVVHGDTDATPFSMVGTGGSRSATFGSGAAVRAARAVRDQVLRLASGMLGAPPEELELGGGRVFVRERPATGLTMVQLAGMVSLAPAYLPPDTPTELAATATHDGADGGFAQATHCCWVRVDPGTGQVAVTRYLVVEDCGSMINPAVVEGQIRGGTAQGLGGVLHERLHYDAAARPLTGTLRDYLLPTAADVPPIEIVHLGPEPGAGPPDYRGVGEGGAICAPPAITNALSDALGTEITQQSVTPSFVLAALRKAGATPPDLLDR

SEQ ID NO: 6485 - protein, 164 aa, Micromonospora chersina
MESVELLVNGVRREGRVEPRRTLADFLREDLGLTGTHVGCEQGACGACTVLLDGEPVYACLLFAVQARGHEITTVEGLAAPGELDPMQDAFRRCHALQCGFCTPGMLLAAHGLLADDPDPDDAGIRIALAGNICRCTGYQSIVDAVRLAAAERRRSAAPDGAAR

SEQ ID NO: 6486 - protein, 324 aa, Polaromonas sp. JS666
MDVRDGFIGSIGNTPLIRLARLSAETGCEILGKAEFLNPGGSVKDRAALYIIQDAERRGALKPGGTVVEGTAGNTGIGLAHICAARGYRCVIVIPETQSQEKMDLLRVLGAEVRPVPAVPYKDPNNYQKIASRLAQEMDNAIWANQFDNLVNRQAHYETTGPEIWRDTAGKVDAFTCSTGTGGTLAGVARFLKEQNPAVRSVLADPYGSALYSFVKTGQLTADGNSITEGIGSSRVTANLEGTPIDDAVRINDQDCVTMVYRLLREEGLFVGGSTGINVAAAAWLARQMGPGHTIVTLLCDRGGLYSSRLFNLAWLMEKGLAPQ

SEQ ID NO: 6487 - protein, 381 aa, Gemmata obscuriglobus UQM 2246
MNLVHLTASTFFGGPERQMLGLALALPDTVRTTFATFPEGGRGTAFLDEVRKHGFPAAPLKTDFPRVFSAVREVTELLRTTACDVLICHGYKAHVLGRLAARRVGIPAVAVSRGWTAETRKVKAYEWIDRRHMPLMDHVICVSEGQAEKVRRWCRVPADRLSVIRNSARLGAFENADPQARERLLGFFPAGGPVSQVVLGAGRFSPEKGFGVLVEAAHAICREHPNAGVVLFGEGPLRGELERRIAELDLTGRVALPGFRTDLDALIGGADVVVLPSFTEGLPNVALEASAAGVPVVATAVGGTPEAIADTVNGFLVPPGDPGAIAAKVGELLRDRSLRSRFGDAGRARMRDLFTFQAQADAYLRLLRALTLRPTPVEVAA

SEQ ID NO: 6488 - protein, 213 aa, Physcomitrella patens subsp. patens
MQNIIDRTSQDTGVNAQSSAHPSSWMVLQPHHGLPEALGGPDPVTVPDSTLSESIPVSHSPRSREFFFCVAHRIVAMACAAAASGVAASSVVIPRAPSAACSSSASGTSTSLAVPKSFCGLGKSFGARVATANVAVAKAGAVAGAKAASQKRGVARASAEDDYAPLVGNVAPDFEAEAVFDQEFIKIKLSEYIGKKYVVLFFYPLDFTFVCPT

SEQ ID NO: 6489 - protein, 898 aa, Musa acuminata
MLILILAVFVPSYTEEPRCLNSELWHACAGPLVSLPAVGSRVAASTNKEVDSQIPNYPSLPPQLICQLHNVTMHADVETDEVYAQMTLQPLSAQEQKDPYLPADLGTPSKQPTNYFCKTLTASDTSTHGGFSVPRRAAEKVFPPLDFSQQPPAQELVARDLHGNEWKFRHIFRGQPKRHLLTTGWSVFVSAKRLVAGDSVLFIWNENNQLLLGIRRANRPQTVMPSSVLSSDSMHIGLLAAAAHAAATNSRFTIFYNPRASPSEFVIPLTKYVKAVYHTRVSVGMRFRMLFETEESSVRRYMGTITGISDLDPVRWPNSHWRSVKVGWDESTAGEKQPRVSLWEIEPLTTFPMYPSSFPLRFKRPWPTGLPFFHGGRDDEFSLNSPLMWLRDGGNPALQSLNFQGVGVTPWMQPRLGTSMLALQPDMHQTVAAVALQEMQTMDLTKQVTPAMLQFQQPQNTTSRSTPILQSQILQHAQPQSHQPLLHTIQGNQMQSQAQSQFLQHHLQQGHSFAEQQQQQQHNLQLQIPEHQQFQQQRVLPAYQQVPYGAANLSQLSSSSQSQSTTLNMISPSSQLKDFPDSNGNSVSASSVSPLDNILHQISPEETSQLLSLPRYAQPVTSNPWSSKRIAVESMLPSGAQSVLSQVEQIGSGQPNIPLQSVVLPPFPGRECSMNQDGNMDIQNQHMFGVNIDSSISVQNGIRSLGTGVNGTNSTNIPYAACNLLRSAGNDFPINQAVNGSNGLDESGLLQSTENVDRVNSQSGTFVKVYKSGSFGRSLDITRFSSYHELRSELGHLFGLEGQLEDPLRSGWQLVFVDREDDVLLVGDDPWQEFVNSVSCIKILSPEEVQQMGKQGVDFVNSAPIKRLQSNGCDDYVSQQHSRNLSAARITSVGSFKY

SEQ ID NO: 6490 - protein, 343 aa, Roseovarius nubinhibens ISM
MRIAQDLAAAVGNTPLIRLRRASEETGCNILGKAEFLNPGQSVKDRAALYIIKDAVARGDLKPGGTIVEGTAGNTGIGLALVGASMGFRTVIVIPETQSQEKKDMIRLAGAELVQVPAAPYRNPNNYVRYSGRLAEEMARHSNEGVIWANQFDNVANRQAHIETTGPEIWEQTGGKVDGFVCAVGSGGTLAGVGMALQPKGVKIGLADPDGATLYNFYKHGEHKSEGSSITEGIGQGRITANLEGFTPDMAWNIPDSEALPIVFDLLAEEGLCLGGSSGINVAGAIRMAREMGPGHTIVTPLCDYGTRYQSKLFNPEFLREKGLPVPGWLSEAPRSIPGVFEE

SEQ ID NO: 6491 - protein, 156 aa, Mycobacterium sp. MCS
MAALDVGTEAPDFTLKDQNGQPVTLGDFRGAKNVLLVFFPLAFTGICQGELDEIRDNLPTYENDDTATLAISVGPPPTHKIWATQSGFTFPVLSDFWPHGAVAQAYGVFNADAGIANRGTFVVDRSGIIRFSEMKSPGEARDQAVWTDALAALRSS

SEQ ID NO: 6492 - protein, 252 aa, Zea mays
MWHAAAAPNNLHPAVATTSSPALRRARWPIARPSSSVKVQSSTRNGNGSADNLDHLQRASKGRQQRQGASAPGPRARRVVRTTPFGLWWDSFPEARTLDQMVRTIMDADDADTDTRFGGVVPAAAAAAPTAVPRADHGRTPWEVRERAGEYLVRFDMPGMARDDVRVSVQDRTLVVAAEKKQQPAADGGGDEEGDNEEEAWPPASFGRYRTRVELPENVDVERIAAEVKDGVLYLTIPKLSAGAKVVNIQVQ

SEQ ID NO: 6493 - protein, 425 aa, Triticum aestivum
MGVPAFYRWLADRYPQTVSDAEEEEPVELEPGAFVPVDPRRPNPNGLEFDNLYLDMNGIIHPCFHPEGRPSPTTYDEVFKSIFDYIDHLFCLVRPRKILYMAIDGVAPRAKMNQQRSRRFRAAKDAADAAAEEERLRLEFEAEGRNLVRKEKSEAIDSNVITPGTPFMFVLSSALQYYIQLRLNHSPGWQSVKVILSDSNVPGEGEHKIMSYIRLQRNLPGFDPNTRHVLYGLDADLIMLALATHEVHFSILREVITMPGQHEKCFLCGQVGHLAAECQGPGPADNVVELPPIHKKKYQFLNIWVLREYLEKDLEIVDPPFKINLERILDDFVFLCFFVGNDFLPHMPTLEIREGAINLLMNIYRAEFKPMGGYLTDGGEVLLERVEHFIQAVAIHEEQIFRKRARIHKAYENNEDRRRAQGENS

SEQ ID NO: 6494 - protein, 157 aa, Cyanothece sp. PCC 7424
MSNLPQIGEKVPNFTGKNQEGILVSLADFSSHWLVLYFYPKDNTPGCTTEAIDFSQFLGEFTALGAKILGVSPDSEKSHGKFIEKHNLSIQLLSDPDHQVAEAYGVWGLKKFMGKEYMGIIRSTFLIDPDGKLVYTWPNVRVKGHAEAVLKKLEEVM

SEQ ID NO: 6495 - protein, 1139 aa, Oryza sativa
  misc_feature (607)..(607): Xaa can be any naturally occurring amino acid
MPGPEARPLPPDTEESDVSLNWLLGARDRFVLTSERPNKKRKLLGADAGLERLVQLPPLEGEAGTTCDVCCLGECGTSSNRMLHCSSCKVSVHQKCYGVHVVPDQSWLCAWCKSIRSARRQTRSDAGRTVLMPCVLCPKEKGALKPVKRDSGQIADGGNLKFVHLFCSLWTPEVVVEDLNSMEPVTNVGDIQENRTKLVCSLCKVMHGACIRCSHGACRACFHPICARESKHQMEIWGKTGNTNVEMRAFCLKHSTVQETISIQNDRICAEEDTSQIELDDASLATQKIQQLRLTRNNKDKFTSSMIASSCSSSLKQTTELATSRSTGIRHESQETQITDMAVDRPIGDRCLVSNSGDVSTALRKLIDQGMVNVGDIESELGVSSESLEAALVPETSTFSPGLKLKIIKLLQNTIRVPSVQEKCSKEGSLALQGTVFTGESKSLTDTQICSELEEGISSFDHCCPEGDNTNKDWADSVENGFHNCGEDCISGKCFLNQDGSRCYVHPFIERKLRILWDNIFKQNKHPIHCHEQSTCDPHDRIAGSSSTKLEQLADIAVADQVSKAKSSGILEHSPHDEIEGELLHLQSRLLDDVGGAKQRYVLLIFXEDLVLKIVQSLSHDLDSFNKRKWDHIIANQFLRDLREAKKRGNTERRHKEAQAIMAAAARCILPTSRNAPVRKVAECDVLSAKQESVPVAVPAKQEVHSPKQESIPKFNTGSSRVSQLISVQQANDSSPNSKVSADANIGSFDLAKFSKKNALPCDICMRSETVLNRIFVCSSCKAAVHLDCYRSVTNPTGPWKCELCQEMPSDVVAGSQSDCDGSKPCLLQCDLCHGTSGAFRKTIKGRCIHAFCAEWLLESTFTRGQYNAVDGMESLPKDKDTCAICHRNVGSCLKCSTVDCQITFHPTCARDAGFYMDTKTIGSTLEHKAYCGKHGIEQRKADLLQLHGPEEVKNMKQMRVDLEVLRLICERVVKREKLKKDLVVCGHDTLAARRNSIAYSTRTSYCGSGPGASSESATTSVNNSYSGLMQRTDDVAVDSIISRKPTVRFSLNNSDADRNTADSSTSSISYKQKLDDRESLADKNLPKKPATAMQISEEGETKSSDKKNQRPPKSIVYTRRSALSKKRQLSQNVEGPGG

SEQ ID NO: 6496 - protein, 308 aa, Listeria monocytogenes EGD-e
MTIANSITDLIGKTPIVKLNRLPEAGSADVYVKLEFQNPGGSVKDRIANAMIESAEKSGALKPGDTIIEPTSGNTGIGLAMVAAAKGYQAIFVMPETMSLERRKLLQAYGAKLVLTPGPDGMKGAIAKAEELAKENNYFVPQQFHNPANPAVHEETTGPEIVEAFGKDGLDAFIAGVGTGGTVTGVGHVLKKNYPDVKIYALEPEESPVLSGGSPSPHKIQGIGAGFVPDTLDTKVYDGILKVSSEDALETAREVAKKEGILVGISSGATIKAALDLAKELGAGKKVLAIVASNGERYLSTPLYNFED

SEQ ID NO: 6497 - protein, 352 aa, Idiomarina baltica OS145
MLVGNRTSDLVGQTDLLRVHSLSERSGSNIYLKCEFQNPGGSIKDRAAKQLIEDAMERGELKPGMTVVEGTAGNTGIGLALVAKSFGLKMLAVMPNDQSPEKERMIALHGGQLKTVDPVPFKNPNHFYHTARRIAEERDDCWWANQFENTSNARAHYLHTGPEIWQQLNGDIDTFVSVAGTGGTIGGNSRYFKEQNPDIDVWLADPDGSGIFEFLRTGEYVSNGSSMTEGIGIMRLVDNFRQARINHAVNLPDQDLISISRYVREQDGIVLGSSSALNLAAAYAAALNGQRGRNIVTFACDLGERSASKLYNDDYLKQKGLTIEPEPIEQLTERYQHLGDRLIEVNWSGDDS

SEQ ID NO: 6498 - protein, 155 aa, Clostridium perfringens ATCC 13124
MSIEINKLAPDFKLMGSDGKEHSLSDYKGKNIVLYFYPKDNTAGCTTEACDFRDNIQNFHDLNAIILGVSRDSLASHDKFITKLSLPFVLLSDPDETVCKLYDVIKEKNMYGKKYMGVERSTFLINKEGILIEEFRKVRVKGHIEKVLDKLKEIN

SEQ ID NO: 6499 - protein, 1418 aa, Ostreococcus tauri
MHDRPPGEKVISSNSRARAAKTSPVSRASVPKSTQGRPRPRLASTASPVAPRSSLTATARRKFEFVERSIDQVMGVPKFFRWLAERYPLLQQEIAGSQIPKIDNLYLDMNGVIHNCSHGAGTDVNTRMSEDEMMSKVFAYLDHLFRMTRPNKLLYMAIDGVAPRAKMNQQRSRRFRSASEAAKDREEARRRGEPEPEGEPFDSNCITPGTEFMARLTEHLKFYVRKKQTEDPLWAKVTVILSGHEVRGEGEHKIMEHIRWARTQPGWEPNQTHCLYGLDADLIMLALVTHEPHFCLLREVVKFGGGEKGQPSREILSNPTDDGFILLHIGLLREYLDLEFREKNLSFGYDLERVIDDFILLCMLVGNDFLPALPTLNIAEGALNTLFKVYHDTLPMLGGYITGDEGGGTFNAERLEKIMSIMSTFERQVLEDRALDVEKEEEKKARRNKRFGDGSASELNVEEKFDKDMSEMSETDGTPQVSSDPVMMNAAKRAMILEGGEEGLQAWKDQYYREKLGLKMGEAAPLAEIRQAYFDGLNWVLRYYYRGVASWTWYYPYHYAPMASDLCAGMEKLTSEFDYGEPFRPFEQLMAVQPPSSSKLLPEPFRHFMEDPRSPLAEFFPEDIPVDFEGKRNDWEGVVLLPFLDADRLKAAVASVEDSQLTAGEIARNKPGHLIFFNHAPGGAGDVQSTLPKSFAGLFPAKSKMTMRMPPGEFPDDVKCFAGEDSVFPGTKIGLDSPSGFPTVRTLPVSGALKNAGVKVFGNASKKESLVIQIDGVDKELVGDLTGSGASDIAAVLLNKRVQIKWPYLQEALVVGVSDAKERIVPVPGKPNDFASKPNNSSEWGAEMQKVTSEYLAKYGVAAGRSNVALHCRACEGLVRHPDGSLQKRFAKTEMMVPIQLVIAKHNAPSSRMEERPALDAGEAAGDFQEGDVALYLGRSYFGALAVVTDVSPSGLGVSLHPVPLDTGVSRRILNGVGQRYMSGGEIARKLGVHPKVIGCITGAVWAQENAKAPRSERIDIGLNLKHNGKMLCVAGFCRPTQGDKPGWEYSQEALRVLQEYKRAHAWVFAAVEDIDDMRDGVNIEDVLADLPESGRLATLKGTKAWLKAHPIARRPLVPTSSQVATEEAVRALVATTAGGTKAAKVVDLEGVSPLLLMKAVTEGSVVDLYAGGDFELGDRVVMVGDSGQPSFGSRGAIVAIHSYTDAHTQDSRAESVEVLFDEDFVGGTDLHGVISSKRGAMLPVAQLINLSHPPAMPNLGSAAPKLVVKDAKGDLNAPTQWSERAPKIQREPSPQPRLPENDSKGFDTTKGAGRGKMKKPTTKGAGSSDTSAASPAPIPSSTRMISMLNNASVKAAEAKAATPAKKAPLSIKEIAQPSADAANKEACGRSIACATTAPSPQPRRMIPRFLLRTGKSS

SEQ ID NO: 6500 - protein, 741 aa, Vitis vinifera
MRRECDPLLRGGRREGKYTHGFSSAEMQSLASICEVLLPPLPLNSIEGQPSKGVQSFYQASGSQHPIPDEGAELFVKRALIEAVILVRVVLIILSTRLGTLLLCGSLSFSDKWPFINNFSSISLEKREKILQRWFRHRLLTPIRLAFVYIKFLCLYAFFTLADENSENAAWEAIGYHTDTDGNRSKVPKERPLQKGMVETMQETESTLVQSLNQKGLKVVKDPEQKLYKIKCDVVVVGSGCGGGVAAAVLASSGHKVVVLEKGNYFTATDYSSLEGPSMNQLFESGGILPTVDGKMMILAGSTVGGGSAINWSASIKTPKSVLQEWAEDHKLPLFGSSQYFSAMDAVCERIGVTETCAEEGFQNQVLRKGCENLGLKVDLVPRNSSEKHYCGSCSYGCRSGDKKGTDSTWLVDAVACGAVIITGCKAERFILETNEYGRVKRKKCLGVIAKTLNNNIKNRIQIEAKVTISACGSLLTPPLMISSGLKNQHIGQNLHLHPVAMIWGYFPDSNSEFEGKAYEGGIITSMHKVVSEDCQVRAIIETPALGPGSFAALCPWESGLDMKKRMVRYGRTVHLFAMVRDEGTGKVKVEGRISYNLSAIDKENLRAGVRQGLRILIAAGAVEVGTYRSDGQRLKSKGINEKELEEFLDSVSAVEGPQSFVDKWTITGTAHQMGSCRMGQSEKEGAVDENGESWEAAGLFVCDGSVLPTAVGVNPMITIQSTAYCLSKKIADSLEKRTDQ

SEQ ID NO: 6501 - protein, 401 aa, Zea mays
  misc_feature (344)..(344): Xaa can be any naturally occurring amino acid
MSQTGEAQVPLLQTQEADAEWSSKPRRIALFVEPSPFAYISGYKNRFQNFIKHLREMGDEVLVVTTHKGAPEEFHGAKVIGSWSFPCPLYQNVPLSLALSPRIFSEVNKFKPDIIHATSPGIMVLGALAIAKMISVPMLMSYHTHLPAYIPRYNLNWLLEPTWSFIRCLHRSADLTLVPSVAIAEDFETAKVVPANRIRLWNKGVDSESFHTKYRRHEMRVRLSGGEPEKPLVIHVGRFGREKNLDFLKRVMERLPGARIAFVGDGPYRAELEKMFMGMPAVFTGMLQGEELSQAYASGDVFAMPSESETLGQVVLESMASGVPVVAARAGGIPDIIPKDKEGXTIGMAAREEMEKCDWRTASKKIRNEHYSTAISYWRKKMGKTNQTSLFQDSSVAALSN

SEQ ID NO: 6502 - protein, 382 aa, Gloeobacter violaceus PCC 7421
MHIAWLGKKTPFCGNVTYSREVTNALMELGHRVSFLHFVQEEEILPPRADLGEVTLPCLYKSQAYTIPSLRARKVLVDSLRELKPDLVHASLTLSPLDFALPEICEELRLPLVATFHPAFDRRRRNFAANTQYLMYQWYTSTLANYDRVIIFSQLQKDLLIRLGVPGRRIAIIPNGVDTARYCPGYSRIKDELRAGRLFVYMGRLTVEKNVEQLLKAWKQAGMHALGARLAIIGDGPQRANLQSFYGTEEGVRWLGYLASEQRRIEILQGADVFVLPSLVEGLSLSLLEAMACGTACLATDVGADGEVLAGGAGLLVNPLRVRSELRTLLPMLGEQPEFTALLGQKARARVIEHYTLSSNIWALENLYAEVLERTPARLLKN

SEQ ID NO: 6503 - protein, 788 aa, Pseudomonas putida
MMKHEVVALKKKSIGTSVLRREDTRLLTGRGRYIADLVLSGMLHVASLRSPFAHARIVSIDVADAQALPGVELVWCGADVAELSQGIVATMQVEGFQTTIQPLLANGVTRFVGEIVAVVVASSRAIAEDAAQLIQVEYEELPAVTGIEAALEGEARANDTLAGNVVSRTSRARDELAPIFASSAGVVRGQFSCGRVSACPMETRGAVAQYEWTTQQLILWTATQMPSFVRTMVAMFCAIPEHLIEVRVPDVGGGFGQKAHLHPEELLVCLLSRALGRPVRWIEDRQENFLGATHAKQQRNEMGLAFDGDGRFLALENRSITDGGAYNNLPWTQLVESHVGNAVILGVYKVPAVSEESIAVATNKCPIGAYRGVGFTAGQIARETLIDRAARQLGLSPFEIRRRNVVMPEDFPFTNRLGQTHREGTYLQTINLLEEMVNPEAFRQRQAEARARGKYLGLGVSVFNDCTGTGTRTLSFLGTPTTTHDSATVRIDPTGKVTVTTSLASSGQGHETTLAQIAADVLGVPASDVVIQAGSTKNTYGFGAYASRGAVIGAGSIGRAASIVRERVKQLAGHLLEAASEDIVIEDGLVHVAGVPAKGMPFAEVVGAAYFADATHPPGFDATLEATATYDPSDLVLANGGHAAIVEIDASTYATRVTDFFAVEDCGTMINPMIVEGQIRGGIAQAIGQTLLEEVIYDDFGQLVTTTLMDYLIPTTLDVPDIRIRHLETPSPLVPGGIKGMGESAMISAPAAVVAAVNDALAHLEVVIETVPITPERIFRSIQERPMQ

SEQ ID NO: 6504 - protein, 211 aa, Glycine max
  misc_feature (16)..(16): Xaa can be any naturally occurring amino acid
SSLWSLPSGSQAGPGXFQLFGSDADVSDALVHLQHGPMNCSSSLNGYALAPNTALGSGSILQESSAGRSDADLTGGLVDNPLAFGGDDPSLQIFLPTRPADSSMHNELRDQASVANGVCTEEDWISLSLGGGTGGNNGDASTQNGLNSRHQIPTREGATNTLDDTASLLLGMNDVRSDRARRQRSDSPFSFPRQKRSVRPRLYLSIDSDSE

SEQ ID NO: 6505 - protein, 173 aa, Wolbachia endosymbiont of Drosophila simulans
MEQGMELAVGNNAPDFSLPTDSGENLSLSEFFDKKNVVLYFYPKDDTPGCTMEAKGFRDKIDDFSFLDTVIIGVQKESTFLDTVIIGVSKDSVKCHTNFKAKYSLPFSLVSDENAEMLGKYGVWVEKSMFGKKYMGIERTTFLIDKKGKIVKIWKNVKVSGHVDEVLEEVKRI

SEQ ID NO: 6506 - protein, 308 aa, Geobacillus stearothermophilus [sequence omitted]

SEQ ID NO: 6507 - protein, 487 aa, Silicibacter sp. TM1040
MAQGHDIRFLLNGVEKRVSDVKATLTLLDYLRLDQRLTGSKEGCAEGDCGACTVLVGRLHQGQLHYETVNACIRFLASLNGCHIVTIEHLSGPQGRLHPVQEAMVDYHGSQCGFCTPGFVMSLYALWMSNPEPSVQEVETAIQGNLCRCTGYEPIVKAAMAVTQYGSPAHDHLVRERTDVTARLMALQPSARIVTGPEDDRAILPLDVADLAQVLAENPKATIVAGSTDVGLWVTKFMRPISPVVFITHLEELKSVEVTEEALTLGAGVTYSESEAAIRAAFPHLGDYWDRIAGWQVRNMGTIGGNIANGSPIGDTPPVLIALGAEVVLQSARGSRVLPLEDFFIDYGKQDREAGDFVAAIRIPRAKPGQMDAAYKISKRRDEDISSVAAGISVCVTDGVITTARIAFGGMAATPKRAATAEAALVGQPFAAASFDAAAVALGQDFTPLSDWRASADYRMTVAANLLRRFYLEQDSTQGAPVRLAIA

SEQ ID NO: 6508 - protein, 322 aa, Vibrio cholerae O1 biovar eltor str. N16961
MSKIYEDNSLTIGNTPLVRLNKVSNGKVLAKIEARNPSFSVKCRIGANMIWEAEKQGKLKPGVELVEPTSGNTGVALAFVAAARGYKLTLTMPESMSLERRKLLKALGANLELTEAAKGMKGAIAKAEEIVASNPEKYLLLQQFNNPANPQIHEKTTGPEIWDATDGQIDVFVAGVGTGGTLTGTSRYIKGTQGKAILSVAVEPAESPVITQALAGEEIKPAPHKIQGIGAGFIPGNLDLSLIDRVERVTSDEAIEMARRLMEEEGILAGISSGAAVVAANRIAQLPEFEGKTIVTVLPSSGERYLSTALFAGIFTDKENQQ

SEQ ID NO: 6509 - protein, 195 aa, Mycobacterium tuberculosis H37Rv
MPLLTIGDQFPAYQLTALIGGDLSKVDAKQPGDYFTTITSDEHPGKWRVVFFWPKDFTFVCPTEIAAFSKLNDEFEDRDAQILGVSIDSEFAHFQWRAQHNDLKTLPFPMLSDIKRELSQAAGVLNADGVADRVTFIVDPNNEIQFVSATAGSVGRNVDEVLRVLDALQSDELCACNWRKGDPTLDAGELLKASA

SEQ ID NO: 6510 - protein, 777 aa, Silicibacter sp. TM1040
MKDLGNTTEIKGAAHQDLKHESAIKQVQGRADYTDDILEPAGTLHAYLGVSTVAHANIRGMDLSRVRAAPGVVDVLTADDIPGVNDVSPTGKHDEPVFPTEKVEFHGQPLFAVIAESRDAARRAAELADVDYEVLPHALDAISARDAGLPMVTDPLKLERGDVESGLAEAPHRLQGRVVVGGQDHMYLEGHIAFAIPGEDDDVVVHCSTQHPSEAQHMVSHVLGVPSNAVVVNVRRMGGGFGGKESQMNLFCAFAALGAKKLNRPVKIRPDRDQDMTATGKRHDFVIDYDLGFDNEGRIEAVESQFAARCGYSSDLSGPVTDRALFHADNAYFYPNVRLTSCPQKTNTVSNTAFRGFGGPQGVVAAERMIEEIAYALGKDPLEVRKANFYGQPGDGRTLTPYHQEVEDNVIGRIVEELEESSDYQARRAAIIAENTKGGIIRRGIALTPVKFGISFTATWYNQAGALIHIYNDGSIHLNHGGTEMGQGLNTKVAQVVAEAFQVDFDRIKITKTTTEKVPNTSATAASSGSDLNGMAALDACEQIKARLVKFAAESRGVAESAVRFGPNQIRIGEEVVDFAAFIREAYMARVHLSAAGFYKTPKIHWDRAAGKGRPFYYYAYGASCSEVSIDTLTGEYRVERTDILHDVGRSLNPILDKGQVEGAFIQGMGWLTTEELWWDKDGRLRTHAPSTYKIPLASDRPRSFNVKLADWSENREMTIKRSKAVGEPPFMLGISVLEALSMAVASVADYRECPRLEAPATPERVLMAVERLKAGG

SEQ ID NO: 6511 - protein, 436 aa, Leptospira interrogans serovar Lai str. 56601
MRILYFSDTFLPKVDGVAISMRNFADLLAKRGHTFAICCPKYGEGDFDSLGDGIRVERFRSGYLPSYPDIKVVLPSPTKIKRIIKEFEPDLVHIHTPGLLGLYGINATEKYGIPTIGTYHTLMSEQEMYLSFYRLLKLDKLFLRVSKSNKKLKMKDLGKIEKFDKFNIRKKIILKISNNIYERCDLIISPSHLIEKQLREFGLKTKIAVISNGLDLTSFKGSIKQLGSAPKLLHVGRISYEKNCDVILNSFKLIHDEIPDSTLTIIGDGPALPSLKVQAQNLGVENFVTFTGFIKREQLPEEYPKYDLFLTASTMETQGLVILESVACGLPAVGVDSFAIPELIHDGKNGYIAKPFDIKGIAEKAISILKDPVLYEKFSKESLKISKSHEMNSCVDKMEEVYKTIASVKNKKKRNTLINMLFSLPDPLDQFLRYFE

SEQ ID NO: 6512 - protein, 221 aa, Dechloromonas aromatica RCB
MAAWLNCMFPPNLKTDHDKEFPMAVLVGKQAPDFTATAVYGNNEIKELKLSSFKGKPVVLFFYPLDFTFVCPSELIAFDHRLEEFKQRGVEVIGVSIDSQFTHLAWKNTAVKEGGIGPVGYPLVADVKHEICRAYDVELEAAGVALRGSFLIDKNGTVMHQVVNMLPLGRNIDEMLRMVDALQFFEENGEVCPAGWNKGKPGMVASTEGVAAYLAKNAKKL

SEQ ID NO: 6513 - protein, 377 aa, Frankia sp. EAN1pec
MRIGLACPYTWDVPGGVQAHVRDLAETLLDAGHEVSVITPVDDESTLPAYAVDAGRAVPVPYNGSVARLLMGPVSAARVRRWLREHDFDVLHAHEPTAPSVSLLACMLADGPLVATFHTANPRSRILTAGHRALQPSLEKLRARIAVSEAARRTLVEHLGTGAILIPNGVAVRAFEGARPLPGYGTAPTVAFLGRIDEPRKGLDVLMAAFPMLVEKVPDVRLLVAGPGDTEAVRARIDPALLGRVDLVGLVPEADKAAVFASGSVYCAPNTGQESFGIVLLEAMAAGTPVVASDIDAFRRVLDNGRAGRLFGVGEPAELAANLAELIEDPAERARLAERGRAVVARYDWRVIAQSIVGVYEMVSGDRPVSVAAPEES

SEQ ID NO: 6514 - protein, 315 aa, Staphylococcus aureus subsp. aureus COL
MLDSVGQTPMVQLHQLFPKHEVFAKLEYMNPGGSMKDRPAKYIIEHGIKHGLITENTHLIESTSGNLGIALAMIAKIKGLKLTCVVDPKISPTNLKIIKSYGANVEMVEEPDAHGGYLMTRIAKVQELLATIDDAYWINQYANELNWQSHYHGAGTEIVETIKQPIDYFVAPVSTTGSIMGMSRKIKEVHPNAQIVAVDAKGSVIFGDKPINRELPGIGASRVPEILNRSEINQVIHVDDYQSALGCRKLIDYEGIFAGGSTGSIIAAIEQLITSIEEGATIVTILPDRGDRYLDLVYSDTWLEKMKSRQGVKSE

SEQ ID NO: 6515 - protein, 161 aa, Bradyrhizobium sp. ORS278
MSTVKLTVNGKAVSAEVEDRTLLVHLLRDHLNLTGTHVGCDTSQCGACVVHIDGRAVKSCTVLAGQAAGANVTTIEGIAKGDELHPMQAAFRDNHGLQCGYCTPGMIMSAIDIVHRHGGHLDEATVREELEGNICRCTGYHNIVKAVLDAAGRMKVAQAAE

SEQ ID NO: 6516 - protein, 356 aa, Solibacter usitatus Ellin6076
MMTVETSSFCHLGRLVGNTPMLAVEFRFRGRRRVIYAKSEQLNMTGSIKDRMAFHILRQGYADGTLRPDCTIVEASSGNSGISFAALGRALGHKVTILMPDWMSRERMELIHSYGATMIPVSREEGGFMGCMRRAEDMAQGRADVFLPRQFSNPADVMAHEVSTGPEIWAQLAQHGLTADAFVAGVGTGGTVMGVGRYLRRRNPKVRVHALQPAESPTLTAGHKVGRHRMQGLTDEFIPEIVKLDELDEVISVSDGDSILMAQRLASELGIAVGISSGANFLGAIEAQNRLGADAVVATVFSDDNKKYLTTDLLREEPEKPGYLSPDVELISFDTYKRVCDTACEFPGCEGHTPQR

SEQ ID NO: 6517 - protein, 781 aa, Bradyrhizobium sp. ORS278
MGMEGIGASVVRKEDKRFITGKGRYVDDIKLVGMTYAHFIRSPHAHAKVKSIDPSAAEAMPGVVAVLTGKQIVDDKVGNLICGWAITSKDGSPMKMGAWPAMAPETVRFVGQAVAVVIADSKNLARDAAEAVVVEYEELPAVADMPSALKPGAPQLHPEAPGNVVYDWHIGDEAAVSAAFSKAAHVVSLELTNNRLAPNAMEPRAAIADYDAAEEHFTLYTTSQNPHVARLVLSAFYNIAPEHKLRVIAPDVGGGFGSKIFIYPEEMVALWASKKVGRPVKWTGDRTEAFLTDAHGRDHISKAEMAFDADHKMLGLRVKTHANFGAYMSLFSSSVPTYLYATLLSGQYNIPAIYAEVMGVYTNTTPVDAYRGAGRPEASYLLERLVETAARQFKVDPAELRRKNFITQFPHQTPVIMAYDTGDFNASLDAALKAIDYAGFAGRKAAAKAQGKLRGIGFSCYIEACGIAPSKAVGSLGAGVGLWESAEIRVNPVGTIEVLTGSHSHGQGHETTFCQLIADRLGVPISQVSIVHGDTDKVQFGMGTYGSRSAAVGLTAILKAMEKVEAKAKKIAAHALEASEGDIVIENGEFKVTGTDKSIALPMVALAAYTAHNLPDGMEPGLKESAFYDPTNFTFPAGTYICELEVDQATGKTSFVNFVAADDFGRLINPMIVEGQVHGGLVQGIGQALLEHAVYDGNGQPVTASFMDYAMPRADDVPSFKLSHTTTLCPGNPLGVKGCGEAGAIGASAAVINAITDAIGNNKLEMPATPDRVWHAIHGNA

SEQ ID NO: 6518 - protein, 188 aa, Cyanobium sp. PCC 7001
MLRRHLLRLAITGAGFLATGLLRPAAARALGGTLPALDQPAPAFRLAGVVPADGGKAEAAELGLEDFRGQWLVLYFYPRDFTSGCTLEARGFQRDLARFRAAGAAVVGVSADDAESHSEFCGSEGLAFPLLSDPGGRVSARYGSWIAPFSQRHTFLIDPQGVLRQRWVAVRPSLHSAEVLTALEALQV

SEQ ID NO: 6519 - protein, 377 aa, Manihot esculenta
MATLTSMATLRNLFTKKSFASNELAMRRFFTPQAAAAEAPSFAQRVRDLPKNLPATKIRTEVSHLIGRTPLVFLNKVNEGCGAYIAVKQEMMQPTASIKDRPAFSMFNDAEKKNLISPGKTVLIEPTSGNMGISMAFMAAMKGYKMILTMPSYTSLERRVTMRAFGAELILTDPTKGMGGTVKKAYDLLETTPNAYMLQQFSNPANSKIHFETTGPEIWEDTLGQVDIFVMGIGSGGTVTGVGQYLKSQNPNVKIYGVEPAESNVLNGGKPGPHQITGNGVGFKPDILDMDVMEKVLEVSSEDAIKMARRLALEEGLMVGISSGANTVAALRLARMPENKGKLIVTVHPSFGERYLTSVLFEQLRNEAANMQPVPVD

SEQ ID NO: 6520 - protein, 311 aa, Herminiimonas arsenicoxydans
MTFLRKNSISLMQYLTIEDTIGNTPLVQLKRMDGEESARRNNVILGKLEGNNPAGSVKDRPALSMIKHAEERGTIKPGDTLIEATSGNTGIALAMVAAMRGYKMILLMPENLSEERRQAMAAYGAKIVLTPKAGGMEYARDLAEQMQKNGEGLILDQFANPDNPRSHYETTGPEIWRDTGGKITHFISAMGTTGTIIGVSEYLKEKNPDIRIIGVQPEEGSQIPGIRKWPEAYLPKIYDASKVDQLEYVSQGVAERMARRLAMEEGIFCGISAAGACEVALRISQTTENATIVFVVCDRGDRYLSTGVFPA

SEQ ID NO: 6521 - protein, 182 aa, Cupriavidus taiwanensis
MKTVGDKLEAFHVVGVKPGFNNHEENGQSAFEDITEKSFEGKWKIIYFYPKDFTFVCPTEIVAFAKLNGDFADRDAIVLGGSTDNEFVKLAWRREHKDLNKLNQWQFADVTGSLIDQLGVRDHAAGVALRATFIVDPDNVIQHVSVNNLNVGRNPDEVLRILDGLQTDELCPCNRAVGGATL

SEQ ID NO: 6522 - protein, 363 aa, Anthurium andraeanum
MATEVMTAVPAGSRVESLASSGIQAIPLEYVRPAEERVSLTDALEAARRAEDGPQIPTVDVAGFSSGDEAARRACAEAVRRAATDWGVMHVVNHGIPLELIRRMQAAGEAFFALPIEEKEKYANDQSSGNIQGYGSKLANNASGQLEWQDYFFHLIFPEDKADFSIWPKQPANYVEETREFGRQLRVVASKMLAMLSLGLGVEEGKLEAEVGGIEDLLLQMKINYYPRCPQPELAVGVEAHTDVSALSFILHNMVPGLQVHNEGQWVTARCVPDSIIMHVGDVVEILSNGQYKSILHRGLVNKEKVRVSWAVFCEPPRDKILLQPLPDILGQGRPAQFPPRTFSQHIQHKLFRKTQGDFATPN

SEQ ID NO: 6523 - protein, 198 aa, Buchnera aphidicola str. Sg (Schizaphis graminum)
MTLVTQKAPNFIAPAILKNGKIMNNFDLKKYSNGQITVLFFWPMDFTFVCPSEIIEFNKTFEAFEKRNVKIVGVSIDSVFVHQAWQNTFPENGGIGKIKFPMVSDIKHEIQKSYHIEHPELNIALRASFLIDENWIIRHQVVNDLPFGRNIDEMIRMIDALNFHNKYGEVCPVNWKHGQEGMKASQEGVSSYLKKYFS

SEQ ID NO: 6524 - protein, 552 aa, Streptomyces carzinostaticus subsp. neocarzinostaticus
MSGGAERTEVLVVGSGFGGAISAYHLAAGGAKVTVLERGPWLEHGQFEHDYKLGSSYTRIFDFVVGDGMSVLGGNCVGGGSVVYFAAMPRAPRFVFDRKGSIGRRMWPKSISRNTLDPWYDRVEESLSVARQGWQDVSYAGGLWAAACSHAGRTANPLPVAIDTVKCVNCNWMMAGCRFEAKQSLLVNYLPAALAHGAEIRPLHEVQYLERTADGGYRVHYNVIDGEDYRTTAGSGVIEAKIVVLAAGAGATPVILQRSEGQLGRMPHAVGRYFSGNGERLNTAVVDEDKAAELLGLDRGSGPAYGANHIGRGPTVASWDRLDGSLPEYSRYSLEQLYFPPGLGTILAQVPHGTGPTWFGARKKEILKRWTSWLTVFSMIEDDNEGVFGPPPATGNAHRISQQLLGRGNLRYAPTQNTLNAWAASDAEVKEILEKDGLAQVMPWTNDLVGAYTVHPLASCRMGDDPHTSALDDRNELRGHPGIFVTDGSAVPGALTVNPALTISALAERAVPGIVEAAQDRGIRVSYGAPAPSGSVSGLRQVLPLLPRPVGT

SEQ ID NO: 6525 - protein, 533 aa, Shewanella sp. ANA-3
MAIIDPIVTGLNSGWLHTDASQLQENQQFEADVVIVGTGAGGGVAAEILTQAGLSVIMIEAGPLKSSSDFNMEERVAYPNLYQQAAAMKTADKAIGIFQGRAVGGSTTINWTTSIRTPKEALAFWAQHKSVAGLDPEALAPWFEQMEQRLNIHEWNYEPNRNNGALKQGCINLGWDYTVIKRNVAGCWNTGYCGMGCPVNAKQSMLVTTIPTALEKGAQLVSRAKVVKIEHHNGQVFALKAQALDVNLRPTSVELLFKAKHYILSAGAIHTPTLMMRSEVPDPYQLLGKRTFLHPTVLSGGVFADAINAHSGAPQSIYSDEFVWKNGADGELGYKLEVPPVHPILIASKTIGYGISHAELMAQFNQLQVTIALIRDGYHPDSQGGQVHLTSTGFALDYPLTEAFWRAARRAYASMAELQFSAGALKVLPISDGMPYLSSWKEAKESIAQMDLAPLRTVVASAHVMGGCPFGEDEKLSMVNSFGQSHYLDNLSVMDGSIFPTSLGANPQLSIYGITARNATALAQKLTDGREPQ

SEQ ID NO: 6526 - protein, 328 aa, Azotobacter vinelandii
MASGAHAAWRQGCRADRAAHFRFRTPSVSMTVHFPTIAECIGNTPLVRLQRLPGETSNTLLVKLEGNNPAGSVKDRPALSMITRAELRGDIRPGDTLIEATSGNTGIALAMAAAIKGYRMILIMPDNMSAERKAAMTAYGAELLLVSKAEGMEGARDLALKMQGEGRGKVLDQFGNQDNPQAHYEGTGPEIWRQTQGRITHFISSMGTTGTIMGTSRYLKEQNPAIRIVGLQPQEGSAIPGIRRWPQEYLPKIFDASRVDQVIDMAQSEAEDTMRRLAREEGIFCGVSSGGAVAAMLRLSCEVENAVLVAIICDRGDRYLSTGVYDQP

SEQ ID NO: 6527 - protein, 368 aa, Ammi majus
MAPTTLTALAQEKTLNSKFVRDEDERPKIAYNQFSDEIPVISLAGIDDDSDDKRSQICRKIVEACEGWGIFQVVDHGIDTDLISEMTRLAREFFALPAEEKLRFDMTGGKKGGFIVSSHLQGEAVQDWREIVTYFSYPVPARDYSRWPDKPEGWRSVTEVYSDKLMGLACKLLEVLSEAMGLEKEALTKACVDMDQKVIVNYYPKCPQPDLTLGLKRHTDPGTITLLLQDQVGGLQATRDGGKTWITVQPVEGAFVVNLGDHGHYLSNGRFKNADHQAVVNSNSSRMSIATFQNPAPNATVYPLKIREGEKAVMEEPITFAEMYKRKMSKDIEMAKLKKLAKEKLLQEQEAEKAKLQMTPKSADEIFA

SEQ ID NO: 6528 - protein, 320 aa, Rhizobium leguminosarum bv. viciae 3841
MSHKPGRGRIYSSITETIGDTPLVRFDKLAREKGVVANLIGKLEFFNPIASVKDRIGVAMIEGLEAQGKITPGKTVLIEPTSGNTGIALAFAAAAKGYRLILTMPETMSVERRKMLALLGAELVLTEGPKGMKGAIAKAEELASSLDDAVIPQQFENPDNPEIHRKTTAEEIWNDTDGTVDIVVSGIGTGGTITGVGQVLKSRKPEIKIIAVEPADSPILSGGNPGPHKIQGIGAGFAPKILDTGIYDEVVTVTNDEAFEQARLVARLEGVPVGISSGAALTAAIKVGIRPENAGKNIVIIIPSFAERYLSTALFEGLGS

SEQ ID NO: 6529 - protein, 441 aa, Streptococcus pneumoniae TIGR4
MRIGLFTDTYFPQVSGVATSIRTLKTELEKQGHAVFIFTTTDKDVNRYEDWQIIRIPSVPFFAFKDRRFAYRGFSKALEIAKQYQLDIIHTQTEFSLGLLGIWIARELKIPVIHTYHTQYEDYVHYIAKGMLIRPSMVKYLVRGFLHDVDGVICPSEIVRDLLSDYKVKVEKRVIPTGIELAKFERPEIKQENLKELRSKLGIQDGEKTLLSLSRISYEKNIQAVLAAFADVLKEEDKVKLVVAGDGPYLNDLKEQAQNLEIQDSVIFTGMIAPSETALYYKAADFFISASTSETQGLTYLESLASGTPVIAHGNPYLNNLISDKMFGTLYYGEHDLAGAILEALIATPDMNEHTLSEKLYEISAENFGKRVHEFYLDAIISNNFQKDLAKDDTVSQRIFKTVLYLQQQVVAVPVKGSRRMLKASKTQLISMRDYWKDHEE

SEQ ID NO: 6530 - protein, 198 aa, Synechococcus elongatus PCC 7942
MTEGALRVGQLAPDFEATAVVDQEFQTIKLSNYRGKYVVLFFYPLDFTFVCPTEITAFSDRYADFSALNTEILGVSVDSQFSHLAWIQTSRKEGGLGDLAYPLVADLKKEISTAYNVLDPAEGIALRGLFIIDKEGVIQHATINNLAFGRSVDETLRVLQAIQYVQSHPDEVCPANWQPGAATMNPDPVKSKEFFAAV

SEQ ID NO: 6531 - protein, 383 aa, Geobacter sulfurreducens PCA
MLAPTPFFADRGCHVRIYEEARTLIARGHQVRIVTYHLGRDMAGIPTDRTLRVPWYTKLSAGPSWHKPYLDVLLCGTALRTARRLRPDLIHAHLHEGAFFGVFLKKLMGIPLLFDCQGSLTMELADHGFVREGSLLYRFFALMEGGINRSADAIVTSSGPGRDDLVTKWGVPAVKVTALMDGVDTAVFRPHDRTEVRRRLGIAPDVPLAVYLGVLNRYQGIDLLLSAMVILKSRGNPLRLLVMGFPEEGYRQKARDLGIADMVTFTGRIDYGKAPLYLSAGDMAVSPKVSLTEANGKLFNYMACGLPTIAFDTPVNREILGETGIYARYGDAADLAAHLAGLAGDAAARAERARLARERAEREHSWQARADVLEAVYRRMKRA

SEQ ID NO: 6532 - protein, 398 aa, Verrucomicrobium spinosum DSM 4136
MSEPTVAIVTKARGTFFKPLYEAFAQAQPEGWRTMLLWPAEHGSEHPEELVTPRADNLDIVPLHSTSHDLKANDAALEGRATRYQTQLPAREMWARLAERDVRGILIHEFSPFTLQALLYARWHRIPVCVSTEVGRGNAPFFGRRTRWWHALWGRLVDGVVACCPAAHHPLSRKQLPTVSTYHAVDSRLYVPVDHAPSQVVTFAYLGQLIRRKGLDLLLQAAARMKENGENRFRIRLIGGGDAGWLHELAHALGLWEQVEFTGFLSGAAIREALASADVFVLPTRQDTYAAVVHEAACLGLPLLISKHAGAAEALVKPGRNGYIFEPEDTASFAAKMQSLMPARVREPMRKISREVGEAHSAHARGAALWEWMVDHALVTTRHGEVTLERHVTQEAGL

SEQ ID NO: 6533 - protein, 325 aa, Azotobacter vinelandii
MSRIYADNAQSIGNTPLVKINRLAPQGVTILAKIEGRNPSYSVKCRIGANLVWDAEASGRLKPGMTLVEPTSGNTGIGLAFVAAARGYRLILTMPASMSLERRKVLKALGAELVLTEAAKGMKGAIEKATEIAAADSGLYFMPQQFDNPANPAIHEKTTGPEIWNDTDGAVDVLVAGVGTGGTITGVSRYIKQTCGKPLLSVAVEPAGSPVISQTLAGEEVKPAPHKIQGIGAGFVPKNLDLTLVDRVERITDDEAKDMALRLMREEGILCGISSGAAMAAAVRLAEHEPALQGKTLVVILPDSGERYLSSMLFEGLFSEQELTQ

SEQ ID NO: 6534 - protein, 456 aa, Xylella fastidiosa 9a5c
MVIHSSVLELIGNTPIVKAQRLDTGLCDLFLKLESANPGGSIKDRVGLSMIEAAECRGHIKPGATLVDGAASSTSMGLAFVARQKGYRLILVVPDNMAWEKISNLKAMGAEVILTRSDVSKGHPEHYQDLAEKLAAETPGAYFINQFGNADNPAAHEFGTGPEILKQMGDHVDAVVLGCDSAGTITGLSRAFDSVASDVELILADPVGSILTQYINEGTCSDKSGTWLVEGIGSDCLPPISDFRRIKKTYAISDAESFHTARELLSKEGILGGSSTGTLLAAALKYCREQIERKRVLVFVCDTGNKYLLNMYNDDWMLDNGFLKRPHYGDLRDLILHPYSQRHTVVVDPNDLLTVAYQRMKRYGVSQLPVIEDGQLVGILDESDVLLHVYGDETRFCDPVSTAMVSKLHRLDVKSPIEGLLPVFERGQVAIVMEDAQFLGLITRIDLLNYLRRRMQ

SEQ ID NO: 6535 - protein, 449 aa, Gemmata obscuriglobus UQM 2246
MLESILDTVGRTPLVQLNRLTEGLQAKVAVKVEFANPGGSVKDRVALAMIDEAEQRGLLRPGGTIIEATAGNTGVGLAMVAAVKGYRCIFVLPDKMSTEKVLLLKAYGAEVVITPTAVAPDSPESYNGVADRLAREIPGAWRPNQFTNAANPDAHYRTTGPEIWEQTKGKVTVFVCGVGTGGTVSGVGKYLKQMNPNVKIVGADPEGSVLSGDSPKPWKVEGIGEDFVPKTFSSKYVDDWVRVGDAESFHVARELARREGMLLGGSTGTNVAAALRYARRLGPGHLVVAVGCDTGRNYLSKFFDDGWLKANNLAFTEAPAHSVGDLIKKRGERKLVFIAPTATAQDAILLLEATGISQLPVMDAGKPVGSVQEVSLARILHDGKDPRQVLIGDLMARPLPTLDVRTHLDEAYRLLLAGYTGVLATQDDAVLDIVTRIDLIHYWGDRRGK

SEQ ID NO: 6536 - protein, 172 aa, Legionella pneumophila subsp. pneumophila str. Philadelphia 1
MAKGSFKNNEKEHLRRWFMKIGEMVPDFAFNATNNVQGHLNDYKGQIIVLYFYPKDATPGCTTEGQDFRDAYSQFKDLNTVIFGISRDSLKSHEQFKSKQNFPFELISDSNETLCQMFDVIKMKSMYGKQVRGIERSTFIIDTQGVLTHEWRKVNVKGHVEEVLDTVRSLAG

SEQ ID NO: 6537 - protein, 220 aa, Oryza sativa Japonica Group; identical to SEQ ID NO: 3248

SEQ ID NO: 6538 - protein, 308 aa, Prosthecochloris aestuarii DSM 271
MNVYESITETVGRTPLVRIRRMADHSYADVYAKLESFNPLSSVKDRVGVAMIEDAERNGLIGPETTIIEPTSGNTGIALAFSCASRGYRLILTMPDTMSVERRRLLKILGAELVLTEGAAGMKGAIAEAERLVDSIPHSLMLQQFNNPANPETHRRTTAREIWDDTDGQVDIFIAGVGTGGTITGVGSVLRELKPGVHIVAVEPDDSPVISGGEPGPHKIQGIGAGFVPGNLDPSVIDEIITVSNQDAAETARKLARKEGILCGISSGAAMWAAMSVAARPAMEGKNIVVLLPDTGERYLSTWLFADE

SEQ ID NO: 6539 - protein, 187 aa, Burkholderia mallei ATCC 23344
MPIINSPIKPFKATAYHNGDFVQVSDETLKGKWSVVVFYPADFTFVCPTELGDLAERYAEFQKLGVEIYAVSTDTHFTHKAWHDTSDTIAKIKYPMIGDPTLAISRNFDVLIEEEGLALRGTFVINPQGEIKLCEIHDNGIGRDAGELLRKVQAAQYAAAHPGEVCPAKWTPGADTLTPSLDLIGKI

SEQ ID NO: 6540 - protein, 403 aa, Pectobacterium atrosepticum SCRI1043
MKVLLVNKFFYIKGGAETVYFQEIDMLKKAGVDVIAFSMQHENNFPSDYAPYFVGNVNYHQNSSAIGAIKTAVNFIHNAEACKKLLALLRKEKPDIVHFHNIYHQLTPSLIKIARQFGCKTVLTAHDYKIICPSYTMLRDGKVCDACLTGSVFNAFKYRCQQGSASKSLLLSLEGAWQNIAKNYQALDVIVSPSEFLRNQLMRKLPNVRIDVIVNGINDSLPAEDVKDDGYLLFIGRLSREKGVATLARAHQQMRNKIPLKIAGSGPLYNDLVAQFPHAEFLGYKQQGEELNRLIKYARAVVVPSEYYENCSMSVLESMAFAKPVVGGRIGGIPEQIRDKVDGILFEPGNVQALVDVLDDLALNPQKAREMGLNARQRLREKYSLRKHTESLLALYQEILIEK

SEQ ID NO: 6541 - protein, 212 aa, Pseudomonas putida GB-1
MSLKLGDIAPDFEQDSSEGKIRFHEWLGNSWGVLFSHPADFTPVCTTELGLTAKLKDDFAKRGVKAIALSVDPVDSHHRWIEDINETQNTVVNFPIIADADRKVSDLYDLIHPNASDTLTVRSLFVIDPNKKVRLTITYPASTGRNFNEILRVIDSLQLTDNHKVATPGNWQDGDEVVIVPSLKDEEEIKQRFPKGYRAVKPYLRLTPQPNR

SEQ ID NO: 6542 - protein, 220 aa, Oryza sativa Japonica Group; identical to SEQ ID NO: 5055

SEQ ID NO: 6543 - protein, 334 aa, Candidatus Pelagibacter ubique HTCC1002
MKNIQDNFISGIGNTPLIKLRAASEITGCNIYGKAEFMNPGGSVKDRAALALIRDAESKKLISKGGTIVEGTAGNTGIGLCLLGNSLGYKTIIVMNDNQTQEKKDLLRNIGADLRLVPAKPYKDDANFVKVAAKLADELRPSNNNGVVWANQFDNVANAKGHYEGTGQEIWEQTEGKVDGFVCSSGTGGTISGVSNALKEKNKDIKIFLSDPKGSALYNYIKNGELKSEGGSITEGIGSSRVTKNFENAKIDDAYSIDDHEALPILYDLIQNEGLSLGTSCGINIAGTIRLGKELGPGKTIVTILCDKSDKYATKMFNKSFLEEKGLPFPNWID

SEQ ID NO: 6544 - protein, 192 aa, Oceanobacter sp. RED65
TKGDIDFHEWIGDSWAFFFSHPADFTPVCTTEMGRTSQLNKEFDARNVKPIGLSTDTVEEHLKWIEDVNDTQGTDLQFPIIADPDLEVSKLYEMIHPGESETAAVRSVFIIDPNKKIRLTLTYPMSVGRNFDEILRVIDALQLGDAKKVATPADWKKGDDVIIPPSISNEQAKDIFPQGWDEIRPYLRKTKV

SEQ ID NO: 6545 - protein, 200 aa, Salmonella enterica subsp. arizonae serovar 62:z4,z23:--
MVLVTRQAPDFTAAAVLGNGEIVDKFNFKQHTNGKTTVLFFWPMDFTFVCPSELIAFDKRYEEFQKRGVEVVGVSFDSEFVHNAWRNTPVDKGGIGPVKYAMVADVKREIQKAYGIEHPDEGVALRGSFLIDANGIVRHQVVNDLPLGRNIDEMLRMVDALQFHEEHGDVCPAQWEKGKEGMNASPDGVAKYLAENISSL

SEQ ID NO: 6546 - protein, 629 aa, Mycobacterium bovis AF2122/97
MSRLADRAKSYPLASFGAALLPPELGGPLPAQFVQRVDRYVTRLPATSRFAVRAGLASLAAASYLTTGRSLPRLHPDERARVLHRIAALSPEVAAAVEGLKAIVLLANGADTYAHELLARAQEHDAARPDAELTVILSADSPSVTRADAVVVGSGAGGAMVARTLARAGLDVVVLEEGRRWTVEEFRSTHPVDRYAGLYRGAGATVALGRPAVVLPMGRAVGGTTVVNSGTCFRPSLAVQRRWRDEFGLGLADPDQLGRRLDDAEQTLRVAPVPLEIMGRNGRLLLQAAKSLGWRAAPIPRNAPGCRGCCQCAIGCPSNAKFGVHLNALPQACAAGARIISWARVERILHRAGRAYGVRARRPDGTTLDVLADAVVVAAGATETPGLLRRSGLGGHPRLGHNLALHPATMLAGLFDDDVFAWRGVLQSAAVHEFHESDGVLIEATSTPPGMGSMVFPGYGAELLRWLDRAPQIATFGAMVADRGVGTVRSVRGETVVRYDIAPGEIAKLRVALQAIGRLFFAAGAVEVLTGIPGAPPMRSLPELQDVLRRANPRSLHLAAFHPTGTAAAGADEQLCPVDATGRLRGVEGVWVADASILPSCPEVNPQLSIMAMALAVADQTVAKVVGVR

SEQ ID NO: 6547 - protein, 207 aa, Nostoc punctiforme PCC 73102
MKFRLRRRRLGQLMLVSTVATTLSSFAEKTVAQTPIKRTTPMLKSSISETMKVTLQVNGTKHSLQIEPRVTLLDALREYIGLTGSKKGCDHAQCGACTVLVDGQRINSCLTFAIMHTDAAITTIEGLAQGDNLHPMQAAFVARDAFQCGYCTPGQICSAVSLVNEGHAKSDDDIRELMSGNICRCGAYPNIVAAVRDVLEGKKDAAV

SEQ ID NO: 6548 - protein, 385 aa, Isochrysis galbana
IFMKCAFVLAMAAPASALNLFGGAKKPGRGTLYSDITQTIGNTPVVKISKKLNPTQCDVYAKCEFFNPLSSVKDRLALAIIQDAEERGALKPGDTVVEATSGNTGIAVAMLCAQRGHKCVICMAEPFSVERRRLMRMLGAKVIVTPKAGKGTGMVRKAEELCEKHGWFLCHQFENEANWKYHEATTGPEILTDFSGKRLDYWVTGYGTGGTFHGAGRAIKKERPEVKIILAEPEDAGLLASGIPTERKADGAPVGSHPAFKPHPIQGWTPDFIPRCWRTPLDNLSDELVPIPGAHAIATAKALAAKEGILTGISGGGTMWAALEIAKKAPAGSIILAMLPDTGERYLSTPLYADIEADMNDEELDIARSTPSFQLIPGKEPVLAA

SEQ ID NO: 6549 - protein, 159 aa, Gloeobacter violaceus PCC 7421
MSEPLNVGDPAPEFAAEQTSGERLSLADLRGKKVVLYFYPRDNTPGCTKEACALRDRYARLQAAGVTVVGVSTDGVRSHQKFTEKFALPFALLADTEGAIAQAYGAWGEKKFMGRTSIGILRHTVVIDEAGRIAHIYRKVKPEEHADQILRDLGIAFEA

SEQ ID NO: 6550 - protein, 737 aa, Nostoc punctiforme PCC 73102
MNASDTNIVVGKPLNRVDGYLKVTGEARYAAEFPVAKMTYGVTIQSAIAKGKIAQIDTKAAEQVPGVLAVITHLNAPKADGEKGGGHKVQVLQDNTVLYSGQHIGVVVADTFERAMYAASLVQVRYDEEKPTINMRENLAKAYFPKGKIPREESPDSSHGNVKQGLANAAVRVEQTYTTPVENHNPMEPHATTAVWQGDQLLLYDATQGIFSTQQKVAEVLGIEPEKVRIMSYFVGGGFGCKGSAWSHVPLAAIAARQVNRPVKLVLGRIQMYGPVGFRPETIQQVSLGATREGKLTALRHTGTSQTSTFDEFIEPVGKSARMIYACPNIETSHRLVQLDQGTPTYMRAPGEASGSFALESAMDELAYALNIDPVELRLRNHADVDPSKGLPWSSKSLIQCYKTGAEKFGWQKRNPQPRSMRDGNYLIGWGMATATYPTNRSPASAIAKIMADGTAVVQSGSQDIGTGTYTVMTQVAAEALGLAVEKVRFELGDTKMPKTPVSGGSQTAASVSSAVHLAGNQARSKLLQLALADEKSPLYSSNAEDVIAQNGSFFLKNKSSVSETYQAILARHGMKTIEARADAKLGDEQKKFSMHAFGSQFAEVRVNPDSGEVRVTRWVGSFGVGRILNAKTANSQLIGGIVYGIGMALMEHTIIDPNLGRVVNHDLAEYHVPVNADVPDIEVLFVDEHDPHINPLGVKGIGEIGITGTAAAIANAVYHATGKRVRDLPITLDKLL

SEQ ID NO: 6551 - protein, 133 aa, Alkaliphilus metalliredigens QYMF
MSVDSVFVHKMWNDHELSKMIDKDIPYPMLSDQDGRIGKMYGIYDEDSGVETRGRFIIDPDGNVQGYEVLTPPVGRNVEESIRQVKAFQLVRETKGGEVAPSGWKPGKTTLKPGPDLVGNVWKVWKVSEAFED

SEQ ID NO: 6552 - protein, 337 aa, Lactuca sativa
MVALSKPSIEQFFMKPSKPNTNPLIFPTIPLIDLSKPESKQHLVKACQDFGFFKVVNHGVPTKFIKKLESEALKFFSSPLSTKEKAGPPDPFGYGNKRIGRNGDVGWVEYLLLNAKPESDYQRYLSVFEENPEIFQGVVNDYVTAVKKMACEILELLADEMKLQPRNVFSKLLMDEQSDSVFRVNHYLPCPEFQENERNGRKLVGFGEHTDPQIISVLRSNNTSGLEISLRDGSWMSVPADSDSFFINVGDSLQVMTNGRFKSVKHRVVANSTKSRVSMIYFGGPPLSEKIAPLPSLIQGEEDSLYKEFTWFEYKKSAFNTRLADNRLGLFEKITAT

SEQ ID NO: 6553 - protein, 377 aa, Microcystis aeruginosa PCC 7806
MRIALFTETFLPKIDGIVTRLKHTVEHLQRLGHQVLVFSPDGGLKEYKGAKIHGVTGIPLPLYPELKMAFPRPSVGQALERFKPDIIHVVNPAILGVGGIYFAKTMNIPLVASYHTHLPQYLQHYGLGSLEGLLWELLKLAHNQASLNLCTSTAMVQELSSRGIEKVELWQRGVDTELFQPHLKSPAMRLKLSQNNPDSPLLLYVGRVSAEKEIDRIKPVLEAIPEARFAIVGDGPHREALTSHFADTNTHFVGYLQGLELASAFASADAFLFPSRTETLGLVLLESMAAGCPVVAANSGGIPDIVTNGVNGHLFDPRDEKGLISATQRLLTAKAEREELRRNARLEAEKWAWQAATKQLLNYYHQVLKNNSVAFAA

SEQ ID NO: 6554 - protein, 764 aa, Aeropyrum pernix K1
MHLSRWIGWRYVGRRVKRVEDYRLLTGRGRYVDDVRLEGMLYAAFARSEYPHAVVRKVDLSDALKAPGVVAAFSYSDLEGSLKPWTFDAPSSPMYPLARDRVRYYGEPVAVVVASDPYQAADAVELVSVDYEPLEPVVDPLKAMEPGAPRVHDEAERNIAYSRRLSCGDVEKAFREAAVVVEDTLWVARKYAASLEPRGVAASYDGSTLTVWVSTQTPHDHRDELLEKIVPPPSDVRVIQPDVGGAFGAKIEVYPEEVVVPYLAMRLGRPVKWYPSRREDMVATTHGRDIRAELALAASRDGRILGVRGRIIGDVGAYPLGIFLPLIAGRILPGPYDIRSGDVEVLAVYTNKTPLAAYRGAGRPEGIFFMERMVDLLADELGMDPAELRLRNMVKPEAMPYRNCFGWQYDSGDYPGTLKRGLKLLRLRELESWVEEERRKGRLLGLGYAFYVEITSGGPFETAKVSLERGGTVSIVVGSTPTGQGDATGFAQIAADILGVGVERVRVRWGDTGLIGEGVGTFGSRTITVGGGAVIEAVSELVERLRPKAAEMLGVDPGRVEYRPGEFYVVDSPEDFVGLWDVVEQLYRELGEKAGEVLSAYAKYDPKKPVYPYGLHAAVVEIDPETGVPRVVEYRALDDVGRIVNPMLLEGQLVGGIVQGIGDTLYEEMVYTGDGYPATLSLSDYGVPTALEYPEVVELHFQETPTHHPHGTRGVGEIGTIAAPPAVARAVEDAVRRYTGRGGFRVRRLPVKPEDILAALAAEG

SEQ ID NO: 6555 - protein, 262 aa, Glycine max
  misc_feature (183)..(183): Xaa can be any naturally occurring amino acid
KFCLGLFPNDDEFGMSSLWSLPSGSQAGPGFQLFGSDADVSDALVHLQHGPMNCSSSLNGYALAPNTALGSGSILQESSAGRSDADLNGGLVDNPLAFGGDDPSLQIFLPTRPADSSMHNELRDQASVANGVCTEEDWISLSLGGGTGGNNGDASTQNGLNSRHQIPTREGATNTLDDTVHPXSFISSLFERGYEGGLEAGYSVSLHRALLYLLLNASLLLGMNDVRSDRARRQRSDSPFSFPRQKRSVRPRLYLSIDSDSE

SEQ ID NO: 6556 - protein, 338 aa, Lactuca sativa
MVMISQVEKKPVVDIFPTKSNKTNFTGIPVIDLSSPEDAKNLIVNACQDYGFFKVINHGVSPLLVSELENEAIEFFNMRQYEKDQYCPPNPFGYGRNKIGTNGDVGWIEYLLLTSTNFPTNSKIFSSLTNEYVKEVRKLGCTILELMAEGLKIEPKNVLSRMLSDENADTVFRLNHYPPCLDPNSNHDSDLNNKSMSHGRTSIGFGEHTDPQLISIARSNATSGFQIYLEDGTWVGVPPDETSYFINVDDLLEVMTNGRFRSVRHRVVADSFKSRVSMIYFGGPPLMEKISPLGSLMEPGEESLYNEFTWFEYKSCTYKTRLTDNRLSLFHKHSHPVH

SEQ ID NO: 6557 - protein, 209 aa, Methanothermobacter thermautotrophicus str. Delta H
MPLIGDKFPEMEVQTTHGPMELPDEFEGKWFILFSHPADFTPVCTTEFVAFQEVYPELRELDCELVGLSVDQVFSHIKWIEWIAENLDTEIEFPVIADTGRVADTLGLIHPARPTNTVRAVFVVDPEGIIRAILYYPQELGRNIPEIVRMIRAFRVIDAEGVAAPANWPDNQLIGDHVIVPPASDIETARKRKDEYECYDWWLCTQSRG

SEQ ID NO: 6558 - protein, 215 aa, Archaeoglobus fulgidus
MAPLLGDNFPEIEVVTTHGRMKLPEAFKGKWFVLFSHPADFTPVCTTEFVAFQNRYDEFRKLNCELIGLSIDQVFSHIKWIEWIKEKLDIEIEFPVIADDTGRVAEMLGLIHPAKGTNTVRAVFIVDPEAVIRAVIYYPQELGRNMDEILRAVKALQVSDQNGVAMPANWPNNELVGDAVIIPPPISEAEAKERLEKAKAGDISCYDWWFCYKKI

SEQ ID NO: 6559 - protein, 531 aa, Pseudomonas fluorescens PfO-1
MPVPDPFREGLARGWKTYNGAQLTDDLTLEADVAIIGSGAGGGTTAEILSAAGYKVLLIEEGPLKTSSDFKLLEDQAYSSLYQEGIGRMSKDGAITILQGRAVGGTTLINWTSSFRTPEPTLEHWAKEHNVKGHSPADMAPWFEKMEQRLGVAPWMVPPNANNDVIRKGCEQLGYSWHVIPRNVRGCWNLGYCGMGCPTNAKQSMMVTTIPATLEKGGELLYLARAEKLLINGDKVTGLQCVAMDERCVEPTGRTITVKARHYVLAGGGINSPALLMRSDAPDPHKRLGKRTFLHLVNMSAGRFDEVINPFYGAPQSIYSDHFQWKDGTTGPMAYKLEVPPLHPALAATLLGGFGQESAQHMADLPHTHAMLALLRDGFHPDSQGGSVELRGDGSPVLDYQVSPYTWEGLRRSFHSMAEIQFAGGAKAVMPMHADARYVNSLAEARSLIDSLSLELYRTRLGSAHVMGGCAMGEDPKTAVTDSLGRHHQLRNLSIHDGSLFPTSIGANPQLSVYGLTAQLATSLGERLRKP

SEQ ID NO: 6560 - protein, 348 aa, Bradyrhizobium sp. BTAi1
MPAEPFSAADLDVIVPNLHRRYSGVTATNRMVAPKLARRVRAAWLGTYAPDGIARMQASDLVMLWRRRRPLIWHARRNNEMIAGVILRALGWPLKLVFTSAAQRHHSWITRWLIRRMDAIIATSDISASYLKREATVVTHGVDTDIYAPPADRAAAFAESGLPGRYAIGCFGRVRAQKGSDVFVAAMCRLLPRYPDFSAVLVGAVTPEQLPFAGELRKQIAAAGLEQRIVITGELDIAEVQRWYQRLTIYAFTSRNEGFGLTLIEAMAAGAALVAARAGAAEIVVEEGVTGVLVPPGDVEALVAALEPLMRDPAAARAMGERARTRVIERFSLEAEADKIAAVYRRLV

SEQ ID NO: 6561 - protein, 384 aa, Burkholderia xenovorans LB400
MSKHQNDNPRVPHEAAPLRVLHVGPGQGQRGGIASVLAELSAQRARFRDAGVVVAIFETHGFQSMRSLLCFPLVDIPRFLFAVLKGVDLIHFHVSVRGSFYRKFLLYLLARLFGKRTIFHLHAGNFQDFWASNGPTTRKAVSRFIRGADAVVAVSSAIASELQGHQGVTRNLYVIGNTAYSAELAAGAALRDSSGGKRVDMTPYVAFAGRFTEGKGLDELLRAVAALNRRGLKVQLRLAGAGDMDRWTRAAIEYGVSDQVRFVGWLQGDAKLEFYRDAAVFCMPSHFEAFGISTLEAMFIGRPVIGTRVGGFLDLVEEGVTGYLVRCGDSHGLAERIRHLVERPELAHEMGRQAVSRALSRYSVDAIVSQYARCYRQVNGSRGA

SEQ ID NO: 6562 - protein, 320 aa, Anabaena variabilis ATCC 29413
MKIARNITELVGRTPLVRLNNIPQAEGSVADIVVKLESMNPSASVKDRIGVSMVESAEEAGLIHPGKTILVEPTSGNTGIALAMVAAAKGYHLILTMPETMSTERRSMLRAYGAQLELTPGLEGMRGAIARAEQIVTELPNAYMLQQFRNPANPKVHRQTTAEEIWSDTDGQVDIVVGGVGTGGTLTGVAQVLKERKPSFQAIAVEPSNSQVLSGGKSGAHKIQGIGAGFIPAICRLELIDQIIAVSDEDAIAYSRRLAREEGLLSGISTGAALYAAIQVAKRPENSGKLIVMVQPSFGERYLSTTLFKDLSELEISALN

SEQ ID NO: 6563 - protein, 157 aa, Thermotoga maritima MSB8
MLKSGDKAIDFELVNTDLKMVKLSDFSGKNVVLAFYPGAFTSVCEKELCTFRDSLSKFNRLNAVVLGISVDSPFANKAFAEKNHITFDLLSDFGGRVASQYGGVHENFLNIPGYTAAKRAVYVVDGGGTIVYSWVSEDPGKEPPYEEIEEALERLSK

SEQ ID NO: 6564 - protein, 187 aa, Rhodospirillum rubrum ATCC 11170
MSLIGSEVKPFKADAFKAGKFVTVTDDTLKGKWSVVFFYPADFTFVCPTELEDLAENYAEFQRLGVEIFSVSTDTHFAHKAWHDTSEAIKKIEYTMVGDPTGTISRNFDVLIEDAGLADRGTFVIDPEGRIQIVEITAGGIGRDALELLRKVKAAQYVASHPGEVCPAKWKEGEKTLAPSLDLVGRI

SEQ ID NO: 6565 - protein, 217 aa, Triticum aestivum; identical to SEQ ID NO: 5180

SEQ ID NO: 6566 - protein, 196 aa, Synechococcus sp. WH 5701
MSRLVGLQAPEFTATAVVDQEFQTVTLSQYRGKYVVLFFYPLDFTFVCPTEITAFSDRYGDFTSRNTEVLGVSVDSQFSHLAWVQTDRKQGGLGDIAYPLVADLKKEIASAYNVLDEDAGVALRGLFIIDPDGVIQHATINNLAVGRNVEETLRVLQAFQHVKANPDEVCPANWTPGEKTMNPDPVGSKEFFAAVN

SEQ ID NO: 6567 - protein, 155 aa, Bacillus pumilus SAFR-032
MTIEVGQQVPEIELTGDNGEKVKLSDFKGKHIVLYFYPKDMTPGCTTEACDFRDRHQSFAELDAVIIGVSPDSQDKHQKFKEKHDLPFLLLVDDEQKLSEAFGVWKLKKNFGKEYMGIERSTFLINKEGTLVKEWRKVKVKDHVEEALEELKAHA

SEQ ID NO: 6568 - protein, 303 aa, Escherichia coli
  misc_feature (41)..(41): Xaa can be any naturally occurring amino acid
MSTLEQTIGNTPLVKLQRMGPDNGSEVWLKLEGNNPAGSVXDRAALSMIVEAEKRGEIKPGDVLIEATSGNTGIALAMIAALKGYRMKLLMPDNMSQERRAAMRAYGAELILVTKEQGMEGARDLALEMANRGEGKLLDQFNNPDNPYAHYTTTGPEIWQQTGGRITHFVSSMGTTGTITGVSRFMREQSKPVTIVGLQPEEGSSIPGIRRWPTEYLPGIFNASLVDEVLDIHQRDAENTMRELAVREGIFCGVSSGGAVAGALRVAAANPDAVVVAIICDRGDRYLSTGVFGEEHFSQGAGI

SEQ ID NO: 6569 - protein, 353 aa, Azotobacter vinelandii
MRVLIVSDAWLPQVNGVVTSLQYLIGELRELGHEVRLLSPGDFRSRPCPTYPEIPLVWDLWRVGPAIRAFRPDCAHLATEGPLGWAARRWLLKHGMAFSTAIHTRFPEYVHTRWPWLPLSWGYALLRAFHRPSRAVLVSTARLRDEFSHWRLSRLVIWRKGVDTRLFSPQPERNVAAERPVFLYVGRIALEKNLEAFLALDLPGEKRVVGDGPQRAELEARYPEARFLGYRHGRELAAAYAEASVLVFPSRTDTYGLVMLEALACGTPVAAFPVPGPLDVVEADVSGVLDEDLGRACLAALVLDRERCAELAGRQSWRASALEFLAHQVLLDGEPYPLAQVCTGFQQADALAD

SEQ ID NO: 6570 - protein, 431 aa, delta proteobacterium MLMS-1
MNICMFTNTYLPHVGGVARSVSCFEEDLRRLGHRVLIIAPTFPDQPENEDPARVLRVPAIRNFNGSDFSASIPAPLLIHKRVDEFAPDVIHSHHPYLLGDAAMRAGRRRHLPVIFTHHTRYEEYTHYVLASKTMQKFVINLATAYANGCTRVIAPSDSIAELIKERGVTAPVEVIPTGVDGQRFQQGEGGRFRQQAGIAGDVELIGHVGRLAPEKNLDFLAEAVKIHLRQNPRAKFLVVGDGPSAPELKASFARDGLAHRLIMTGKKTGDDLIDAYCAMDVFVFSSHSETQGLVVAEAMAAGCPVIALAASGVREVVEDNRNGRLLPAAAAAEEFAKALSGCFADGELAARWRQNAQATAREFDRLKTAQKLLDLYQRARQQQLKTAQEYRRFFEGWEHLLAGVKTEWDMLSSKVGAIADTFGADDNGHRQ

SEQ ID NO: 6571 - protein, 382 aa, Crocosphaera watsonii WH 8501
MHIAWLGKKSPFCGNVTYGREITNSLLDRGYQVSFLHFSQEETDSNHWQHCKEVTLPFFYKSQIYTIPTPKSSKILMNALAKLKPHVVHGSLTLSTLDFRLPEICQALNLPLIATFHPPFDSKLRNFKSSTQFLTYQLYAPFLAHYDKVIVFSRLQQELLMKLGVHKDKLAIIPNGVDTVKYSPGVSCLKSQIKAKRLFVYVGRIATEKNVEALLKAWKQLDMGEQSKLLIVGDGPLKPSLEDFYGREHNIYWLGFVADEQKRIDILRAADVFILPSLVEGLSLSLLEAMACGVACIATDAGADGEVLEDGAGVVLDTQGVTTQLKTLLPLFRDHNEITQLLGQKARQRVLDKYSLTSNISQVEKLYQEVLERKNISIMSHL

SEQ ID NO: 6572 - protein, 911 aa, Xanthobacter autotrophicus Py2
MTYSIDGRTVSAEPRPGQCLRTFLRESGALGVKKGCDAGDCGACTVWLDGRAVHSCLMPAFRAKGHQVTTVQGLASGNALHPVQQAFLEAQAFQCGFCAAGMIMTVAALDEDQRADLPRALKGNLCRCTGYRSIADAVHGVGAIEQDVAGAACGASLPNPFSAGIVTGHARYTMDVDTADPALHGLLHLKVLRSPHAHARILRIDTAKALAIPGVVAVFTHEDVPKKLFSTATHEDHLVDPDDTLILDDVARFVGQRIAAVVADTEGAAEAGCRALEVDYEILPAVFDPLQAMAPDAPLLHPGNDGLAGGARGNVFLCLKGEVGSVAEGFAAAAVVHDETYSTSRVQHAHLETHGSIAWRDGDGRIHVRTSTQAPFITHKKLCYLFGIFPHDLHVFTERVGGGFGGKQEMLSEDLCVLATLKLGRPVKWEFTRPEEFLGATTRHQMTTRVKMGATADGMLTALEVHVVSNTGAYGGHGGETLAAALGSPLAAYRCPAKKAEGHAVYTNVIPGGGFRGYGASQTSFAIESALDDLAAKLGIDPFAIRRRNMIRPDDVIQSVWAEPSDVAFGSYGLDQCLDLVEAELASGKGDQAPEGDWAEGTGVALAVLEAGPPTEHRSGGEMRLLADGTYHLAVGSTEMGNGSVTAHRQIAAAVLGTRAEAIAIINADTDRAPYDTGTFASTGTVVAGQAVELTARALAAEILSYAARRTNTAPEDWRLTADAVESATQRISLAELCRLAAAEGHHLEAKRKAYLSPRTIGFNVQGVRLAVHRVTGEVRVLHSVHAADIGRLINPLQCRGQIEGAVAMGLGWALTEHMVHDAQGNILNAALRNYHIPAFADMPRTTVLFADTHDSIGPLGAKAQGECAINAVAPAVANALANATGVRFAHLPFTPDRIFDRLGRAAGAPS

SEQ ID NO: 6573 - protein, 334 aa, Moorella thermoacetica ATCC 39073
MSKKRGTGMACFFYGTGYGNGFPDVSTANVEIHDDGSATVHTGAVDCGQGSNTVLAQIAAEELGIPYNWVTVVSADTDTTPDAGTTAATRQTYASGNAVQAACRQARETLFEYTRTILGVNTIAGLVARDGVIYVKGYPEKHITYPEAAARARLAGYRLVGQGTFVTHTTAVDRETGQGAPYWPYAFGTQIAEVEVDTETGEVRVLKLVAAHDVGRAVNRQGVEGQIAGGIGQGVGMALMEKVHLKEGRIINNSFSTYLIPTTLDMPEVQPLIVESYEPTGPYGAKGVGEPATIPTVPAIINAIYDAIGVRITELPATPEKILAALRAKEGERQ

SEQ ID NO: 6574 - protein, 188 aa, Saccharophagus degradans 2-40
MQTIINTKILPFKATAFSKGDFIPVSEQDLLGKWSVVMFYPADFTFVCPTELGDMADHYAQLQEMGVEVYSVSTDTHFTHKAWHDSSDTIGKINFPMIGDPTGTISRNFGVMIEEDGLALRGTFVINPEGEIKVAEIHDLGIGRSAKELVRKIQAAQYVAEHDGEVCPAAWQPGEATLAPSLDLVGKI

SEQ ID NO: 6575 - protein, 426 aa, Moorella thermoacetica ATCC 39073
MGVIGASPARGDARAKVTGEAIYPADIVFPGMIYGQAIRSPHPHARIVNIDTAAALKVPGVLCVLTARDIPGHNGQGVLFQDMPVLAGNEVRSVNDVVALVGATTPAAAREGAAMVKVDYEELPALLDPVAAMQPGAPRVHPDRENIIYHLPIRRGDVAAGFAAADVVVENTYRTQLLDHAFLQPEAAVARLDERGHLIIYVATQYVHWDRTEVARVLGWNQDRVRIVAPAVGGAFGGREDMTLQTLVALLAVHTRRPAKMVLSREESFFAHSKRHPMIMRYKTGATREGKLTALEAEIIGDSGAYCSWAPNVLRKAAIHATGPYVIPNVKIDAYAVYTNNPFTGAMRGFGATQPPLAYESQMDELAAQLGIHPFTIRWLNAFRQGDVTATGQVLESSVGLTETMLQAARAAGWSPDNLLPGGKLG

SEQ ID NO: 6576 - protein, 215 aa, Picea glauca
MATVASAKSNVMKSVIPAVKKCLLPLGRPGDSAASATCRSLSTAAAKYRPEYDSAIQDDKQDRQASETRRGGLPNIFGDPFYPLRSLGFGLDQLFDNPFLAASRGTGDAVRGGSRKPWDAVEDKEALHLRVDMPGLGKEDIKVYAEENALVIKGESVSDAELDGSARKYSSRIELPPKVYKLDHIKAQMKNGVLKVTVPKFTEQEIKNVINVNIE

SEQ ID NO: 6577 - protein, 377 aa, Prochlorococcus marinus str. MIT 9515
MKIAFFTETFLPKVDGIVTRLTKTIEFLTKNGDEVIVFCPEGCPNTYQGATIVGVAAMPLPLYPELKLGLPGPAVSDKLEQFKPDLIHVVNPAVLGLGGIWLAKTNNIPLIASYHTHLPKYLEHYGMGMLEPLLWELLKAAHNQALLNLCTSSAMVNELEDKGIQRTALWQRGVDTENFKPELRSEKMREKLFGKYKDADSLLIYVGRLSAEKQIERIKPVLESIPGACLALVGDGPYRSQLEKIFENTKTNFVGYLSGEELASAYASGDIFLFPSSTETLGLVLLEAMAAGCPVIGANKGGIPDIINDGINGCLYDPDEKDNGEKSLIEATKKILADKNKKEAMRIEARKEAEQWDWNQATLQLQKYYSETLENIS

SEQ ID NO: 6578 - protein, 308 aa, Methanosarcina barkeri str. Fusaro
MGRIYSDITWTIGNTPLVRLNRITEGLHADVLAKVESFNPMGSVKDRIGLAMIEKAELEGKIKKGTTVIEATSGNTGIGLACVCAARGYKLILVMPETMTVERRKLLKALGAELVLTPGTEGMKGAVNKAEQMAADDPSLYFIAQQFQNPANPEIHRRTTAEEIWRDTDGKADVIVAGVGTGGTITGVASVLKKRKPAFKAIAVEPAESPVLSGGSPGPHKIQGIGAGFIPDVLQLDLVDEVIRVTGDNAAAMSRRLAKEEGILAGISSGAATYAALQVAAREEMNGKTIVVILPDTGERYLSTDLFD

SEQ ID NO: 6579 - protein, 201 aa, Isochrysis galbana
GGAVRKAEQIVAALGSKGKLLQQFENSDNPKIHRETTGPEIWADTDGSLDIFVAGVGTGGTLTGCAQYIKPLKPEVKFVGLEPVSSPVLSGGKHQGPHKIQGIGAGFIPGNVDLSMIDEVMQISDDDAIATARELAAHEGLMCGISSGASVFAAKQLAKRPENKGKTIVCIIPSFGERYLSTILYANLWEEAAAQTAEPLD

SEQ ID NO: 6580 - protein, 161 aa, Pseudotsuga menziesii
MSIIPSFFGRRSSSAFDPFSLDVWDPFRAFTDLAAGGPSGQFVNEASAVANTQIDWKETPEAHIFKADLPGLKKEEVKIELEEGQRILQISGERSKEEEQKNDKWHRIERSHGKFLRRFRLPDNAKVEEIKAAMENGVLTVTVPKEPEPQPPQPKSIEISG

SEQ ID NO: 6581 - protein, 316 aa, Bacteroides fragilis YCH46
MAKIAKKLTELIGHTPLMELSGYSRKYGLQENIVAKLESFNPAGSVKDRVALSMIEDAEERGVLQPGATIIEPTSGNTGVGLAMVATIKGYRLILTMPETMSLERRNLLKALGAQIVLTNGQKGMAGSIAKAEELKKSIPGSVILQQFENPANTEVHARSTGEEIWQDTDGEVAVFVAGVGTGGTVCGVARALKKHNPNVYIVAVEPASSPVLEGGKAVSHRIQGIGANFVPGIYDASVVDEVMPVPDDEAIRGGRELASTEGLLVGISSGAAVYAARQLAGRPEFKGKMIVTLLPDTGERYLTTELFAFDAYPLD

SEQ ID NO: 6582 - protein, 326 aa, Mycobacterium tuberculosis
  misc_feature (54)..(54): Xaa can be any naturally occurring amino acid
GSHMARYDSLLQALGNTPLVGLQRLSPRWDDGRDGPHVRLWAKLEDRNPTGSIXDRPAVRMIEQAEADGLLRPGATILEPTSGNTGISLAMAARLKGYRLICVMPENTSVERRQLLELYGAQIIFSAAEGGSNTAVATAKELAATNPSWVMLYQYGNPANTDSHYCGTGPELLADLPEITHFVAGLGTTGTLMGTGRFLREHVANVKIVAAEPRYGEGVYALRNMDEGFVPELYDPEILTARYSVGAVDAVRRTRELVHTEGIFAGISTGAVLHAALGVGAGALAAGERADIALVVADAGWKYLSTGAYAGSLDDAETALEGQLWA

SEQ ID NO: 6583 - protein, 782 aa, Polaromonas sp. JS666
MTETQPAQINPSRFGSGQSVRRLEDDALLAGAGQYTDDLTLPGQTQLFFVRSPYPHARIVSLDTAAALAMPGVLQVVTGADLVAAGVKPIPGASGFTRADGSPCAAPPRRALAHERVRFVGEAVAAVVAQTLQQARDAAEAIAVDYEELPMVVDMNDAMAPGAPVLCPEAPDNIAAETRYGNAEATAAAFASAHHVVALDLVNQRLAPLSLEPRSVLAAFDTTSQRLTIRMSTQMPSGVRDSVCDALGMAKEQLRVVVGDVGGGFGMKTGVYPEDVAVAFCARALQRPVKWVADRSEEFVSSTHGRDLQSHAELALDEHGKILGLRLASLANVGAYATGAGVVIQLMIGPWVQTSVYDIQTIDFHFRAVLTNTAPTSAYRGAGRPEAIFTIERLMDEAARQTGIDRIELRRRNFIQPTQMPYKNPMGQTYDTGRFESVMDQALVLADWQGFDARAAESARRGLLRGLGIATFLEWTGGNALEESVTVEIKAPTSGTDGIIEVFSAVNAMGQGIATSLAQLVVDAFGVPMDKVRIVLGDTDRGNGFGSAGSRSLFTGGSAVRIGAERTIDKARQLAAKEFEAAEQDITYADGSFKVAGTDLSIDLFALAARQSDQRIFMDSTTAVAGPSWPNGCHICEVEVDPQTGHVAVVAYASVNDVGRVVNPMIVRGQLDGGAVQGIGQALCEHLVYDRETGQPLTGSLMDYAAPRADNAPDFKTELDPSTPCLNNPLGVKGVGELGTIGAGPTVVNAVADALARRGMAAQARQLQMPLSPSRLWHLMQG

SEQ ID NO: 6584 - protein, 336 aa, Fusobacterium nucleatum subsp. nucleatum ATCC 25586
MEQKKMKYLENLVGKTPMLELIFDYKGEERRIFVKNESYNLTGSIKDRMAFYTLKKAYEKNEIKKGAPIVEATSGNTGIAFSAMGAILGHPVIIYMPDWMSEERKSLIRSFGAKIILVSRKEGGFLGSIEKTKEFAKNNPDTYLPSQFSNLYNSEAHYYGIGLEIVNEMKSLNLNIDGFVAGVGTGGTVMGIGKRIKENFSNAKICPLEPLNSPTLSTGYKVAKHRIEGISDEFIPDLVKLDKLDNVVSVDDGDAIVMAQKLAKCGLGVGISSGANFIGALMLQNKLGKDSVIVTVFPDDNKKYLSTDLMREEKVKEDFLSKDITLKEIKNVLRVI

SEQ ID NO: 6585 - protein, 381 aa, Synechococcus sp. CC9605
MKVAFFTETFLPKVDGIVTRLTKTVKHLVDAGDEVVVFCPEGCPEEYMGARLIGVPAMPLPLYPELKLALPRPAVSDAIDAFQPDLIHVVNPAVLGLGGIWLAKNKGIPLVASYHTHLPKYLEHYGLGMLEPLLWEMLKAAHNQALLNLCTSTAMVKELSDKGIQHTDLWQRGVDTELFRPELRSAKLRQRLLGGRDDRGALLLYVGRLSAEKQIERIRPVLEGLPDARLALVGDGPHRQQLEKHFEGTATTFVGYLAGQDLAGAYASGDAFLFPSSTETLGLVLLEAMAAGCPVVGANRGGIPDIITDGVNGCLYEPDGADGGAASLIEATRRLLGNDLERQALRSAARAEAERWGWAGATEQLRTYYRTVLSAPQLTAA

SEQ ID NO: 6586 - protein, 1325 aa, Magnaporthe grisea 70-15
MAPIAMSPERDPLASLHSLTTNYEDTISFFLNGSRVVLDEIDPEVTLLEYLRGIGLTGTKLVNACLAPLASVDGKHVITIEGIGNAKRPHPAQRLIAEGNGSQCGFCTPGIAMSYRPILDAAQAFSVKKDASLGCGKSTANGGDGCCMENGSGGAAGGFCKADKSSQSEESGKRFPQPKLMKYDPETELIFPPALKKHQFKPLTFGNKRKRWYRPVTLQQLLEIKSVHPDAKIIGGSTETQIEVKFKALSYPVSDFVGDIPELRQYELKDDHLEIGGNVTLTDLEGICQKAIEHFGEARSQVFAAIHKQLKYFAGRQIRNVGTPAGNLATASPISDLNPIFVASDSTLLARSLQEEKPIEIPMASFFKGYRMTALPKDAIIASIRIPITREKGDFFRSYKQAKRKDDDISIVTGALSVSLNSDGVVEKCNLVFGGMAATTLAAKETSEFITGKRFADLETLEGAMNALEKDFNLTFGVPGGMASYRKSLALSFFYRFYHDVMGSIGADSDATALTSTVDKDAELELERDISTGTVDRDTTAAYEQEILGKGNPHLAALKQTTGEAQYTDDIPPLANELHGCLVLSTKAHAKIKSIDYSAALEIPGVVDYVDRHDLPRQDLNRWGAPHFEEVFFAEDEVFTTGQPIALILAKSALKAAEGARAVKVEYEELPAIFSIEEAIEKESLFNYFREIKKGDPEGTFDKCDHVFTGIARIGGQEHFYLETNATVVVPKPEDGEMEIYSSTQNPNETQLYAARVCDVKINKILVRVKRLGGGFGGKETRAVQLSSIIALAAHKTRRPVRCMLTREEDMIISGQRHPFLGRWKVGVNKDGKIQALDIDIFNNGGWSWDLSAAVCERSMSHSDGCYRVPNVHVRGRICKTNTMSNTAFRGFGGPQGMFIAETYMSEVADRLGMPVEKLREINMYKHGESTHFNQTLDGDWFVPLMYKQVQEETKYAERREAVARFNAEHKWRKRGLALIPTKFGISFTALWFNQAGALVHIYHDGSVLVAHGGTEMGQGLHTKMAMIAAQALDVPLDSVHISETSTNTVANASATAASASSDLNGYAIFNACKQLNERLAPYREKLGKDASMAKLAEAAYFDRVNLSAQGFYKTPEIGYTWGENKGKMFFYFTQGVAAAEVEIDTLTGTWTCLRADIKMDVGRSINPAIDYGQIQGAFVQGLGLFTMEESLWLRSGPQKGMLFTRGPGTYKIPGFRDIPQVFNVSLLKDVEWKELRTIQRSRGVGEPPLFMGSSVFFAIRDALKAARAQYGVEATVGSDDKDDGLLKLESPATPERIRLACVDPIMERSRVTPNEGEKNFFIAI

SEQ ID NO: 6587 - protein, 161 aa, Bradyrhizobium sp. ORS278
MAKISMIVNGNPVTANVDPRTLLVQFLRENLRLTGTHVGCDTSQCGACVVHLDGKAVKSCTTLAVMADGHEVRTIEGLAADGAPLHPMQEAFREHHGLQCGFCTPGMIMTAVDLVHRKGHELSEETIREELEGNLCRCTGYQNIVQSIAAGAKAMAKSDLA

SEQ ID NO: 6588 - protein, 381 aa, Anabaena variabilis ATCC 29413
MRLSIVTHNVIKGDGQGRVNYEIAQEAIRRGHHVILLASQVAPELQQNEQVNWVAISVKQWPTELLRNLIFAFISANWLHKHRSQVDLIKINGAITHASGDVNAVHFVHSSWLNFSSSKAQSNSAKTRQSRRIFYNFYQWLYTVLNARWEKKAFRRARVVVAVSSRVAEDLQAIGVAPEKIRVIVNGVDLQEFSPGNNQRSQWGLPAGVPLALFAGDIRISRKNLDTVLKALVYVPDLHLAVAGITEGSPYLQLAQSLGLDERVHFLGLRRDVPELMKAVDFFVFPSRYEPFGLVVIEAMASGLPVITASSTGAADLLTPESGIVLADSDDVEALAQALSLLASDRTLRQQMGQVARTIAEQHSWTNMAQRYIDLFEELHQ

SEQ ID NO: 6589 - protein, 357 aa, Bacillus subtilis subsp. subtilis str. 168
MRKLGKQLAEKGHEIHFITSSIPFRLNTYHPNIHFHEVEVNQYAVFKYPPYDLTLASKIAEVAERENLDIIHAHYALPHAVCAYLAKQMLKRNIGIVTTLHGTDITVLGYDPSLKDLIRFAIESSDRVTAVSSALAAETYDLIKPEKKIETIYNFIDERVYLKKNTAAIKEKHGILPDEKVVIHVSNFRKVKRVQDVIRVFRNIAGKTKAKLLLVGDGPEKSTACELIRKYGLEDQVLMLGNQDRVEDLYSISDLKLLLSEKESFGLVLLEAMACGVPCIGTNIGGIPEVIKNNVSGFLVDVGDVTAATARAMSILEDEQLSNRFTKAAIEMLENEFSSKKIVSQYEQIYADLAEPE

SEQ ID NO: 6590 - protein, 379 aa, Rhizobium leguminosarum bv. viciae 3841
MNTLTDGNRVATRNAAATVRHYVPGGCENGGGIGRLVGYISNTAKEAGETHLVTDTRGPRWSSVASPVRLLGAVLMIAKDRIIAPARIHHIHVAGRGSTARKLILTEAARLLGCSYILHLHDYDYASDFAARSPRQQMLVRRMFQHADQVVALGQRDRLTLTTLLGVEERRVVVIGNCVPDPGPRNVHVGEMPLIIFLGRLSERKGVQELLLALSHPIMKELRWRAVLAGDGPVEDYRRQAAAMGLSDLVKMPGWLGADEARALCTRADILVLPSHAEGLAMAVVEGLAHGLAVVTTRVGAHAEVISDGETGVFVPVGDKDALAAALAKLVTDPELRNHLSAKARAHYLNNFSMKAYMRSLDKLYDAISAQPQTMAGER

SEQ ID NO: 6591 - protein, 793 aa, Acinetobacter sp. ADP1
MNQSVEHLNIQKKSAKAGDSIPHESAHLHVTGQATYIDDLPELENTLHLAVGFSQCAKGKIVQFDLDAVRQAEGVYAVYTAADIAVKNNWGPIVNDDPIFADGEVEFYGQALFVVAAKTYQQARRAVRLAKIEYEAETPILSIQDAIEQQSWVLPPVDFSHGEVEQAFQTASHQLSGSIELGGQEHFYLEGQISYAVPQEDQTLKVYCSTQHPTEMQLLICHALGYHMHQVSVEARRMGGGFGGKESQSAQWACIASLAAQLSGHPCKLRLDRDDDMSSTGKRHGFAYEWSVAFDELGVLQGLKVQLASNCGFSADLSGPVNERAICHIGNAYYLNAVQLRNLRCKTNTVSNTAYRGFGGPQGMFVIENILDDIARYLKCDPVLVRQRNFFAEKPGNGRDHMHYGAEVRDNVAPKIVDELLATSHYHARRASIAQFNQHNAIIKRGIALTPLMFGISFNAVHYNQAGALVYVYMDGTVAITHGGTEMGQGLYTKVRQVAAHELGLPIDRVRLIATDTSRVPNTSATAASSGADLNGKAVQNACIKIRERLAKLAAEISQSDADQIHFENSTVTTNNGQSWSFNDLVNRAYMARVQLWDSGFYKTPEIHYDQVNHLGRPFFYYAYGAAVSEVAIDTLTGEMKVLRTDILHDVGRSINPAIDIGQIEGGFIQGMGWLTTEELYWQPQGPHAGRLFTHAPSTYKIPTSADIPHVFNVKLFDNQNAADTIYRSKAVGEPPFMLGLSVFSAIRQAVQAAIPEDAPLELNAPATAEEILRAIAIGRGQALADQPQPRLR

SEQ ID NO: 6592 - protein, 381 aa, Bacillus cereus ATCC 14579
MKLKIGITCYPSVGGSGVVGTELGKQLAERGHEIHFITSGLPFRLNKVYPNIYFHEVTVNQYSVFQYPPYDLALASKMAEVAQRENLDILHVHYAIPHAICAYLAKQMIGERIKIVTTLHGTDITVLGSDPSLNNLIRFGIEQSDVVTAVSHSLINETHELVKPSKEIQTVYNFIDERVYFKRNMSQLKKEYGISESEKVLIHISNFRKVKRVQDVVQAFAKIVKEVDAKLLLVGDGPEFCTILQIVKNLHIEDRVLFLGKQDNVAELLAMSDLMLLLSEKESFGLVLLEAMACGVPCIGTRVGGIPEVIQHGETGYLCEVGDTTGVANQAIQLLKDEELHRNMGERARESVYEQFRSEKIVSQYETIYYDVLRDDKNGKI

SEQ ID NO: 6593 - protein, 319 aa, Synechococcus sp. PCC 7002
MKIAKNITELVGKTPLVQLNRIPEQENCVAQVVIKLEGMNPAASVKDRIGVNMIEAAEAAGEITPGKTILVEPTSGNTGIALAMAAAAKGYQLILTMPETMSMERRAMLLAYGAQLELTSGDAGMSACITKAQEIVDTLPNAYMLQQFNNLANPDAHRKTTALEIWEDTEGKVDMIIAGVGTGGTITGIAEVLKKYKPECQAIAVEPANSPVLSGGKPGPHKIQGIGAGFVPSVLNQTIIDEVVTVTDEAAINFGRRLAREEGILSGISTGAALCAAIKVAQRPENSGKLIVVIQPSYGERYLSTPLYQDLPANVIHSV

SEQ ID NO: 6594 - protein, 217 aa, Methanocaldococcus jannaschii
MPVIGEKFPEVEVKTTHGAIKLPDYYVEKGKWFVLFSHPADFTPVCTTEFVGFQKRYDEFRKLNTELIGLSIDQVFSHLKWVEWIKEKLNVEIEFPIIADDRGELAEKLGMISPYKGNNTVRAVFVVDNKGIIRAIIYYPQEVGRNLDEIVRLVKALQVSDEKGVAMPANWPENDLIGDKVIIPPASSVEEIKQRKEACEKGEIECLDWWFCYKKLD

SEQ ID NO: 6595 - protein, 182 aa, Nostoc punctiforme PCC 73102
MEEKFLAPITSNSLTQKLQIFASEEVELSLNINNISYSVKLEPRVTLLDALREKLGLMGTKKACDRGECGACTILINGRRINSCMTLAVMHIDAEITTIEGLAQDDKLHPMQTAFITHDAFQCGYCTSGQIVSAVGMILEEPPKSEAEIREKMSGNLCRCGAYPNIIAAIRDVLEEMENAAI

SEQ ID NO: 6596 - protein, 263 aa, Triticum aestivum
QPRAMACAFSASTVSTAAALVASPQAQPGCRSACRFPGAAARPSRLAAAGSRTARAPSFVARAAAEYDLPLVGNKAPDFAAEAVFDQEFINVKLSDYIGKKYVILFFYPLDFTFVCPTEITAFSDRHEEFEKINTEILGVSVDSVFSHLAWVQTERKSGGLGDLKYPLVSDVTKSISKSFGVLIPDQGIALRGLFIIDKEGVIQHSTINNLGIGRSVDETLRTLQALQYVQENPDEVCPAGWKPGEKSMKPDPKGSKEYFAAI

SEQ ID NO: 6597 - protein, 371 aa, Geobacter sulfurreducens PCA
MDRNTGTGSRLTVLFAESSKNFGGQERRIVHEARLLRDAGHRPLILCPPDALLCARAQEAGLMVVGVPMRNAVHPAALRSFCTVIRREGVDVIYSHSAKDSWLGGIASLLTGVPLVRSRELLNPIKRAISYNLLPKRVLACSNAVREHLVAAGVAPRKIRVQYPPVATARFASVTDEERLNTRRELGLDGHFPVIACVAGFRTEKRQEDLIRAMALIRRPFPSARLVLAGSGWYVANLRSFAEEAGVTDLVDCPGEREDVPALLANTDVFVLPSSMEPFGMSPVEAMAAGVPVVVTRTGGLAEIVTDGVDGIQVPVGDPPAIADAIIRICNDRQLRDRLAAAGLRRASDFDEARAIEALLGHFNDVIARRI

SEQ ID NO: 6598 - protein, 734 aa, Nostoc punctiforme PCC 73102
MNKIIGKPLDRVDGKLKVTGEAPYTADVAIENLTYGVIFQSAIASGKVIQIDTSAATAVPGVVDIITYKQTPSLVKIPFFSPPQPQATEKDDNIYYDGQHLGIVIAQTLEQAETAASLVKIIYEEATAIVTVADAEIFEPESIFFGMMPGKITRGDVESGKAQADVLVEQIYTTPMEHHNPLEPSGTIAIWEGDNLTLYETTQGISATQKAIASVLNIPQENVRVISKYLGGGFGCKALLRSHTILAAIASRQVKRPVKVVLTRSQMYTACGHRSQTQQQLTLGATKEGRLTLIDHIGTSLTSLFDDFVEPVGAATTMMYACPNLEIKYRLARINTATPTFMRGPGEATGMFALESAMDELAYTLNIDPIELRLINHADIEPHKGLPWSTKSLKECYQKGAEIFGWLQRNPVPRSMRDHHFLIGWGMASATFPTNIQTASVKVKIFATGEVKVQSGTQDIGTGTYTVMTQVAAEVLGLPVQFELGDTNLPKAPITGNSITVASVSPAVHQAAIAARDQIIKMAIADPNSLLYGSQAEGIIVESGQIFLKQDPSKRDSYTDILRRHGLESLEVTEESSINPEGKEYAKHSFGAIFVEVAVDELLGEIKVRRCVGVYGAGRILNFKTARSQVIGGITWGIGMALMEKTVMDPNQGRIVGANFSDYLIPVHADIPNMEVQFVEEHDPYVNALGTKSLGELPIVGVAAAISNAVYHATGKRIRDLPITPDKLSESGID

SEQ ID NO: 6599 - protein, 68 aa, Physcomitrella patens subsp. patens
MGVPAFYRWLADKYPLIVVDVIEDEQHVIEGVKVPIDTTQPNPNGLEYDNLYLDMNGIIHPCFHPEDR

SEQ ID NO: 6600 - protein, 311 aa, Bacillus subtilis subsp. subtilis str. 168
MLKIVANTADLIGDTPLVRLNRLQPENAAQVYLKLEFFNPSGSVKDRAAYQMIIEAEQNGLLKPGSVIIEPTSGNTGIGLAMNAAARGYKAILVMPDTMTKERINLLKAYGAEVVLTPGEERMPGSIKKAKELAEQIPNSYIPMQFDNTANPDAHRKTTAPEIARAIEEIGKPLGAFVASSGTGGTITGTGEALKELFPDITVHVVEPAGSPVLSGGKPGAHKLVGTSPGFIPPILNEDVYDEIIKISDEDAYTTTRRLAAEEGILVGPSSGAACFAAIETAKRLSPDKVVVCMTADTGERYLSTDLWSFI

SEQ ID NO: 6601 - protein, 669 aa, Oryza sativa Japonica Group
MEMAANPGGSGTCSDALFRELWHACAGPLVTVPKRGERVYYFPQGHMEQLEASTNQQLDQYLPMFNLPSKILCSVVNVELRAEADSDEVYAQIMLQPEADQSELTSLDPELQDLEKCTAHSFCKTLTASDTSTHGGFSVLRRHAEECLPQLDMSQNPPCQELVAKDLHGTEWHFRHIFRGQPRRHLLTTGWSVFVSSKRLVAGDAFIFLRGESGELRVGVRRLMRQVNNMPSSVISSHSMHLGVLATASHAISTGTLFSVFYKPRTSRSEFVVSVNKYLEAKKQNLSVGMRFKMRFEGDEAPERRFSGTIIGIGSVPAMSKSPWADSDWKSLKVQWDEPSAIVRPDRVSPWELEPLDASNPQPPQPPLRNKRARPPASPSVVAELPPSFGLWKPPSEAAQTLSFSEPQRAREIFPSIPASIFSASSHVEFNSKNEPSILSNQFYWSMRDSKTDSFSASTNKTRVERKQEPTTMGCRLFGIEISSAVEEALPAATVSGVGYDQTVLSVDVDSDQISQPSNGNKSDAPGTSSERSPLESQSRQVRSCTKVIMQGMAVGRAVDLTKLNGYGDLRSKLEEMFDIQGDLCPTLKRWQVVYTDDEDDMMLVGDDPWDEFCSMVKRIYIYSYEEAKLLAPKSKLPVIGDTIKLSSMNSSHESVDLDNHASVTNRDC

SEQ ID NO: 6602 - protein, 187 aa, Pseudomonas syringae pv. tomato str. DC3000
MPIINSQVKPFKATAFKNGSFVDVSDADFKGKWSVVFFYPADFTFVCPTELEDLADNYDTFQKLGVEIYSVSTDTHFAHAAWHNTSPAIGKIQYTMIGDPTLAISRNFDVLIEEAGLADRGTFVINPEGQIKIVELNDGGVGRDASELLRKIKAAQYVAAHPGEVCPAKWKEGEATLAPSLDLVGKI

SEQ ID NO: 6603 - protein, 325 aa, Mycobacterium tuberculosis H37Rv
RHMTRYDSLLQALGNTPLVGLQRLSPRWDDGRDGPHVRLWAKLEDRNPTGSIKDRPAVRMIEQAEADGLLRPGATILEPTSGNTGISLAMAARLKGYRLICVMPENTSVERRQLLELYGAQIIFSAAEGGSNTAVATAKELAATNPSWVMLYQYGNPANTDSHYCGTGPELLADLPEITHFVAGLGTTGTLMGTGRFLREHVANVKIVAAEPRYGEGVYALRNMDEGFVPELYDPEILTARYSVGAVDAVRRTRELVHTEGIFAGISTGAVLHAALGVGAGALAAGERADIALVVADAGWKYLSTGAYAGSLDDAETALEGQLWA

SEQ ID NO: 6604 - protein, 327 aa, Parvularcula bermudensis HTCC2503
MQTHPSVLSLIGNTPLLKLRRASEETGCLILGKCEFLNPGQSVKDRAALSIVEAAEAAGTLKPGGTIVEGTAGNTGIGLCLVGKAKGYKVKIVMPRTQSAEKKDAIRLLGGELIEVDAVPYANPANYIHQSKRIAAETENAVWANQFDNTANRDAHIRTTGPEIWTQTDGTVDGFCCAVGSGGTLAGVSMALKERGDVKIAAADPEGAKIYSWIKTGELAGDGSSVMEGIGQGRVTANLDGAQFDDAYRIPDDEALQIVFSLMEEEGLCLGGSSGINIAGAKRLAKDLGPGSTVVTILCDYGNRYQSKLFNPEFLQSKGLPVPPWMS

SEQ ID NO: 6605 - protein, 323 aa, Mycobacterium tuberculosis H37Rv
MTRYDSLLQALGNTPLVGLQRLSPRWDDGRDGPHVRLWAKLEDRNPTGSIKDRPAVRMIEQAEADGLLRPGATILEPTSGNTGISLAMAARLKGYRLICVMPENTSVERRQLLELYGAQIIFSAAEGGSNTAVATAKELAATNPSWVMLYQYGNPANTDSHYCGTGPELLADLPEITHFVAGLGTTGTLMGTGRFLREHVANVAIVAAEPRYGEGVYALRNMDEGFVPELYDPEILTARYSVGAVDAVRRTRELVHTEGIFAGISTGAVLHAALGVGAGALAAGERADIALVVADAGWKYLSTGAYAGSLDDAETALEGQLWA

SEQ ID NO: 6606 - protein, 270 aa, Arabidopsis thaliana
  misc_feature (15)..(15): Xaa can be any naturally occurring amino acid
  misc_feature (44)..(44): Xaa can be any naturally occurring amino acid
  misc_feature (52)..(52): Xaa can be any naturally occurring amino acid
  misc_feature (73)..(73): Xaa can be any naturally occurring amino acid
MASVASSTTLISSPXSSRVFPAKSSLSSPSVSFLRTLSSPSASXASLRSGFXARRSSLSSTSRRSFAVKAQAXDDLPLVGNKAPDFEAEAVFDQEFIKVKLSDYIGKKYVILFFYPLDFTFVCPTEITAFSDRHSEFEKLNTEVLGVSVDSVFSHLAWVQTDRKSGGLGDLNYPLISDVTKSISKSFGVLIHDQGIALRGLFIIDKEGVIQHSTINNLGIGRSVDETMRTLQALQYIQENPDEVCPAGWKPGEKSMKPDPKLSKEYFSAI

SEQ ID NO: 6607 - protein, 218 aa, Glycine max
MPGLTIGDTIPDLQVETNQGKIKLHQFCADGWTILFSHPGDFTPVCTTELGKMAQYAKEFYQRGVKLLGLSCDDVQSHNEWIKDIEAYTPGAKVNYPIIADPKREIIKQLNMVDPDEKDSTGNLPSRALHIVGPDLKIKLSFLYPATTGRNMDEVLRVIESLQKASKFKVATPANWKPGDPVVISPGVTNEQAKEMFPKGFETVDLPSKKEYLRLTKV

SEQ ID NO: 6608 - protein, 152 aa, Campylobacter coli RM2228
MSVLKVGDEAPQFELLNQDGVKIALKDFIGKKVILYFYPKDNTPGCTTEACDFSANYDKFCDKNAVIIGVSPDGVTSHDKFIAKFNLKHILLSDSEKEVAKAYGAWGLKKNYGKEYEGIIRSTFVIDEAGKIAQIYSNVRVKDHALKVLESL

SEQ ID NO: 6609 - protein, 567 aa, Ostreococcus tauri
MGVRVWIILIIALSARGGGVDGARVRLDRDFNHLRLTKTTRDADAVRELPGYGAPPTAQFSGFLDASSSTPGTMLHYWFAAKETADWLTEPTVFWFNGGPGSSSLLGFLQEQGPLLINATGGLMRNPFSWTKHANFVALESPAGVGWSYCEEMTRGGDCANDDISTAADARAAVVSFFEKFPELRRNKLYLTGESYAGVYVPTLARSILDYNDAQSGNESRIPLAGVAVGDPCTDNESQKDSMDMLWYGHKYGFVPETEFKLLWHTCNHRYTKPLTHGKWKKKTLKKSLFEVFDHVVDKGTSEECKVAHRKFLWQTSNAFSQDWRFAWINDLSLFGPAALAEGGENVPGTLDYMTTQWMMRGDVRKALHVDESAAKQWPGPTDNWLYTKSWAACNDDADTSTQSMIDFYRSISPRLERTIVYNGDTDPCVSYEGTREAIIKVGFAELKGGSQRPYFFNASGVPASLLQEKPLLYGPDLATIDAGAQFAGHVVDYENNLSFITIHGAGHMCPQFRPQTSQLLIRKLLTGDAFAPPMPTNNRLASTNEEEFQRDMDAWVVEAQGSKYID

SEQ ID NO: 6610 - protein, 136 aa, Borrelia turicatae 91E135
MLLTNYKKNFLDFLNDDFDFMSPKGVHDIPVNIKDEGKSFILEAYLPGIKKDDISISIKNDYLTISYESKDESEEKHDKYLRVERRDISFARSFRLSGNIDQDKIKSELKNGVLHIKLPKKAEVIEKIQEKKIAIE

SEQ ID NO: 6611 - protein, 184 aa, Streptomyces coelicolor A3(2)
MLTVGDKFPEFDLTACVSLEKGKDFQQINHKTYEGQWKVVFAWPKDFTFVCPTEIAAFGKLNDEFADRDAQILGFSGDSEFVHHAWRKDHPDLTDLPFPMLADSKHELMRDLGIEGEDGFAQRAVFIVDQNNEIQFTMVTAGSVGRNPKEVLRVLDALQTDELCPCNWSKGDETLDPVALLSGE

SEQ ID NO: 6612 - protein, 498 aa, Acinetobacter sp. ADP1
MSQRPVTFFFRGKTQQVAGVAPVMTVLQFLREHGGLDQVRQTGTKEGCAEGDCGACTVVIGELVNDQLQLRSVNACIQFLPTLDGKALFTVEDLKTLTLSSESVLHPVQQAMVEHHGSQCGFCTPGFIMSLWSMYENESHAPDKAKVSDYLSGNLCRCTGYRPILDAAQKAFDYPKVMLERQNIIEALKQIQALPSLQLEYQGQQFFAPKTVQEFAALRQQYPQARIVAGSTDVGLWVTKLGRDLGDMLYIGQVQELKSIDIDQNMLHIGANVSLSDALSKISDIYPDFEELQRRFASMPIKNAGTLGGNIANGSPIGDSMPALITLDTILRLRSGEQRRDIALADYYLDYQKTALQAGEFVEAILIPIHSSKTFKFATYKISKRFEQDISAVCAAFSCELDENKVVQSINIAFGGMAAIPKRAVQAEAVLLGKVMSAELIQHAQVALAQDFQPLSDGRASSAYRLQVAQNCLQRFYLEKIEDTPMTRVDDLIALVEV

SEQ ID NO: 6613 - protein, 167 aa, Myxococcus xanthus DK 1622
MAKTKLLKQGDAVPDITLTGAGGQSVRLRDLVGQKVLVVYFYPKDDSPGCTAQACGLRDQYEDFVAAGAEVVGISGDSVGSHEGFAAKHRLPFKLLSDARGEAREAFGVSSSFLGLLPGRVTFVVDRSGIVRDSFESQIRVGEHVRRALELVRALAQEGGAPASAAK

SEQ ID NO: 6614 - protein, 456 aa, Xanthomonas campestris pv. campestris str. ATCC 33913
MAIHSSVLELIGNTPIVKAQRLDTGVCELFLKLEASNPGGSIKDRIGLSMIEAAEQRGDLKPGATLVEGTAGNTGLGLALVAQQKGYRLILVVPDKMSREKIFNLKAMGADVVLTRSDVAKGHPEYYQDLAAKIASETPGAYFINQFGNPDNPAAHEFGTGPEILAQMDGQLDAIVFGCGSSGTMTGLSRAFATASPQTELVLADPVGSILTQYIEEGTVSEKSGSWLVEGIGEDFLPDISDFSRVKKAYSISDAESFHTARELLAKEGILGGSSTGTLLAAALKYCREQTTPKRVLVFVCDTGNKYLSKMYNDYWMLDNGFLEREQHGDLRDLILRPYNKRDTVVVGPKDLLTTAYQRMKLYDVSQLPVIDNGELVGIVDESDVLLHVYGDEARFRDPISTAMVSKLDRLDVASPIEALLPVFDRGQVAIVMDGNQFLGLITRIDLLNYLRRRVQ

SEQ ID NO: 6615 - protein, 362 aa, Thermosynechococcus elongatus BP-1
MPKAHWAIALPEGNSGGKAFYHKSIQFTSNNDGMNIKQGFVGTVGQTPLIRLNYFSDLTGCEILGKAEFLNPGGSVKDRAALYIIEDAERKGLLKPGGTVVEGTAGNTGIGLAHICNAKGYRCLIVIPNTQSQEKIDLLRTLGAEVRPVPAVPYKDPNNYVKLSGRIAAEMENALWANQFDNLANRQAHYETTGPEIWEQTDGRIDAWVAATGTGGTYAGVALFLKEKNPAIRTVIADPMGSAIYSYVKTGTLSSTGSSITEGIGNSRITANLAGAPIDDAIQIEDQECLDVIYQLLHYDGLFMGGSVGINVGAAVRLAKELGPGHTIVTVLCDGGSRYQSRLFNPEWLASKGLRVPEIKKR

SEQ ID NO: 6616 - protein, 160 aa, Malus x domestica
MSLIPNSRRGSSSVFDPFSLNLWDPFKDFPFPSSSSLSAFPEFSRENSAFVNTRVDWKETPEAHVFKADVPGLKKEEVKVEVEDDRVLKISGERNVEEEDKNDKWYRVERSSGKFLRRFQLPENAKVDQIKAAMENGVLSVTVPKAELKNVDVRAIEISG

SEQ ID NO: 6617 - protein, 769 aa, Bradyrhizobium sp. ORS278
MAAPIKFGMGQSVLRKEDDALIRGKGRYTDDLAPSAALHALVLRSPQAHAKFTIDVSAARLLPGVALILTAEDTAELGGLPCLFNLETDPFTAPPYPILAKDEVRHVGDAVAFVVADTLDHARDALEAIKVEWTTLPAVTGVVNAIKPGAPQVWPDHKGNVLFDVSIGDKAATEAAFAKAHAVAEIRIVNPRVVASFMETRAAVCEYDTKRDHLTLTAGSQGSHRLRDILCQNVLKIPTEKMRVICPDVGGGFGTKLFPYREYALVAVAAQRLRKSVRWAADRSEHFMGDAQGRDNVTTARMALAEDGKFLAMDVDLMGDMGAYLSTFAPYIPHGGAGMLPGLYDIQKFHCRVRTIFTHTVPVDAYRGAGRPEAAYVVERLVDACARKLDMSVDAIRRKNFIPPRALPYKTATGKVYDSGDFNAHLKRAMEIAEWKDFSKRAKAAKKNGLVRGIGLASYVEVCGTMGEETAHVKLDPNGDVTILIGTQSSGQGHQTAYAQIVAEQFGLPPERVHIHQGDTAQVPTGLGTGGSASIPSGGVSVQRATHELGDKLKQIAAEALEAGLGDLEIADGVIRVAGTDRSITFADLAKRPGVDPAKLNGSATFASADGTYPNGTHVAEIELDPATGIIRIVNYVIVDDFGVTLNPLLLAGQVHGGAVQGIGQALMEQVVYSNSDAQLVTGSYMDYALPRAADAPSFTFETHNVPCKTNPMGVKGAGEAGAIGSCPAVVNAVVEALWREYKIDHIDMPATPERVWIAIREQHRRHSL

SEQ ID NO: 6618 - protein, 376 aa, Frankia sp. CcI3
MGPRVLVDATSVPADRGGVGRYVDGLVAALGATGADMALVCQRSDEERYSRMAPHATVLSGPAAIAHRPARLAWEQTGLPLVAEQVNADVIHSPHYTMPLRAHQPVCVTIHDVTFFTEPDMHTAVKGTFFRSAMRTAVRRAARIIVPSKATRDELVRVLDGESTTTDVAYHGVDTSTFHPPTEEDKRRVRRRLGLGDSRYVAFLGMLEPRKNVPNLIRGWAEAVHWRDEPPALVLAGGSGWDDDVDAAVASVPSHLRVIRPGYLRFSDLPGYLGGSSLVAYPSHGEGFGLPVLEAMACGAPVLTTPRLSLPEVGGDAVAYTQPDAGSIAREMGALLDDAERRRQLGEAGLARAREFTWAASAEAHLASYARAVAEH

SEQ ID NO: 6619 - protein, 226 aa, Zea mays
MPGLTIGDTVPNLELDSTHGKIRIHDYVGDGYAIIFSHPADFTPVCTTEMAAMAGYAKEFEKRGVKLLGISCDDVESHRQWTKDVEAYGGKQQTTTTKVTFPILADPARDAIRQLNMVDPDEKDAAGRSMPSRALHVVGPDKAVKLSFLYPATTGRNMDEVLRAVDSLLTAAKHGGKVATPANWKPGECAVIAPGVSDEEARKMFPQGFETADLPSKKGYLRFTKV

SEQ ID NO: 6620 - protein, 398 aa, Thermobifida fusca YX
MRLRRLKTTVRTRNDKGRGPELMPGRTLLVTNDFPPRQGGIETFCYELAVRLACHGGVVVYTSTSPGDGDFDARLDFPVVRDRATTLLPTPRVAARAAALLREYACDRVLFGAAAPLGLAARRLRAAGARRIVAMTHGHEVWWARLPGSRALLRRIGRHVDALTYLGRFTRSALERALAPADREKLVRLVPGVDPDLFHPDVDGSGVRGRYGLGDAPVVLCVARLVPRKGVDTLIRALPQIRERVPDARLLVVGKGPDERRLHTLAERAGVAEAVVFTGGRPHAELPAFFAAADVFAMPSRTRRFGLEAEGLGIVYLEAAASGLPVLVGASGGAPDTVQHGDTGFVVDGRNPAAVAEHAAALLADPETAQTMGKRGREWVLAEWTWQASAERMLALLD

SEQ ID NO: 6621 - protein, 218 aa, Cupriavidus taiwanensis
MAIRLGEQAPDFTADTTEGRISFHEWIGDGWAILFSHPKDFTPVCTTELGYMARLKPEFDKRNTKIIGLSIDPVDDHQRWVKDIEETQGCTVNYPMIGDADLKVAKLYDMIHPEASGSGPRTAVDNATIRSVFIIGPDKKVKAMLVYPMSAGRNFDEVLRLLDSLQLNAKHTVATPVNWKPGEDVIIPTSVSDEEASKKYPQGFKTLKPYLRTVAQPK

SEQ ID NO: 6622 - protein, 490 aa, Microcystis aeruginosa PCC 7806
MINTLMKPKSFSQAQRDLINQENPAHHYALISVHGDPTAEIGQEGAGGQNIYVRELGLGLAQRGCQVDMFTRRENPNQPEIEELAPGCRTIRLTAGPREFIPRTELFKYLPAFVAAWLDFQSRSQCSYRLIHSNYWLSGWVGLQLKFHLGLPQVHTYHSLAAIKYRDLKNPPSIAAIRHGVEWACLEQCDCVVATSPQEAENLRQLLSAQGRIETVPCGINAAHFGSVSPEIARQKLNIDPEMPVILYVGRFDPRKGIETLVNACARLPAPWLLYLVGGSRSGGSDCQEQQRIRFLVKTLGLESRIIFTGRVSQTDLPSYYAATDVCVVPSYYEPFGLVAIEAMAAGTPVVASDVGGLRHTVVHNRTGLLVPPRNAEALATALGELLARPEKRQSMGRLGREWVESRFSSGAVARQILSLYQSLTLEKSAPEGVLPTQSLITALQKRIQQELGLKKGNKESELRHLAAMEKLIQVLQEGVKVSREQLYNF

SEQ ID NO: 6623 - protein, 187 aa, Pseudomonas putida KT2440
MPIINSQVKPFNATAYHKGEFVQVSEADLKGKWSVVFFYPADFTFVCPTELGDLADNYAEFQKLGVEIYGVSTDTHFTHKAWHDTSDTIGKIEYPLIGDPTHVISRNFDVLIEEAGLADRGTFVINPEGQIKIVELNDGGVGRDAAELLRKVKAAQYVAAHPGEVCPAKWKEGEATLAPSLDLVGKI

SEQ ID NO: 6624 - protein, 1041 aa, Magnaporthe grisea 70-15
MGIPAAFRWLSTKYPKIISPVIEDKPVEMEDGTSIPVDITKPNPNGEEFDNLYLDMNGIVHPCAHPEDRPAPQDEEEMMLEIFKYTDRVFNMVRPRKVLMIAVGKDSKHYPKCELYINPIQPLLDGVAPRAKMNQQRSRRFRSAQEAKEKAEDKLELLKLLKQQKGGDVSAETLESVTKKAFDTNSITPGTPFMDILAGSLRYWCAYKLNTDPGWANVKIIISDATVPGEGEHKIMDFVRSQRSSPDHDPNTRHVIYGLDADLIMLGLATHEPHFRVLREDVFFQQGKPRLCKLCGQKGHDAQQCKGEVKKKEGEFDEKQNAEPLKPFIWLHVAILREYLNVELYVPDLPFRFDLERAVDDWIFLCCFVGNDFLPHLPALEIRENGIITLTSIWKQNLPRMGGYVTKDGHIDLERVQYIMDGLAKQEDSIFRKRKEQEDRRDANAKRRKMQDDRAKWGNNSANGPHVSEPAKAITHDMVVNRAAAQVDANVANKSAASMLKSQLKAMQSQAPEASAPETPVKEGAASEETTPASALGKRKAALMEDGDSPAPNSPTPGTPASGNGEAVDTVRLWEDGYTDRYYEQKFHVDPKNVEFRHKVAHAYVEGLSWVLLYYFQGCPSWEWFYPYHYAPFAQDFVGLKDLEISFEKGRKSKPYEQLMSVLPAASRDNLPPIFHDLMTKEDSEIIDFYPEDFEVDLNGKKFAWQGVALLPFIEMDRLLAAVQAKYPELSADEAARNGLGRDVLIISDAHAPLYDDLITNFYSKRQTGSTYKLDQKNSDLLAGVVEKLPDYLPHGALVYPLERKCMPDVEYDRSLTVYYDMPQAVAHKSMLLRGLKMPTPALTRHDIDDLKNKMRGGGGRGGYGGGRGGGGYGGGGRGGYNGNNGNNNNGGHRNGVESYNSRDQRGGRPPQNQSWQPPPPGSAGFGMGVPPPPPPAHHYGGHGGGYNDRYAQQGYPPSYPQYPPPGQGYPPAYPPSYGPPPGQYGGGGGGHYPPPPPPGHNQSYRPDDRGYRGGYNGGRDRGPPRGGGGGGGRGRGGYGR

SEQ ID NO: 6625 - protein, 273 aa, Vitis vinifera
  misc_feature (11)..(11): Xaa can be any naturally occurring amino acid
  misc_feature (68)..(68): Xaa can be any naturally occurring amino acid
MACSAPSTPTXLLSSNPRAFPSKSLSTVASFSKPLSPQTLTIPNSFNPLRKPFQSPVPRSISSRGSHXRRSLVVRASEAPLVGNKAPDFEAEAVFDQEFIKVTLSEYIGKKYVILFFYPLDFTFVCPTEITAFSDRYEEFEKLNTEILGVSIDSVFSHLAWVQTDRKSGGLGDLKYPLVSDVTKSISKSYDVLIPDQGVALRGLFIIDKEGIIQHATINNLAIGRSVDETMRTLQALQYVQENPDEVCPAGWKPGEKSMKPDPKLSKEYFAAI

SEQ ID NO: 6626 - protein, 811 aa, Moritella sp. PE36
MSNHNKVQLSQQQLLEQANRSITTGVGKNVKHDSAGIQVTGEAVYVDDRLEYPNQLHVYVRMSDVAHANIIKIDLTPCYEFDGVELAIEAKDVPGELDIGAILPGDPLLADGKVEFLGQAVIAVAASSMEIARQAAQAAIIEYEELPAILCVEEALAKKSFVTESHQQKRGNSAAALSAAKHILEGSIHIGGQEHFYLETQAASVMPTEDGGMIVYASTQNPTEVQKLVAEVIGVPMHKVVIDMRRMGGGFGGKETQAAGPACLCAVFAKLTGRPTKIRLPRVEDMMMTGKRHPFFNQYKVGFNDDGQINGIEIIVASNCGYSPDLSSSITDRAMFHSDNAYYLGDATIIGHRCKTNTASNTAFRGFGGPQGMITIEHIMDEIAGKLGKDPLDVRKVNFYGIDDRNVTHYYQKVEDNFIHDLVADLEATSEYAQRRKAIDEYNKTSPILKKGISLTPVKFGISFTATFLNQAGALLHVYTDGSMQLSHGGTEMGQGLNTKVAQIVAQEFQVDIEHIQITSANTSKVPNTSPTAASSGTDLNGKAAQNAARTIKQRLIDFCVAHFGVTDEEVIFSNNTVTIREKIMTFADLIQLAYFNQISLSSTGFYKTPKIYYDHATAKGRPFYYYAYGASCSEVLIDTLTGEYKILRVDILHDVGASLNPDIDIGQIEGGFIQGMGWLTTEELVWNDKGKLATNGPMGYKIPAIADTPIDFRTQLVENRSNPEQTVFNSKAVGEPPFMLSMSVWSALRDATASVAEHQYMPHLDTPATPERVLWAVQDAEDYLRTKKCLSNQVKTVAVSEADVESVTVS

SEQ ID NO: 6627 - protein, 240 aa, Oryza sativa Indica Group
MAAPFALVSRVSPAARLPIRAAWRSARPTVGLPSSGRARQLAVASAAQENRDNTAVDVHVNQDGGNQQGNAVQRRPRRSSALDGISPFGLVDPMSPMRTMRQMLDTMDRMFDDVALGFPATPRRSPATGEVRMPWDVMEDDKEVRMRFDMPGLSREEVKVMVEDDALVIRGEHKKEEGEGAEGSGDGWWKERSVSSYDMRLALPDECDKSKVRAELKNGVLLVTVPKTEVERKVIDVQVQ

SEQ ID NO: 6628 - protein, 228 aa, Methanococcoides burtonii DSM 6242
MSETENTERITMPLIGDIAPTFKVDTTMGEISFPEDYKGKWVILFSHPADFTPVCTTEFMTFASMQEDFRELNTELIGLSIDSKYAHIAWLRTIKEKIEYKGMKNVEVLFPVIADIKMEVAKMFGMVQPNASDNQAVRAVFIMDPEAKVRAILYYPLSNGRNMDEIKRMIIAMQKSDKENIATPANWNPGDDVIIPPPGSCGAAKERVESEEEGKYCLDWFMCLRKDS

SEQ ID NO: 6629 - protein, 342 aa, Xanthobacter autotrophicus Py2
MIRNGLVDSIGNTPLIRLKRASEETGCEILGKAEFLNPGQSVKDRAALGIIKDAVARGALKPGGVIVEGTAGNTGIGLALVAAPLGFRTVIVIPETQSQEKKDMLKLAGAILVEVPAVAYANPNNYVKVSGRLAEALAKTEPNGAIWANQFDNVANRQAHIETTGPEIWEQTCGKLDGFICAVGTGGTLAGIAIALKARNPNIRIGLADPMGAALYSYYTTGELKAEGSSITEGIGQGRITANLVDAPIDTAFQIPDEEALPVVFDLLQHEGLCLGGSSGVNVAGAIRLAKEMGPGHTIVTILCDYGTRYQSKLFNPEFLRSKNLPVPEWLERKVEVPNVLV

SEQ ID NO: 6630 - protein, 573 aa, Ostreococcus tauri
  misc_feature (573)..(573): Xaa can be any naturally occurring amino acid
MPSVVAASPIPSARATRGRATRRVTTTGRARIFQPLGTAARARPVAPRALRGRGDGGALCAIAPASTEDGTTAAVKKRRVAIFVEPSPFSHVSGMKNRFLRLIENLREMGDDVVVITPDRNPPAEYHGAKVIGLRGFVLPFYGTDTLLCSFGVSGEVWREFRERPPDLVHCAVPGGLVFGAMTYCKLLDLPLVQSYHTHIPHYIPRYTWAGLVKPMWDLIRFWNGYAATTLVTSSILENELRGEGCTNLQVWDKGVDTVSFNPKFRSEEMRKRLSGGRDGPIIGCVGRLGAEKRLGDLKDILAKLPPNVNLAIIGDGPERQKLEKHFEGTNTVFTGMITGDDLSAAYASLDVFVMPSPSETLGFVVMESMASSVPVVAVAAGGLLDILTKPGDVGLLYPEYDYDAAAKHVTMLLEDDVERKRMGEASRKDVEKWGWMSSNRNLRDNQYTKGLARFFRLQRLRNVAKAIGVRRRTAAAIDFLISGQYILQIVVFTAAVGALIYARQTGPAVAAPRSKEAGPVLAPGVPHRDHHASGDHSVRSQPNSCSHGLAWFFGPAYGAASDCSRGVRGGHX

SEQ ID NO: 6631 - protein, 784 aa, Mycobacterium smegmatis str. MC2 155
MTSAAPETVTTRYAGRRVERVEDTRLLTGRGTFVDDIVRPGMLHACFVRSPFAHAKINGIDATEALALPGVRAVFTAADINPEVKEAWHAVAGRDMPDTPRPPLAEGEVKFVGDPVAIVIAESRYVAEDAVDLVEVDYEPLPAVVDFRTALTSPVAVHDAYPDNNAGGMAGAPPDEETFDSAAHVVKEHVYQQVYVPVPIETRGLVVEWQASAGELTIWASTQTPHELRAFAARLLGIPAQHVRVIMRDTGGGFGQKVVPMREDMCIMLAARKTAGALKWIEDRRENLMSAGQSRHVDGDVRMAFDPDGNILAADIDFVQDIGAYPTPYPVLTTAAIGMFFPGPYRVPKASFNYKTVFSNTAGLHAYRGPWQYETLSREILLDIAARKIGIDPVELRRRNLLRRDEMPYFNPNGMPYDHVAPAETFEQAVKILDHEGFRKQQAEALAQGRYIGLGFSAYIEPTGAATGHLASEGATIRMESTGKINVYVNGGSTGNSLETTVIQLTADALGADIDDVATIQGDTAVTPYGAGTQGSRSAPMTAGAVNEAGTMLRNQIVAMAAAWLGVEEPEIELGGSKATVRSDPDKSVTFGQLAYRAYYEPQQLPPGLSASLEATARYTAPPTAPIHWANATHACTCEVDIETGQVTLTRYIVSEDVGPMINPNVVEGQIAGGTVQGIGGALLEQLAYDDAGNPLSSTFVDYLLPTATEVPAIEYGHVEIPGPGVGGYKGAGEGGAIGSTPAVINAVNDALAPLGVTITTLPASPAAISAAIEAAIETRGKDH

SEQ ID NO: 6632 - protein, 417 aa, Gossypium raimondii
MKESDKSLDPQLWHACAGPMVQIPPLNSKVFYFPQGHAEHSLAAVDFPSSPPVPALVLCRVASLKFMADTETDEVYAKILLMPLPNTELDLEHVAVFGSDNAEKPASFAKTLTQSDANNGGGFSVPRYCAETIFPPLDYTEDPPVQTVVAVDVHGETWKFRHIYRGTPRRHLLTTGWSTFVNHKKLVAGDSIVFLRSENGGLCVGIRRAKRGTGNGPEAGSPFLSFLREDESKMMMMNRNGDWRGKGKLKAEAVLQAATLAASGQPFEVVYYPRASTPEFCVKASSVKAAMRVPWCCGMRFKMAFETEDSSRISWFMGTVSSVQVVDPIRWPNSPWRLFQLEELSTQVPQGLAWDNIGGPSIPPYNRLTAAQFEAFFHPPGANCSSQIGYSNDVVSDEMNGAVHSQNVNGYFPGWML

SEQ ID NO: 6633 - protein, 688 aa, Sulfolobus solfataricus P2
MIQEHLPLITGKGSYIDDINPKNVVYLHIIRSPIARGIIKSISKPESALLSLTWEDVKLYMPVRLFPDLAKTAQVAKMPVLADGRVNFVGQPILAFVVEDRYRTEDVAEEVLIDYDELKPVVDPEESLNADPIHPGLKSNISIDQLLEGGNLSLKNKAEVVVSRKLKQQRVVSNPMEPKGFICWWDNDILNVYVSTQAPFGVKNDLREILGISPEKIRVYSAPNVGGGFGNKSGGYPEYVLAAIASLKLGRPVKWIETRSEMLVNTQSLGRGEVSDMRLYATKDGEILGIEGTIIANIGAFDYGIGFIAPLFIARLSNGPYKMKFASIRAMGVFTNTPPMGFYRGAGRPEAALIHETLVEDLAEELGVDSVEIRRRNLIGDNGYVTPLGVRIDPAGYNEVLNEAEKYYRKAKEVYKDKGVSIVTFAEIVRTSPGEGARVKIENGKVHFYLGIGPHGQAYGSTFKRLASEVLGISEDKIEITTGSSEIVKEGIGSFGSRAGTIGGSAVIAAATELLKKLNTNSLNESELVKYEGVEAEVFYKADDIFAPGAHVAVIDVDKETGFIRVLEYYAVDDVGRAMNKEEIEGQIIGSVLQGASQVIIEAMRYDERGIPLCSSIADCGVPTALEAPLKVKTEYIEYPSQLLSRSRGVGEAGTTGALPAVFIAVEKVTKKKFDRTPVDPWILVSST

SEQ ID NO: 6634 - protein, 312 aa, delta proteobacterium MLMS-1
MSASPEIPASVAGLVGDTPLLRLEHMSRECGAEILVKLESHNPIFSVKDRIALAMLTAARRQGLIQPTTTIIEPTSGNTGIALAMLCAAQSLRLTLTMPETMSVERRALLRHLGAKLVLTPGPEGMKGAIARAEELAAADTDTFIPNQFTNPANPEIHRRTTAEEIWRATGGELDLFVAGVGTGGTITGVGEVIKERLPGFKAFAVEPAASPVLSGGAPGPHKIQGIGAGFIPAVLNTGIIDEVIQVSNEDAIASARLLAAREGVLAGISSGANLYAAMQIAARPEFKGKRIVTVVCDTGERYLSTDLFLTE

SEQ ID NO: 6635 - protein, 595 aa, Oryza sativa
MVESASMVNENSENPYWKAIGYRVEEPRRDRAESMPSPSPSPVSRRPLDNGVVETRALTDTTLLRSLAAKGLAVRPGASDEHHTVRCDAVIVGSGCGGGVAAAVLASAGYKVVVVEKGDYFTKEDYSSIEGPSMERLFERGGVFCTSNVTTMIFTGATVGGGSAVNWSASIRTPAGVMQEWSREHGLAVFASPGYARAMDAVCERLGVTDACREEGFQNKVVRRGCDALGLRADAVPRNSSEGHFCGSCNFGCPTGDKKGTDTTWLVDAVERGAVILTGCKAEHFIVESNGGGGGRSKRCVGLVATCMSNGITKKLRVEAKVSISASGALMTPPLLRNSGLKNRHIGRNLHLHPVSMAWGYFPDNTPEPHIPGKCYEGGIITSMHRVTERTIIETPALGPGAFAALVPWESGRDMKERMRRYARTAHAFALVRDRGAGSVDGEGRVRYAPSRDDAEELRAGLRRALRILVAAGAAEVGTHRSDGARLRCKGARDADVEAFLDEVTVEKGPMHSTTDKWSVLCSAHQMGSCRMGASPRDGAVDVAGESWEAEGLYVCDGSLLPTAVGVNPMITIQSIAYCVAKGIADSMAHGKEQR

SEQ ID NO: 6636 - protein, 81 aa, Zea mays
PGRSKALLAPVRREPSLGQDELNPRVEAFIPKFNMEIRLQRQESFKHYSDMFGRGIRYLKGLGANPCGSQEGLYAFFFFVP

SEQ ID NO: 6637 - protein, 189 aa, Desulfovibrio desulfuricans subsp. desulfuricans str. G20
MMVSKLNPWNWFKKESEQEKTLPVKQTERGAREYASPLDHFHAEFDRMVDSMFSGFGMPSPRRLFDAASPMLGKSVIKPKVDIYGTDKEYVVEVDLPGIEEKDLSVELKDDVLILSAEKKHEEKTEEKGYYRVERSYGSFRRVLNVPDDADKEGINAKLNKGVLRITMPRNKAIETESRKIAIESSKED

SEQ ID NO: 6638 - protein, 156 aa, Vibrio parahaemolyticus RIMD 2210633
MNTLTAGSPAPAFSLLDQDGNTVTLDDFKGKKVLFYFYPKAMTPGCTTQAKGLRDVKAELDAHNVVVLGVSIDPVKRLGKFIERDELNFTLLSDEDHAVAEQFGVWGEKKFMGKVYDGLHRISFLINEEGVIEHVFNKFKTKDHHEVVLNYLNENA

SEQ ID NO: 6639 - protein, 383 aa, Borrelia turicatae 91E135
MKIAIFTDTYLPDKNGVATSIKQIKEGFERKGHSVYIFCPQSQKTDLQEDHIYRCFSIKLNQTVDAKIAFPNKTRIKKIIQEYQPEIIHTHSEFTMGKIGKKLALQHNIPIVHTNHTMWNYYLHYLGIFKYLTNPDKMMKKFYDQIHHFIYPSIKSHNKYFHLATNADYKIIPNGVDRKIFIKDLSQEKRQEILTKHGISKNDKIIIFVGRINEEKNICLLMKHLKKLLIENKNCKLILIGKGKEETKIRRFRKQYELEKQIILIGTIPWEEMYYYYKISDVFTSLSRSEVYPMTTIEALTAGIPAVLINDIIYKDVIQQGKNGFLIDDYENLYKYIKEIIENEEKLQTLKKNTEETSMMFSSSFFVEKIEQYYSEIIKNKKY

SEQ ID NO: 6640 - protein, 156 aa, Dechloromonas aromatica RCB
MLLKVGEKAPVFSLPDADMETVDLARYQGKHIVIFFYPKDGTPCCTKEVTDFSDHEDEFLRHNCVLLGISRDDCLKHAEFRDKEGIGIELLSDTEGVVCKQYGVWQAKDVDGHRKFGVCRSTFVIDRTGTIRHALYGVNYKGHALEVLRLVKELNS

SEQ ID NO: 6641 - protein, 225 aa, Dictyoglomus thermophilum H-6-12
MENLERKGIPLLGEPFPKIEVQTTHGVKNLPDDYKGKWFVLFSHPADFTPVCTTEFVAFQKRYDKFRALNTELIGLSIDQVFSHIKWVEWIKEKLGVEIEFPIIADDTGKVAEKLGLIHPGKGTNTVRAVFVVDDKGIIRLILYYPQEVGRNIDEILRAVEALQVTDKYGVATPAQWPDSEVVGKDHVIIPPAKDVETAKQRLESAKKGEIECFDWWLCHKKLER

SEQ ID NO: 6642 - protein, 404 aa, Nostoc punctiforme PCC 73102
MSSHPSHTLLFLFTTFLPEVTGSAIFNWERVQWFAKQGIYRIIVLAPDWQEQSKLPVVPPDLAENLILETYPSQPWLLYPLLHVPKFSTARYINQRIAHYKPDLINVVDVERLFLFSTWHLPGRRYAKNNKILYITEYHTDYCNHVSTYPAGNLLREILWKPITKYLYNKCDITIAISPTASKILQKMGISNAITIPMYGLDLSAYTPSRRNRQFLETWLTPQEKDNKVILFLGRIALEKRIDILIKAFSTLQLKQKNSSLIIAGDGPVEVVQKLKNLAKSIPNIHFIGFVHGEKKANLLAASDIYCSPAPYETFGRTLVEAMASGTPAITVNSGGVSDYILDGINGYLVEPNDVEALTHAILKILRNENRNVIQRACEDAKQFSLEQACENLHNYYQEILNKN

SEQ ID NO: 6643 - protein, 777 aa, Bradyrhizobium sp. BTAi1
MNILPNNMRFGSGQPVKRLEDQRLLTGKGQFIDDKPDDGALWLYVLRSPHAHAKILSIDTAAAREIAGVQAIYTGADLVADDVGTIPTLAIFKRPDGKPMTVPPRRLLAHEVVRYTGEAVAAVVATSRVIAQEAAEAIVVDYEVLPAVTDPVQALEPGAPVVWAEAPDNIVAAMSYGDAAKVEEAFASAPHKVSLDIVSQRLVPSAMEPRSTIAEIEKKTGRLLLYVQSQTPASTRDVLAEAVLKRPKESVRVLVGDIGGGFGQKTNLYPEDGIVAYAATKLAKKIRWRAERTDEFVGGTHGRDLTSTAEFALDAKGKVLAYRVRSIGATGAYSSGAANIIPLVLGPFVQTGVYDLPLVHFEVKTVMTHTAPVGAYRGAGRPEAVFIVERLFDTAARQIGIDPRTIRKANYIKPAQLPYTNAVGQVYDSGAFAHMLERASKLADWDGFNARKREAKKRGMLYGRGLTSYIEWTGGRAHTEKVSLHATSEGRVILHSGTMAMGQGLQTTYTQMISDTLGIPLDKIDVVQGDTDLATGFGSVGSRSLFVGGTAVAVSSNDLMTKAREKASNLLETAVEDIEYRDGFLTVVGTDRRISLFEIAQKEQGAKLSVDSEGEVDGPSWPNGTHICEVEIDPETGISRVVRYTTVDDVGVAVNPMLVAGQIHGGVAQGIGQALYENVAYDADGQLLTATYQDYCIPRADDVPPIVVTLDDSAPCKTNPLGSKGCGESGAIGGPPCVTNGVMDALFELGITNLQTPLTPEKVWAAIRDAKAKKAAA

SEQ ID NO: 6644 - protein, 185 aa, Anabaena variabilis ATCC 29413
MISRRNFLHILLVSCFAVISWLNFAPTAYALGGKLPAINQPAPDFTLPTNTGDGKLSLADFRGKWVVLYFYPKDFTSGCTIEARRFQQDLPTYVDKNVQIIGVSADDIDSHAEFCDSEGLKFPLLADTDGAVSKAYGSWIGFVSMRHSFIIDPQGILRETFVKVNPSVHSTEVLARLEKLQSAAS

SEQ ID NO: 6645 - protein, 420 aa, Corynebacterium glutamicum ATCC 13032
MGMRVAMISMHTSPLQQPGTGDSGGMNVYILSTATELAKQGIEVDIYTRATRPSQGEIVRVAENLRVINIAAGPYEGLSKEELPTQLAAFTGGMLSFTRREKVTYDLIHSHYWLSGQVGWLLRDLWRIPLIHTAHTLAAVKNSYRDDSDTPESEARRICEQQLVDNADVLAVNTQEEMQDLMHHYDADPDRISVVSPGADVELYSPGNDRATERSRRELGIPLHTKVVAFVGRLQPFKGPQVLIKAVAALFDRDPDRNLRVIICGGPSGPNATPDTYRHMAEELGVEKRIRFLDPRPPSELVAVYRAADIVAVPSFNESFGLVAMEAQASGTPVIAARVGGLPIAVAEGETGLLVDGHSPHAWADALATLLDDDETRIRMGEDAVEHARTFSWAATAAQLSSLYNDAIANENVDGETHHG

SEQ ID NO: 6646 - protein, 396 aa, Kineococcus radiotolerans SRS30216
MSTLVVTNDFPPRTGGIESFVHAVARRLPALGEGDAARVVVHTARQRGDAAVDAALAAEGIVVVRDPSPLLVPTPGIVRRVQRTVREHGADRVWFGAAAPLGLMAPALRAAGVARAVATTHGHEVWWSSLPGSRAALRRIGEGNDTVTYLGDWCRSRVERPLTPAARARMRRLTPGVDVATFRPDPVARARVRAELGLGERPVVVCVSRVVARKGQDVLVRALPEVRRRVPGAALLLVGDGPHRAAVERLARDLGVEADVVFTGAVPWERAPGFYAAGDVFCMPTRTRLGGLEPEALGICYLEAAACGLPVVAGNSGGAPDAVLDGVNGHVVDGRSTEQVAAALVGLLRDGATAAGFGAAGREWVSRRWGWEEQARRLTDLLAGTDVPADPGRERG

SEQ ID NO: 6647 - protein, 412 aa, Streptomyces coelicolor A3(2)
MRKTLIVTNDFPPRPGGIQAFLHNMALRLDPERLVVYASTWKRGREGIEATAAFDAEQPFTVVRDRTTMLLPTPGATRRAVGLLREHGCTSVWFGAAAPLGLMAPALRRAGAERLVATTHGHEAGWAQLPAARQLLRRIGESTDTITYLGEYTRSRIAGALTPGAAARMVQLPPGVDEKTFHPASGGDEVRARLGFTDRPVVVCVSRLVPRKGQDTLIRAMPRILAAEPDAVLLIVGGGPYEKDLRRLAEETGVAAAVHFTGAVPWSELPAHYGAGDVFAMPCRTRRGGLDVEGLGIVYLEASATGLPVVAGDSGGAPDAVLDGETGWVVRGEDPNESADRITTLLADPELRRRMGERGRAWVEEKWRWDLLAEHLRTLLQGGSAARARQATDNVGPPTNRTRHPGRRPYLE

SEQ ID NO: 6648 - protein, 149 aa, Prochlorococcus marinus str. NATL1A
MKLKIGDQIPSFSLKDQKGNIRTSNNLKKSLVLFFYPKDDTPGCTIEVCGFRDKYDLFKILGAEVWGISNGSSQSHLGFANKNKLQYPLLCDQNNILRNQFGVPKKLGFIEGRVTYIINSEGVIKHIFEDLLNGPAHIKEAIKALKKLQ

SEQ ID NO: 6649 - protein, 402 aa, Blastopirellula marina DSM 3645
MSRYFRQPLDRRGPLRVMFITTSMPVGGAETLLVNLIRRLDRTRFAPELCCTKQRGPLGEELSHEIPTFDHLLSGKYDLRVLPRMVELFRLRQIDAIVTVGAGDKMFWGRLAAYLAGVPVIASAIHSTGWPDSINWLNRRLTGITDRFIGVADPHGKHLVEVEGFPPSKVVVIRNGIDTARFRPNVEARRKLRRELQIAENAPVCGIVAALRPEKDHRLFVTAAAKVLETLPEARFLIVGDGPERPAIEAKCRELNVQRQVILTGSRSDIPELLAACDLFALTSKNEASPVSILEAMSVELPIVAPRVGSIPQAVDDPANGLLYPASDLSAVAAAMRQLLADPARMRQMGKSARDKAIGYGSLETMVGGYESLIESVYSAKYPESAAMSSRSGYAENPASTA

SEQ ID NO: 6650 - protein, 160 aa, Rhizobium leguminosarum bv. viciae 3841
MRKNITLVINGASHSLDVPANTLLLDLLRWEVGLTGTKEGCGEGVCGSCTVNVNGDLVRSCLTLAVQVDGKSITTIEGMADGDTLHPLQRKFLELGAVQCGFCSPGLIVTADALLKSNPDPTEAEVRDALRGNLCRCTGYVKIIDAVLAAASEMRSHAHE

SEQ ID NO: 6651 - protein, 187 aa, Xanthomonas oryzae pv. oryzae KACC10331
MSLINTQVQPFKANAYHNGNFIEVTEASLKGKWSVLIFMPAAFTFNCPTEVEDAADNYAAFQKAGAEVYIVTTDTHFSHKVWHETSPAVGKAKFPLIGDPAHKLTRAFGVHIEEEGLALRGTFIINPEGVIKTLEIHDNSIARDVTETLRKLTAAQFVANNPGQVCPAKWKEGAKTLAPSLDLVGKI

SEQ ID NO: 6652 - protein, 179 aa, uncultured marine bacterium 580
MIKVFLVLAIVLALIFIFKKSAFGSEDKLLGNSAPEFKLKNSYGKLVSLNEFKGEWLLVFFYPKDDTPGCTKEACSLRDNFTEIKKLNANIVGISIDSSDSHKEFKEKYNLPFMLLSDPDGETAKKYGALNNFFIFKLAKRQSFIIDPDGIVRRVYRNVSPSNHAQEIKTDLEAFKRNS

SEQ ID NO: 6653 - protein, 215 aa, Thermotoga maritima MSB8
MEGRIPLIGEEFPRVEVKTTHGKKVLPDDFRGKWFVLFSHPADFTPVCTTEFVAFQKRYDEFRKLNTELIGLSIDQVFSHIKWIEWIKEKLGVEIEFPVIADDLGEVSRRLGLIHPNKGTNTVRAVFIVDPNGIIRAIVYYPQEVGRNIDEILRAVKALQTSDEKGVAIPANWPSNELINDSVIVPPASSVEEARKRLESKDFECYDWWFCYKKV

SEQ ID NO: 6654 - protein, 113 aa, Oryza sativa
VVAARAGGIPDIIPEDQEGKTSFLYTPGDVDDCVSKIERLLTCEELRETMRKAARKEMEKFDWRAATRKIRNEQYSAAIWFWRKKRAQLLRPIQWVSGRLFRPTPAPSTMNQS

SEQ ID NO: 6655 - protein, 152 aa, Frankia sp. CcI3
MAVEVGSVAPDFSLKDQNNEVVTLSEFQGKRNVVLLFYPLTFTGVCQGELCSVRDDLASFQNDDVQVLAVSVDSPFAHKVWADQQGYEFPLLADFWPHGAVASAYGVFNAERGISLRGTFVIDKEGVVRWKVVNNIPDARDQAEYLKALAIL

SEQ ID NO: 6656 - protein, 366 aa, Kineococcus radiotolerans SRS30216
MPRVAVLRHRFGLPSEPFVLEQARAFTRWEPVLLARDPFPPGLEGASLAAAGPLAVAAHTAGLGSGPMTALLRDLRVDAVLAHFGVEAACALPATRRAGVPLATVFHGFDATTTTAALLRARTVSWATYARRRARLARQGELFLPVSEHLRTRLLERGFPPGRTRTHHLGLDLAKVPAAGDPEPRTIVHVGRLVPKKGHAHLLRALADLPGVRLTCVGDGPLRAELSALAAALGVGDRVEFAGRLDNASTLERIARAAVLCLPSTTAPSGDQEGLGQVLLEAGAMGRPVVASRHGGIPSAVVDGVTGLLVPEGDAPALAAALRRVLDDPAFAARLGSAAAGHVAEEFDVVRRTARLEELLDGLVHR

SEQ ID NO: 6657 - protein, 325 aa, Opitutaceae bacterium TAV2
MARIYNDITETIGNTPLVRLNRTAAAHGAQAEILLKLEFFNPLSSVKDRIGFAMIDEALKSGRINKDTILIEPTSGNTGIALAFVAAAKGLKLILTMPETMSLERRKLLKVLGAKLVLTEGSKGMKGAIAKAEELNKQIANSVVLQQFANPDNPEIHRKTTAEEIWRDTDGAVDFVVSGVGTGGTITGVGEVLKSRKPGVKLVAVEPAGSPVLSGGNPGPHKLQGIGAGFIPSVLNTKIIDEIIQVKEDDSGPISKQVNTLDGIPIGISSGAAVWAAIQLAKRPENKGKKIVAIIPSAAERYLSSWLFADVNVESDNIDALLAAK

SEQ ID NO: 6658 - protein, 219 aa, Elaeis guineensis
MPGLTIGDTIPDLLVDSTHGPIQIHDFIGDGWAVIFSHPADFTPVCTTELGKIALYAEEFDKRGVKLLGVSCDDVVSHVEWIKDIEAYTPGCNVRYPIVADPDREVIRQLNMVDPDQKDSSGLELPSRALHVIGPDKRIKLSILYPATTGRNMDEVVRVVESLQKTSKLKIATPVNWKPGEKVVISPSVSNEEAKEMFPQGYDTVDLPSKKEYLRFTNI

SEQ ID NO: 6659 - protein, 1057 aa, Ostreococcus tauri
MGVPSFYRWLSQKYPKIVEDVVEDEPMDELGRAVALDASRANPNGIEFDNLYLDMNGIIHPCFHPEDRPAPTTEGEVFENIFDYIDRLFLMIRPRKVLYMAIDGVAPRAKMNQQRSRRFRAAQEAKEKAMEEEKLREKLTREGVKVQPKVESGVFDSNVITPGTPFMGRLSEALKYYVHDRLNNDPGWRGIEVIFSDASVPGEGEHKAMHYIRQQRGLPGANPNTRHVVYGLDADLIMLGLATHEPHFWILRELVFQKKDTNAPQTLGMGTEETKKKVAIARKPYQLLSVSVLREYLALELRPVAPTPFKLDPERLFDDFIFMCFFVGNDFLPHSPTLEIREGAIDLLMTLYRNLLPTLGGYLCADGRPNLPVVENFVQVVAQHEDAIFQKRAKKEAQMRSRRHREKQKAKDYYDRQRQASGTVGPSNSYALGGSKLASDRAPAAPDQLVALGRGRAPPPPPAKNKTAEENKSAADALRERLKARGKRAAEATADVTTEDADAKKAKTAEGEDKEDAKAKAKEFWSELEQATTEAEKEDSESTLTTVDSDEVVEHPFVQATGPDAQPGDWMCPTGCGAMYGNKGSCFRCGCPKPSEVRKFKAGEEMDSKSFLKQLEGIVKNLGDREGESPDTIRLGESGWKDRYYEAKMKATPQTREQIARGMVVEYVRGLIWVCRYYFEGCCSWGWFYPYHYAPFASDLTNLAGISTDFELGKPFKPFSQLMGVLPAASSHALPAAYAPLMSDKDSPIIDFYPEDFDLDMNGKRFTWQAVALLPWIDSRRLLEQTDMLEYTLTAEEKRRNSINEEEIYVNTAHPLAKQFVKLDEREDEDAEKTLPMDPKLSDGMNATLVSVKREAKPSTIPSPISCRPDIQNNQVIVASLRLPTDRFVPPVLMPGTVLPTPSVTEQDLPPPPMTILGENFDRRPRGGGQPTIDYGRGMAGHPMAGPIGGPRMDSRALLDASMGRGAPLGGGANFQQRAPPPPPTYPQGYPQQYTPGGGGRGVPLGGFPSGNPTPGRGGPSPAGYAPGGNRFAALNNLPRRGPPSTRPPSSDPRARK

SEQ ID NO: 6660 - protein, 130 aa, Zea mays
SFVHSQLFHPAKRDNALRESWALNSDQIAVLHVGRLAQEKNLGLLKRCFETLQDTYPLRQMKLIIVGDGPQRAMLEKELPEAIFCGTLRGEELARHYASGDLFLFPSLTETFGNVVLEAMASGLGVVAYD

SEQ ID NO: 6661 - protein, 879 aa, Glycine max; identical to SEQ ID NO: 2830
  misc_feature (63)..(63): Xaa can be any naturally occurring amino acid

SEQ ID NO: 6662 - protein, 150 aa, Hordeum vulgare subsp. vulgare
MSIVRRSNAFDPFADLWADPFDTFRSIVPAFSGNSETAAFANARVDWKETPEAHVFKADLPGVKKEEVKVEVEDGNVLVVSGERTKEKEDKNDKWHRVERSSGKFVRRFRLPEDAKVEEVKAGLENGVLTVTVPKTEVKKPEVKAIEISG

SEQ ID NO: 6663 - protein, 445 aa, Physcomitrella patens subsp. patens
MKWKVEQEADRVWLPEQPAVNFSQYAGMVTVNATAGRAYFYFFVESSEDAPTKPLTLWLNGGPGCSSLAYGFAEEFGPYRILPDASGVYLHEYAWNRASNMLFLESPSGVGFSYSNVSSENRIGGDKRTADDNYHFLLNWFERFPQYKHRDFYIAGESYAGHYVPQLAKLILDRNVGADLKINLKGCLTGNPVTDGYWDNVGNIDYWHSHAIISDQTWEKMKKECNFSDPHCCTKACDRLYTYAETHEFGQIDPYSIYTANCLETISYSSAHRKSYLTVRPNNPFMQGRRGYDPCTGNYAEIYFNRPEVQKALHANISGIIPYNWTGCSSELRNWTDSAFSVIPVYKVLIKAGLKIWVFSGDADAVVPVTSTRYALAAMKLPIVKPWYAWYHHRQVGGRVLEYEGLTYVTIRGAGHEVPLLQPGRAFHMFKSFLDAKRLPNSPYK

SEQ ID NO: 6664 - protein, 215 aa, Bradyrhizobium sp. ORS278
MENPPFRFNRRDLMVGGAASVAGMALLRAGVPGALAAEPLASVPPATAKVSFTVNGRPQELVLDTRTTLLDALREHLQLTGTKKGCDHGQCGACTVHVDGRRVNSCLSLAVMHEGDPVTTIEGIGTPDHLAPMQAAFIKHDGFQCGYCTPGQICSAVAVLDEIKAGIPSHVTGSLTETPQLTRDELRERMSGNICRCGAYSNIAEAILEVAENKA

SEQ ID NO: 6665 - protein, 154 aa, Geobacter metallireducens GS-15
MIALTVNGTRHQVDVPPDTPLLWVIREVIGLTGTKFGCGMSLCGACTVHVEGRAIRSCVTPVSAVAGKEVTTIEGIPESHPVKQAWIADDVPQCGWCQPGQIMAATALLATNPKPDDAAIDEAMEGILCRCGTYQRIRRAIHRAAGTPAKGGAS

SEQ ID NO: 6666 - protein, 739 aa, Bradyrhizobium sp. ORS278
MKFETPATTNPIDQQKVVGKPTDRIDGRFKVTGTAPYAYERHDVAPNQAYGYVLGAGIAKGRIRSMDLSRAKAAPGVIAIVSTLDMDRLDLGRMNTASLFGGPDIQHYHQAIALVVAETFEQARAAASLIDVDYQRQEGRFDLGAAAGSAPPVGGDSGEGSGAKPVNGIGDFNGAFAAAPVKLDAIYTTPDESHAMMEPHASIAAWNGDRLTLWTSNQMINWGKGSIAKILGIRPENVRLDSPYIGGGFGGKLFIRADAVLAALGARAAQRPVKVTLPRPLVINNTTHRPATIQRVRIGATPDGKITAIAHESTSGNLPGGRPETAVDQTKLLYAGANRLTAMKLAELDLPEGNAMRAPGEAPGMMALEIAMDEMAEKLGLDPVEFRVRNDTQVDPQNPERPFSHRNLIGCLKLGAERFGWDQRMARPAQSRDGRWLVGLGMAAGFRNNLLQTSAARVRLGGDGIVTVETDMTDIGTGSYTIIAQTAAEMMGVPIERVVVKLGDSDFPASAGSGGQWGGNNSTAGVYAACIKLRDAVAARLGFNSSELVFADGEVRAGNRSAPLARAAADGELVAEDAIEYGDLAKTHQQSTFAAHFVEVAVDAATAEIRVRRMLAVCAAGRILNPKSARSQVIGAMTMGVGAALMEELAVDKRYGLFVNHDLASYEVPVHADIPHQEVIFLDESDPMSSPMKAKGVAELGICGVGAAVANAVYNATGVRVRNYPITLDKLIGSLPETA

SEQ ID NO: 6667 - protein, 158 aa, Mesorhizobium sp. BNC1
MAIVEKGDIAPDFELPQDGGRTFRLSSLRGKPVVLYFYPKDDTSGCTAQAIEFSARKDEFEALGISIVGLSPDTVKSHDKFKAKHDISISLVADPEKKVVQDYGVWVEKSMYGRKYMGVERSTFLLDAEGRIAELWRKVQLKGHVDAVLKAAKALRDS

SEQ ID NO: 6668 - protein, 792 aa, Rhizobium leguminosarum bv. viciae 3841
MNNPDQEFNVIGKNVIREEGPGKVTGLGKYAIDLEFPRMLWAKIKRSTRPHAKIINIDISRAQALPGVHAVIVDKDCPQTLFGFGCYDEPLLARGKVRYIGEPVAAVAAESEAIAEQACDLIEIDYEDLPAIFDPWEAFEADPKVIIHEDQANYRRVPIGPAQYDPKHPNAFGYYRIRTGEVSQGFAEADVVLEKTYSNAMMAHATMERHNSISLWDADGKVTAWSSAQAAYPLLNQISEALDIPHSRVRVIIPKYVGGGFGGKIEMKAEGLCAVLSRAAGHRHIKIIYTREESLCWAGVQHPFEMRIKSGVRKDGVITACEMFVLVNGGAYAQHGFLVTRQASYGPLGSYRFPHFKLDNYVVYTNNPPGVAYRGFGNTQIHFGLESHIDELAHAIGMDPYEIRRKNVLKENEINAAGEIQHSVAGAELLDEIKAGLERHGPLQREDGPWRRGRGIAFANKDSVAPSASSAIVKIHNDETVEIRHSAGNIGQGSSTTLIQITAEFFKVGPERVRTAEVDTWVTPYDQLTGSSRLTFAAGNAVLMACEDVKNQILTMAAQMMQATPEELDLADMVVFVKENPGRSMRVKDLFRTVFFTGSFLPTGGELLGKATFTVPSSKIDPETGHAANDGMRKIFSFCTRAAQAVEVAVNIETGQVKLEKIAIANDLGKAINPMSCEGQMHAAISMGLGQAISEELQISEGSVANGDFSSYRFLTAKDAPSNDHVSTHIVEIPQFDGPYKAKGFSEATTSPTAPAIANAIFDAVGLRLRHMPMTPERVLEGLDRLTSADRD

SEQ ID NO: 6669 - protein, 326 aa, Trichodesmium erythraeum IMS101
MDIKPGFIGTVGNTPLIRLNSFSEETGCEILGKAEFLNPGGSVKDRAALYIIKDAEEKGLLKPGGTVVEGTAGNTGIGLAHICNAKGYKCLIVIPETQSVEKMDALRTLGAEVKPVPAVPYKNPNNYVKMSGKLASTIENAIWANQFDNLANRIAHYETTGPEIWEQTDGKVDAWVAATGTGGTFAGVSLFLKEKNPQIKTVLADPMGSGLYSYVKTGEISSEGNSITEGIGNSRITKNMENVMIDDAIRVDDKEAVRVVYQLLRKDGLFMGGSVGINVGAAVALAKQMGPGHTIVTVLCDSGTRYQSKLFNREWLATKNLLPDER

SEQ ID NO: 6670 - protein, 462 aa, Nocardia farcinica IFM 10152
MRIADHVVDLIGNTPLVRLNNVVGPNAGLVAAKIEYLNPGGSSKDRIAVKMIDAAEKSGQLKPGGTIVEPTSGNTGVGLALVAQQRGYKCVFVCPDKVSEDKRNVLRAYGAEVVVCPTAVPPDHPDSYYSVSDRLVREIDGAWKPDQYSNPGGPESHYETTGPEIWRDTDGRVTHFVAGVGTGGTITGAGRYLKEVSGGKVRVIGADPEGSVYSGGSGRPYLVEGVGEDFWPSAYDPAVPDEIIAVSDADSFEMTRRLAREEGLLVGGSCGMAVVAAIEVARRDPDAVVVVLLPDGGRGYLSKIFNDQWMSSYGFLRTRLDGSPEPLVGDVLRGKSGELPDLVHTHPSETLRDAIEILREYGVSQMPVVGAEPPVMAGEVQGSVTERDLLSAVFEGRAHLTDSVAQHMSPSFPLIGSGEPISAATKALSDTDALMVVEDGKPVGVITRHDLLGFLSTGSVGH

SEQ ID NO: 6671 - protein, 198 aa, Chlamydomonas reinhardtii
MVAKIGAPAPKFKAQAVVNGEIKEISLDDYKGKYVVLFFYPLDFTFVCPTEIVAFSDRVEEFRAINTEVIGASIDSQFTHLAFSNTPRTKGGLGGCKYPLVADLTKQIAKDYGVLIEDGPDAGVTLRGLFIISPTGVLRQITINDLPVGRSVDETLRLVKAFQFTDEHGEVCPANWNPGAKTMKADPTKSLEYFSTLS

SEQ ID NO: 6672 - protein, 398 aa, Shigella boydii
MKVLYIVNQFPCLSETFVYNQIKGLSNLGHDVKVLAVYKGAKGEEVGVNYRCCATEKLSRLEQLCLLLKSFSIAILKFDPIIIEFIRLLLSFNLSGLVSLSLLRKQIYNYYDTECIIAHFGDCGYYAAMLKKFNIKSVKTIAIYHGYDVSVKKILEKWLPSYKRSFEILDFLLPISELWKNKLLSLGALPEKIIVQHMGININDFNFTSRSLHNLEIKYKTTRILSTGRFVEKKGFKYIVSAMQYLPECSLEIIGDGPLFTDIMRFIDDNNIKNVKCVGALKHNDVKNKLQECDIFCLPSVTGGNGDMEGIPVVLMEAMACGKIVVSTRHSGIPELIEDGVTGFLCEEKNVEELVEKIKFINSLGTRKKNIAVEARKKVVNDFNNEIIYADLDKIIKC

SEQ ID NO: 6673 - protein, 1201 aa, Coprinopsis cinerea okayama7#130
MEGFLRLNAVAAGLAPTVNTRLTTWSGVPALFRWLSKKYPKIILPVEEEDDIKVPDENDQEVTIPVNMAQPNPNGVEFDNLYLDMNGIVHPCTHPEGKPAPETEEDMMVEVFKYTERVVNMVRPRKLLFMAIDGVAPRAKMNQQRSRRFRSAQEAKEKEEARKEALALWEAMGKKVSDEEKTKQAWDSNAITPGTPFMDLLAASLRYWVVQKMNTDPGWKNIQVIISDASVAGEGEHKIMDYIRRQRSNPGYDPNTKHVIYGLDADLIMLALATHEPHFRVLREDVFAQDKSTACRICGQEGHYAAQCTGTKAEIEKKPPPPEKKPFIFLDVAVLREYLEVELDVPSSPFRFDLEKAIDDWVLLIFFVGNDFLPHLPSLEIREGAIDTLLKIWKQELPRMGGYLSDNGTLNLARAQIILEGLAKREDEIFRRRREAEERQAQNAKRRKLEQAHRQGGTGPAASLKLTEAPAPPASNDFAAQANALGLGGPAPAPAPAPDSSAAIQALGGSNRDVVANRAAIRMAQMNAAQVLKAEMAALSPVRPSKNKLSKPTPAPQAEPPPPATPTPPATATAVPVDETPVVDPEGSTEVKPPEDLAKDITADIPPEADEHVTPQKRKYEEGPGSNTPDEDVVTVEESEEEEGPKPLKVNPDGTVEQEDTVKLWEPGYKERYYKQKFGVEPHDIEFRHKVAEAYVQGLAWVLQYYYQGTPSWQWYYPYHFAPFAADFVDVEKMDIKFNLGQPFKPYEQLMGVFPAASRKHIPAVFQKFMVDEDSPIIDFYPPTFEIDMNGKKMAWQGVALLPFIDETRLLDAMALEYPNLTEDEVKRNQPGHNVLFAADEHPVYPFYEALYGKKMKKNADPVAIDTALSKGISGQVLPNPDCLPGSTYYCPLTTVGLPDIRNDRSLSVLYFFPPQRTPHKSAMLPGARKPPRVLSAQDLERTRGGGRGRGGWHSHNESGRGGGRGGGGGYERRNDPFHSRGNSYNTYGGGGGGDQYGGGRNGNYGGYGGYGRGGAGGGGYANGNQQYQQGGSYNRPPPQSNYGGGGYGGGGGYGNHGPPPSRGGYGGHGQGYGGYQGGGGRGGGGGGGRGGYQGPPGRGGYSGYNQPPPQSYGGYGGGGGGYGGYGGPPQNAPPPPQNYGGYGGYGAPPPPQQYSGYHSKRYKKDGYMQGSTNTRMDEWYRCLWKVASVIKYEQVVTGSG

SEQ ID NO: 6674 - protein, 160 aa, Synechococcus sp. RS9916
MGGPAPALNEPAPSFNLEGTRRTEDEIKGWSLEDFAGRWLVLYFYPRDFTSGCTIEAHGFQSLNQDFEQNNASIVGVSADGVEDHASFCSSEALDYLLLSDPDGTVSKAYGSWMAPYSMRHTFLIDPSGVIREQWTGVRPTGHAQEVMNRLKQLQSEASI

SEQ ID NO: 6675 - protein, 375 aa, Mycobacterium sp. JLS
MRVAIVTESFLPNVNGVTNSVLRVLEHLRRTGHEVIVIAPDTPRGEPPAERVHDGVRVHRVPSRMFPKVTSLPLGVPRPRMVGVLRGFDPDVVHLASPALLGYGGLHAARHLGIPTVAVFQTDVAGFAQSYGVGAMSRAAWAWTRHLHSRADRTLAPSTSAMENLASHGVPRVHRWARGVDITGFAPSARDHELRRRWSPHGEPIVGFVGRLAPEKHVERLAALSARTDLQVVVVGDGVDRMKLESLMPTAVFTGALYGDALAAAYASMDVFVHPGEHETFCQAVQEAMASGLPVIAPNAGGPRDLVAPYRTGLLLDVTEFEDRLSESVDHLIAERPRYSPAARRSVLDRTWPAICDELIGHYEAVAGLRRLRAA

SEQ ID NO: 6676 - protein, 371 aa, Pseudomonas aeruginosa PAO1
MHIADMTMFYAPASGGVRTYLEAKHRHLWHYPGIRHSVLVPGASYRQANGIHEVPAPPLPFGNGYRFPLRRGPWRKVLRNLQPDLIEVGDPYLTAWAALDARRRLDVPVIGFYHSDLPLLVSNRMGAWLGTNADNYVSKLYGHFDRVLAPSRVMAEKLMRLGVADVHVQPLGVDLVTFHPSNRDPGLRQELGLDEETRLLVFAGRGSREKNLPVLLDAIQRLGDGYHLLLVGSNMPTRVPRNTSVVDHFCDSREVARLLASSDALLHAGDQETFGLVALEAMASGIPVVAVRAGALAEIVPERCGVLCAPNNGDAMACAVRELFSHDVELRGQRARRHVERQHAWDAVVAGLLLHYHAVLGDSEARFPRYG

SEQ ID NO: 6677 - protein, 324 aa, Pseudomonas aeruginosa PAO1
MSRIFADNAQSIGNTPLVQINRIAPRGVTILAKIEGRNPGYSVKCRIGANMIWDAEASGRLKSGMTLVEPTSGNTGIGLAFVAAARGYKLILTMPASMSLERRKVLKALGAELVLTEPAKGMKGAIQKAEELVAGDPGKYFMPQQFDNPANPAIHEKTTGPEIWNDTEGAVDVLVSGVGTGGTLTGVSRYIKNTRGKPILAVAVEPVTSPVISQTLAGEEVKPAPHKIQGIGAGFVPKNLDLSLVDRVEKIGDDEAKNMALRLMQEEGILCGISSGAAMAAAVRLAEEPNMQGKTIVVILPDSGERYLSSMLFDGLFSEQELTQ

SEQ ID NO: 6678 - protein, 376 aa, Corynebacterium efficiens YS-314
MAPTVPERGSSPVRIGIVCPYSFDEPGGVQAHILDLAREFIAQGHEVRVLGPCSADTDIPGFVVRGGRSVPVPYNGSVARLSFGPRMMRMTRRFIREGDFDILHIHEPNSPSYSMAALFMAEGPIVATYHASSSSSRLLHLVLPVLRPQLEKIRAGIAVSEMARRWQVEQMGGDPVLIPNGVDTSLFARARRAGSRADEPPEIVFLGRIDESRKGLDILLRALARLDREVRCTVIGGGSPREVDGVDFVGRVSDAEKAEILGRADIYVAPNTGGESFGIVLVEAMAAGCAVVASDLEAFSLVVDSESDTPAGLLFTTGSDADLAEKLRVLIDAPPTRAALVAAGQRRAVHYDWSTVAERIMTVYETVSTGEKVRLR

SEQ ID NO: 6679 - protein, 149 aa, Sulfolobus solfataricus P2
MNVGEEAPDFEAESTLGKIKLSDFRGKKVILYFYPKSFTSGCTRELQRFTELYDEFKKLNAEVIGVSVDKIDTQKKFAEKYGAKFPIVADDQKTISKLYSVLNERGTSAQRVTFIIDENGKIVNILKNLKKAEEHADKSLEIIKRQNST

SEQ ID NO: 6680 - protein, 312 aa, Pseudomonas putida GB-1
MIGAPAVRIVKYAMTLQYPTIADCVGNTPLVRLQRIAGETSNTLLLKLEGNNPAGSVKDRPALSMITRAELRGQIKPGDTLIEATSGNTGIALAMAAAIKGYKMILIMPDNSTAERKAAMTAYGAELILVTKEEGMEGARDLAEKLQAEGRGLVLDQFANGDNPIAHYNSTGPEIWQQTQGSITHFVSSMGTTGTIMGCSQYLKEQNPAVQIIGLQPMEGSAIPGIRRWPEEYLPKIFDATRVDRVVDMSQQEAEDTTRRLAREEGIFCGVSSGGAVAAMLRLSREVENAVMVAIICDRGDRYLSTGLFDPS

SEQ ID NO: 6681 - protein, 455 aa, Photorhabdus luminescens subsp. laumondii TTO1
MTTSRSVLDMIGNTPLLELTHLNTGPCQLFIKLENQNPGGSIKDRVALSMIEQAEEQGLLQSGGTIIEATAGNTGIGLALVAALKGYKLILVVPDKMSREKVFHLRALGTDVRLTRSDVSKGHPEYYQDYALRLAQEIPGAYYIDQFNNPANSAAHTTTTGPEIWQQMDHNVDAVVIGVGSGGTLGGLSHYFAQVSPETEFVLADPTGSILVDYIEHGKYGEAGSWQVEGIGEDFVPPLGNFSRVHHAYRVSDAEAFSSARDLLLKEGVLAGSSSGTLLAAALRYCRAQTTPKRVVTLACDSGNKYLSKMFNDYWMLEQGFQSRVQQHDLSDYITYRYQDGATVFISPEDTLKTAHTRMRLYEISQLPVLKEEQVVGIIDEWDLMHTVQADPRNFSLPVSHAMTHQVRTLDKNDSLQQLMATFDAGHVALIVDNGRFLGLVTRTDVLNAWRQQLN

SEQ ID NO: 6682 - protein, 434 aa, Frankia sp. EAN1pec
MHLVGGAPPEHPEPARPKPASRVAMLSMHTSPLEQPGTGDAGGMNVYVIELARQLAALGTEVEVFTRAVSSRLPPALEIAPGVIVRHVPAGPFEDIGREELPAWLCAFTADVLRTEAGHAAGWFDVVHSHYWLSGQVGLSAARRWGVPLVHTAHTLARVKNASLADGDRPEPEPRVQGEQEIIKAATRLIASTDTERRHLTQLYGAAPGKVDVVAPGVDLDVFRPGDPRAARKRVGLDPDTQLLLFVGRIQPLKAPDVLLAAAAELIHRDPDRRGQLAVVVVGGPSGSGLERPDSLVKLAAELGITDIVRFQPPVPQEQLAHWYRAATAVVVPSHSESFGLVAVEAQACGTPVVAASVGGLRTAVAHGTSGVLVHGWEPADYADALERILTEERWRRHLSTGARLRAASFGWTATAKGVLASYQAAISPAAVAV

SEQ ID NO: 6683 - protein, 653 aa, Vitis vinifera
MMVGFGGEGDDLYAELWKACAGPLVDVPRRGERVFYFPQGHVEQLEASTNQELSQRIPLFNLPSKILCRVIHIQLRAEQETDEVYAQITLLPEPDQAEPRSPDPCTPEPPRPTVHSFCKVLTASDTSTHGGFSVLRKHANECLPQLDMNQATPTQELVAKDLHGYEWRFKHIFRGQPRRHLLTTGWSTFVTSKRLVAGDSFVFLRGDNGELRVGVRRLARQQSTMPTSVISSQSMHLGVLATASHAVATQTLFIVYYKPRTSQFIIGLNKYLEAVSNGFAVGMRFKMRFEGEDSPERRFSGTIVGGEDFSPEWKDSEWRSLKVQWDEPASIPRPEKVSPWEIEHYVSSVPQGLAPPGVLKNKRPRSNESPVPGSAAASAVWHLGLTQSHDLTQMSSTAEGKRSENHQADIGAIPPTEGSWLSSSHVSASQHQFQDATEDSKSVSAWPALSGYSTLHSSKLTSDTIIDPNGNGKKAVAEMATSCRLFGFELMNHSSSPPVGKAHGHSISSDLSKASKEQKQGQSHVSPKEIQSKQNCYSNTRSRTKVQMQGIAVGRAVDLTALEGYDELIDELEEMFEIKGELRPRYKWEIVFTDDEGDMMLVGDDPWPEFCNMVRRIFICSSQDVKKMSPGSKLPISSMEGEGTTISLDSTEN

SEQ ID NO: 6684 - protein, 464 aa, Streptomyces avermitilis MA-4680
MQFHDSMISLVGNTPLVRLNSVTAGIQATVLAKVEYFNPGGSVKDRIALRMIEAAEESGALQPGGTIVEPTSGNTGVGLAIVAQQKGYKCIFVCPDKVSTDKINVLRAYGAEVVVCPTAVDPEHPDSYYNVSDRLVRETPGAWKPDQYSNPNNPLSHYHSTGPELWEQTEGKITHFVAGVGTGGTISGTGRYLKDASEGRVQVVGADPEGSVYSGGSGRPYLVEGVGEDFWPTAYDRTVADEIVAVSDKDSFQMTRRLAKEEGLLVGGSCGMAVVAALRVAERLGPDDVVVVLLPDSGRGYLSKIFNDEWMADYGFLEDSGPSARVADVLSDKAGGSIPSLVHMHPDETVGEAIEVLREYGVSQMPIVKPGAGHPDVMAAEVVGSVVERELLDALFTQRASLQDPLEKHMSAPLPQVGSGEPVGDLMSVLGTADAAIVLVEGKPTGVVSRQDLLSFLAKGGGKQ

SEQ ID NO: 6685 - protein, 784 aa, Oryza sativa Japonica Group
MDQKAKEAAPAARGHPALRGPARRERYTHGLGAAQMGALRAMCGALIPALPAEEEDGARGGGDMDVERFYLATAAESTVPDEVAELTMTRCIWEAGVLVRIILWILATRVGTLALCGRRCVSGEFPYVRRFADMPVERREAALKRSRSSLPSSRSSATSSSTPRFQVLIYHIVDENLENPSWKAIGYSVPAAEEEPQKEEPTEATPTPAPATAPPCRPLDNGVVETKQLDDNALLMSLAEKGLALKTGASSPSAHHHTVLCDAVVVGSGCGGGVAAAVLASAGYKVVVVEKGDYFAARDYSSLEGPTMERLYENGGVFSTANVTTTMFAGATVGGGSAVNWSACIRTPANVLQEWSNDHGLPLFGGQGYVQAMDAVCARLGVTGRCREEGFQNKAVRRGCEALGLRVEAVSRNSSEGHFCGSCNLGCPTGEKRGTDTTWLVDAVGRGAVILTGCKAERFILETNTGGGGGRRKKCVGVVAKCLGKGITKKLRIEAKVSVSACGALMTPPLLRNSGLKNRHIGRNLHLHPVSMAWGYFPDSTAELPGKSYEGGIITSMHRVTDRTIIETPALGPGAFAAVVPWESGRDMKERMRRYARTAHAVVLVRDRAAGTVGGEGRVRFTPSRGDAGELRAGLRRALRILVAAGAAEVGTNRSDGLRLRCKGARDEDVEAFLDEVSVEKGPMHPGSDKWALLASAHQMGSCRMGRSAKHGGVDGGGESWEAEGLYVCDGSLLPTAVGVNPMITIESVAYCVAKGIAESLASRAARSVENRDVSTNPPLACES

SEQ ID NO: 6686 - protein, 157 aa, Pseudomonas fluorescens PfO-1
MTQITLNVNGSTQALELEPDMPLLYALRNHLGLNGAKYGCGLGQCGACTVIVDDQPVFSCLTPCAGLEGKKVRTVESLGTAEHPGSLQQAFIDKQAAQCGYCIAGMLMRAQSLLERNPHPDEQTIREHMSVNLCRCGTHLRIIEAINLVARQNGSAL

SEQ ID NO: 6687 - protein, 126 aa, Zea mays
  misc_feature (36)..(36): Xaa can be any naturally occurring amino acid
  misc_feature (76)..(76): Xaa can be any naturally occurring amino acid
  misc_feature (79)..(79): Xaa can be any naturally occurring amino acid
  misc_feature (108)..(109): Xaa can be any naturally occurring amino acid
MVNHKATGIPCGTLGSCHTSWDFIKTVRDRLTGARXIAFIVHGPFRAELLQTISGIPMVKTDTCQGEELSQAYARXDVXVRPLETKQHVFEGLKAMSSGITVLPPHAXXIPDIIPDYYVGRTSLLY

SEQ ID NO: 6688 - protein, 308 aa, Bacillus subtilis subsp. subtilis str. 168
MVRVANSITELIGNTPIVKLNRLADENSADVYLKLEYMNPGSSVKDRIGLAMIEAAEKEGKLKAGNTIIEPTSGNTGIGLAMVAAAKGLKAILVMPDTMSMERRNLLRAYGAELVLTPGAEGMKGAIKKAEELAEKHGYFVPQQFNNPSNPEIHRQTTGKEIVEQFGDDQLDAFVAGIGTGGTITGAGEVLKEAYPSIKIYAVEPSDSPVLSGGKPGPHKIQGIGAGFVPDILNTEVYDEIFPVKNEEAFEYARRAAREEGILGGISSGAAIYAALQVAKKLGKGKKVLAIIPSNGERYLSTPLYQFD

SEQ ID NO: 6689 - protein, 155 aa, Saccharophagus degradans 2-40
MLELTINQKKHSLDADPNMPLLYALRDIAQLTGTKFGCGLGQCGACTVHVDGTPVRSCLTPLAAVTGKAITTIEGLASGEGLHPLQQAWVDNNVPQCGYCQAGQLMSAAALLKQKPSPTDKDIDTYMQGNICRCGTYPRIKKAIKQAAVQMQEVK

SEQ ID NO: 6690 - protein, 322 aa, Shewanella sp. MR-4
MSKIFEDNSYTIGNTPLVRLNRVSQGKVLAKVEARNPSFSVKCRIGANMIWDAEKKGLLTKDHELIEPTSGNTGIALAYVAAARGYKLTLTMPNTMSLERRKLLKALGANLVLTEGAKGMKGAIDKAEEIRQSAPEKYIMLQQFNNPANPEIHEKTTGPEIWNDTDGAVDVFVAGVGTGGTITGVSRYLKKVAGKAITSVAVEPADSPVITQTLAGLPVQPGPHKIQGIGAGFIPGNLDLELIDRVETVTNDEAIDMARRLMQEEGILVGISSGAAVVAANRIAALPEFADKNIVVILPSAAERYLSSVLFQGQFGDEENIQ

SEQ ID NO: 6691 - protein, 322 aa, Agrobacterium tumefaciens str. C58
MPEARKPGRGRVYSSITETIGDTPIVRLDKLAKEKGVKANLLAKLEFFNPIGSVKDRIGVAMIEALEAQGKITPGKTTLVEPTSGNTGIALAFAAAAKGYKLILTMPETMSVERRKMLALLGAELVLTEGPKGMKGAIAKAQELAETLPDAVIPQQFENPANPDIHRRTTAEEIWNDTDGTVDILVSGIGTGGTITGTGQVLKSRKPEVKVIAVEPADSPVLSGGNPGPHKIQGIGAGFAPAILDTGVYDEIVTVTNDEAFEIARLAARLEGVPVGISSGAALAAAIKVGAREENAGKNIVVIIPSFAERYLSTALFEGLGL

SEQ ID NO: 6692 - protein, 183 aa, Cyanothece sp. PCC 7424
MFGRRVLSLFLAFGLTVLTWFNTTYTAAALGGAQPPLNQPAPQFTLPTNTGDGEISLSDYHGKWVVLYFYPQDFTPGCTLEARRFQEDLAKFEAKNAQIIGVSADDINSHAEFCDSEGLKFPLLADTTGKVSKAYGSWLGSMSLRHTYLIDPDGNLRDIFLGVRPAIHSAEVLARLDELQQNS

SEQ ID NO: 6693 - protein, 386 aa, Nostoc sp. PCC 7120
MRVAYICADAGIPVFGQKGCSIHVQEVIRALKGQGGQVTLFATRIGGELPADLADVVVHQLPPVPKLERSQREQVALGMNPDLRLSLEKFGSFDLIYERYSLWSYGAMEYAQDRGIPGLLEVNSPLIIEQAQHRGLIDREGAEAVARRVFSAATGLIAVSDAVKSYLLDYVDGSKVHVIPNGVNPHRFSHRRSASQSDSFTVGFVGTLKPWHGLPILTEAFSLLHQRVPHAKLLIVGDGPERENLEAELAARGLDAHTQFTGAVNPDEIPQLLAAMDVAVAPYAAQSDFYFSPLKVYEYMAAGLPVVVSQIGQLADLIDPGVNGMLCPPGDAIALADTLEQLWRSPNLRHSLGQAARETVIAHHTWDAIAGQILHLASPLPVEVKL

SEQ ID NO: 6694 - protein, 339 aa, Arabidopsis thaliana
MTTKAVLISSGVATVALLLKLSVPVAVDFSVSRAPILWSSLLSWLKPPYLYVVTNGIIITIVASSKYYRSHHDRDEEDEIVVYGGGGYKIQTEEPIVNQHQASPRILEVKDLDTGAHFGFVVANLEAEELESEAVTAVVFDDEEEEKKIIDSAATAEDEIEEELKSVIMVENSDLVESDVIPPPMMIESENLPPIEKPLVTSRFGHRKLMKASQEGGRALRVTKPKKNETLENTWKMITEGKSTPLTRQLYRRSDTFGRGDSGGVDGEVKPVYKKSDTFRDRTNYYQLAETAKVRKEPSLSQEELNRRVEAFIKKFNEEMKLQRMESLRQYKEITSRGV

SEQ ID NO: 6695 - protein, 433 aa, Verrucomicrobium spinosum DSM 4136
MNNSTSIIHVPRRFVAHEWGGTETVVAEVARQQQKAGYAPKIVTSMALADCRRETIQNIPVERYPHHYPFFGLSKDEIQLLDKKGGNLLSLGLFAGLLREPGVRLYHAHCLKRLGGEVATAARWRRIPFVVTLHGGVFDVPQAEREDLVRPIRGKMEWGRLFGAIFGSRQVLERADMVICVGRSEAEAAAQALPHGRVAHLPNGVDVERFSQGEGGRFRKRFGIPQDAFLFANISRIDAQKNQAELVAAFSRVAARRPEARLLLMGPETQPEYAEKIRREVAQAGLADRVILLPGLRNDDRALPDAYAACDAFVLPSRHEPFGIVVLEAWSASRPVIASRVGGLVGLVKDECNGLCFDPGTQGSVEQLAAQMERLITDQALREKIASAGRREAQERYDWSAVHSQLEQIYQQAEHHHQARLGSPASQVQSFPC

SEQ ID NO: 6696 - protein, 144 aa, Zea mays
  misc_feature (26)..(26): Xaa can be any naturally occurring amino acid
  misc_feature (46)..(46): Xaa can be any naturally occurring amino acid
MKNLSHFRIKELKDVLHQLGLSKQGXRKQDLVDRVMAVLLSQQDQXKMQDPTNTVAVSRSHELGDSVTCKKKPDDSAQAVKVRCPCGDSKPNDSMIKCIDPQCNIWQHVGCVVIPDTEKSADNISPELPSCFYCEVCRLSRADP

SEQ ID NO: 6697 - protein, 239 aa, Picea sitchensis
MACTLSNLYIPATASTCSIPISVRNGAFVPTGQRLKSKVGLSSPFNQRRAKAVVVRAESSKEGAIDVHNTNTKKVAEQKPRAVEMAKEISPFGLVDPFSPVRTMRQMLNTMDRLFDDAFMLPTSSRGVSRDDALSVRTPWDIIENENELKMRFDMPGLSKEDVKVSVEDGVLVIKGSHKKEESENDSWSERSYSSYNTRLALPENCEMEKIKAELKNGVLNITIPKGKVESKVVDVNVE

SEQ ID NO: 6698 - protein, 153 aa, Methanococcoides burtonii DSM 6242
MKFGLVRRGSSDVSRWDPFDEIRQTQEHLNQLLREVSPFGGLFEGKSRAPLMDIKEEDNNVIVTTDLPGIDKEDVEISVNNNILEIHAEFKKESESEKEGYVQKERTYSSFSRSAVLPSVVSDEGVKAKLEAGVLTITLPKTKAEEKTKIKIE

SEQ ID NO: 6699 - protein, 732 aa, Rhizobium leguminosarum bv. viciae 3841
MQFDTPATTNPIDNLKVVGQPIHRIDGQLKTTGRAMYAYEWHDPNMSYAYGYPVGAAIAKGRITSMDVSAAKKAPGVLAVVTTLDIGERKKGRFNTAKLFGGDEVQHYHQAIAVVVAETFEQARAAASLVKVDYAEEKGVFDLGQAKDSAVKPDESQQPDTAVGDFEAAFRSAPVTVDASYTTPDQSHAMMEPHASIAAWNGDEVTVWTSSQMIDWWRSDLATTLDIDKENIHLMSPFIGGGFGGKLFLRADAVLAVVGARAVKRPVKVALPRPLLINNTTHRPATIQRIRIGTERDGKITAIAHESWSGDLPGGGLETAVNQTRLLYAGANRMTAMRLATLHLPEGNAMRAPGEAPGLMALEIAIDEIAEKVGIDPVQFRIVNDTQVDPEKPQRPFSQRNLVGCLTLGAERFGWRERGKPGSRRDGSWLVGMGVAVAFRNNLVLPSGARVKLDREGVVTVETDMTDIGTGSYTIIAQTAAEMMGVTIDKVAVQLGDSRFPVSAGSGGQFGANSSTSGVYAACVKLREAIAKKLGFNSEDIVFENGEVRSGNRSVPLAEAAGPDGLVGEDTIKWGELTETHQQSTFGAHFVEVGVDIATGESRIRRMLAVCAAGRILNPITARSQVIGAMTMGAGGALSEELAVDTRRGFFVNHDLASYEVAVHADIPHQEVIFMDETDPMSSPMKAKGVGELGLCGVAAAIANAVYNATGVRVRHYPLTLDKLIGGLPDVA

SEQ ID NO: 6700 - protein, 722 aa, Vitis vinifera
MGKESNREEGHGHPLLRGGWRKGSYSHGFSSSQIQALASICETLIPPLHLESISKENPPEALYSFYKASGSQFPVPDEAAELLKKRGLPEGVMLVSIVLKILSTRLGTLLLCGFLCLGWKWPFILKFSEISLEKREQVLKNWSRQRFLFPLRLFFAIMKIFCFFIFFSRTDDNLENPAWDAIGYHVETKEYVKKPPKERPIRKGIVETMYENDSTLVQSLSQRGIKVIEDQKNICKIKCDVVIIGSGCGGGVTAAVLASSGYKVLILEKGNYCEPEDYSSLEGPSMSEQYESGGVMSTIDAKVMILAGSTVGGGSAVNWSAAIKTPNSILREWSTDHKLPLFGSSEYLSAMDTVWKRIGVTEKNSSENHYCGSCAYGCTRGDKQGTQSTWLVDAVGCGAVILTGCKAEKLIFKEKKNGRKRRKCSGVIVASSSKNVTKKLQIEARVTVSACGSLLTPPLLLSSGLENPHIGKNLHLHPVLMVWGYFPESQSGIKGKCFEGGLLTSLHKVVSEESRVQAIVEPTALGPASFAAIHPWVSGLDMKERMVKYSRTATLFALARDKGAGEVKVERRIKYRLHPADKENLRVGLRQALRILIAAGAVEVGTYRSDGQSIKCKGVKEEAVEEFLDGVVAGGGPCSRGDHWTLYCSAHQMGSCRMGATEEEGAVDENGETWEAKGLFVCDGSVLPSAVGINPMITIQTTAYCISKRIAESLKKQEFLAD

SEQ ID NO: 6701 - protein, 188 aa, Triticum aestivum
SIHQQAKPIKLTDFQGKYVVLFFYPLDFTFVCPTEILAFADAHSEFEKHNTVLLGASTYFLFSHHAYTQQPRNKGGLGDINLPLIADYSKTIARIYGALITKGPDAGVASRATFIIDGKGILRHASYNDLPVGRNVDEVLRLVQAFQFSDEHGEVCPAKWRPGGKTMKTDHNSDVTQKYWAEEHAKGQ

SEQ ID NO: 6702 - protein, 263 aa, Pisum sativum
MACSAPFASLLYSNPNTLFSPKFSSPRLSSLSIPNAPNSLPKLRTSLPLSLNRSSSSRRTFVVRASGELPLVGNSAPDFEAEAVFDQEFIKVKLSEYIGKKYVILFFYPLDFTFVCPTEITAFSDRHAEFDAINTEILGVSVDSVFSHLAWVQSDRKSGGLGDLKYPLVSDVTKSISESYGVLIPDQGIALRGLFIIDKEGVIQHSTINNLGIGRSVDETKRTLQALQYVQENPDEVCPAGWKPGEKSMKPDPKGSKEYFAAV

SEQ ID NO: 6703 - protein, 201 aa, Geobacter sulfurreducens PCA
MCMCTLVTKEAPDFTADAVMPDNTFGTVKLSSYRGKYVVLFFYPLDFTFVCPSEILAFNKKLDQFKAKNCEVIGVSVDSKFTHMAWKNTPVENGGIGNIQYPLVADLKKEIATQYGVLFEGAGVALRGLFLIDTKGVVRHAVINDLPLGRSVDEALRMVDALQFVETHGDQVCPANWKEGDEAMKPTASGVAEYLAKHSVG

SEQ ID NO: 6704 - protein, 203 aa, Thermoplasma volcanium GSS1
MPVVLGQKAPDFTVNTSKGPITLSNYRGKWVLLFSHPGDFTPVCTTEFIAFTERYEDFQKLGVELIGLSIDSVFSHIAWIRDIKEHFGIDIPFPIIADIDKEVAREYNLIDEKSGATVRGVFIIDPNQIVRWMIYYPAETGRNIEEIIRVIKALQFNWDRKLATPANWQPGQEGIEPAPTTVDSSFKRDNEQGVKTWYLKFVK

SEQ ID NO: 6705 - protein, 839 aa, Pseudomonas syringae pv. syringae B728a
MSEHSSNSTQAEMLAVFQQGLNTGVGRSVKHDSADKHVSGEAVYIDDRLEFPNQLHVYARLSDRAHARIVSIDTSPCYAFEGVRIAITHQDIPGLKDIGPLLPGDPLLAIDKVEFVGQPVLAVAARDLDTARQAAMAAIIEYEDLQPVLDVVQALRQKHFVLDSHTHKRGDSAAALARATHRLQGNLHIGGQEHFYLETQISSVMPTEDGGMIVYCSTQNPTEIQKLVAEVLGVPMNRIVVDMRRMGGGFGGKETQAASPACLCAVIARLTGQPTKMRLQRFEDMQMTGKRHPFYIEYDVGFDDDGRLQGIQLDLAGNCGYSPDLSASIVDRAMFHADNAYYLGEATVNGHRCKTHTASNTAYRGFGGPQGMVAIEEVMDCIARFLGKDPLHVRKANYYGKTERNVTHYYQTVEHNLLEEMTADLEQSSQYAERREAIRAFNAGSPVLKKGLALTPVKFGISFTASFLNQAGALIHIYTDGSIHLNHGGTEMGQGLNTKVAQVVAEVFQVDIERIQITATNTDKVPNTSPTAASSGTDLNGKAAQNAAEILKQRLVEFAARHHQVSEAEVEFRNGHVRIGELFLPFAELAQLAWMGQVSLSSTGYYKTPKIFYDRSQARGRPFYYYAFGAACVEVIVDTLTGEYKMLRTDILHDVGASLNPAIDIGQVEGGYIQGAGWLTTEELVWNDKGKLMTSGPASYKIPAVADMPLDLRIKLVENRKNPEDTVFHSKAVGEPPFMLGIAAWCAIKDAVASLGDYRHQPNIDAPATPEKVLWGCEQMRQNSAARRASSEGAEPIVSASSRASEASPGSPSPIQDAPVGASLLAKAPGLDHSVLEQK

SEQ ID NO: 6706 - protein, 484 aa, Pseudomonas syringae pv. syringae B728a
MIQFLLNQELKTERSLNPNMTVLTYLREQAHKPGTKEGCASGDCGACTVVVGELHSDTDGEQTLRYRSLNSCLTFMASLHGKQLISVEDLKHQGQLHSVQKAMVECHGSQCGFCTPGFVMSLFALQKNSSEADAHQAHEALAGNLCRCTGYRPILAAAEQSCAQRLPDQFDQRQAQTVERLRAIAPASTDELNDGEKRCFIPLTVADLADLYDSHPQARLLAGGTDLALEVTQFHKQLPVMIYVGHIDEMKGVKRFDDRLEIGAATPLTDCYAALKAEYPDFGELLQRFASLQIRNQGTLGGNIGNASPIGDFPPLLIALGAQIVLRKGNSQRTLALEDYFIDYKVTARQESEFIEKIIVPTASSRQIFRAYKVSKRLDDDISAVCAAFRLTLEGGVIHEARVAFGGMAAIPKRAAACEQALIGQPWSHATVERACAALSEDFTPLSDFRASKEYRLLSAQNLLRKYFIELQTPAVPTRVTDYV

SEQ ID NO: 6707 - protein, 393 aa, Zymomonas mobilis subsp. mobilis ZM4
MDIRHLRLALFTGNYNYVRDGANQALNRLVGYLMKQGASVRIYSPHSETPAFPAIGEVISVPAVPFPGRSEYCIPIALPSRVRRDIKKFDPNIFHIASPEYLGHRAVSLARKSNLPVVASVHTRFETYPRYYGMPFLEPVIEAILRRLYRRCDAIFAPSESMAQLLREQRMSYDVRIWSRGVDRNLFKPEARDPHLRHKFGIKEDEVVIGFVGRLVMEKGLDVFSDTIDELVRRKIPHKVLVIGEGPARGWFSRRLPQAIFAGFQTGESLARAVASTDILFNPSVTETFGNVTLEAMATGRAVVAAQATGSESLIDDPSMGRLIRPGAIKDFADALQSYCENKELRKEAGYNGYKRSECYGWDNVNQILADNYLSIIQARQQSGQAPRLKPRS

SEQ ID NO: 6708 - protein, 444 aa, Streptococcus pyogenes M1 GAS
MRIGLFTDTYFPQVSGVATSIRTLKEELEKEGHEVYIFTTTDRDVKRFEDPTIIRLPSVPFVSFTDRRVVYRGLISSYKIAKHYNLDIIHTQTEFSLGLLGKMIGKALRIPVVHTYHTQYEDYVSYIANGKIIRPSMVKPLLRGYLKDLDGVICPSRIVLNLLEGYEVTIPKRVIPTGIPLEKYIRDDITAEEVTNLKAELGIAGDETMLLSLSRISYEKNIQAIINQMPAILAENAKIKLIIVGNGPYLQDLKHLAMQLEVDKHVTFTGMVPHDKVALYYKACDFFISASTSETQGLTYIESLASGTPIIAHGNPYLDDVVTDKMFGTLYYAETDLTDAIIDAILKTPVMDKRLLAKKRYEISAQHFGKSIYTFYLDTLIARNSKEAQKLSLYLNHSGKSSSLKLVQGAIHLPKRAAKVTAITSVKVVKAPIKLVHAIKDFLD

SEQ ID NO: 6709 - protein, 378 aa, Nostoc sp. PCC 7120
MRIALFTETFLPKVDGIVTRLRHTVDHLQRLGNEVLVIAPDGGITEHKGAKVYGVSGFPLPLYPELKMALPRPAIGYALEEFQPDIIHVVNPAVLGLSGIFYSKVQKIPLVASYHTHLPQYLQHYGLGMLEGLLWELLKGAHNQAVLNLCTSTAMVAELSGHGIERVDLWQRGVDTELFHPELASLEMRSHLSQNHPENPLLLYVGRLSAEKEIERIKPILEAIPQARLALVGDGPHRQALEKHFFGTNTHFVGYLTGRELGSAFASADAFIFPSRTETLGLVLLEAMAAGCPVVAARSGGIPDIVTDGVNGYLFNPKADIQDAINATVRLLENAQERDTIRQNARREAEGWGWASATRQLQDYYQKVLIKEKLAKVG

SEQ ID NO: 6710 - protein, 260 aa, Brassica napus
  misc_feature (220)..(220): Xaa can be any naturally occurring amino acid
  misc_feature (251)..(251): Xaa can be any naturally occurring amino acid
VDPRVRTNLLSKAIMRAPGDVQGTYIAEAIIENVASSLSLEADTIRKINLHTYESLALFYKDGAGEPHEYTLSSMWDKLGVSSNFEERVSIVREFNESNIWRKRGISRVPIIYPVSMFATPGRVSVLSDGTVVVEVGGIELGQGLWTKVKQMAGYTLGLLKCGGTEELVDKIRVVQSDTLSMVQGNFTGGSTTSEGSCAAVRLCCETLVKRLKPLIDKSXGPISWNNLISQAYAQSVNLSASDLYTPERTXTQYLNYGVC

SEQ ID NO: 6711 - protein, 357 aa, Hyphomonas neptunium ATCC 15444
MPQPASAITPPAVSSLPSARQCQEARLKALSALIGRTPMLSIRLRFRGRERVIHAKAEHYNLTGSIKDRMALSILACAYRSGALQPGDTIAEATSGNAGIALTALGRALGHPVEIFMPDWMSGERKNLLRSLGANLNLLSREAGGFLGAIAATETLAASRKDVFLPCQFSNGDNSAAHAQTTARELINQLATLDARPDAFVAGVGTGGTVMGVGRAFKSAFPDVKVHPLEPQESPTLSTGYKVGQHRIQGISDDFIPALVKLEQVDEVIAVSDGDAIRMAQRLARELGLGVGISSGANLIGALIAAERLGDTACVATVFCDDNKKYLSGALACEEPHKEGHLTPEIELLDFEATICG

SEQ ID NO: 6712 - protein, 637 aa, Oryza sativa Japonica Group
MAAVARSRHPGHCARRPLPVTSLFRLADATPASRRRRLAVPGPPLTGCEQRDSTLTVCTLDEKSRNPSWKAIGYAAPAAAAAAVEQRRPASPSRRPLEDGVVETRRMDDNALLRSLVEKGLAVKTGTAAHHTVQCDAVVVGSGCGGGVAAAVLASKGYKVVVVEKGDYFATEDYTSLEGPSMERLYEKGGVFGTSNVTTILFTGATVGGGSAVNWSACIRTPAEIREEWSREHGLPVFASTAYAQAMDAVCDRIRVTGGCEEEGFQNRVLRRGCDALGMRADAVPRNSSEGHFCGSCNLGCPTGDKKGTDTTWLVDAVERGAVILTGCKAEHFILERNAGGRGGRSKRCVGLMATCTSSGITKKLRIEAKVSISACGALMTPPLLRNSGLKNRHIGRNLHLHPVSMAWGYFPDSTAELPGKCYEGGIITSMHRVTDRTIIETPALGPGAFSAVVPWESGRDMKERMRRYARTAHAFALVRDRGAGAVDGEGRVRFSPSRDDAEELRAGLRRALRILVAAGAAEVGTHRSDGLRLRCKGVRDADVEAFLDEVTIEKGPMYPGSDKWAIFCSAHQMGSCRMGASPRDGAVDGAGESWEAEGLYVCDGSLLPTAVGVNPMITIQSIAYCLSNGIADTLSH

SEQ ID NO: 6713 - protein, 217 aa, Burkholderia sp. 383
MSIRLGEDAPDFTAETTEGTIRFHEWIGDHWAILFSHPKDFTPVCTTELGYMAGLKPEFDKRNTKIIGLSIDPVSDHRKWVADIAETQGHAVNYPLIGDDELTVAKLYDMIHPNASGGPRTAVDNATVRSVFIIGPDKKVKAMLVYPMSAGRNFDEVLRLLDALQLNAKHTVATPVNWKPGDDVIIPTSVSDDAAKQKYPDGFRTLKPYLRYVTQPS

SEQ ID NO: 6714 - protein, 289 aa, Rubrobacter xylanophilus DSM 9941
MEFVQPLDWEEALEVKASRPEARPIFGGTDVMVELNFGRARPEVVMDLTRVPELREWGEEDGRLRVGAGVTYTRIIEELKGRLPGLAMASRTVGSPQIRNRGTVGGNLGTASPAGDALPPLYVCGAEVEVASVRGVRRVPVEEFVTGPKRNALRDDELILSFVLPEAGGPQQYAKIGPRNAMVIAVCSLGLALHPERREVGVCIGSAGPTPIRAREAEGFIRGVLEEEDLWESRGRLGEPALARFGELVAGAARPISDVRGTAEYRRHAVGVLARRVLRWAWEEYREGR

SEQ ID NO: 6715 - protein, 492 aa, Brucella suis 1330
MGQSARHEIRFLLNGETIVLDRVSPTETLLDYLRLSARLRGTKEGCGEGDCGACTVLVGRVVDGGLVYESVNACIRFVGSLDGCHVVTIEYLRGADGDLHPVQKAMVEFHGSQCGFCTPGFVMSLYALWMRDPRPADAAIEKALQGNLCRCTGYEAIMRAARAISDYGNVAQDPLAAERAHVLQRLTALRDGARVEVGAGKDRLIVPADLDDFAPILAAEPKATIVAGSTDVGLWVTKMMRDISPVVFIGHLEELHSIREENGVVTIGAGVTYTQAFGFLAGRIPALGQLINRIGGEQVRNMGTIGGNIANGSPIGDTPPPLIALGATLTLRKGAERRTIALEDFFIAYGKQDRGAGEFVEAVHVPLPGEGSRFAAYKVSKRREEDITASLGAFHLMLDAAGNVAHIRIAYGGMAATPKRAHAVETALMGKPWTEATVEAALEAYAQDYTPLTDMRATAEYRLLVARNMLRRFYLETTGSGETLGALRGEAA

SEQ ID NO: 6716 - protein, 153 aa, Rubrobacter xylanophilus DSM 9941
MRLSCEVNGERYEIDGVWEGESLLYVLRERLGLYGSKNACEQGECGSCSVYLDGVLVCSCLVLAGQAEGRRIVTVEGISGGEGLHPVQEAFVEAGAVQCGFCTPGLVVATHDLLSRNPDPTDAEIREALAGNLCRCTGYEKILDAVRLAAGRA

SEQ ID NO: 6717 - protein, 780 aa, Brucella suis 1330
MNRHSATDIKAARIRGGVATEQKHDSAHKHVTGTAVYIDDIPEPEGTLHIGVGYASVAHGRIKSMDLEAVRAAPGVVDILTCKDVPGENDVSPSGMHDDPIFAVDKVEFHGQPIFAVIAKTRDQARRAARLAKIEYEEAPGIYSIDMLDGLKDRLVTPPLTLERGNARAAIDAAPHRIRNRMYLGGQDHFYLEGQVSLAVPGEDEDVTVYCSTQGPSETQHLVAHALGVSSHSVTVEVRRMGGGFGGKETQANQWAAIAAIAAKKHKRAVKIRLDRDEDMTSTGKRHGFVIDYEVGFDDDGTILGVDYLYALNAGFSADLSGPVGDRALFHCDNAYFYPAVHAQSAPLYTNTAFRGFGGPQGMAGAERVIDEVAFALGKDPLEIRKRNFYDEMGKDGTRNVTPYHQKVEDCIIQRIVAQLEESADYAKRREAIREFNAKSRYVKRGIALTPVKFGISFTKTESNQAGALVHVYADGSVHMNHGGTEMGQGLHMKVAQVVAEEFQIDIDRVKITATTTAKVPNTAPTAASSGADLNGMAAQDAARQIRKRLIRFAAQQYQVPEDQIMFLPNRVRVGNQEISFNDLVNQAYIGRVQLSAAGHYKTPKIHWDRAKGRGHAFYYYAYGAACSEVSVDTLTGEYVVERTDILHDTGRSLNRAIDIGQIEGGFVQGMGWLTTEELVWDEKGRLRTHAPSTYKIPLASDRPKIFNVALTDWSEAYEPTIHRSKAVGEPPLPLGLSVLHALADAVASVADYKVCPRLDAPATPERVLMTVERLRKQNG

SEQ ID NO: 6718 - protein, 212 aa, Pseudomonas putida
MSLKLGDIAPDFEQDSSEGKIRFHEWLGNSWGVLFSHPADFTPVCTTELGLTAKLKDDFAKRGVKPIALSVDPVDSHHRWIEDINETQNTVVNFPIIADADRKVSELYDLIHPNANDTLTVRSLFVIDPNKKVRLTITYPASTGRNFNEILRVIDSLQLTDNHKVATPGNWQDGDDVVIVPSLKDEEEIKQRFPKGYRAVKPYLRLTPQLNR

SEQ ID NO: 6719 - protein, 195 aa, Archaeoglobus fulgidus DSM 4304
MKLPEAFKGKWFVLFSHPADFTPVCTTEFVAFQNRYDEFRKLNCELIGLSIDQVFSHIKWIEWIKEKLDIEIEFPVIADDTGRVAEMLGLIHPAKGTNTVRAVFIVDPEAVIRAVIYYPQELGRNMDEILRAVKALQVSDQNGVAMPANWPNNELVGDAVIIPPPISEAEAKERLEKAKAGDISCYDWWFCYKKI

SEQ ID NO: 6720 - protein, 595 aa, Oryza sativa Japonica Group; identical to SEQ ID NO: 6635

SEQ ID NO: 6721 - protein, 785 aa, Rubrobacter xylanophilus DSM 9941
MSGTETVPKAPPRGMPGAAESRPGDIGESTRRADGVPKVRGEFGYSSDLWMEDMLWGATLRSPHPHANIWSIDTSEAEAMPGVYAVLTHEDVPGRKVYGMEVPDQPVLAWEKVRYQGEPVALVAADHPETARRALQKIKVEYEVLEPLTDAEEAMKEGAPRLHLSGNLLRHIHVRHGEPESAKAEVVVSGEYEVGMQDQAFLGPESGLAVPDGQGGVDLYISTQWLHIDRDQVAESLGLPPERVRLVLSGVGGAFGGREDLSMQIHACMLALETGRPVKMVYNREESFFGHVHRHPCRMRYEHGARKDGTLVYVKARIVLDGGAYASSSNAVCLNAATFACGPYKVPHAEVDSYMLYTNNPPCGAMRGFGAVQVCFAYEAQMDKLARELGMDPVELRVKNAIAPGDRFPFGQEVPEPAPVAELLERVRRMPLPEEEALAGRDLRELPGGVSNVTHGEGVRRGVGYAVGFKNIGYSAGFDDYSTARVILSVEEGEPVAQVHTAACEVGQGVITVQAQIARRELGVERVRVLPADTRVGSAGSSSASRQTYMTGGAVRLACRAVRERVLARVREELGEGPEGLSVRGGNVVDAAGRVVVPLAELLGEEGIEETVEFHHRPTHPLDENGQGDAHVQFAYAAHRAVVEVDTELGLVRVVEVATAQDVGKAINPQAVEGQIEGGIAQGLGLALMEEIQVREGKVQNASFTDYLIPTILDMPSVRAEILELADPEAPYGLKGVGEPPTIASTPAIVAALRDATGRELNRVPVRPEQIVGIAERPAAPERIR

SEQ ID NO: 6722 - protein, 198 aa, Helianthus annuus
IILHDYVGDSFTIIFSHPGDFTPVCTTELGAMAAYADKFAQRGVKLLGLSCDDVQSHKEWIKDIEAYNKGKKVTYPIAADPNREIIKQLNMVDPDEKDASGQNLPSRALHIVGPDKKIKLSFLYPASTGRNMDEVVRALDSLIKASQHKIATPVNWKEGEPVVIAPSVSNDEARKMFPKGFQTVDLPSNKDYLRFTSV

SEQ ID NO: 6723 - protein, 203 aa, Nostoc punctiforme PCC 73102
MSLTYGTEGSLRVGQQAPDFTATAVVDQEFKTIKLSDYRGKYVVLFFYPLDFTFVCPTEITAFSDRYEEFKKINTEVLGASVDSEFSHLAWIQTDRKSGGVGDLNYPLVSDIKKEISAAYNVLDPAAGIALRGLFLIDKDGIIQHATINNLAFGRSVDETLRTLQAIQYVQSHPDEVCPAGWQPGDKTMNPDPVKSKVYFSAV

SEQ ID NO: 6724 - protein, 430 aa, Nostoc sp. PCC 7120
MKVAFIVWRFPVLSEAFILNQITGLIDRGHEVCIHPVNGLPKDYTGKLHPVVEEYRLMERVCFPPHVPNNLIWRFFKGVGLFIRNIHQGSCKTWRFFIPGRYGKEVATLKTFYRIVGLLKDGSYDIIHCQFGTLAPIALAYREVGIISGKLITTFRGIDISKYVEENGIDVYEQLFQEGEFFLANCQFFGDRAINLGCNPDKLIIHGSGLDCNKFTFKPRYFPADGKVQVATTGRLVEKKGIEYAIRAVAKVAELYPNIEYQVIGDGDLKEDLEQLITELNIGHIVKLLGWKQQKEIVEILENTHIFIAPSVTAADGNQDAPVNTLKEAMAMGLPVISTRHGGIPELVTDGVSGFLVPERDAEAIAHKLTYLIEHPELWEEMGKAGRGRVAEKYDMNKLNDELVEIYQQMLKSASPQQDLQHLPKELTAI

SEQ ID NO: 6725 - protein, 215 aa, Rhizobium leguminosarum bv. viciae 3841
MEQFMPSQTQLELSRRDLLISSAATIAVTAAVAPAAAQSPGNDMAYTSKVSFAVNGEKRDLEVDNRTSLLDALREHLHLTGTKKGCDHGQCGACTVMVDGHRINSCLTLAVMHEGDQITTIEGLGQPENLHPMQAAFVKHDGFQCGYCTPGQICSSVAVLEEIKANIPSHVTGDLTAQAAVTAAEIRERMSGNICRCGAYSNIIDAISEVAGIKA

SEQ ID NO: 6726 - protein, 340 aa, Sinorhizobium meliloti 1021
MKVTHFHFGKDGGAERFFVHLVNALAERGVEQTAIIRPGRGWRRDIEGAAKIRESHFRNLSLDRILLPLKVKHMARREKPDVLMAWAPRASELMPNYKGAFKISRLGDYPTRLSYFRNTDCIVCNTPGIAERVSDLGWKREIRVISNFTGTGRVVAVDRAKLDTPADAPVVMSMGRFVERKGFHTLIEAVARLPGVYLWLLGDGEERDNLHKLATDLGVSGRVRFAGWQDDTRPFLAAVDVFVMSSSHEPLGNVILESWAQGTPVVSTRSEGPQWFMRDGENGLMVDIGDAEGFARAIEQIVADNSLRTRLAERGHETLVGQFSREAITDAYLQLLASKP

SEQ ID NO: 6727 - protein, 334 aa, Ralstonia eutropha JMP134
MDVRDGFVGTVGHTPLIRLGGLSAETGCDIYGKAEFLNPGGSVKDRAALYIIRDAERRGTLRPGGTVVEGTAGNTGIGLAHICAARGYRCIVVIPDTQSPEKMERLRMLGAEVRAVPAKPYADPNNYQKIAGRLAQETANAIWANQFDNLANRQAHYETTGPEIWHDTAGRIDAFVCATGTGGSLAGISRFLKEHGPHVRIVLADPYGSSLYNFVKHRELKSEGNSITEGIGSSRITANLQDTVIDDAVRVDDQACVNMVYRLLREEGLFLGGSTGINVAAAVALAREMGPGHTIVTLLCDRGDLYFGRLFNQDWLAGKGLTPTPFARMAPRAG

SEQ ID NO: 6728 - protein, 323 aa, Salmonella typhimurium
MSKIYEDNSLTIGHTPLVRLNRIGNGRILAKVESRNPSFSVKCRIGANMIWDAEKRGVLKPGVELVEPTNGNTGIALAYVAAARGYKLTLTMPETMSIERRKLLKALGANLVLTEGAKGMKGAIQKAEEIVASDPQKYLLLQQFSNPANPEIHEKTTGPEIWEDTDGQVDVFISGVGTGGTLTGVTRYIKGTKGKTDLITVAVEPTDSPVIAQALAGEEIKPGPHKIQGIGAGFIPGNLDLKLIDKVVGITNEEAISTARRLMEEEVFLAGISSGAAVAAALKLQEDESFTNKNIVVILPSSGERYLSTALFADLFTEKELQQ

SEQ ID NO: 6729 - protein, 200 aa, Pectobacterium atrosepticum SCRI1043
MVLVTRQAPDFTAAAVLGSGEIVENFNLKKHINGKAAVIFFWPMDFTFVCPSELIAFDHRYAEFKKRGVEVVGVSFDSEFVHNAWRKTPVDKGGIGEVQYAMVADIKREIQKAYGIEHPEAGVALRGSFLIDKNGVVRHQVVNDLPLGRNIDEMLRTVDALQFHEEHGEVCPAQWEKGKSGMGASPDGVAKYLSENADKL

SEQ ID NO: 6730 - protein, 918 aa, Verrucomicrobium spinosum DSM 4136
MQLTINGNPAEVAPRPGQCLRTLLREQGWYGVKKGCDAGDCGACTVWVDDKPVHSCLYPAFRARDRRITTIEGLSPAEGPLHPMQEQFLAAQGFQCGFCTAGTIMTAAAKCCAMGAPMERVLKGNLCRCTGYRAIRDAIEGHRHVQEDLPGASVGRSLGSPLGPALVTGQARFTADEPPIPDLLHLKVVRSPHAHARVVAIRKEAALQVAGVHSIFTWEDVPLHRPFTSATHDDYHVDPDDTLMLDRVVRFVGQRVVLVAADSEQAAVLACDKIEVDYEILPAVFDPEEAMRPDAPILHQGKDAASRISHPERNVLREIHGENGSVAAGFEEADVTVENTYATHRQPHVTLETHNSLSYLTPDGRLHVRTSSQTPFLTKVKLVYLFNLYPENLHVYTERVGGGFGSKQEVLTEDLCVLVTLKTGRPARWEFTREEEFTATTTRHPFRVKVKLGARRDGTLTAMSMRVVTNTGAYGNHGGEVLGHSLNEAFAVYRCPNKQADGYAVYTNCVPSGAFRGYGLTQTAYAVECAMDELAAALQMPPITLRRKNMIQPGDTLLSIWPHPGDLEIGSYGLAGCLDLVEEALASGRGESLPLGHEWSTGQGLALAMLDCGPPTEHRSEARIDLLADGSYQVSIGSAEFGSGTLTVQRQIAATVLGCPVGSVRMVTADTDKTPYDTGTFASTGTLVGGGAVLAAAKVLKEQLLRLASRYTGQPVESCQLTGTAVACANHTLPLSELLTRAEQDGHRLSAVRRAYAAPRSVAFNVHGFRVAVHRITGQVRILQSVHAADAGQVLNPMQCRGQVEGGVAQGIGWVLTEDMQLTVEGRIANPTLRHFRIPGMADLPETEVYFAHTHDRIGPMGAKPMSESPVNPVAPALANAIANATGIRFTDLPLTAPRLYPALALPSTLPLLDIALS

SEQ ID NO: 6731 - protein, 682 aa, Oryza sativa Japonica Group
MGVPAFYRWLADRYPQTVSDAVEEEPVELEPGAFVPVDLRRPNPNGLEFDNLYLDMNGIIHPCFHPEGRPAPTTYDEVFKSIFAYIDHLFGLVRPRKLIYMAIDGVAPRAKMNQQRSRRFRAAKDAADAAAEEERLRKEFEAEGRTLVAKEKSEAIDSNVITPGTPFMFVLSSALQYYIQLRLNHTPGWQSVKVMLSDSNVPGEGEHKIMSYIRLQRNLPGFDPNTRHCLYGLDADLIMLSLATHEVHFSILREVITMPGQHEKCFLCGQVGHLAAECRGSGQADKTVELPPIHKKKYQFLNIWVLREYLEKDLEIVDPPFKINFERVVDDFVFMCFFVGNDFLPHMPTLEIREGAINLLMNIYRREFTSMGGYLTDGGEVLLDRVEHFIQSVAVHEEQIFQKRARIQKAIQNNEERNRVQTENSEDNQYVDKVKLGEPGYRVRYYAEKFKEEAELKPIDQVQRDVVQKYVEGLCWVMRYYYQGVCSWQWFYPYHYAPFASDLKCLAELEITFFLGQPFKPFDQLMGTLPAASSNALPKYYGDLMNDPNSPLKSFYPKDFEIDMNGKRFAWQGIAKLPFIDERRLLAETQKLEETLTDEERFRNRTMFDILYVRETHPLAAQIAFLYQMCSQSPNASYIIPIDPAASGGMNGFLCLSERNCYSIVVTSPVKGFNGIAQNRVL

SEQ ID NO: 6732 - protein, 553 aa, Aspergillus fumigatus
MRGYGLISLLPVAAAIWAPAIHQPVTVDKRQLPKDPTGVKTIHTANNVTIRYKEPGKEGVCETTPGVKSYSGYVDISPESHTFFWFFEARHDPKNAPITLWLNGGPGSDSLIGLFEELGPCRINSTLDSTINPHSWTEVSNVLFLSQPLGVGFSYSEAEPGSLNPFTGVFENASSAGIQGRYPVIDATLIDTTDLAAHAAWEILQGFMGGLPQLDHRIKSKDFSLWTESYGGHYGPAFFNYFHEQNEKIANGTVEGIHLNFNSLGIINGIIDEGIQASYYPEFAVNNTYGIKLVNDTVYNYMKFANQMPNGCQDQIGYCKQTNRTSLADYAICSEATNMCRDNVEGPYYAFGNRGVYDIRHPSKDPTPESYYVDYLKKDWVMNAIGVNINYTQSNNDVYYAFQQTGDFVWPNFLEDLEEILKLPVRVSLIYGDADYICNWFGGEAVSLAVNYTHTEQFRAAGYTPMVVDGVEYGETREYGNFSFTRVYQAGHEVPYYQPVASLQLFNRTLFGWDIAKGTTKIGPDYSTSGKAKATHTESSVPLPTATPSTSVH

SEQ ID NO: 6733 - protein, 159 aa, Arachis hypogaea
NKQTKMQYSYMRNCSNNRAATFSPPVVTIPIVDLSKPDAQALIVKACEDFGFFKVINHGVPMDAISLLEEEATKFFSLPLSDKEKVGLANPFGYGNKRLGYNGDIGWIEYLLLKTNSQHSNTLTLPSDQNLEQFRCALNEYMQAMRKMACEVLELWRKG

SEQ ID NO: 6734 - protein, 718 aa, Oryza sativa Japonica Group
MGVPAFYRWLADRYPQTVSDAVEEEPVELEPGAFVPVDLRRPNPNGLEFDNLYLDMNGIIHPCFHPEGRPAPTTYDEVFKSIFAYIDHLFGLVRPRKLIYMAIDGVAPRAKMNQQRSRRFRAAKDAADAAAEEERLRKEFEAEGRTLVAKEKSEAIDSNVITPGTPFMFVLSSALQYYIQLRLNHTPGWQSVKVMLSDSNVPGEGEHKIMSYIRLQRNLPGFDPNTRHCLYGLDADLIMLSLATHEVHFSILREVITMPGQHEKCFLCGQVGHLAAECRGSGQADKTVELPPIHKKKYQFLNIWVLREYLEKDLEIVDPPFKINFERVVDDFVFMCFFVGNDFLPHMPTLEIREGAINLLMNIYRREFTSMGGYLTDGGEVLLDRVEHFIQSVAVHEEQIFQKRARIQKAIQNNEERNRVQTENSEDNQYVDKVKLGEPGYRVRYYAEKFKEEAELKPIDQVQRDVVQKYVEGLCWVMRYYYQGVCSWQWFYPYHYAPFASDLKCLAELEITFFLGQPFKPFDQLMGTLPAASSNALPKYYGDLMNDPNSPLKSFYPKDFEIDMNGKRFAWQGIAKLPFIDERRLLAETQKLEETLTDEERFRNRTMFDILYVRETHPLAAQIAFLYQMCSQSPNASYIIPIDPAASGGMNGFLCLSERNCYSIVVTSPVKGFNGIAQNRVLNATYLNPQYHKHIPEPPEGVIIPAKVNPSPLCKQDN

SEQ ID NO: 6735 - protein, 132 aa, Chlorobium tepidum TLS
MLMKIAKDPMRLFDDIWSGSQMAVAPSFKVDISEDENAYHLDAELPGIAKEQIALNIEDDVLTIKAERTHKEEEKKKNYHRVERTYGSFSRSFNIGEIIDQEHIGATYDNGVLHVTLPKTQPAKKTKEIPIN

SEQ ID NO: 6736 - protein, 389 aa, Synechococcus sp. WH 8102
MVQIAWLGKKTPFCGNVSYGLSTTEALRQRGHQTHFIHFDNPRNPESGGTSLLANDPDVSLPYLVKSQVYTIPSPGAQRELRDSLERLKPDIVHASLTLSPLDFRLPDLCQQLGVPLVATFHPPFDAGLRNITAGTQQLTYQLYAPALARYDRVIVFSQLQADVLVRLGVPEQRLVVIPNGVDTECWAPATPSTSNLTLKRVREQLGSQRIFLYMGRLATEKNVEALLRAWRLTSPVGCRLVIVGDGPLCSGLMNQFGNGEVLWWGYEPDLETRVALLQCAEVFVLPSLVEGLSLALLEAMASGTACVATDAGADGEALEGGAGIVLSTQGVTTQLRTLLPVLRDQPVLTAELGKRARQRALERYTISLNIDAIEALYGSLVRSDQRAA

SEQ ID NO: 6737 - protein, 130 aa, Triticum aestivum
  misc_feature (70)..(70): Xaa can be any naturally occurring amino acid
  misc_feature (98)..(98): Xaa can be any naturally occurring amino acid
MARAVPILPVSKPFPLPVIAPASRPRAGPLHLHRRRLLPLSPSSSCNTSTSALFYSSSPDLLRDDELDHXEEPPPALEADLRSRRIALLGEPSHFDYXYGYKNRLQNFIKYLRETGDEVIVMTTHEGVPD

SEQ ID NO: 6738 - protein, 378 aa, Xanthomonas oryzae pv. oryzae KACC10331
MRYAIVTETYPPEVNGVALTVHGLETGLRARGHQVDVVRPRQSADTTATDALLVRGASLPRYPGLKFGLPATHRLVRHWRSTQPDAIYVATEGPLGWSAMRAARRLGIPVATGFHTRFDQYLPDYGAAWLQGTALRWMRRFHNQAEATLVPTRELQQFLREDGFERVRLLARAVDSQQFDPGRRDLALRADWGIEGEGVAAIYVGRIANEKNLPLAVRAFRNLQQIRPKARFVWVGDGPAREKIAHDNPDFIFCGIQRGDALARHFASGDLFLFPSRSETFGNVTLEAMASGVATVAFDYGAAREYLRNGHTGAAVDTDEAFIQAAVALTEDDALRQRMGTAAAQAMKKLHPDNVVSDFEALLLGISAARGRYVVNAA

SEQ ID NO: 6739 - protein, 349 aa, Caulobacter crescentus CB15
MTTILHAMLGKGLGGLEQVFLDYQPILEAWAARRGGRCVGVVRKGGKMAVAQANRTPPLSAMPALTDWDPITVGAARALVKTYRPALIFSHGQRPARVFDKAAPADVVRAVCLHKPSFDVTPGTHYVCVGQHLAALAIERGAPADHVWLVPNAVKPPGVEAQPFAEAGRPIRIVAAGRLHPKKGFDVLIHAVGKLRAWDYEVTCEIAGEGDERGALEGLIRDLDLEASVTLKGWTGDVAGFLATGDLFAFPSHQEGFPLTLLEAMAVGLPVVASEIDGPLEILTDGRDGRLVPDNDPDRLAEALAELISDRETAVRLGAAARQQVLTEYSPQELARRLEAALDGMTSRA

SEQ ID NO: 6740 - protein, 391 aa, Micromonospora echinospora
MGGMQVQILALSRSLARAGVDQLVLTLGFPGLPPTKQIEPGLTVRIARVSLPQIRSEITGLVGLGQAWLIGTIRECLRLRRGDWRPDLVHVHADGQIWPLVAGRIAARILGVPYVLTLHCSRLSVYQPMSAVDAMAHRLVTQAERQALRSAARVSTLTARTADVVSAATGLDRSAIVVNPDAVDITPATPAEAAAFAQRYGLTGRRPLIGYIGRVAHEKGWPDLLRLAELLDDLSPTFLVVGDGPQRERMEREIAEAGRAHQFVVTGFLPHDQVPAALALVDTLVMPSIHEELGGSAIEAIMTGTPVAAYAVGGLRSTIGSACPDLLSEPGDVRGLADVVRHVLTDRDAVVAQIHAAQTSTASTFDVAATRDRMIDCYRAALAGAGAASGK

SEQ ID NO: 6741 - protein, 181 aa, Methylobacillus flagellatus KT
MLKTLSILLMIGLAAFIILRPAHAASVPQPGSPAPGFTLLDAKKAQHRLTDYAGQWLVLYFYPKDDTPGCTKEACSFRDDLFQLEKLGAKVIGISVDDPESHAKFADKYSLPFPLLSDSDGKVADSYGALTNLGIIKIAKRYTFLIDPQGNIAKTYLKVDTSRHSQEIIDDLKQLKTAQPH

SEQ ID NO: 6742 - protein, 160 aa, Rhodopirellula baltica SH 1
MADFIEPGKKAPAFTLKDQDGQTVKLKDLAGAPVVLFFYPKDNTPGCTKEACAFRDRYAELQSAGAQLFGISTDSAESHIQFRDKFELPFPLLVDENHAMSEKYGAYREKNLYGKKSMGIQRSTYLIDAAGKVVKVWKRVRVDGHDQQVLDALALLAEQN

SEQ ID NO: 6743 - protein, 408 aa, Mycobacterium tuberculosis CDC1551
MKIRRLQRAEQQSSHAVCRYATISTAGADSVCGVRVAIVAESFLPQVNGVSNSVVKVLEHLRRTGHEALVIAPDTPPGEDRAERLHDGVRVHRVPSRMFPKVTTLPLGVPTFRMLRALRGFDPDVVHLASPALLGYGGLHAARRLGVPTVAVYQTDVPGFASSYGIPMTARAAWAWFRHLHRLADRTLAPSTATMESLIAQGIPRVHRWARGVDVQRFAPSARNEVLRRRWSPDGKPIVGFVGRLAPEKHVDRLTGLAASGAVRLVIVGDGIDRARLQSAMPTAVFTGARYGKELAEAYASMDVFVHSGEHETFCQVVQEALASGLPVIAPDAGGPRDLITPHRTGLLLPVGEFEHRLPDAVAHLVHERQRYALAARRSVLGRSWPVVCDELLGHYEAVRGRRTTQAA

SEQ ID NO: 6744 - protein, 268 aa, Triticum aestivum
  misc_feature (242)..(242): Xaa can be any naturally occurring amino acid
SPPRLTTAAMACAFSASTVSTAAALVASPKPAGAPQCLSFPRAAARPSRLAAAGSRTARARSFVARAAAEYDLPLVGNKAPDFAAEAVFDQEFIHVKLSDYIGKKYVILFFYPLDFTFVCPTEITAFSDRHEEFEKINTEILGVSVDSVFSHLAWVQTERKSGGLGDLKYPLVSDVTKSISKSFGVLIPDQGIALRGLFIIDKEGVIQHSTINNLGIGRSVDETLRTLRALQYVQENPDEVXCPAGWKPGEKSMKPDPKGSKEYFAAI

SEQ ID NO: 6745 - protein, 224 aa, Kluyveromyces lactis NRRL Y-1140
MRNILPKQAIYIGAKAPNFQAMTSLGPMDFYQYTQGKWCVFFSHPADFTPICTTEIGAFGALQDEFTNRDCVLLGLSTNNRASHLRWIQDIEAITGVKINFPIICDEEKKVATQFSMIDVNALTNGEPALTPLRAVYIIDPNKIVRLIQLYPLSTGRNTAEVLRCLDSLQLVYKTDGKIMTPINWIPGDDIVVVPDLENCSMFPHRRTIRDYLQLSPLDPNSLD

SEQ ID NO: 6746 - protein, 198 aa, Helianthus annuus
IILHDYVGDSFTIIFSHPGDFTPVCTTELGAMAAYADKFAQRGVKLLGLSCDDVQSHKEWIKDIEAYNKGKKVTYPIAADPNREIIKQLNMVDPDEKDASGQNLPSRALHIVGPDKKIKLSFLYPASTGRNMDEVVRALDSLIKASQHKIATPFNWKEGEPVVIAPSVSNDEARKMFPKGFQTVDLPSNKDYLRFTSV

SEQ ID NO: 6747 - protein, 305 aa, Ralstonia eutropha JMP134
MKADNILQTIGNTPHIRIRRLFGNGHEVWIKSERSNPGGSIKDRIALSMVEDAERRGVLKPGGTIVEPTSGNTGIGLAMVAAVKGYKLILVMPDSMSIERRRLMLAYGATFDLTPREKGMKGAIARAEELIASIPGAWMPQQFENPANIDVHARTTAQEILADFPEGLDALITGVGTGGHISGCAQVLKQKWPQLKVFAVEPTASPVISGGAPAPHPIQGIGAGFIPENLKTDLLDGVIQVDAEPAREMARRCAREEGILVGISSGATLAAIASKLPELPAGARVLGFNYDTGERYLTVEGFLPA

SEQ ID NO: 6748 - protein, 198 aa, Campylobacter upsaliensis RM3195
MIVTKKALDFTAPAVLGNNEIVNDFNLYKNIGSKGAVVFFYPKDFTFVCPSEIIAFDKRYDEFKKRGIEVIGISGDNEFSHFAWKNTPINQGGIGQVKFPLVADLTKQIARNFDVLFAEAVALRGSFLLDADGTVRHAVINDLPLGRNIDEMLRMVDTMLFTNEHGEVCPAGWNKGDEGMKADPKGVAEYLNKNENKL

SEQ ID NO: 6749 - protein, 389 aa, Nocardioides sp. JS614
MKEATRARFTRHPPGRSGPVTPRGDPDDMRIALVTETFFPAADGTTTTVKAVADRLVETGHEVLVVARGPGLASYGGSEVVRVRQLDRPGAQVREALERFGPDLVHVTSPDAVGRKALKHARRLGVPTLVVEQSALMDVAADYWRSRVARRSDRVLVTSRWMVGRLAEFEVDAGLWPPGTDPAAFTPALRDEWLHERWSRARSRTGPLVVVGYVGSLRKRHDVRRLAALVRVPGIRTVVVGDGPQRAWLEARLHGAKFTGELGTGDLAAVLPTLDVLVHPGEHETCCHALREAAAAGVPVVAPRSGGAPDVVVSLETGLLYDPTDEHALARAVAAIAADRHRSLLGARARELATRTWRQAVDELVERHYVPLAASRRAPGAEEKVLISP

SEQ ID NO: 6750 - protein, 1032 aa, Aspergillus nidulans FGSC A4
MGVPALFRWLSKKYPKIISSVIEELPQEVNGEEIPVDITGPNPNGEEMDNLYLDMNGIVHPCTHPEGKPPPANEQEMMIEIFKYTDRVVNMVRPRKLLMIAVDGVAPRAKMNQQRARRFRSAQEAREQDEKKQEFQRMLAKQNGDKEQMLQEEVIQKTWDSNVITPGTPFMDILAASLRYWIAYKLNTDPAWEKLKIIISDATVPGEGEHKIMEFIRSQRASPEHDPNARHVIYGLDADLIMLGLATHEPHFRVLREDVFFQESKQRTCHLCGQPGHKAEECRGQAKEKNGEFDEKGKGATLKPFIWLHVSILREYLAAELYVPHQPFPFDLERALDDWVFMCFFVGNDFLPHLPSLDIREDGIDTLIAIWRDNIPLMGGYLTQDGRVDLKKAQLILQGLAKQEDAIFRRRRQAEERKLANEKRRKQEEKARNEERARKRRRSSPSYDAIESPTHAKPRSAGAAAAPPAGLELITPARGELARQTRELTHSMVVNRGNVYRANMANKSAAAVLKSKLLGGQDGQPSDDGESTAESDAQLDAAGPVLGKRKADEAEVGQLGTETPDKPEPAKADELPPDTVRLWEEGYADRYYEQKFGVDPQDKEFRHKVARAYAEGLAWVLLYYFQGCPSWTWYYPYHYAPFAADFVDIGDMELSFEKGTPFKPYEQLMGVLPASSNHAIPKVFHSLMTEPDSEIIDFYPEDFPVDLNGKKFAWQGVVLLPFIDEKRLLAAMSKKYPLLTEDEKARNTVGRDVLLLSESHPLYQDLVSNFYSKKQGAPKYKLNMRVSDGLAGKVEKNEAYIPHSSLVSSLEEYGMPSLEDDRSIMVNYEIPKSTNIHKSMLLRGVKFGPPALDNADIQATKSRAQHSGRSYGGAPFRGGRGGRMNYAGDRQSHGNDRPNPFAAHLDPKFMPGANPGAPMGMPSGWVPPSGNFSRGPPPPPRGGTSYGYGSQQYGSYGGYGQQQSYQQSSHSQSDYYGRGPPAPYNNGPADYYSGRPSGYGPQESRGGGYNRGGYRGGRDTYSSSGHGGYGRY

SEQ ID NO: 6751 - protein, 198 aa, Helianthus annuus
IILHDYVGDSFTIIFSHPGDFTPVCTTELGAMAAYADKFAQRGVKLLGLSCDDVQSHKEWIKDIEAYNKGKKVTYPIAADPNREIIKQLNMVDPDEKDASGQNLPSRALHIVGPDKKIKLSFLYPASTGRNMDEVVRALTTLIKASQHKIATPVNWKEGEPVVIAPSVSNDEARKMFPKGFQTVDLPSNKDYLRFTSV

SEQ ID NO: 6752 - protein, 364 aa, Debaryomyces hansenii CBS767
MIRTSIRRLTISRNHDIKLPFVPLVSENGFPQAIGNTPLLRLPRISDKIGRNVYAKAEFMNPGGSIKDRAALYVINDAEEKGLIKPGGTIVEGTAGNTGIGLAHVCRAKGYKCVIYMPNTQSKNKIETLRLLGATVHPVPAVAFDNPENYNHQAKRFAESQENAAWTNQFDNVANRQAHIETTGPEIWSQLNGKVDAFTCSTGTGGTFAGVTRYLKEISNGATKCVLADPPGSVLYSYIKSNGETMERGGSSFTEGIGQGRVTDNLKQEIPLVDDALKITDEESIEMLYRLLDEEGLYIGGTGALNVVAAVKVAQSLPEGSNVVTLLADSAHKYSDRIFSKSWLQSKGLFDALPSHLKKYATLE

SEQ ID NO: 6753 - protein, 198 aa, Helianthus annuus
IILHDYVGDSFSIIFSHPGDFTPVCTTELGAMAAYADKFAQRGVKLLGLSCDDVQSHKEWIKDIEAYNKGKKVTYPIAADPNREIIKQLNTVDPDEKDASGQNLPSRALHIVGPDKKIKLSFLYPASTGRNMDEVVRALDSLIKASQHKIATPVNWKEGEPVVIAPSVSNDEARKMFPKGFQTVDLPSNKDYLRFTSV

SEQ ID NO: 6754 - protein, 155 aa, Dictyoglomus thermophilum H-6-12
MQKRGLEIGSQAPDFSLKDQNGDEFKLSNYKGKKILLSFHPLAWTSICSKQMLSLEENYNKFLELNTIPVGVSVDPVPSKKAWAENLQLKNLKILSDFWPHGKVAKLFNIFREEDGFSERANIIIDEEGKIVFFKIYPIRELPDINEIIEFLSNK

SEQ ID NO: 6755 - protein, 180 aa, Gloeobacter violaceus PCC 7421
MRKLLLKSSLLFALLLAGPQAALLAAPRVGEAAPAFELPVAAGKKISLKDFQGKWLVLYFYPKDMTSGCTIEAQRFQKDLAQYKQLGAEIVGVSADALDSHSMFSKKEGLTFLLASDVGGKVAQAYDSWYGLGDMGMAARNTYLIDPQGRVAKVFSNVDPTGHSREVLSTLKQIQAKAQR

SEQ ID NO: 6756 - protein, 151 aa, Pseudomonas fluorescens PfO-1
MELRINQKTYQVDADADTPLLWVIRDDLGMTGTKYGCGLAQCGACSVLVDGNVVRSCVTPVAGVVGREVTTIEAIEADEVGKRVVSTWVDLQVAQCGYCQSGQVMAATALLKQNPKPSDAQIEAAMVNLCRCGTYNAIHAAVHELAGKGDA

SEQ ID NO: 6757 - protein, 460 aa, Absidia zychae
MFGKRALTSLLVTLGVALVCAPVTVQAHPMSHVLRRQDGNDTSSGNTTQLKYTSPKLCDPDVKQYSGYLDAANDEHYFFWFFESKNDPKNDPLTIWLNGGPGCSSLIGLWEELGPCQQNGSANPHSWHHSSNMLFFDQPDGVGFSYGKQTVSTTEDAAERAWTFLQAFYETFPQYSKLDVHYFGESYGGHYIPGFASHVVDMNKKVQSGEEKGVVVPLKSIGVGNGFIDAVIQYKSYPKMTCHSTYPAVLSEEECDKMQQIYENDCKPAAEQCAESDEDSDCVNANQQCGQIEGIYAQSGYSFYDIRQQGDDTPHPFVDELNKASVIKEVGARGHFSMCSDSVGTAFAQTGDGARSYIPAVEKLLKEGIPVLIYVGDADVICNWYGNLDVADSLKWDGSDAFSKTKLEAWKADGKEVGQFRSADKLTFVRVYEAGHEVPMYQPEAALSMFQTWISGKSFG

SEQ ID NO: 6758 - protein, 157 aa, Verrucomicrobium spinosum DSM 4136
MNTLTRWTPFRTGTWDPLKEISEMENRLSRLFPTAASNGGAKEALTVAEWAPPVDITEDDKEYVIKAELPEIKKEDVKVTVTNGELTLAGQRKFEKEEEGKKYHRVERSYGSFLRSFTLPDAVDATKVEAQFKDGILTVHLPKDERAKPKSVEVKLN

SEQ ID NO: 6759 - protein, 390 aa, Micromonospora echinospora
MGGMHVLGHAIVTEMGRRGFPQRVLTMAPPGVPKDLQIAPNVTVHARRLPVLPIPSKLEGYFGLVGAWAKASLLYVMRNKEQLKREIGIVHAHCDGSGSAPAYAYAAAQVLDVPIVSHIYSCRSLTQHPTTVFERVVDPVAKSAEKYVIQHSGAVLTLSDKVRERIRDELHVPDDKVHRLAHLVTDNFVGHDTPERREELRQRFGLTDDKPTVLYVGRISSEKGVDWFVKAAAEVAKRRDCRFLIAGDGPQRGDIEALARQLGVADKLVITGFLLPEYIPSIISLSTLAVLPSQYEELGVVVLEYMMMKRPVVAHDVSGVHKLVDHMKTGVLVPPFDPPKLADAIEMVLDDPDLARRLAENAEPIPQREYSLASAGERLEAIYLSLMEES

SEQ ID NO: 6760 - protein, 795 aa, Rubrobacter xylanophilus DSM 9941
MTGNCTSCRPERWVGQSVPRVEDARHLTGRGMFVDDIERPWILYAAFVRSPFSAAHIQEVSVEEALKVPGVETVITAADLDGFPGIKPLLHRPEFVPVEMPLLCGREVRHAGEPVALVLADCPHVAEDGAEAVVVKYERREPVVSLDGALAEGAPRVHEEMKDNVLLDVSDPENPELDKIFEQAPVVVAATFDTGRLSAVPMEGRACLAEWDAREDTLILYTSTQVPFIVRTAVADALKLPQQRVRVIAPDVGGGFGQKCVVSREELLVSIAALRLGRPVKWTEDRQENLTAAFHGHEQQYKASAAFDEKGKLLGLKVDILCDVGAYSCYPFTCGVEPLMAATEMPGVYQLEHYQSRARAVATNKAPMAPYRGVSRPQFTFVMERLMQKAAKRLGLDAVEIRRRNLPSLEDFPYESPTGVVYDPGSYVESLEKCAKVFNFSTWKERQEKARRAGRLIGIGFSCFGERTGYGTRAFALRKMAITPGADNARLRMDPSGNVTLTVGTCGHGQGHQTTLAQIAADELGLPLEKIVVRQGDTEAAPYGWGTFASRSAVVGGGATKRAAALLAERIKEVASYLLEAASRDLEIKEGRVFVVGSPDRYVTVEQVARAVHLEAHLLPEGEAGMLDASAGFDPPGTFSNATHGVVVEVDPETGDVRIERYVVVEDCGIMINPMIVEGQVRGGVAQGIAAALYEQFVYDDEGQPVTSTLMDYLVPTTTEIPPIEILHLETPCEYTETGAKGMGEGGTMGAPAAVASAVADALSHLDIEIDHLPITPDRLRAAIKESRAYGGSAK

SEQ ID NO: 6761 - protein, 191 aa, Rubrobacter xylanophilus DSM 9941
MKDMHPVEITVNGRVHEIEVESRRTLADVLRHDLGYTGTHLGCEHGICGACTVLLDGLPVRSCLLFGVQANGCEVETVEGLESDGHLNPLQEAFSANHALQCGFCTPGFLMLATAFLRENPNPTEEEIREVMSSNLCRCTGYQGIIDAVRAAAGKGEKPKAVVEKTVATEASEDKRVEGVSPLRDAGGHGQ

SEQ ID NO: 6762 - protein, 211 aa, Microcystis aeruginosa PCC 7806
MALQLGDIVPDFTQDSSAGPISFHQWVGDSWVVLFSHPADYTPVCTTELGTVASLKSEFERRNVKVIALSVDSAESHRGWINDINETQNTTVNYPIIADGDRKVSDLYGMIHPNSLNNLTVRSVFIIDPNKKLRLTITYPASTGRNFNEILRVIDSLQLTDNYQVATPANWTDGGDCVVVPSIPTEEARSKFPKGVEEIKPYLRMTPQPNK

SEQ ID NO: 6763 - protein, 380 aa, Staphylococcus aureus subsp. aureus MW2
MKIGITCYPSMGGSGIIATELGIKLAERGHEVHFITSNIPFRIRKPLPNMIFHQVEVNQYAVFQYPPYDITLSTKIAEVIKEYGLDLLHMHYAVPHAICGILAREMSGKDIKIMTTLHGTDITVLGYDHSLQGAIKFGIEKSDIVTSVSKSLAQETHEIIETNKEIIPIYNFVRENEFPTKHNTALKSQFGIAPDEKVLIHVSNFRQVKRIDTIIETFAKVREKIPSKLILLGDGPELVPMRQLTKELNVEEDVLFLGKQDCVSEFYQLSDLVLLLSEKESFGLTLLEAMKTGVVPIGSNAGGIKEVIKHGETGFVVDVGDCDSASDYAIRLLEDKVLYNKLQKNMLADIAERFGSELITDQYEYYYQKMLNEHNKSKGE

SEQ ID NO: 6764 - protein, 775 aa, Rubrobacter xylanophilus DSM 9941
MSVIGQRIGRLEDRRLLRGLGHFVDDVDRAGQLWMRVLRAPLAHARILSIKAEKALALPGVEMVLTGDDLAWVKPIPVRTRTEHPLDDFLQPVLARERVRYVGEPVAVVLADDAYLAEDAAELVEVEYEELPVVLDAREAIRSDAPQLRDEVGNEAATLSMGYGDIEEAFRNASRVIEAEFKIGRHSGVPLETRGLVAEYDRGSDHLTIWGSTKVPHFNRRVLAQLLDMPLSRISIKKTDAGGGFGVRGEFYPEDFLVPYLARKTGRPVKWIEDRAEHLIATNHSREQRHRLQAAFDNENRLLALRDEVWHDNGAYVRTHGVIVADLTLAMLPGPYRVPAYEGTAHVALTNKTPCGTFRGPGRFESTFAREHLLDVAAAELGVDRLELRRINLLDPSEIPHVRPLSTLSTDVILDAGDYGGLLDKALQHSGFEDWVEEARELRDQGRLVGTGIGYFLEKSGLGPYEEATVEVDPTGSVRVLTGGASLGQGIETVLAQIAADQLSVPPEEIEVIHTDTDLLPDGVGSWASRSTVVGGSAVMLAAKATVEKALRVAAEVLEASTEDLFLESSEVKVAGSPDKALTLGKLAEACDPQRSAAMGEEPGLGARRTFSVEHMTYPYGVHLAQVEVDPETGGVEVRRYFVAYEIGRAINPTLVEGQLIGGAAQGIGGSLFEEFRYDESGQPLASTFIDYLEPTVAEIPQVRTLICEDAPSPGNPLGLKGAGEGGAVGCGAAIAGAVEDALRTPGAITELPITPDRIRGLARRRDRPTRLGAT

SEQ ID NO: 6765 - protein, 308 aa, Streptococcus mutans UA159
MAKIYNNITELIGNTPIVKLNNVVPEDAADVYVKLEAFNPGSSVKDRIALSMIEDAEKRGLIKPGDTIVEPTSGNTGIGLSWVGAAKGYNVIITMPETMSVERRKIIQAYGAKLVLTPGSAGTKGAIDKAHEIAKEVGGWVPLQFDNPANPKIHELTTGPEILEAFGSHGLDAVVAGIGTGGTITGISRALKKDNPDIKIYGLEADESAVLSGDKPGPHKIQGISTGFIPAALDTHSYDEVIRVKSDDALATGRYFGGKEGFLLGISASAAVWAALEVAKKLGKGKKVLAIAPDNGERYLSTALYEFN

SEQ ID NO: 6766 - protein, 342 aa, Nocardia farcinica IFM 10152
MLVTRVTDLIGRTPLFELATTDTGTRLLLKLEQFNPTGAAKIRMAREMVLDAERRGLLEVGGHIIESTSGNTGLGLAVVAAERGYRFTAVVDHHACKDKLRAMAAMGAELVYVADEGDDGLATSAREDLAEAMAAECGGYFTEQHDNDANAVGYYPVAEELLEDVERVDILLSAVGTGGSLFGTATRLRQLGCPPHVIGVEPVGSIAFGGPGGPYWQSGTGTPPGATIGTAVDYSLLDEGVKVSDTDAFATARAVAAELGLMLGGSAGGSVYVGLERLEQFPPGSTVVTIVCDGGEKYLDTVFDDDWMRARDLLAPAVEDRVREHLRRYAPAARRPALAHAR

SEQ ID NO: 6767 - protein, 159 aa, Erythrobacter sp. NAP1
MASFILNGEPVTIDADPAMPILWVVREKAGLAGTKFGCGIAQCGACTVHLDGQPVRSCSTPISQAEGREVTTIEGVAGPEGELSAIQKAWISEQVPQCGYCQSGQIMSATALLRENPNPSDEDIDMAMRGNICRCGTYTRIRRAIKVAAGQAQPRNEEA

SEQ ID NO: 6768 - protein, 230 aa, Ostreococcus tauri
MLSASLSKSAFTPRASALQKSVKGKNFSRSAVRVEARKPLVGYPAPEFSAEAVFDQEFQDIKLSDYRGKYVVLFFYPLDFTFVCPTEITAFSDRYEEFAKLNTEVLGVSVDSKFSHLAWLQTDRNDGGLGDLAYPLVSDLKREICESYDVLYEDGTALRGLYIIDREGVIQHYTCNNAPFGRNVDECLRVLQAIQYVQNNPDEVCPAGWTPGAATMKPDPKGSKEYFKAI

SEQ ID NO: 6769 - protein, 369 aa, Iris x hollandica
MPAPPARVESLASTGMASIPTEYVRPEWERDGSLGDALEEAKKSDQLEGPQIPTVDLKGFDSEDEKERSRCVEGVKEAAVEWGVMHVVNHGIPPELIERVRAAGKGFFDLPVEAKERYANDQSEGKIQGYGSKLANNASGKLEWEDYYFHLIFPPDKVDLSIWPKEPADYTEVMMEFAKQLRVVVTKMLSILSLGLGFEEEKLEKKLGGMEELLMQMKINYYPRCPQPELALGVEAHTDVSSLSFILHNDVPGLQVFYGGRWVNARLVPDSLIVHVGDTLEILSNGRYKSILHRGLVNKEKVRISWAVFCEPPKEKIVLEPLAELVGEGSPAKYPPRTFAQHVQHKLFKKAQAQVQDQAGVHIPEAIQT

SEQ ID NO: 6770 - protein, 360 aa, Streptomyces avermitilis MA-4680
MPVISVPYAFNEEELYVDLRSIFGHSLFLKCEGFNFAGSIKLKAATEMVEAAERDGVLTPESILVESSSGNLGVALSMIAASKGYRFLCVTDSRGNLSTRMMMEALGSEVHMIAGQEANGGFLGARIAYVRALCASDDRYVWLSQYTNPSNWKAHYRKTAPEIARQFPRLDVLFVGAGTTGTLMGCARYFREWHRPVRIVAVDSVGSVSFGGPPGRRMIPGLGMSMRPPLLDESYVDEVIRVEEADTIRTCHRLARRGFLFGGSTGTVVSGATDWLAGHDARELTAVAVGPDLGERYLDTIYQTNWLKDLYGDEVLDSDDVAAGSWASSPAQPTRWGRSLDLQTGDHHGNQHHQFHDRKT

SEQ ID NO: 6771 - protein, 269 aa, Brassica napus
  misc_feature (48)..(48): Xaa can be any naturally occurring amino acid
  misc_feature (60)..(60): Xaa can be any naturally occurring amino acid
MASVASSTTLISSSASVLPATKSSLLPSPSLSFLPTLSSPSPSASLRXSLVPLPSPQSAXSSRRSFAVKAQTDDLPLVGNKAPDFEAEAVFDQEFIKVKLSEYIGKKYVILFFYPLDFTFVCPTEITAFSDRYAEFEKLNTEVLGVSVDSVFSHLAWVQTDRKSGGLGDLNYPLISDVTKSISKSFGVLIHDQGIALRGLFIIDKEGVIQHSTINNLGIGRSVDETMRTLQALQYIQENPDEVCPAGWKPGEKSMKPDPKLSKEYFSAI

SEQ ID NO: 6772 - protein, 165 aa, Arthrobacter nicotinovorans
MTTPSPSDRVEIDVEVNGRRRTVAVDARETLADHLRNDQKLTGIKLGCEHGVCGACTILMDGAAVRSCLTLAAQGDGRSIRTVEDLSDGALSPLQEAFKRHHALQCGFCTAGFLMSATELLEANPSPTKEEVIEALSGNLCRCTGYQTIVEAVLDAPGQIGNKNG

SEQ ID NO: 6773 - protein, 311 aa, Clostridium thermocellum ATCC 27405
MAKIAKNLTELIGNTPLLELSNYNRANNLEAVLIAKLEYFNPASSVKDRIGYAMIKDAEEKGIINKDTVIIEPTSGNTGIALAFVAAARGYRVILTMPETMSIERRNLLKALGAELVLTPGADGMGGAIRKAEELAREIPNSFIPQQFSNPANPEIHRRTTAEEIWRDTDGQVDIFVAGVGTGGTISGVGEVLKQRKPDVKIVAVEPFDSPVLSGGTKGPHKIQGIGAGFVPDNFNRAVVDEIFKVKNEEAFETSRKLARTEGLLVGISSGAAAFAATQIAKRPENKGKNIVVLLPDTGERYLSTALFQDA

SEQ ID NO: 6774 - protein, 1304 aa, Chlamydomonas reinhardtii
MVSPTGSATGDAICYINGKRYVLPPGRGEVTLLQFLRENGLTGTKLGCGEGGCGACTVMLSSWEDGKVQHRSANACLCPLYAVEGMQVVTVEGLGNTRDGLHPVQQKLAVMHGSQCGFCTPGFVMSMYSLLRSSTEPPSEDDIEDALGGNLCRCTGYRPILDAFKTFAKTDPAAYTEEAIAASKGLADCCKKTGGACGGGSKAANGAGGGGKATCEPIFPPELKKREPQPLAIAGACALTWHRPVSLEALLELKAAHPAAKLVVGNTEVGIEMKFKAARYPVVIAPTHVKEMNAITVTDAAVEVGAACTLTRMMTRFKELIATLPRHQTSGLQAVVHQLRWFAGNQIRNVSAVGGNIVTGSPISDLNPIWMAAGATFVALGKGTGERAVPASQFFTGYRQVDLQPHEVLYKVVVPLTRPHEYVKEFKQSPRREDDIAIVNAGMRVKLAPGSEEGVWVVEEAAVAYGGVAARAVMAPAVAAALVGKPWDNTTLQAALAAVRQDVVMADNAPGGKVEFRRALAAAFLFKFFVHAALALEADTQAAYKADVPQDQRSAAKPYERHPARGVQFWADPQEVSVVGQPHHHMAAELQTTGEATYTDDIKLTADGLVGALVTSVKPHARITRLDPSAALKVPGVVGFYCARDVPGSNMIGPVWTDEEVFATTEVTCVGQVIGIVVADTEAAARAGARAVEVGYEELPAVMSIEEAIEAGSFWEDYKGKLECGDVDGAWASCDHVVTGTYKVGGQEHFYLEPGNCCVIPHENDEFTLFSSTQAPAKHQKYVAHVLGVPAHKIVSKTKRLGGGFGGKETRGIFLHCAAAVPAYHLRRPFNLVCFSLGWYLPPLSPLPPTRTRSIMDRALLHSDCCYKVPHMRVRGHMCKTHQASNTAFRGFGGPQGLMFAEMWIEQIAKTVGKPDHEVRTLNMYNEGDVTHFGQVMEHCRARACWDTVLASSDYSRRLGAVAEFNAAHRWRKRGLAATPTKFGISFTTKFLNQAGALVHVYLDGTVLVTHGGVEMGQGLHTKMAQVAAQALNVPLSKVFISETSTDKVPNASPTAASASSDMYGAAVLDACQQIAGRLQPYRCVGRCVCLGPSKSACECERLWWLHALNRSAHLLLSPFPLISLSLSYGAHDPTLLFLNTVIMNVHPSSFLPVDLVMDVGNPINPAIDIGQVEGGFVQGMGWLVLEELMWGDKQHPWVRPGHLFTKGPGTYKIPSVNDIPVDFRVALLADAPNTRAVHSSKAVGEPPFHLGASVFFALKEAVYAARSAAGRPGYFVLDAPATPERLRLLCADELVAPYADPDI

SEQ ID NO: 6775 - protein, 160 aa, Arthrobacter nicotinovorans
MNAFRLTVEVNGVTHATDVEPRRLLADFLRDDLHLRGTRVGCEHGVCGSCTVLLDGQPVRSCTVLAVQANNSRIETVESLQKDGQLHPLQRSFSKCHALQCGFCTSGFLMTLKPLYDDEDVTLDATSAREAISGNICRCTGYQQIVEATVDAFHCRDHND

SEQ ID NO: 6776 - protein, 507 aa, Saccharomyces cerevisiae
MTKSEQQADSRHNVIDLVGNTPLIALKKLPKALGIKPQIYAKLELYNPGGSIKDRIAKSMVEEAEASGRIHPSRSTLIEPTSGNTGIGLALIGAIKGYRTIITLPEKMSNEKVSVLKALGAEIIRTPTAAAWDSPESHIGVAKKLEKEIPGAVILDQYNNMMNPEAHYFGTGREIQRQLEDLNLFDNLRAVVAGAGTGGTISGISKYLKEQNDKIQIVGADPFGSILAQPENLNKTDITDYKVEGIGYDFVPQVLDRKLIDVWYKTDDKPSFKYARQLISNEGVLVGGSSGSTFTAVVKYCEDHPELTEDDVIVAIFPDSIRSYLTKFVDDEWLKKNNLWDDDVLARFDSSKLEASTTKYADVFGNATVKDLHLKPVVSVKETAKVTDVIKILKDNGFDQLPVLTEDGKLSGLVTLSELLRKLSINNSNNDNTIKGKYLDFKKLNNFNDVSSYNENKSGKKKFIKFDENSKLSDLNRFFEKNSSAVITDGLKPIHIVTKMDLLSYLA

SEQ ID NO: 6777 - protein, 340 aa, Solanum tuberosum
MVVLSQPLVENFSHIKTCKHNNTTSDHVYTGIIPVIDLLDPEANNLIIKACQEFGFFKVVNHGVPIETITKLENESINFFNLSQIEKDKVGPANPFGYGNKRIGSKGDVGWVEYLLFTTNPELNHNKSITIPGNSLLFWGLVKEYISAVRNMGCMVLEMIAEGLNIEPKNILSRMLSDEKSDSCFRLNHYPPCPELLQALSGRNLIGFGEHTDPQVISVGRSNNTSGLQISLKDGTWISVPPDPYSFFINVGDSLQAMSNGRFMSVRHRVIADCLKARVSMVYFGGPPLSEKIAPLSCLMEEPNEQILYNEFTWSEYKISAYKTRLGDNRLSLFEKNAQS

SEQ ID NO: 6778 - protein, 322 aa, Synechococcus sp. WH 7803
MAIAPDITALVGCTPMVRLNRLPKAWGCTAEIVAKLESFNPTASVKDRIAGAMVEAAESAGTIAPERTVLVEPTSGNTGIALAMVAAARGYRLILTMPDTMSTERRAMLRAYGAELQLTPGMEGMQGAIERARELVDEIPGAYLLQQFDNPANPAVHAASTAEEIWADTEGSLDAVVAGVGTGGTITGCARVLKERQPKLSVVAVEPAASPVLAGGVAGPHRLQGIGAGFIPPVLEMDLIDEIIAVSDDEAMDVGRRLAREEGLLCGVSSGAAVAAALRLGQRPAMEGRRIVVILASFGERYLSTPMFSTAAPLPARRDAQL

SEQ ID NO: 6779 - protein, 209 aa, Methanothermobacter marburgensis str. Marburg
MPLIGDKFPEMEVQTTHGLMKLPAEFKGRWFILFSHPADFTPVCTTEFVAFQEVYPELRELDCELVGLSVDQVFSHIKWIEWIEENLDTEIEFPVIADTGRVADTLGLIHPARPTNTVRAVFVVDPEGIIRAILYYPQELGRNIPEIVRMIRAFRVIDAEGVAAPANWPDNQLIGDHVIVPPASDIETARKRKEEYECYDLALPPQRKW

SEQ ID NO: 6780 - protein, 154 aa, Pseudomonas fluorescens PfO-1
MIAFTVNGERRELDEASPSMPLLWVLRDQLKLTGTKFGCGMGLCGACTVHLNGVAVRSCQLPLAAVAGHSITTIEGLSPSESHPLQLAWVAEDVPQCGYCQSGQIMSAAALLNTGAPVNDDSIRNAMSGNICRCGTYGRINKAIKRAANAPKEA

SEQ ID NO: 6781 - protein, 165 aa, Bradyrhizobium japonicum USDA 110
MNHSISLTVNGARRDFVLDDPRVTLLDLLRERLHLTGTKKGCDRGQCGACTILVDGKRINSCLALAVSHDGADILTIEGVARGDQLHPVQAAFIAHDGFQCGFCTPGQIMSAIGMMREAQAGDDPERIRECMSGNLCRCGAYAGIVDAVREAQERMDESNQRRSA

SEQ ID NO: 6782 - protein, 352 aa, Betula pendula
MKRMLSTQPLADSDPSFAQRIRDLPKHVPGTNIKNEVSQLIGRTPLVYLNKVTEGCGAYIAVKQEMMQPTASIKDRPAYAMMMDAEKRNLITPGKTTLIEPTSGNMGISLAFMAAMKGYKMVLTMPSYTSLERRVTMRAFGADLVLTDPTKGMGGTVKKAYDLLESTPNAFMLQQFSNPVNTQGAFETTGPEIWEDTNGQVDIFVMGIGSGGTVSGVGQYLKSQNPNVKIYGVEPTESNVLNGGKPGPHQITGNGVGFKPDILDMDVMERVLEVSSEDSVNMARQLALKEGLLVGISSGANTIAALRLARMPENKGKLIVTVHPSFGERYLSSVLFEELRKEAENMQPVSVD

SEQ ID NO: 6783 - protein, 419 aa, Streptomyces fradiae
MLRLTPFFHHDCVTAWPAEFDAVGGMQVQILRLSRELADRGVEQLVMTVGFPGLPRERVDRPGLRVRVTRAPLPRLRSELTGLVGLNQAWLAAVLTACAPLRRTWRPDLVHVHADGQLWALLAGPLVSRLVGAPYCLTLHCSRLASYEPMSRFDRLQHRLVAAAERYALRRARRVSTLTSRTADTVARLLPLDRALVDVLPDSVGDVRPVARPEAEEYVRSLGVPAGRPVVGWVGRVAHEKGWRDFVAMAERWDAGSGAPGAVFAVVGDGPQRERMREAVEAAGLADRFVFTGFLPHDAVPSVMTALDVLVMPSAHEELGGSALEAMVCGTPVAGYAVGGLRDTVGSVTPSLLVPRGDVAALTRAAGDAVTDAERHRKTVAAAVPDLLGRYGADTVERALEHYRLAVGRASGGGAGWAP

SEQ ID NO: 6784 - protein, 189 aa, Methylobacillus flagellatus KT
MTTSLINTEIKPFKATAFHNGEFITVTDADLKGKWAAVVFYPADFTFVCPTELGDIADNYDELQRLGVEVYSVSTDTHFTHKAWHDTSDTIRKIKFPMIGDPTGAISRNFGVLREDQGLADRGTFVIDPNGIIQAIEVTAEGIGRDAADLVRKIKAAQYVASHPGEVCPAKWKEGEATLAPSLDLVGKI

SEQ ID NO: 6785 - protein, 233 aa, Agrostis stolonifera var. palustris
MAAANAPFALVSRLSSPATRLPARAWRAATQRRGAGRTRPLTTASASQENRDNSVDVQVSQNGGNQQGNAVQRRPRVPDLTSLRSGWWTRCHPCEPCGRCWTRWTGCSTTPWGSPRQPFSGDGERAPRMPWDIMEDDKEVKMRFDMPGLSRDEVKVMVEDDTLVIRGEHKKEVGEGQGDGWWKERSVSSYDMRLSLPDECDKSQVRAELKNGVLLVTVPKTETERKVIDVQVQ

SEQ ID NO: 6786 - protein, 187 aa, Burkholderia xenovorans LB400
MPIINSQVKPFKAQAYHNGEFVTVTEESLKGKWSVFVFYPADFTFVCPTELGDLADRYAEFQKLGVEIYSVSTDTHFTHKAWHDTSDTIQKIKYPMVADPTLAISRNFDVLIEEEGLALRGTFVINPEGEIKVAEIHDNGIGRDAGELLRKVQAAQYIAAHPGEVCPAKWTPGAETLTPSLDLIGKI

SEQ ID NO: 6787 - protein, 373 aa, Frankia sp. EAN1pec
MRVLAVTNDFPPRPGGIQAYVHNFASRLPDDEIVVYAPAWRGAAEFDAAQRFPVVRHPTSLMLPTPDVFRRAREIARSEKCDTLWFGAAAPLGLLGAWLRRDLDARRVLASTHGHEVGWAALPGARQLLRRIGATTDVITYLTDYTRGRLGPAFGPHPDLARLPSGVDPSLFRPGEGRDETRRRYGLGSRPVVVCVSRLVPRKGQDMLIRALPALRRRIPGTALLLVGGGPYRQELTRLARENDVAKHVVFTGSVPWAELPAHYAAGDVFAMPCRNRRAGLEVEGLGIVFLEASATGLPVVAGRSGGAPDAVLDQRTGVVVDGRDPRALIRAVGDLLADPNRARSMGTAGRAWVELRWRWDVLASDLRDLLLA

SEQ ID NO: 6788 - protein, 758 aa, Arabidopsis thaliana; identical to SEQ ID NO: 3233

SEQ ID NO: 6789 - protein, 156 aa, Chlorobium tepidum TLS
MALLQAGQKAPEFTAKDQDGKEVSLRDYTGRKVVLYFYPKDDTPGCTKEACAFRDNLPNFEKVDAVVLGVSVDGQKAHRKFADKYELPFTLLVDDEKKIVEAYGVWGLKKFMGREYMGTNRVTYLIDEQGTIEKVWSKVKPETHTAEVLDWLQQKT

SEQ ID NO: 6790 - protein, 273 aa, Magnetospirillum magnetotacticum MS-1
MLMRDGAPCETCLTGSAYQSVRHACYRGSRLGTLAVARMIDRHRKAGTWRRDVDAFIALTDFARGRFVAAGLPAHRLFVKPNGLPDPGPPRDGPREGILFAGRLSPEKGVEILKAAAPLLAAPVAIAGEGPLRDALAGAPGLTLLGALPQADLRARMGRAAALVVPSLWYEGLPMVVAEAYAAGTPVIASRLGALAHLIEDGVTGLLVTPGDPVDLARAIERLSSHPDEARRMGRAAREAYLRHWTEEATTASLLAIYRTALAARAGADRASA

SEQ ID NO: 6791 - protein, 348 aa, Bradyrhizobium sp. ORS278
MQAEPFSAGDLDVIVPNLHRRYSGVTATNRMVAPKLARLVRAAWLGSYAPEGIARLRARDLLKVRGRRRPLIWHARRNDEMIVGVILRALGWPFKLLFTSAAQRHHSWITRGLIRRMDAIIATSDISASYLKRAATVITHGVDTEVYKPPADRAAAFAESGLPGRYAIGCFGRVRAQKGSDLFVAAMCRLLPKYPDFSAVLVGAVTPEQMPFAAELRKQIAAAGLEQRIVITGELDIADVQRWYQRLTIYAFTSRNEGFGLTLIEAMAAGAALVAARAGAAEIVVEEGVTGRLVPPGDVDALVAALEPLMQDPEAARVMGEKARTRVVEKFSLEAEAEKIAAVYRGLV

SEQ ID NO: 6792 - protein, 216 aa, Brassica napus
MPGITLGDTVPNLEVETTHKNFKLHDYFADSWTVLFSHPGDFTPVCTTELGAMGKYAHEFEQRGVKLLGLSCDDIQSHKDWIPDIEAFTPGSKVTYPIIADPNKEIIPQLNMIDPIENGPSRALHVVGPDCKIKLSFLYPSTTGRNMDEVLRALDSLLMAAKHKNKIATPVNWKPDEPVVISPAVSDEEAKKLFPQGFKTAKLPSKKGYLRVADVS

SEQ ID NO: 6793 - protein, 216 aa, Brassica napus; identical to SEQ ID NO: 6792

SEQ ID NO: 6794 - protein, 148 aa, Cyanothece sp. ATCC 51142
MALVRWEPFREIDSLQKEMNRLFDSFYPTGLANGDFDKLSFVPAAEMNETEEAIDLKLEIPGLEAKDLDVEVQADSVSIKGERKSEEKTEENGTTRTEFRYGKFHRVIPLPSRVQNNNVTAEYKDGILHLNLPKAEEERNKVVKVNLG

SEQ ID NO: 6795 - protein, 213 aa, Photobacterium sp. SKA34
MSKIYEDNSLTIGNTPLVRLNRVSNGKVLAKVEARNPSFSVKCRIGANMIWDAEKKGTLKEGVELVEPTSGNTGVALAFVAAARGYKLTLTMPESMSLERRKLLKALGANLVLTEAPKGMKGAIDKAEEIVNSDPSKYLLLQQFNNPANPEIHEKTTGPEIWDATDGEIDVFVSGVGTGGTLTGVSRFIKQQKGKAITTIAVEPLESPVITQT

SEQ ID NO: 6796 - protein, 197 aa, Kluyveromyces lactis NRRL Y-1140
MVAQVQKPAPEFKKTAVIDGVFDEVSLEKYKGKYVVLAFIPLAFTFVCPTEIIAFSEAAKKFEAIGAQVLFASTDSEYSLLAWTNVARKDGGLGPVDIPLIADTNHSLSRDYGVLIEEEGVALRGLFLIDPKGVVRHITINDLPVGRNVEEALRLVEGFQWTDKNGTVLPCNWTPGAATIKPEVDASKEYFSSVNKD

SEQ ID NO: 6797 - protein, 401 aa, Methanococcoides burtonii DSM 6242
MMYSNVKNDFKKYSGKNLLVIAPSYPNEDNTFIGGSFIKNQLESLKKHFDNIFVISPVLFSFNKLDKDKLCNNYRYDNINVYFPRSYYIPIFYFNKILIDNRLHVVEKIIKNENLKFDLIHAHFTWPSAYISTSLKEKYHVPTITTIHENAEWLVKEAGINSSLINNAWRNSDVLIRVNSKDLPILSEYNKNVISIPNGFSSKFKYIDKMECRGKLNLPKNKKIIFSLGGLIERKGFNYLIDAIKFVTKKQKDVLCFIGGNGPLKDALQKQIIDLNLQNNVKLVGFVTDELLSIWINSCDIFVLPSLSEGNPTVMFECLGCGKPYVGTGVGGVPEIITSDKYGLLVEPGNSQDLAEKIIIALNKEWDRDAILEYSDRFTWDNIALQTMDAYNLAIAKCKNS

SEQ ID NO: 6798 - protein, 376 aa, Frankia sp. CcI3
MRVLAVTNDFPPRPGGIQAYVHNFASRLPEGEIVVYAPAWKNAAAFDAEQNFPVVRHTTSLMLPTPDVLRRAREIARAEGCDTMWFGAAAPLGLLGARLRRDTAMRRMVASTHGHEVGWAALPGARQALHSIGTAADVITYLTDYTRARIRPAFGGHPTFARLPSGVDPSLFHPGHGREEMRRRHGLTGRRVVVCVSRLVARKGQDMLIRALPMVRRRVPDAALLIVGGGPRRGDLERLARENDVAEHVIMTGSVPWEELPAHYAAGDVFAMPCRSRLAGLEVEGLGIVFLEASATGLPVVAGRSGGSPDAVLHQHTGIVIDGTDLAQVVTTIGDLLADPDRAASMGAAGRAWVELRWRWDVLAQDLRTLLAGPDG

SEQ ID NO: 6799 - protein, 347 aa, Xanthobacter autotrophicus Py2
MPVAFVHPGPLDTPTGGYAYDRRVIAELAATGLDIAPLSLDGAFPTPSGAQVEAALARLAATPPETILLGDGLAFGALPADRLKALGRRLVALVHHPLALETGLSPELAEHLFQSEKAVLKAADAVITVSPETGRTLVARYGVSPERLTLAVPGTEPMARVPADGEPPRLIAVGSLTPRKGYDILFDALDRIADLDFSLAIAGAAHLDPPTAEMVAARAAVAPRGNIRLLGQLNRADLDAAYAQADIFVHPSLYEGYGMVLAEAMRRGLPVVCTTGGAAGETVPDGAGLKVPPGDAEAFAEALRSLIADPARRRAFADAAFAAGQQLPSWADTAAVIGQVLAKTSHT

SEQ ID NO: 6800 - protein, 98 aa, Glycine max
  misc_feature (61)..(61): Xaa can be any naturally occurring amino acid
  misc_feature (83)..(83): Xaa can be any naturally occurring amino acid
  misc_feature (89)..(89): Xaa can be any naturally occurring amino acid
LNREELEKMFEGMPAVFTGMLGGEELSEAYASGDVSVMPSESETLGLVVLEAMSSGIPVVXARAGGVPDIIPEDQDGKIGYLXTPGDLXDCLSKLSLF

SEQ ID NO: 6801 - protein, 577 aa, Oryza sativa Japonica Group
MVESASMVNENSENPYWKAIGYRVEEPRRDRAESMPSPSPSPVSRRPLDNGVVETRALTDTTLLRSLAAKGLAVRPGASDEHHTVRCDAVIVGSGCGGGVAAAVLASAGYKVVVVEKGDYFTKEDYSSIEGPSMERLFERGGVFCTSNVTTMIFTGATVGGGSAVNWSASIRTPAGVMQEWSREHGLAVFASPGYARAMDAVCERLGVTDACREEGFQNKVVRRGCDALGLRADAVPRNSSEGHFCGSCNFGCPTGDKKGTDTTWLVDAVERGAVILTGCKAEHFIVESNGGGGGRSKRCVGLVATCMSNGITKKLRVEAKRAQEPPHRPEPAPPPGVHGVGLLPGQHAEPHIPGKCYEGGIITSMHRVTERTIIETPALGPGAFAALVPWESGRDMKERMRRYARTVHAFALVRDRGAGSVDGEGRVRYAPSRDDAEELRAGLRRALRILVAAGAAEVGTHRSDGARLRCKGARDADVEAFLDEVTVEKGPMHSTTDKWSVLCSAHQMGSCRMGASPRDGAVDVAGESWEAEGLYVCDGSLLPTAVGVNPMITIQSIAYCVAKGIADSMAHGKEQR

SEQ ID NO: 6802 - protein, 947 aa, Arabidopsis thaliana [sequence omitted]

SEQ ID NO: 6803 - protein, 312 aa, Zea mays
FGRESSFQKSFLDPQARASQPLSPSPRKPIANSQTNPKPQSTPSPPHPLRAAMACSFSAAITVSSAPTPAARPLAAATQSVCIARSAVATTARPLRLAASRSARATRLVARASVVDDLPLVGNKAPDFEAEAVFDQEFINVKLSDYIGKKYVILFFYPLDFTFVCPTEITAFSDRYEEFEKLNTEVLGVSIDSVFSHLAWVQTDRKSGGLGDLKYPLVSDVTKSISKAFGVLIPDQGIALRGLFIIDKEGVIQHSTINNLAIGRSVDETMRTLQALQYVQENPDEVCPAGWKPGERSMKPDPKGSKEYFAAI

SEQ ID NO: 6804 - protein, 174 aa, marine gamma proteobacterium HTCC2143
MSVLVGKPAPDFTCSAVLGSGEMVDNFNLADTIKGKVGLVFFYPLDFSIICPSELLAVDHRMDTFKKLGVEVIGVSIDSHFTHKAWRNTAVNDGGIGKVSYTLAADINHDICRAYDVQSDGGMAFRGAFIIDQNGVVRSQTVNDLPLGRNFDEFIRVIEALQFYEEHGEVSPAG

SEQ ID NO: 6805 - protein, 293 aa, Pectobacterium atrosepticum SCRI1043
MTTLEQCIGNTPLVKLQRMTQGLKSEIWLKLEGNNPAGSVKDRAAFSMILQAENRGDITPGDRLIEATSGNTGIALAMIAALKGYRLRLLMPDNMSYERQTAMRAYGAELVLVNRKLGMEGARDRAKQMVLAGEGKTLDQFNNPDNSLAHFLTTGPEIWQQTAGKLTHFISSMGTTGTISGVSRYLKQQNPAICTVGLQPAEGSHIPGIRRWTPDYMPGIFRADLVDRILDMTQVDAENTLRQLARQEGIFCGVSTGGAVAGALRIAAENPGSVIVAIACDRGDRYLSTGVFD

SEQ ID NO: 6806 - protein, 240 aa, Nicotiana tabacum
MACKTLTCSAASPLVVNGVTASSRSNNRVAAPFSVFFPSTCNVKRPASRLVVEATGDNKDTSVDVHVSSGQGGNNNQGSTSVDRRPRKMSLDVSPFGLLDPMSPMRTMRQMMDTMDRLLEDTMTFPGRNRSSAVGEIRAPWDIKDDENEIKMRFDMPGLSKDEVKVSVEDDLLVIKGEYKKEETGDDNSWGRNYSSYDTRLSLPDNVEKDKIKAELKNGVLFISIPKTKVEKKVIDVQIN

SEQ ID NO: 6807 - protein, 204 aa, Nicotiana tabacum
LTCSAASPLVVNGVTASSRSNNRVAAPFSVFFPSTCNVKRPASRLVVEATGDNKDTSVDVHVSSGQGGNNNQGSTSVDRRPRKMSLDVSPFGLLDPMSPMRTMRQMMDTMDRLLEDTMTFPGRNRSSAVGEIRAPWDIKDDENEIKMRFDMPGLSKDEVKVSVEDDLLVIKGEYKKEETGDDNSWGRNYSSYDTRLSLPDNVEK

SEQ ID NO: 6808 - protein, 326 aa, Staphylococcus aureus subsp. aureus Mu50
MIEKSQACHDSLLDSVGQTPMVQLHQLFPKHEVFAKLEYMNPGGSMKDRPAKYIIEHGIKHGLITENTHLIESTSGNLGIALAMIAKIKGLKLTCVVDPKISPTNLKIIKSYGANVEMVEEPDAHGGYLMTRIAKVQELLATIDDAYWINQYANELNWQSHYHGAGTEIVETIKQPIDYFVAPVSTTGSIMGMSRKIKEVHPNAQIVAVDAKGSVIFGDKPINRELPGIGASRVPEILNRSEINQVIHVDDYQSALGCRKLIDYEGIFAGGSTGSIIAAIEQLITSIEEGATIVTILPDRGDRYLDLVYSDTWLEKMKSRQGVKSE

SEQ ID NO: 6809 - protein, 753 aa, Bradyrhizobium japonicum USDA 110
MPELNLTSAPAHLRHGSSIGQPLTRRDGLLKVKGQATYAADNHPPGMLFAVMAVSSIARGRVVSLDVSAAKRHPGVVDVMTPDHKPPLAIDPEIKTNPFVFRMEVLQSDEVRYANQPIAVVIAETLEAATEGAVLLAPRYEALPALVGLDAGESYVPPVVGVGNPTESHRGDVEAGLASAEKQIDAVYETPPQYHNAMEPHAIVASWDGDNLSVDMPTQGLMLSLGRIAELFGIAPDKIHIRSPFLGGGFGSKGLMSGPPTLGIMAAKLVGRPVKLVLRREQMYGPVGHRAPTRQRLRIGADGEGRLTALDHHARTVSSTFDDFYEPAADASHTLYAAPAIRTSHDAVRVNTGTPLFMRAPGEATGSIALESAIDEMAWACGIDPLAFRLKNYAEVEPITGKPFSSKALRACYAQGAARFGWAKRSLQPRQMRDDAGLLVGWGMGTATFPALMFQAEARAALRRDGTGAMEIGAHDMGQGAWTALAQIAADGLGLDIDRVTFKAGTSDLPDAGIAGGSAHTATAGAAIHSAGAAVIAKLAALATGDERSPLFGAGNAGVVARDGKLFRRDDESRGESYAEILARAGVAEVEARGTGAPNPAAMEEYAMHAHGAVFAEVKVDPELGQVRVTRMVGAFAAGRIVNPHLVKSQLFGGMIWGMSFALHEEAITDRRSGRIMNANLGEYHIPVNADVPPLDVITVEEHDPHVNALGIKGVGEIGITGSAGAVANAVWHATGVRVRRFPIRIEELLTQS

SEQ ID NO: 6810 - protein, 155 aa, Brassica napus
QTDILYDSGKSLNPAVDLGQIEGAFVQGLGFFMLEEYITDSEGLRLTDSTWTYKIPTVDTIPRQFNVEILNSGRHEKRVLSSKASGEPPLLLAASVHCATREAVKEARKQLRMWKGVNDSELMFQLPVPATMPVVKELCGLDIVESYLEWKSSVN

SEQ ID NO: 6811 - protein, 588 aa, Arabidopsis thaliana
MANVEADFRTSAVGWNLGSNDDELYTELWKACAGPLVEVPRYGERVFYFPQGHMEQLVASTNQGVVDQEIPVFNLPPKILCRVLSVTLKAEHETDEVYAQITLQPEEDQSEPTSLDPPLVEPAKPTVDSFVKILTASDTSTHGGFSVLRKHATECLPSLDMTQPTPTQELVARDLHGYEWRFKHIFRGQPRRHLLTTGWSTFVTSKRLVAGDAFVFLRGETGDLRVGVRRLAKQQSTMPASVISSQSMRLGVLATASHAVTTTTIFVVFYKPRISQFIISVNKYMMAMKNGFSLGTIIGSGDLSSQWPASKWRSLQIQWDEPSSIQRPNKVSPWEIEPFSPSALTPTPTQQQSKSKRSRPISEITGSPVASSFLSSFSQSHESNPSVKLLFQDPATERNSNKSVFSSGLQCKITEAPVTSSCRLFGFDLTSKPASATIPHDKQLISVDSNISDSTTKCQDPNSSNSPKEQKQQTSTRSRIKVQMQGTAVGRAVDLTLLRSYDELIKELEKMFEIEGELSPKDKWAIVFTDDEGDRMLVGDDPWNEFCKMAKKLFIYPSDEVKKMRSKSLLGDKGTIVNLESDQRTVHV

SEQ ID NO: 6812 - protein, 205 aa, Nicotiana sylvestris
LTCSAASPLSNVVNVSAASSRSNNRVTAPCSVFFPSACNVKRPASRLVAQATGDNKDTSVDVHVSSGQGGNNNQGSTSVQRRPRKMALDVSTFGLLDPMSPMRTMRQMMDTMDRLFEDTMTFPGSNRASTGEIRAPWDIKDDENEIKMRFDMPGLSKEDVKVSVENDVLVIKGEHKKEESGDDNSWGRNYSSYDTRLSLPDNVEK

SEQ ID NO: 6813 - protein, 464 aa, Mycobacterium tuberculosis CDC1551
MRIAQHISELIGGTPLVRLNSVVPDGAGTVAAKVEYLNPGGSSKDRIAVKMIEAAEASGQLKPGGTIVEPTSGNTGVGLALVAQRRGYKCVFVCPDKVSEDKRNVLIAYGAEVVVCPTAVPPHDPASYYSVSDRLVRDIDGAWKPDQYANPEGPASHYVTTGPEIWADTEGKVTHFVAGIGTGGTITGAGRYLKEVSGGRVRIVGADPEGSVYSGGAGRPYLVEGVGEDFWPAAYDPSVPDEIIAVSDSDSFDMTRRLAREEAMLVGGSCGMAVVAALKVAEEAGPDALIVVLLPDGGRGYMSKIFNDAWMSSYGFLRSRLDGSTEQSTVGDVLRRKSGALPALVHTHPSETVRDAIGILREYGVSQMPVVGAEPPVMAGEVAGSVSERELLSAVFEGRAKLADAVSAHMSPPLRMIGAGELVSAAGKALRDWDALMVVEEGKPVGVITRYDLLGFLSEGAGRR

SEQ ID NO: 6814 - protein, 415 aa, Herminiimonas arsenicoxydans
MSALRIAYLINQYPKVSHSFIRREILALERQGLAINRFALRGWEGDLVDAEDFVERERTRYILQRGVFGLLSSVLEIKLTSPIRYIKALGLAFRMSRRADRSLPYHLIYLAEACRLALWLKRDGVTHLHAHFGTNSAEVAMLASELSGIPYSLMIHGSEEFDKPEFIGLPEKLRRATFVAAITSFCRSQLYRSLPYAQWNKVHVVHCGLEPAFYNNVDMRLPARPRFICVGRLCEQKGQLLLIEAAAMLARKGLAFELVLAGDGEMRKEVEALIAKYNLESRVRITGWISSDQVKQEILDARAMVMASFAEGLPVVIMEAMSLQRPILSTWIAGVPELVIDGENGWLYPPGSVEELALAMERCLTTSTEDLSRMGRLARARVLERHDIDHEADKLHALFQQADDDKTRLTGAVKW

SEQ ID NO: 6815 - protein, 344 aa, Burkholderia vietnamiensis G4
MKIMLVTDAWEPQVNGVVRTLKSTSRELAALGHRVEMLTPLEFRTVPCPTYPEIRLSILPYRKLRARIDAFAPDALHIATEGPLGLAARRYARARKLPFTTAYHTRFPEYVQARFGIPLAATYRFLHWFHAPSRAVMAPTPVVKQDLEKFGFTNVVLWTRGVDLDIFRPMDSKVLNTARPIFLYVGRVAIEKNVEAFLRLDLPGSKWVAGEGPALAELKSRYPEANYLGVLSQAELAKVYAAADVFVFPSRTDTFGLVLLEALACGTPVAAYPVTGPIDVLGGGNAGAMHEDLQEACLEALKIERDTARAWAERFSWRAASEQFASHLQPLPKTAYSPAEGAAI

SEQ ID NO: 6816 - protein, 216 aa, Arabidopsis thaliana; identical to SEQ ID NO: 6308

SEQ ID NO: 6817 - protein, 378 aa, Xanthomonas campestris pv. campestris str. ATCC 33913
MRYAIVTETYPPEVNGVALTVHGLETGLRARGHQVDVVRPRQAADSTPADTVLVRGASLPRYPGLKFGLPATRRLTRHWATTQPDAIYVATEGPLGWSAMRAARRLGIPVATGFHTRFDEYLPDYGAAWLQGTALRWMRRFHNQAEATLVPTRELQQFLRGSGFERVQLLARAVDSLQFDPSRRDAALRAEWGIEGEGFAAIYVGRIANEKNLPLAIRAFRKLQQLRPKARFVWVGDGPAREKIAHENPDFIFCGIQRGDALARHFASGDLFLFPSRSETFGNVTLEAMASGVATVAFDYGAAREYLRNGQTGAAVEDDAAFVQAALTLTENDDVRQRMGHAAAQAMKKLHPDNVVSDFEALLLGITAARGRYVVDAA

SEQ ID NO: 6818 - protein, 187 aa, Bacillus subtilis subsp. subtilis str. 168
MSLIGKEVLPFEAKAFKNGEFIDVTNEDLKGQWSVFCFYPADFSFVCPTELEDLQEQYAALKELGVEVYSVSTDTHFVHKGWHDSSEKISKITYAMIGDPSQTISRNFDVLDEETGLADRGTFIIDPDGVIQTVEINAGGIGRDASNLVNKVKAAQYVRQNPGEVCPAKWEEGGETLTPSLDLVGKI

SEQ ID NO: 6819 - protein, 198 aa, Helicobacter pylori 26695
MLVTKLAPDFKAPAVLGNNEVDEHFELSKNLGKNGAILFFWPKDFTFVCPTEIIAFDKRVKDFQEKGFNVIGVSIDSEQVHFAWKNTPVEKGGIGQVTFPMVADITKSISRDYDVLFEEAIALRGAFLIDKNMKVRHAVINDLPLGRNADEMLRMVDALLHFEEHGEVCPAGWRKGDKGMKATHQGVAEYLKENSIKL

SEQ ID NO: 6820 - protein, 997 aa, Oryza sativa Japonica Group
MGVPAFYRWLADRYPQTVSDAVEEEPVELEPGAFVPVDLRRPNPNGLEFDNLYLDMNGIIHPCFHPEGRPAPTTYDEVFKSIFAYIDHLFGLVRPRKLIYMAIDGVAPRAKMNQQRSRRFRAAKDAADAAAEEERLRKEFEAEGRTLVAKEKSEAIDSNVITPGTPFMFVLSSALQYYIQLRLNHTPGWQSVKVMLSDSNVPGEGEHKIMSYIRLQRNLPGFDPNTRHCLYGLDADLIMLSLATHEVHFSILREVITMPGQHEKCFLCGQVGHLAAECRGSGQADKTVELPPIHKKKYQFLNIWVLREYLEKDLEIVDPPFKINFERVVDDFVFMCFFVGNDFLPHMPTLEIREGAINLLMNIYRREFTSMGGYLTDGGEVLLDRVEHFIQSVAVHEEQIFQKRARIQKAIQNNEERNRVQTENSEDNQYVDKAGFKTLGFPVKLGEPGYRVRYYAEKFKEEAELKPIDQVQRDVVQKYVEGLCWVMRYYYQGVCSWQWFYPYHYAPFASDLKCLAELEITFFLGQPFKPFDQLMGTLPAASSNALPKYYGDLMNDPNSPLKSFYPKDFEIDMNGKRFAWQGIAKLPFIDERRLLAETQKLEETLTDEERFRNRTMFDILYVRETHPLAAQIAFLYQMCSQSPNASYIIPIDPAASGGMNGFLCLSERNCYSIVVTSPVKGFNGIAQNRVLNATYLNPQYHKHIPEPPEGVIIPAKILKPSDFKPFPILWHEDNSRRQPRERPQVSGALSGSVLGEAAHRLVKNSLQIKSGYSAGLLDMPYRGAPYGPGNRPRPAGPLGYERGFVENSYNGHMSRSVPNSHPQFFGDAQANRQNVRILERPNYRNNDSAIHSGMSQLTIQDGPRMHQNNRMQNSGFSPNQPHPNQYAGFPPQRPMQNSGFTPQRPAQYSGFPHQRPVQIGLQHQPAVNGIQPPLPPSAWIGRPISGVPAGVPAKQDPRMAMDRQPKQDNSRSQHDKRQQATKVVYRVKGQGPNGLSE

SEQ ID NO: 6821 - protein, 153 aa, Helianthus annuus
MSIIPSFFTSKRSNIFDPFSLDTWDPFQGIISTEPARETAAIVNARIDWKETPEAHVLKADLPGMKKEEVKVEVEDGRVLQISGERCREQEEKDDTWHRVERSSGKFIRRFRLPENAKMDEVKAMMENGVLTVVVPKEEEEKKPMVKAIDISG

SEQ ID NO: 6822 - protein, 160 aa, Arachis hypogaea
MSMIPSVFGGRRSNILDPFSLDVWDPFQDIFSVAMSGPNASASAREASAIASTRVDWKETPEAHVFNVDLPGLKKEEVKVEVEDGRVLQISGERSREQEQKDDRWHRVERSTGKFMRRFRLPENANMDEIRAAMENGVLTITVPKVEEKKPEIKSIQISG

SEQ ID NO: 6823 - protein, 335 aa, Populus alba x Populus tremuloides
MVVASPTQIHGEKLLAIELPVIDLSGERSMVSNLIVKACEEYGFFKVRNHGVPHDIIARMENESSNFFAKTFDEKQKAGLANSFGYGCKNIGFNGDTGEVEYLLFNTNPLSIAERSKTISNDPTEFSSAMSGYIEAVRELACELLDLMAEGLWVPDRSVFSRLIRDDDSDSIIRLNHYPPMPILCKDKDSSSPCNHNRVGFGEHSDPQILTILRSNDVGGLQISLNDGVWVPVTPDPSAFCVNVGDLLQAMTNGRFVSVRHKALTNSYKSRMSMAYFAAPPLNARIAVPPEMVTPIKPALYRPFSWAEFKKAAFALRLGDSRLGLFRMEEYEQVA

SEQ ID NO: 6824 - protein, 809 aa, Silicibacter pomeroyi DSS-3
MKDEVTSREERIENLKGMGCSRKRVEDARFTQGKGNYVDDIKLDGMLFGDFVRSPYAHAKIVNIDTSAALEVPGVLAVLTAKDLEPLGLHWMPTLAGDKQMVLADGKVLFQGQEVAFVVAVDRYAAADGIEAVEVEYEELEVLVDPFKAMQSDVVLRPDTVAEDGSPADGAHGPRKHHNHIFTWEAGDKGPTFETIDNAEVVAEETMYYHRTHPCPLETCGCVASMDKVNGKLTLWGTFQAPHAIRTVVSLISGIEEHNIRVISPDIGGGFGNKVGAYPGYVCSVVASIVTGKPVKWIEDRMDNLMTTAFARDYHMTGRISATKEGKITGLHCHVTADHGGFDACADPTKFPAGFMNICTGSYDIPTAFLEVDGVYTNKAPGGVSYRCSFRVTEAVYFIERMIEVLAIELNMDAAELRRINFIKKEQFPYKAALGWEYDSGDYHTAWDKALKAVDYDGLRAEQAQRVEDFKAGKTRSLMGIGLSFFTEIVGAGPVKNCDILGLGMFDSCEIRIHPTGSAIARLGTISQGQGHATTFAQILASEIGLPADSITIEEGDTDTAPYGLGTYGSRSTPVAGAATAMAGRKIRAKAQMIAAYLLEVHDDDVEFDVDRFVVKGAPEKFKTMKEIAFAAYNQAIPGIEPGLEAVSYYDPPNMTYPFGAYVCVMDIDVDTGVPEIRRFYALDDCGTRINPMIIEGQIHGGLTEALAVALGQEIAYDDMGNVKTGTLMDFFLPTAWEVPNYETDYTVTPSPHHPIGAKGVGESPHVGGVPCFSNAIQDAFRPFGNRHTNMPHDHWRIWKTANELGLHD

SEQ ID NO: 6825 - protein, 196 aa, Helicobacter pylori
MLVTKLAPDFKAPAVLGNNEVDEHFELSKNLGKNGAILFFWPKDFTFVCPTEIIAFDKRVKDFQEKGFNVIGVSIDSEQVHFAWKNTPVEKGGIGQVTFPMVADITKSISRDYDVLFEEAIALRGAFLIDKNMKVRHAVINDLPLGRNADEMLRMVDALLHFEEHGEVCPAGWRKGDKGMKATHQGVAEYLKENSI

SEQ ID NO: 6826 - protein, 164 aa, Silicibacter pomeroyi DSS-3
MGKKQHYKITVNGKEEEFLAEPRELLIYTLRERLNITGPHIGCDTSHCGACTVTIDGKSVKSCTMFVAQADGKDITTIEGIGGPDNLHPLQTAFKEHHGLQCGYCTPGMITRAKKLLEENPNPTEEEIRFGMAGNICRCTGYQNIVKSIRAAAAEMNAAKEAAE

SEQ ID NO: 6827 - protein, 1226 aa, Oryza sativa Indica Group; identical to SEQ ID NO: 2913

SEQ ID NO: 6828 - protein, 368 aa, Azoarcus sp. EbN1
MHVCDVTMFYAPQSGGIRRYLQEKRRWLQARAQYRHSLVLPSRAAAGEWVMEIPSVPLPFSHGYRLPIATQPAVRALLSLRPDIIEAGDPYHLAWAALDAGQALGVPVTGFYHSDLPRLARKLGGAPAERLAEAYVRRLYSQFDAVLAPSTCMVERLRALGVGRVHRQPLGVDTAVFRPERRDDAWRMRLGVRAGDRLLVFVGRFAPEKNLPDLYAALDRLGPGHVLVLVGSGPAASRPDVRVVPFIGDTPRLASLIANCDVFVHAGDQETFGLAALEAMACGVPVVAVRAAALAELVDDEVGAAVPPEVPRGAAMADAVSAILARDLAPLRLAARRRAQRHDWQRVMPEIVARYAALCGQATHTVTC

SEQ ID NO: 6829 - protein, 167 aa, Oryza sativa; identical to SEQ ID NO: 4596

SEQ ID NO: 6830 - protein, 241 aa, Petunia x hybrida
MACKTLTCSASPLVSNGVVSATSRTNNKKTTTAPFSVCFPYSKCSVRKPASRLVAQATGDNKDTSVDVHVSNNNQGGNNQGSAVERRPRRMALDVSPFGLLDPMSPMRTMRQMMDTMDRLFEDTMTFPGSRNRGTGEIRAPWDIKDDENEIKMRFDMPGLSKEEVKVSVEDDVLVIKGEHKKEESGKDDSWGRNYSSYDTRLSLPDNVDKDKVKAELKNGVLLISIPKTKVEKKVTDVEIK

SEQ ID NO: 6831 - protein, 704 aa, Candida tropicalis
MNTFLPDVLEYKHVDTLLLLCDGIIHETTVDQIRDAIAPDFPEDQYEEYLKTFTKPSETPGFREAVYDTINSTPTEAVHMCIVLTTALDSRILAPTLTNSLTPIKDMTLKEREQLLAAWRDSPIAAKRRLFRLISSLTLTTFTRLASDLHLRAIHYPGRDLREKAYETQVVDPFRYSFMEKPKFDGTELYLPDIDVIIIGSGAGAGVMAHTLANDGYKTLVLEKGKYFSNSELNFNDADGMKELYQGKCALTTTNQQMFILAGSTLGGGTTVNWSACLKTPFKVRKEWYDEFGLEFAADEAYDKAQDYVWKQMGASTEGITHSLANAVVVEGGKKLGYKSKEIEQNNGGHPDHPCGFCYLGCKYGIKQGSVNNWFRDAAAHGSKFMQQVRVVQILHNKGVAYGILCEDVETGVKFTISGPKKFVVSAGSLNTPTVLTNSGFKNKHIGKNLTLHPVSTVFGDFGRDVQADHFHKSIMTSLCYEVADLDGKGHGCRIETILNAPFIQASLLPWRGSDEVRRDLLRYNNMVAMLLITRDTTSGSVSADPKKPDALIVDYDINKFDKNAILQAFLITSDMLYIEGAKRILSPQAWVPIFESNKPKEQRTIKDKDYVEWRAKAAKIPFDTYGSAYGSAHQMSTCRMSGKGPKYGAVDTDGRLFECSNVYVADASVLPTASGANPMISTMTFARQIALGLADSLKTKPKL

SEQ ID NO: 6832 - protein, 536 aa, Delftia acidovorans
MSTSQNSQPIRFFHRGEVVEVQGPHPTRSVLQWLREDAHCTGTKEGCNEGDCGACTVVIGELAEAGDEQAVNGLRLQTVNACIQFLPSLHGKALFTVEDLKSQCAGKSACAGKPAGPQSLHPVQQAMVECHGSQCGFCTPGIVMTLWSAYEHHQQQGSEPTRQQLADELSGNLCRCTGYRPILDAGQRMFDLPAVRLDTAPVVAALQGLQAEAGDAGLNYAAPQGLRTDFFHAPRTLADLASLCEAKPKARIVAGSTDVGLWVNKQFRDLGDMIYVGDVAEMKRIEVRPDAEGGELYIGAGASLESAWSALVQRWPSLTDVWLRFASTPIRHAGTMGGNVANGSPIGDSPPVLMALDAQIELRKGERVRRMPLTDFYLDYMKNQLEAGEFVQALAVPLAAMQRQVRGYKISKRFDCDISALCAGFAIELDGEIVQSIRLAFGGMAATVRRAAAAEAALLGKPWSPENVKAAQAALAQDFKPMSDMRASADYRLKVAQNLIQRLWLETRADQPQSTEATSVWSVMPHVVPAAVEQGV

SEQ ID NO: 6833 - protein, 185 aa, Vibrio campbellii AND4
MINTQIKPFAATAYKNGEFVEVTEQDVLGKWAVFFFYPADFTFVCPTELGDLADHYEELQKRGVEVYSVSTDTHFTHKAWHDSSDTIGKIQYYMLGDQTGNITNNFGVMREGQGLADRATFLIDPEGTIQTMEITAEGIGRDAEDLLRKVKAAQYVAAHPGEVCPAKWKEGEETLAPSLDLVGKI

SEQ ID NO: 6834 - protein, 184 aa, Ralstonia metallidurans CH34
MIATQALSMNINGKDVGPLEVPVGLMMIDFLHEYVNLTGSRLGCGQGVCHACVAILDHPDGTSETIRTCITGAHFFQGKRVRTVEGHGKRNDKGEVVEMTPVQQAFLKHFSFQCGYCTPGFVNGATVLVEKLKREPVAADKVEQTIMSSMDEHICRCTGYVRYYEAIKDVVTSTPGLVKGKGAQ

SEQ ID NO: 6835 - protein, 808 aa, Delftia acidovorans
MNHPHELTNELVAEAFADYRKNQAYRIDEVTEAKAHDQGARVGVSRKHESAHLHVAGEAAYIDDLPELEGTLQCALGLSPVAHGRLTALVLEAVRAMPEVVEVITAADIPGVNDCGSIIHDDPILCDGEIRYVGQPLFAVIARSRDAARRAAALAKAAATISELPPVLTPRQAHELGQYVMPPMHLERSTREGGARAAMDAAPHRLKGSFDVGGQEQFYLEGQISYATPKEDGAVHIHCSTQHPSEMQHLVAHALGVASHSVHVECRRMGGGFGGKESQSALFACVAAVAATRLQKPVKLRLDRDDDFMITGRRHCFWYEYEVGYDDEGRVLGAEISMVSRAGHSADLSAPVMTRALCHFDNTYWLPDVLMHGYMGKTNTQSNTAFRGFGGPQGAIAIENILDTVARSLGRDPLDVRRVNFYGKGERNITPYEQVVTDNVIHELVAELEESSDYRARRAAVNAFNAGSAVLKRGLALTPLKFGISFNVAHFNQAGALVHIYTDGSILVNHGGTEMGQGLNTKVAQVVAHELGVAFENVRVTATDTSKVANTSATAASTGADLNGKAAQDAARQLRERLAECAARLHGGDAGDVRFANNAVQVNGQNVPFAELVRAAYLQRVQLWSDGFYATPGLHWDGKRMKGHPFFYFAYGAAVSEVVIDTLTGEWKLLRADVLHDVGRSLNPAVDVGQVEGAFIQGMGWLTTEELVWHPQTGKLTTHAPSTYKIPTANDCPPVFNVRLFEGDNYEDSIHRSKAVGEPPLLLPFSVFFAIRDAVSAAGEHRANPPLQAPATSEAILRAVEAVQGHTG

SEQ ID NO: 6836 - protein, 188 aa, Bifidobacterium longum DJO10A
MMTLLQHELTDFKVNAFQNNEFHEVTKDDVLGHWSLFFFYPADFTFVCPTELEDLAKNYAKFKEIGCEIYSVSCDTHFVHKAWHDANEKIAKIEYPMLADPTALLAKDLDTYNEADGMAERGDFIVSPEGKVVAYEVISSNVGRNAEELLRRVQASQFVYEHGDQVCPANWTPGEETIEPSLDLVGQL

SEQ ID NO: 6837 - protein, 413 aa, Corynebacterium glutamicum ATCC 13032
MEIIRPMRVAIVAESFLPNVNGVTNSVLRVLEHLKANGHDALVIAPGARDFEEEIGHYLGFEIVRVPTVRVPLIDSLPIGVPLPSVTSVLREYNPDIIHLASPFVLGGAAAFAARQLRIPAIAIYQTDVAGFSQRYHLAPLATASWEWIKTVHNMCQRTLAPSSMSIDELRDHGINDIFHWARGVDSKRFHPGKRSVALRKSWDPSGAKKIVGFVGRLASEKGVECLAGLSGRSDIQLVIVGDGPEAKYLQEMMPDAIFTGALGGEELATTYASLDLFVHPGEFETFCQAIQEAQASGVPTIGPRAGGPIDLINEGVNGLLLDVVDFKETLPAAAEWILDDSRHSEMCAAAWEGVKDKTWEALCTQLLQHYADVIALSQRIPLTFFGPSAEVAKLPLWVARALGVRTRISIEA

SEQ ID NO: 6838 - protein, 327 aa, Hyphomonas neptunium ATCC 15444
MAGTVKLEGGVTLDGPRGRIYGSILETVGATPLVRAEKFAKAEGVDADILFKLEFFNPLASVKDRIGLAMILGLEAEGKLKPGGVLIEPTSGNTGIGLAFVAAAKGYRLILTMPESMSVERRKMLAYLGAELVLTPKEKGMGGAIARANELLAEIPGAVSPSQFDNPANPAIHEKTTAEEIWSDTAGAVDAIVSGIGTGGTFTGVGRVLKPRKPSLKMFAIEPEASPVLSGGAPGPHMIQGIGAGFVPGNADTSLIDEIVKVSNEESFAMARKLAKTEGIPGGISSGAAAAAAVRIGKRPEMAGKTIVVILASFAERYLSTALFDGV

SEQ ID NO: 6839 - protein, 316 aa, Legionella pneumophila str. Lens
MIYPNILATIGHTPVVKINRLGKDLECELYAKCEFFNPGGSVKDRIGYEMVVKAEKEGRIKPGDTLIEPTSGNTGIGIALAGAVLGYKVIITMPEKMSQEKQSVLERLGAIIYRTPTEAAYNDPDSHISLAKKLQAEIPNSHILDQYANPNNPNAHYFGTAQEIIDDFGKDLHMVVAGVGTGGTITGIAKRLKEFNPAIKIIGADPEGSILGGGTEVKSYHVEGIGYDFFPDVLDNTLIDAYIKTNDADSFRTARRLIKEEGLLIGGSCGAAMWAALQAAKSLSKGQKCLVILPDSIRNYMSKFANDEWMKEMGFL

SEQ ID NO: 6840 - protein, 629 aa, Mycobacterium tuberculosis H37Rv
MSRLADRAKSYPLASFGAALLPPELGGPLPAQFVQRVDRYVTRLPATSRFAVRAGLASLAAASYLTTGRSLPRLHPDERARVLHRIAALSPEVAAAVEGLKAIVLLANGADTYAHELLARAQEHDAARPDAELTVILSADSPSVTRADAVVVGSGAGGAMVARTLARAGLDVVVLEEGRRWTVEEFRSTHPVDRYAGLYRGAGATVALGRPAVVLPMGRAVGGTTVVNSGTCFRPSLAVQRRWRDEFGLGLADPDQLGRRLDDAEQTLRVAPVPLEIMGRNGRLLLQAAKSLGWRAAPIPRNAPGCRGCCQCAIGCPSNAKFGVHLNALPQACAAGARIISWARVERILHRAGRAYGVRARRPDGTTLDVLADAVVVAAGATETPGLLRRSGLGGHPRLGHNLALHPATMLAGLFDDDVFAWRGVLQSAAVHEFHESDGVLIEATSTPPGMGSMVFPGYGAELLRWLDRAPQIATFGAMVADRGVGTVRSVRGETVVRYDIAPGEIAKLRVALQAIGRLLFAAGAVEVLTGIPGAPPMRSLPELQDVLRRANPRSLHLAAFHPTGTAAAGADEQLCPVDATGRLRGVEGVWVADASILPSCPEVNPQLSIMAMALAVADQTVAKVVGVR

SEQ ID NO: 6841 - protein, 991 aa, Schizosaccharomyces pombe
MGVPALFRLLSRKFAKVITPVIEAPTEKLPDGTEIEPDLSLPNPNGVECDNLYLDMNGIVHPCSHPEDRPAPETEDEMMVAVFEYTDRILAMVRPRQLLFIAIDGVAPRAKMNQQRSRRFRSSREAALKEEELQAFIEEAKQQGIPIDENATKKKSWDSNCITPGTPFMDTLAKSLRYYIINKLNSDPCWRNVRFILSDASVPGEGEHKIMEFIRSQRVKPEYDPNTHHVVYGLDADLIMLGLATHEPHFRVLREDVFFQQGSTKKTKEERLGIKRLDDVSETNKVPVKKPFIWLNVSILREYLEVELYVPNLPFPFDLERAIDDWVFFIFFVGNDFLPHLPSLDIRDGAVERLTEIWRASLPHMGGYLTLDGSVNLARAEVILSAVGNQEDDIFKRLKQQEDRRNENYRRRQQRESNQESESYVDNVVIQRSVETQSTEVVTSSKSTSVDTKPPKKTQKIDAPAPVDLVNLSEKTSNRSLGATNRELINNRAANRLGLSREAAAVSSVNKLAASALKAQLVSNETLQNVPLEDSIASSSAYEDTDSIESSTPVVHPIDTKVSNVGQKRKAPDSTEENENTDTVRLYEPGYRERYYEQKFHISPDEPEKIREAVKHYVHGLCWVLLYYYQGCPSWTWYYPYHYAPFAADFKDLASIDVKFELNQPFKPYEQLLGVLPAASKNNLPEKLQTLMTDENSEIIDFYPENFTIDLNGKKFEWQGVALLPFIDENRLLNAVSKIYPQLTEEESKRNEDGSTLLFISEHHPMFSELVKQLYSKKRQGKPLKLSGKMAHGLFGKVNTNDSVIPNVSVQCPIDVTSADALQKYGSIDDNQSISLVFEVPKSHFVHKSMLLRGVKMPNRVLTPEDINQVRAERSFSSRRNNGNSYRGGHQSYGVRRSYQSQSYSSRQSYTGVTNGFANGGVQPPWSGNGNFPRSNASYNSRGGHEGYGGRSRGGGYSNGPPAGNHYSSNRGKGYGYQRESYNNNNRNGYY

SEQ ID NO: 6842 - protein, 322 aa, Pectobacterium atrosepticum SCRI1043
MSKIYEDNSFTIGHTPLVRLNRIGNGRILAKVESRNPSFSVKCRIGSNLIWDAEKRGVLKPGIELVEPTSGNTGIALAYVAAARGYKLTLTMPETMSIERRKLLKALGANLVLTEGAKGMKGAIAKAEEIVASDPSRYLLLQQFSNPANPEIHEKTTGPEIWEDTDGEVDVFISGVGTGGTLTGVSRYLKNTKGKAIISVAVEPTDSPVISQALAGEELKPGPHKIQGIGAGFIPGNLDLELIDRVEKVTNEEAISTARRLMEEEGILAGISSGAAVAAALNLLKEKEFDGKTIVVILPSSGERYLSTALFADLFTEQELQQ

SEQ ID NO: 6843 - protein, 303 aa, Salmonella enterica subsp. enterica serovar Paratyphi A str.
MNTLEQTIGNTPLVKLQRLGPDNGSEIWVKLEGNNPAGSVKDRAALSMIVEAEKRGEIKPGDVLIEATSGNTGIALAMIAALKGYRMKLLMPDNMSQERRAAMRAYGAELILVTKEQGMEGARDLALAMSERGEGKLLDQFNNPDNPYAHYTTTGPEIWRQTSGRITHFVSSMGTTGTITGVSRFLREQEKPVTIVGLQPEEGSSIPGIRRWPAEYMPGIFNASLVDEVLDIHQNDAENTMRELAVREGIFCGVSSGGAVAGALRVARATPGAVVVAIICDRGDRYLSTCVFGEEHFSQGAGI

SEQ ID NO: 6844 - protein, 300 aa, Ralstonia solanacearum GMI1000
MAYPTIEDTIGNTPLVRLQRIPGEDNARRGNVILGKLEGNNPAGSVKDRPALSMIKHAETRGRIKPGDTLIEATSGNTGIALAMAAAIRGYKMVLIMPEDLSVERRQSMAAYGAEIVLTPVKGGMEYARDLADAMERDGKGVILDQFANPDNPLAHYEGTGPEIWRDTEGRITHFVSAMGTTGTITGVSRFLKEKNPAIQIVGAQPAEGSRIPGIRKWPEAYMPKIYDPKHIDRTESVSQSDAEHMARRMAREEGIFCGISAAGALCVALRVAEAVENATIVFVVCDRGDRYLSTGVFPA

SEQ ID NO: 6845 - protein, 237 aa, Brassica napus
PRVRRAADLTLVPSAAIGKDLVAAGATAANQLRLWNKGVDSESFNPRFRSQEMRIRLSNGEPEKPLVIHVGRIGVEKSLELLKSVMDKLPEARIAFIGDGPYREDLEKLFTGMPAVFTGMLQGEELSQAYASGDVFVMPSESETLGLVVLEAMASGLPVVAARAGGIPDIIPEEQEGKTGFLFNPGDVEDCVTKLRTLLEDSETRDIIGKAAREETEKYDWRAATTKIRNEQYGAAI

SEQ ID NO: 6846 - protein, 765 aa, Xanthomonas campestris pv. vesicatoria str. 85-10
MNARIPDLSDSALTPPVADSGTGYRPTGTGVTRIDGRAKVTGQARYAAEWPVPDLAYGVVVNSSIAKGEIVAFHLDAARAVPGVLEIVTHENRPHMRGMDLFYKDMTAPAGSPFRPLYDNKILYSGQPIALVVAETFEAARHAAHLVEVELLQDPHDTNLMTNLDRAHAPKPLKAGFSPPPKDKGDPQSAFDNAACQVQADYYSGVEHHNPMELFASTVIRDADGHFTIYDKTQGSQNSRWYVSHVFGLSKRKVTVRNPYVGGAFGSGLRPQYQLPLAVMASILLDRSMRVVLTRQQMFTFGHRPETLQRLKLGADRDGTLRSVWHEAIAETSRIEDYVEVVVNWSGQLYACDNVHLGYKLVSLDQYSPIDMRAPGAAHGVHALEVAMDELAYEVGIDPLALRLKNYAEVNPADDKPYSTKALRQCYEQGAERFGWAQRPLQPRARKEGSEWVGWGMATGQWDAMQMFARAHAALHADGRLVVSSAASDIGTGTYTVMAMIAAEALGLPLEQVTFQLGDSTLPVAPIEGGSSHVTTVGSAVDGVCAKLRGRLLRLAQALPDSRFAKAKPDDVVFADGTLALRADAGSAIALTDLLRTAGLEQIEDKFLLLPNVLKQRKYTRATHGAVFVEVRVDEELGTVRVTRVVSAVAAGRILNPITARSQIVGGVVWGIGQALHEHTQSDHRFGRFMNHDLALYHVSANADIHDIDVIFADEDDRVVSSLGAKGVGEIGLVGVSAAICNAIFHATGKRIRSTPMTPDKVMAD

SEQ ID NO: 6847 - protein, 156 aa, Rickettsia akari str. Hartford
MTLELGKKVPDLSLHIGKDKVIKLSDLKGKFIVLYFYPKDDTPGCTIEAQDFNKLKPEFDKLNTVIIGVSKDKLDSHDKFKEKYSLGFDLASDANSNLCEQLGVWVEKSMFGKKYMGIDRATFLLDNEGIVKHIWSAVNAKNHAQEVLETLRTILS

SEQ ID NO: 6848 - protein, 192 aa, Xanthomonas campestris pv. vesicatoria str. 85-10
MTATPATAHDTAPATATTSAPTYPVNLRINAQPYHLQLEAWVSLLDLLRDRLDLTGTKKGCDHGQCGACTVLVDGRRINSCLTLAVMQDGADITTVEGLADGDALHPLQRAFIANDAFQCGYCTPGQLCSAVGLINEGKAHDRDQVRELMSGNICRCGAYPQITDAVMEVMGKPSDSSDSAATPWTPGTVPA

SEQ ID NO: 6849 - protein, 173 aa, Nocardioides sp. JS614
MIPTADPSADDVGADLVAVTCTVNGRSAGFSVPPHRTLMDTLRYELGLTGTKTCCAEGECGACTVIVDGVTVNSCLMLAAEAEGCDILTVEGLGAGEPSGLCDLQESFLQTGAVQCGFCIPGQVMAAEHLLRANPDPSVEEIREGMSGNLCRCAGYQRIVAAVELTSRKRATR

SEQ ID NO: 6850 - protein, 212 aa, Pseudomonas putida KT2440
MSLKLGDIAPDFEQDSSEGKIRFHEWLGNSWGVLFSHPADFTPVCTTELGLTAKLKDEFAKRGVKAIALSVDPVDSHHKWIDDINETQNTVVNFPIIADADRKVSDLYDLIHPNASDTLTVRSLFIIDPNKKVRLTITYPASTGRNFNEILRVIDSLQLTDNHKVATPGNWQDGDEVVIVPSLKDEEEIKQRFPKGYRAVKPYLRLTPQPNR

SEQ ID NO: 6851 - protein, 771 aa, Nocardioides sp. JS614
MIEQQGSEREALRTVGEPIRRYGGAARVAGQQEFLADLHFPDAAAVALVTLPVACASVTGVDGKRAMEMPGVIAVVSAADLPQPVPRFGISHQDRPVLADGEVLFHGEPVAAVVAETLDQAEAGAREVEVTFEEKTGVYTVDGALAAGAPLVRDPSLRPVEDENRDSNVLETALYEWGDTVAAAGEAAVIVENTYTFPMVTHFPIEPGGTVAVPTGAGGLDIYSPVQHPYLLQRTIATVTGLPLSQVRVFAPDPGGGFGGKQTPRLEPLLAFLALRTGRTCRLVLSLEQTFQMMRRAACRVQARTGFAGDGALIFHELECDFLIGAYADVAPRVMTKGSYVGAGPYRIPRVRTASRAVLSNTTPSTAFRGFGAPQVAWATESQLDAGARALGLDGLQIRRRNLVNMGEAFFRGPYEATADGHWHEALEKAAELVGWGQPLAPGRGRGIAVAIKPGATSGLSQSLVRFLADGSAIAYAGTSDMGQGARTLWQQILADELGSPLDKIRVVSGDTGVVPFDLQTSASRSTVFMGNAVLEACRDIRKRVLALYAESTGIDEELLSEAPGVLITPDGELTLLEASRIALGALGGEFVGQGTARMRGRKGHPLGGDAAFYEFNCTAIEVEVDLETGELLLHRHVSVSDVGTELNPIQVTSQDEGASIMGLGHSQMEQLLLDDHGVIRNLGALDYRIPTFKDVPVELITHGIENHDGPGPYGSKGISEGALLCTAGALGSAVSDAIGTPIRDLPLTPERVWTALHPDVTGRPGGEEHT

SEQ ID NO: 6852 - protein, 296 aa, Saccharophagus degradans 2-40
MEYPTIEAIIGNTPLVRLQRLPGCEKNTVLVKLEGNNPGGSVKDRPALSMIQRAEAAGAIKPGDTIIEATSGNTGIALAMVAAVKGYNMILIMPDHMTEERKAAMTAYGAKLILVSKAEGMEGARDLAQAMASRGEGVVLDQFSNTDNPLAHFTGTGPEIWQQTGGTVTHFVSSMGTTGTIVGTSKFLKSQNPNVQVVGLQPAEGAAIPGIRAWPQEYMPTIFTDENIDSVVQMSQQKAEETMRLLAKKEGVFCGVSSGGAVAAALDIAASTEGAVIVAIICDRGDRYLSSGVFNS

SEQ ID NO: 6853 - protein, 351 aa, Pseudomonas aeruginosa UCBPP-PA14
MRLLIVSDAWLPQVNGVVTSLLALQRELELLGHQVRVLSPADFRCLPCPSYPEIPLAWNLWRLGGLIEAFAPDAVHLATEGPLGWAARRWLGKRGLDFTSAIHTRFPEYLRDRCPWLPLSWGYAFLRAFHRPSRAVLVSTPRLRDEFCAWRFQHLRLWRKGVDTELFHPAETTPAEERPPVFLYVGRLATEKNLEAFLDLELPGEKWLVGDGPQRAALEQRYPQARFLGYRHGRALADAYRAASVLVFPSLTDTYGLVMLEALACGVPVAAFAVPGPLDVLQQGVTGVMHEDLGEACRQALALDRQACGRWAREQSWRVSAEEFLALQASGPRTAPEWRDELPAALDELRG

SEQ ID NO: 6854 - protein, 150 aa, Picrophilus torridus DSM 9790
MELLKVGDTAPDFETVDQNGKTVKLSDFRGMPVVLYFYPKDNTPGCTVEAKNFRDNMDIFDSRVKVIGVSVDSQESHMKFHEKLNLNFDLLSDKSKEIVKKYGVLGVSTAKRVTYIIDQNGKIAHVFEKVKPDGHAKEVYEKLKELKLIN

SEQ ID NO: 6855 - protein, 381 aa, Nostoc sp. PCC 7120
MRLGIVTHNVIKGDGQGRVNYEIAQEAIRRGHRVILLASQVAPELQQSEQVNWVAISVKQWPTELLRNLIFAFISANWLHKHRSQVDLVKINGAITHASGDVNAVHFVHSSWLNFSSSKAQSNSAKTTRSRRIFYNFYQWLYTVLNARWEKKAFRRARVVVAVSSRVAEDLQAIGVAPERIRVIVNGVDLQEFSPGNNQRSRWGLPAGVPLALFAGDIRISRKNLDTVLKALVNVPDLHLAVAGITEGSPYLQLAQSLGLDERVHFLGLRRDVPELMKAVDFFVFPSRYEPFGLVVIEAMASGLPVITASSTGAADLLTPESGIVLADSDDVEALAQALSLLASDRTLREQMGQVARTIAEQHSWTNMAQRYIDLFEELHQ

SEQ ID NO: 6856 - protein, 179 aa, Coxiella burnetii RSA 493
MIKIGEQFPSFSLKAVISNDVNKAFTEINEKSYANKWLVLFFWPKDFTFVCPTEIAEFGRLNGEFADRDAQVLGASVDSEFVHLAWRREKEELSQLPFPMLSDIRRDLSQRLGILNEKEGVAERATFIVDPNHIVRFVMVNDLNVGRNPQEVLRVLDALQTDELCPCNWQQGEETIVVA

SEQ ID NO: 6857 - protein, 310 aa, Chromobacterium violaceum ATCC 12472
MRIANTITDLIGNTPLVKLNRVTEGVGATVVAKLEFFNPAHSVKDRIAVAMLDAAEQAGKIGPNTVIVEPTSGNTGIGLAMVCAARGYKLVITMPETMSKERRQLLKAYGAELILTPGPDGMGGAIAKAKALVDEFPDTYFMPQQFENPANPEIHRHTTAEEVWNDTDGKVDIFVAGVGTGGTITGVGEVLKARKPGVQIVAVEPDASAVLSGSPKGPHPIQGIGAGFVPAILNTGIYDEIIRVKNEDALQTAREVATKEGILVGISSGAAVWSALQLAKRPENAGKLIVVVIPSFGERYLSTVLFEHLG

SEQ ID NO: 6858 - protein, 452 aa, Thermosynechococcus elongatus BP-1
MQALSTRTAKNTLPRAFAMPQPQVPARQPIALISVHGDPAADVGHESAGGQNIYVRQLGEALAAAGWHVDMFTRKTDPNDPDVIEHSPHCRTIRLQAGPLTYIPREKLFETLPKFVEAFKAYHAKYGYPLIHTNYWLSGWVGWQLRQQFNFQWLHTYHSLGVVKYQVASEQAQRDETRLMVEKAILENADCVIVTSPQEEAYLRRWVSKAGQTRLIPCGTNLKLFYPVADARAQLNLPADEPIVLYVGRFDRRKGIETLVAAMAQIPQGQLLLVGGSDPQRSDGAERRRIEGLVQEYNLGDRVTFVGQIDHEYLAVYYSAANVCVVPSYYEPFGLVAIEAMACGTPVIASAVGGLQFTVIPEETGLLVPPQDANALANAIQRILADPAWARTLGKNGRERVQALFNWEAIALQMGQLYRQLFAASLMGNSPRLEMVKNTASLAAVTKAALAS

SEQ ID NO: 6859 - protein, 295 aa, Triticum aestivum
  misc_feature (278)..(278): Xaa can be any naturally occurring amino acid
PRVRVNLRCPMTGSRIKVAGRFKPCVHMGCFDLEAFVELNQRSRKWQCPICLKNYSLENLIIDPYFRRRTSLIKSCGDDISEIDVKPDGSWRAKGGAELKDLMQWHLPDGTLCMSTGTGPKPNMGVVKQEIKEEPLPENKGSRLKLGIRRNNNGKWEISKKGDVNLKPTSYNDQSRDFENGKCVTHTSNTNHEDAKGGSYNSEPGQSDHPTSSVYDLNSSPGDEHVPIVLSDSDDENTTVLSPSAVNCGAANDTGYEFPPPNPLDTSGGPDETSFFPXENFDDLGLSFWGVSFDY

SEQ ID NO: 6860 - protein, 212 aa, Burkholderia vietnamiensis G4
MGLRLGDIAPDFEQESSLGTIKFHEWLGNSWGILFSHPADYTPVCTTELGLTAKLKGEFDKRNVKVIALSVDGVESHKGWINDINETQSTVVGFPIIADADRKVSQLYDMIHPNANETLTVRSLFVIDPNKKVRLIITYPASTGRNFDEVLRVIDSLQLTDNYKVATPGNWKDGDDVVIVPSLQDPEELKKRFPKGFNAVRPYLRLTPQPNK

SEQ ID NO: 6861 - protein, 144 aa, Prunus dulcis
LIGRTPIVYLNKVTEGCGAYIAVKQEMFQPTSSIKDRPALSMINDAEKKGLITPGKTVLVEPTSGNMGISMAFMAAMRGYKMVLTMPSYTSLERRVCMRAFGAELILTDPARGMGGTVKKAYDLLESTPNAHMLQQFSNPANTQ

SEQ ID NO: 6862 - protein, 190 aa, Ralstonia eutropha JMP134
MSKTLRGAPAGTLSVMRRDERHRVTLALNGSERSGLCAPRELLSDFLRHELGATGTHVGCEHGVCGACTVRVDGVAARSCLMLAVQSDGRAIDTVEGLAPREGLGDLQEAFRRHHALQCGFCTAGILMSCADYLERVPEPTEAQVRDMLSGHLCRCTGYTPIVAAVLDVAASRARARHVEATTVGETSDA

SEQ ID NO: 6863 - protein, 389 aa, Synechocystis sp. PCC 6803
MHIAWLGKKTPFCGNVTYGREVTNALLDRGHQVSFLHFAQEEEGEPLAENGCAEVALPFLFKSTVYTIPTPRSSRVLTDALAKLKPDLVHASLTLSPLDFRLPEICEELGLPLIATFHPPFDSKLRNFSSSTQFLTYQLYAPSLAQYDKVIIFSRLQRNLLLKLGVPRQRLAIIPNGVAVERYCPGQNDLKKEYQAERLFIYLGRIAPEKNVEALLKGWKFSDMGPHCKLLMVGDGILKSTLQTHYGPEMGVHWLGFVADELTRIQLLRAADAFILPSLVEGLSLSLLEAMACGTACVATDAGADGEVLENGAGIVLKTQGVTAQLKILLPLLRDHPEITDLLGRKARERVLERYTFAANMVQLESLYKTLVPHQAHSTNLSSYFYLLE

SEQ ID NO: 6864 - protein, 1012 aa, Ralstonia eutropha JMP134
MKRFDAGETTGTVQETQETRQAPHVGRPMARVEDAAILTGRGRYADDLGVRPGTLHAAILRSPHAHAELGAIDFAAALKVPGVRAVLTAADLPAWSRPFVVGVKAPMEQWALAMDRVRYVGEPVAVVVAESRALAEDALDLVRVDYRALPPVVSIEAAVAGDAPVLHSGLGSNVASDRHFCYGDPEAAFAAAPHRVTLTAHYPRNTCTPIECGVVIAEHLPGDEGYQVTSNFMGPFSLHAVMAMALQVPANRLRHVAPRDSGGSFGVKQAVFPYVVLMCLASRKAGAPVKWVEDRLEHLSAATSATARLSTLEAAVEADGRIVALSYDQLEDCGGYLRAPEPATFYRMHGLLTGAYAIPNLLVRNRVVLTNKTPTGLVRGFGGPQVYFALERLVQRIAVELGLDPLDVYRRNFVPADAFPFRAAAGALLDSGNYQLAMSRALEAGAYDELKRRRDAARAEGRLYGIGFAAIVEPSVSNMGYITTATPAEARRKAGPKNGAIASATVSVDLLGGVVVTVASTPAGQGHMTVCAQVVADVLGIDPADVAVNVEFDTHKDAWSVAAGNYSSRFAGAVAGTVHLAATRVRDKLARIVASHLRCDPAELVFTNGCIARKSASPDTALPFARAASNAPHWSPQLLPAGEEPGLRETVFWSPPNLDAPDEQDRVNTSACYGFAFDLCGVEIDRATGRVRIDRYITAHDAGKLLNPALADGQIRGAFAQGLGAALMEEFRYGPDGSFQSGTLADYLMPTTCEVPDPIIVHLETPSPFTPLGAKGLGEGNNMSTPPCVANAVADALGVRDIRLPLTPAKVMAMIGFDDPPPSRPELAEAANEAAPANGKGGKAAKALSARGAVDLDATPEAVFAVLLDPKALAQVVPGCHALERIGENRYRADVTVGVGMIKARYEAEIALSDLEPPHRLRLAGAGLSSLGSARGSGMVELTPHGDGTRLAYDYEAEVSGKVAAVGGRMLEGAAKVVLRQLFESLGRQAGGKPVRSPGWIARLLALLGVRR

SEQ ID NO: 6865 - protein, 395 aa, Azoarcus sp. EbN1
MRMKTALSIALVTETYPPELNGVALTVERALHHLLERGHRVGLVRPRQAADRVGMPAATIPADTLCVRGLPLPRYPALQLGLPAPLQLLRHWRQTRPDVVHVVTEGPLGWSALFAARQLGIPVTSDYRTHFQKYSGYYRLGHLAQVIDATLRSFHNRTDLTFVATAALADELRGCGYRHLACVGRGVDTDLFSARRRRAALRASWGVGAGQLAVLHVGRLAPEKNPAVVLEAFRAVRRAHPGARLVWVGEGPLRGQLERDAVDQVFAGVQRGVALAEHFASADLFLFPSLTETFGNVTLEAMASGLPIVAYDLGAAREHLVDGVCARVLPPAGAEGFIEAACALAGDGEARRAFGAAARQVAEQLAWPRILDRFEAHLAAQVARNVPAGDVATVA

SEQ ID NO: 6866 - protein, 738 aa, Clostridium difficile 630
MEKVIGKSYPLKDAALKVTGQMKYVADMKPQNVLYAKMLLSPVAHAKIKSIDTSEAEKVVGVRAIATYLNTSQRKYNGSLRFYEHKIPENEVIFSDTVRFVGDRVAAVAAETPEIAEKAVKLIKVEYEELPAVFTIQDAIKEDAICIHGDSNIVSQNNINGGDVEKGFKECDYIFEDEYSTPAIHHSAIETHSVIAHYDYNDKLTVHTPCQNTFGFRIILSQIFGMSLNKVRVIRPAIGGSFGGKLELTIEPVAAALSKMTRRPVKMVLTRKESMISTRTRHGSFVKLKTGVNKDGEVIAQDIKIYTNTGAYASSALNVIGALSHKVFKVYKIPNIKFTGMPVYTNTPIAGAMRGYGSPQIFMAQQAQFAKIAKEIGMDLVDFQNKNAVEPDDVDIIFHGSLGNPRVLDCIEQGKKMFKWDEKKKLPKEEGKYLRGIGMAIGAHGNGVFGAHRDVVTLTLKLNEDGTLTLLTGAHDMGNGVVTMQTMMVAEVLGITPDKVDTFETDTDACTFNLGDYASRGVFVEGGGAKKTAEKLKNLILEEAEKLLETSKEDLYLDNGYVISKLDENVKASLSDVAVYSQSKSLRELTVVEDYSSPAGRTSYGVHFAEVLVDKETKDIKVVDFVAVHDVGRVINPLNLEGQLEGGIHMGLGYALSEELAFDEQGRPKATDFKTYKLFRTVDMPKCQVAFVDGYEKAGPFGGKSIGECAVVPVAPAVANAVYNATDVEIHSLPIKLK

SEQ ID NO: 6867 - protein, 217 aa, Silicibacter pomeroyi DSS-3
MGLRINDIVPNFEADTDKGRIAFHDWIGDSWAILFSHPKDFTPVCTTEFGAVAQLADEWAKRNTKVIGVSVDGVEDHKKWKGDIESFAGTSAGFPIIADEGLAVSKAFDMLPADAYLPDGRTPADSATVRSVFIISPDKKLQLSMTYPMSVGRNFAEVLRALDGLQRTYQQPLATPANWQTGQDVIVALALDNAAAEEKYGALDIKLPYLRFAKNPG

SEQ ID NO: 6868 - protein, 156 aa, Clostridium difficile 630
MEKIKLNINDYMYEIEVEKNETLLHVLREKLNLTGAKQGCNSGSCGACKVLIDGVDMKSCKLLAKNCEGKVIYTIESFANGENLHPIQEAFIEVGAVQCGYCTPGMIITTQALLNRNASPNEDEIREAFKENLCRCTGYVKIIEAVKLSAARLGGR

SEQ ID NO: 6869 - protein, 1046 aa, Physcomitrella patens subsp. patens
MGRGLIILLLRLSLVWIAFLCDPVCITESSPSIGVWFHGGALAGEGRCWDDTPGQLVAPELDSNSGTETLLLLAMADLASRCRNQLGSFRIRELKDVLARLGLPKQGKKQILMEKIMGLINPVEKQSLTKGSKSSKKVVSREEAIAVIDEQYRKLRNSGAELSRYKSAKSGSSSVYPSAGHEERRVHDETKVHCPCGSSVETGKMIQCVEPKCRIRQHMSCVVFPENTVDGDAVVMPPNFYCELCRISRGDPFCVAVSHPLLPVKLLSSTVKTDGTNTLQNIDQQFTLSAADHGLLQKPHHDLQILESLMSCISSVDGYESSYLMDIAQVWCVLLCDKVSFRMHWPSYADLRVNGMNVRVTNRPGQQLLGANGRDEGPSVVSIIPSERDGEPFEEAMARVRRCINGGGGQGLGADGDGSDSDLEVVAESISVNLRCPMSGSRIKVAGRFKPCLHMGCFDLDTYVEMNQRARKWQCPICLKNYSIEHLIIDPFFNRITNAVQYQVRTLDEDITEVELKADGFWRPKLEGNARNGEPWRPSPAAAAAAVTNGIKSVPVLFPNHHIKVEEGLSSHDHRALRFRRTSEGQWALNGTRRLNANPNHQVMPLARLSRSSSATDSNLKGDEDEHSVNQDPSEKNVMFMDDNDDAEYSSKPRNEPGVTWQTSCDEPANGADVIVLSDTDDEGAEEEAVVGSSGASMYAESDVGNGRVRSSEVSIRNDTNGDSSGLALGLDSTDVTLASNSACLTFGSLLSTRVPDEGTSNNSGLGLQLDNNSFWTVPAAIPRYYGTPAETVGLQRPSLVRPTPLQAGAGPGFLSTSLVRNDSLQSGWKSFRESHAPIHYGITDGCSMDNDTTASPLQNFLPAQPARAEVQENLREPFLPEEDIDNSWFSLSLGGGENLVKSTPTQNPRTSSMERYSPILQPRVAEIDPQGRGLDNNGSSQRLVDSRPPVRSHFTADGHPFPVRPLRHIPLYLESKERGKHLHLATLLVTMPSFLSTTLLSGLEEHKWSFDCASSLHYQFRIVPYCLQGVKAESGFMPMHLLLSL

SEQ ID NO: 6870 - protein, 411 aa, Deinococcus radiodurans R1
MGSAAVGGPRPHLYFPAMSFFSPPSASVASTLGPKIAVLCHTGAGGSGVVATELGLKVADAGHEVHFVGTAMPFRLTGHQGLRGPYFHQVGGFAYALFEQPFPELSAANTLSEVILEHGVDLTHAHYAIPHASAALHARSITGKTRVLTTLHGTDVTLVGTEPAFQHTTRHAIERSDHVTAVSHSLAAETREVFGVDRDIEVIHNFVDSDRFRRIPDPGVRARFAHPEEALIVHVSNFRPIKRVEDVVQVFARIASEIPARLLMIGDGPERARAFELARELGVIGRTQFLGSFPDVQTVLGISDLFLLTSSHESFGLAALEAMSCEVPVVASNAGGIPEVVQHGVNGFLSDVGDVDDMAHHALKILRDQETYQQMGQAARRTAVEQFHPRLIVPQYLAAYRRLAEQSASTF

SEQ ID NO: 6871 - protein, 193 aa, Thiomicrospira crunogena XCL-2
MAFYHSIYFQPRVEKDIDTMLRTLTLFALTFVTLSAQANPLSIGTPAPDFALYNQHHERIQLSDQQGKWVVLYFYPKNDTPGCTTEACSFRDNVNKLIQKKAIILGVSLDSLDSHQAFAQKYQLPFSLLSDPDGKVAQKYDALSDFIVFKFAKRHSFIIDPSGHIAKIYRDVDPQKHVGVVLNDLTMLQQGHN

SEQ ID NO: 6872 - protein, 390 aa, Corynebacterium efficiens YS-314
MKVGMMTREYPPEVYGGAGVHVTELTRFMREIAEVDVHCMGAPRDAEGVYVHGVDPALDNANPAIKTLSTGLRMAEAANNVDVVHSHTWYAGLGGHLAARLHGIPHVATAHSLEPDRPWKREQLGGGYDVSSWSEKNTMEYADAVIAVSARMKDSILAAYPRIEPDNVRIVLNGIDTELWQPRPTFDDAEESVLRKLGVDPQRPIVAFVGRITRQKGVEHLVKAAAHFDEGVQLVLCAGAPDTPEIAERTRALVEALQSQRDGIFWVQEMLDKKGIQEILTAADTFVCPSIYEPLGIVNLEAMACNTAVVASDVGGIPEVVVDGETGTLVHYDENDTETFERDIAEAVNKMVADREVAKKFGIAGRERAINEFSWATIAQQTVDVYKSLM

SEQ ID NO: 6873 - protein, 184 aa, Prochlorococcus marinus str. NATL1A
MKRSEFIKSFILFSSILFIKPSRLYASINSVKIGKKAPNFLLNGYNKNSPNKKQWSLDDFSKKWLVLYFYPKDFSSGCTLEAKNFQDNLSNYNKINASIVGISADSEEEHESFCTSENLGYTLLSDANSEISKSYDSWLDPYSKRNTFLINPEGIVVYKWIGVRPIGHAQEVLKELTKQQKIYA

SEQ ID NO: 6874 - protein, 312 aa, Bacillus clausii KSM-K16
MTVVNNITELIGNTPLVKLNRLATAEHADVYLKLEYQNPGSSVKDRIALAMVNAAEESGELKPGATIVEPTSGNTGIGLAMVAAAKGYKTKLVMPETMSMERRNLLRAYGAELVLTPGPEGMGGAIRKATELAKQDGHFMPQQFENSANPKIHRETTGKELLKQVDGQLDGFVAGIGTGGTITGAGGLLKEHFPELKIVAIEPKDSPVLSGGKPGPHKLQGIGPGFVPGILNTNVYDSVLQVSTEQAFEYARRAAREEGILGGISSGAAIYGALELAKELGPGKKVVAIIPSNGERYLSTPLYQFEEETTHS

SEQ ID NO: 6875 - protein, 322 aa, Prochlorococcus marinus str. MIT 9211
MPIASDITTLVGKTPLVRLNRLPKAFGCEAELIAKLESFNPTASVKDRIAGAMVAAAEKDRTIVPGKTVLVEPTSGNTGIALAMVAAAKGYRLILTMPDTMSIERRSMLRAYGAELQLTPGKEGIQGAITLAQEIVSSLPDAYLLQQFDNPSNPEVHEQTTAEEIWVDCDGQIDGLVVGVGTGGTITGCAKLLKQRNPKILIYAVEPSASAVLSGKSANPHHIQGIGAGFIPSVLDTALIDEVIEVDDNQAMEIGRQLARQEGLLSGISSGAAVAAALKVGSRKEMKNKRLLVVLPSFGERYLSTSMFNSVSSIPPRPDGYI

SEQ ID NO: 6876 - protein, 319 aa, Xylella fastidiosa Temecula1
MTIYNTILDTIGHTPVVKLNRIAPAHVDLYIKVESFNPSGSVKDRLALAIILDAEQQGLLKPGDTIVEATSGNTGVALAMIAAARGYTFVATMVETFSIERRKLMRAYGAKVILTPAAERGSGMVRKAKELAQQHGWFLASQFSNPANPAYHRNTTAAEILRDFAGRRLDHFVSGWGTGGTLTGVGEVLKIARPDIKITASEPASAALLQGKEWQPHKIQGWTPDFVPEVLNRSVPHHILSVTDDDAITVARRLAAEEGVFSGISGGASVATALQIAQQAEPGAVILAMLPDTGERYFSTPLFADINEHSDDAWLASLG

SEQ ID NO: 6877 - protein, 591 aa, Zea mays; identical to SEQ ID NO: 2928
  misc_feature (492)..(492): Xaa can be any naturally occurring amino acid
  misc_feature (536)..(536): Xaa can be any naturally occurring amino acid
  misc_feature (563)..(563): Xaa can be any naturally occurring amino acid
  misc_feature (576)..(576): Xaa can be any naturally occurring amino acid

SEQ ID NO: 6878 - protein, 379 aa, Helianthus annuus
MAIDCIIKNPSPMSSLKEDRQRSLVFDASVLQHEGNIPQQFIWPDHEKPNTQKSKELEVPLIDLGGFLSGHSCSTKKASNLVGEACQKHGFFLVVNHGVDENLISDAHQYMDLFFELPLSEKQRAQRKAGESCGYASSFTGRFSSKLPWKETLSFQYSADENSSDIVKDYFKDKMGEEFIRLGNVYQDYCNAMNRLSLGIMELLGMSLGVSRAHFKEFFQENNSIMRLNYYPPCQKPDLTLGTGPHCDPTSLTILHQDNVGGLEVFVDNEWRSIAPNSQAFVVNIGDTFMALSNGRYKSCLHRAVVNSKTPRKSLAFFLCPKKDKVVSPPEKLVDQKNPRIYPDFTWSTFLEFTQKHYRADMNTLKAFSNWVQQETSRT

SEQ ID NO: 6879 - protein, 765 aa, Xanthomonas axonopodis pv. citri str. 306
MNARSTDLSDSELTPPVADSGTGYRPTGTGVTRIDGRAKVTGQARYAAEWPVPDLAYGVVVNSSIAKGEIVAFHLDAARAVPGVLEIVTHENRPHMRGMDLFYKDMTAPAGSPFRPLYDNKVLYSGQPIALVVAETFEAARHAAHLVEVELLQDPHDTNLMTNLDRAHKPRPLKAGFSPPPKDKGDPQSGFDNAACQVQADYYSGVEHHNPMELFASTVIRDADGHFTIYDKTQGSQNSRWYVSHVFGLSKRKVTVRNPYVGGAFGSGLRPQYQLPLAVMASILLDRSVRVVLTRQQMFTFGHRPETLQRLKLGADRDGTLRSVWHEAIAETSRIEDYVEVVVNWSGQLYACDNVHLGYKLVSLDQYSPIDMRAPGAAHGVHALEVAMDELAYEVGIDPLALRLKNYAEVNPADDKPYSTKALRQCYEQGAERFGWAQRPLQPRARKEGSEWVGWGMATGQWDAMQMFARAHAALHADGRLVVSSAASDIGTGTYTVMAMIAAEALGLPLEQVTFQLGDSTLPVAPIEGGSSHVTTVGSAVDGVCAKLRARLLRLAQALPESRFAKARTDDVVFADGKLALRADASSALALTDLLRTAGLEQIEDKFLLLPNVLKQRKYTRATHGAVFVEVRVDEELGTVRVTRVVSAIAAGRILNPITARSQIVGGVVWGIGQALHEHTQSDHRFGRFMNHDLALYHVSANADIHDIDVIFADEDDRVVSSLGAKGVGEIGLVGVSAAICNAIFHATGKRIRSTPMTPDKVMAD

SEQ ID NO: 6880 - protein, 1031 aa, Coccidioides immitis RS
MGAGRHGVTFPRTGAMGVPALFRWLSTKYPKIISAVVEELPQEIDGEEFPVDTTKPNPNGEEMDNLYLDMNGIVHPCTHPEGKPAPANEGEMMLEIFKYTDRVVNMVRPRKLLMIAVDGVAPRAKMNQQRSRRFRSAQEAKEADEKKAEFAKLLRQQNRGKGDMEIAEEVVQKTWDSNVITPGTPFMDILSAALRYWVAYKLNTDPAWEKVKIIISDATVPGEGEHKIMEFIRSQRSCPEHDANTRHVIYGLDADLIMLGLATHEPHFRVLREDVFFQESKARTCHLCGQQGHVAEACTGKAKEKNGEFDEKQRGTPLKPFIWLHVSVLREYLAAEMYVPNQPFPFDLERALDDWVFMCFFVGNDFLPHLPSLEIRENGIDTLIAIWRDNIPLMGGYLTQDGNVDLKRAQLILQGLAKQEDAIFRRRRQTEERRNANAKRRKEQERQREEENARKRPRHSLENEPAGPSPRRGKDMDGIAPANMPLFIPSKGELPRAERELTHAMVVNRGAIYKANMANKSAAAALKSQLISGASEMSVEVSTSTSANDVSPSALGKRKADALETDNTTEQEDSERPPQEQDELPADSVRLWEQGYADRYYEQKFHVDPKDIEFRHKVARAYVEGLCWVLLYYFQGCPSWTWYYPYHYAPFAADFVDLEHMDIQFHKGAPFRPFEQLMGVLPAASNHAIPEIFRDLMSNPESEIIDFYPEEFPIDLNGKKFAWQGVALLPFIDESRLLEAMAKRYPRLSEEEKARNEMGRDILFISDRHPLYKELVANFYSKKQTVPKFKLNMRVSEGLGGKVERDEAYIPHSSLVASIDGIELPALDEDRSISVLYDIPKSMYTHKSMLLPGVKFNPPVLDKTDIEVTKAKAQRSGRSFGGAPLHSGNGRGRGRISYASDRPNPFAAHLDPSFKPPPHMNAPPGRGGPHQFDRHRSQNPPSQQSRGRGYGGYGGYGGSYGQRDSYHPPAPRGRDSYQDRQDRQYQHQDRPYPPSGAGGRGGSNYYRGRGGGQQRSSQSGYYGRNDGYGRY

SEQ ID NO: 6881 - protein, 89 aa, Arabidopsis thaliana
  misc_feature (40)..(40): Xaa can be any naturally occurring amino acid
  misc_feature (66)..(66): Xaa can be any naturally occurring amino acid
SISKSFGVVIQNKRIALRGHFILYKKREIPHSTIYNIVIXPSVDKTIRTLPSLHYIQCNPDEMCPXNRSPGEKTIKPDPKLNTEYFSSI

SEQ ID NO: 6882 - protein, 379 aa, Helianthus annuus
MAIDCIIQNPPTMPSLIEHQQTSLVFDALVLQHETNMPQQFIWPDHEKPNSQKSKELDVPTLDLGGFLSGHSGSVKEACRLVGEACENHGFFLVVNHGVDASLISDAQRYMDLFFELPLSKKLRAQRKVGESCGYASSFTERFSSKLPWKETLSFHFSAEENSYDIVEEYFKSRMGEEFVQLGKVYQDYCNAMSRLSLGIMELLGMSLGVSRSHFKEFFKDNNSIMRLNYYPPCQKPDLTLGTGPHCDPTSLTILHQDKVSGLEVFVENEWRSIAPDSNAFVVNIGDTFMALSNGRYKSCLHRAVVNNKSPRKSLAFFLCPKRDKVVSPPEELVDENNPRVYPDFTWSTFLEFTQKHYRADMNTLQAFSNWVQQKTSRT

SEQ ID NO: 6883 - protein, 192 aa, Xanthomonas axonopodis pv. citri str. 306
MTATPATAHDTAPATATTSAPTYPVNLRINGQPYHLQLEAWVSLLDLLRDRLDLTGTKKGCDHGQCGACTVLVDGRRINSCLTLAVMQDGADITTVEGLADGDALHPLQRAFIANDAFQCGYCTPGQLCSAVGLINEGKAHDRDQVRELMSGNICRCGAYPQITDAVMEVMGKPSDSSDSAATPWTPGTVPA

SEQ ID NO: 6884 - protein, 223 aa, Taiwanofungus camphoratus
MPSLRLGSIAPNFEAETTQGHIKFHDWIGDSWAILFSHPGDFTPVCTTELAEVARKAPEFAKRNVKVIGISANDLNDHEKWVQDINEYGTKSLGPTNVQFPIIADGNRKISTLYDMLDEQDATNRDAKGLPFTIRTVFVIDPKKVIRLTLSYPAATGRNFDEILRVVDSLQLGDKYRVTTPVNWQKGDDVIVHPSVSNEEAKTLFPEVTFHKQSYIRTTPLNV

SEQ ID NO: 6885 - protein, 518 aa, Leptospira interrogans serovar Lai str. 56601
MSGRVYEWKNLGDSRTVKADVVIVGTGCGGATLAYELSKNGKKVIMIEEGGYYHTGTFDNHELNMAGKVSAERNMATDATGTINLVYGKNVGGASVHYWADSYRTPDDRLNLWKKTYGVQGHSPEDLNSYWKELDETLNVHPAKEEYYNKMNQLVRKACKSLSWEGNPVPQARKNCQKSGHCMQGCMYGAKQSQLVTHIPKAMSLGTDIYADCKAVRLELKGDKVEFLEAVMIDRPSGKESNIVLKFEAPIFAISAGGFGSSTFLLKNGWKKKLPALGEYLAINPSPFIHAFYEEPIIQWRNIPSAFGVEEFRLARFKEDGSYIEGGFLIMANQLQPGSLAALIPGFGVEHREIMKQLPHIGGTIGWIDDVPSELGNISVSASGKRTITYNFGKLTKEFLKDCIRKQAQLNFSAGAKWILLPDLKRTKIFSEKEIDKINLLELNPASMMMAAPHPAGGCRMGQDPFTSVVDWRHRVHGLKNLYVSDSSVFPTGVSVDPSYTIMAFSKQAAKFILEDSE

SEQ ID NO: 6886 - protein, 426 aa, Corynebacterium glutamicum
MRVAMISMHTSPLQQPGTGDSGGMNVYILSTATELAKQGIEVDIYTRATRPSQGEIVRVAENLRVINIAAGPYEGLSKEELPTQLAAFTGGMLSFTRREKVTYDLIHSHYWLSGQVGWLLRDLWRIPLIHTAHTLAAVKNSYRDDSDTPESEARRICEQQLVDNADVLAVNTQEEMQDLMHHYDADPDRISVVSPGADVELYSPGNDRATERSRRELGIPLHTKVVAFVGRLQPFKGPQVLIKAVAALFDRDPDRNLRVIICGGPSGPNATPDTYRHMAEELGVEKRIRFLDPRPPSELVAVYRAADIVAVPSFNESFGLVAMEAQASGTPVIAARVGGLPIAVAEGETGLLVDGHSPHAWADALATLLDDDETRIRMGEDAVEHARTFSWAATAAQLSSLYNDAIANENVDGETHHGLEHHHHHH

SEQ ID NO: 6887 - protein, 335 aa, Arabidopsis thaliana; identical to SEQ ID NO: 3641

SEQ ID NO: 6888 - protein, 398 aa, Clostridium acetobutylicum ATCC 824
MKILITTDAYYPMINGVVVSTNNLYKQLKMAGHDVRILTLSYNGREYIEGDIYYLNSHFVKVYPDARIMKPFGNKVISKIVEWSPEIIHSQTEFSTMLVAKYIKRKLDIPQVHTYHTMYEDYLKYFLGGKVIRKGTMAKLLKILLNTFDEIIAPTEKVKNVLREYEVYKDIKIVPTGIDIKSFQKELSSKEREKILNHYGWKTKDKILVYVGRVAEEKNIDEIINLFKKGLNELKDIKLLIVGGGPYLSQLKELVSRYGIEDIVKFTGMVDSDQVYKYYKMGIAFVTASQSETQGLTYIEALASGCPVICKWDPCIKNLIVNGVTGFAYTDTSEFVKAVESLKSNEILRRKIISNAKQKSCEYSTENFGKSVMDIYNKVLLGRNVKKRNLVQIIRTIF

SEQ ID NO: 6889 - protein, 154 aa, Malus x domestica
MTLSLFGGRRSNVFDPFSLDIWDPFEGFGDLANIPSSARETTAIANTRIDWKETPKAHIFKVDLPGIKKEEVKVEVEDGRVLQISGERSREQEEKNDKWHRVERSSGKFMRRFRLPENAKIDQVKAAMENGVLTVTVPKEEEKKPEVKAIDISG

SEQ ID NO: 6890 - protein, 326 aa, uncultured gamma proteobacterium
MSRLYQNNAETIGGTPLVKINHISDGNIYAKLESRNPAMSVKCRIGASMVAAAEQDGSLKPGMTIVEPTSGNTGIALAFVAAAKGYGCILTMPNTMSLERRMLMKSLGAEVILTDGAKGIPAAIERAENIITSDPSKYWGPHQFENPANPAIHEQTTGPEIWEDTGGGIDILVSGVGTGGTITGISRYLKRICGKDVLSVAVEPDSTTMITAAKAGETPSHAPHKIQGIGAGFVPQNLDLEMVDQVEQVSSEEAMEWAHKLMQQEGILAGISSGAAMAVAHRLSQQEVHRGKMIVAILPDSGERYLSSALFAGRFSENETVQAAVS

SEQ ID NO: 6891 - protein, 1127 aa, Cryptococcus neoformans var. neoformans JEC21
MGVPALFRWLSKKYPKIVERVKEDTPKKIRGPDGEIVEEPIRYENPNPNGFEVDNLYLDMNGIVHPCTHPEGRPAPETEEEMMVEIFKYTERVVNMCRPRKVLMMAIDGVAPRAKMNQQRSRRFRAAQEAADKEEERREAIKLFEAMGHAVSEETANHKSWDTNAITPGTPFMDLLSISLKYWVSHKLTTDPGWKDLKIILSDSSVPGEGEHKIMDWIRRQRSYPTWDANTSHVIYGLDADLIMLSLATHEPHFRVLREDVFAQSSKGPHACKNCGKVGHIAANCKSDKKFKDPNVAEVAKTEDPKPFIFLDVACLREYLAVELVVPGMPFPFDLELAIDDWIFMIFFVGNDFLPHLPSLEIREGAIDVLLKIWRAELPRMGGYLTNHGKVNLDRAQVILEGLAKSEDEIFQKRKDDEERQEHSQKRRRIEEHKRQDEDKAREEDRNTLTLNGTEYVAVDNPAATARGGPLHPSLPSRPAFDLVPKEDAVKQPEDQDQKAKKAMAGSNSDIVKNRKAIRMANMSAAQALKAELEGGNDVNVDDKKAIAQEGKEEDEAVVTVERTEDEEKEQLTKEEARGTLEEQGEKEGVDEEVVPPAIQTDEDEGEAPVGDATVAENDESTTPEDDEDPTHVPRKRKRGDSDGDEDSNEEDDDDDDDDAPPNPEADQPIPKKKLKVNADGTVDYEDDVKLWEPGYRERYYEKKFGVKLSEREFIDKVTKSYMEGLCWVLEYYYQGVPAWDWFYPYHYAPFAQDFRDVGSMDIKFETSIPFKPFAQLLGVFPAASRIHLPEPLQTLMIDEDSPILDFYPPDFEIDMNGKKMAWQGVALLPFIDQNRLLTALKSKEELLSDDEKRRNSWGDNVMFIANENPLYDLFCDKLYGLRAKDPIPIDTKASYGITGSVLPDPNCVPASTFDTPIPSISECPDLNPNDSISVRYYFPRQAHPHRSILLRGYKPEPARLTESDKDWVRRGGQGGRRGHRHNGGGNGNVTGGPGMARGRYESGPPRTNGYQPPPPRSNYGGSSGYGYGAPAPLPSRPPVSSYGGGAGGYGYSNPYAAAPNPYAGGYGAPAPYAAGGYGQRPYVPPLPPPNPYSAPPPAYGRPPGGGYGYGAPPPRGGGYNPYPSRR

SEQ ID NO: 6892 - protein, 160 aa, Bradyrhizobium sp. ORS278
MTPATIRLTVNGRTHDVAAASDTTLLHVLRNDFALNGPKYGCGLGECGACTVLIDGRAARSCVIPIEGCIGRSVVTLEGLGSRDAPDPVQQAFITEQAAQCGYCLNGMIMTTKALLTMRPDPSLEEIKQALRYNLCRCGAHVEILRAAMRAAGYTLEALD

SEQ ID NO: 6893 - protein, 361 aa, Sinorhizobium meliloti 1021
MANAGIRSVQREVFNMPVLPSVLEAIGNTPLIRLKAVSEATGCNILGKAEFLNPGQSVKDRAALWIIRQAEKSGQLRPGGVIVEGTAGNTGIGLAVVGSALGYRTVIVIPETQSQEKKDALRLLGAELVEVPAVPYRNPNNYVKISGRLAAQLAETEPNGAIWANQFDNVANRQAHVDTTAPEIWRDTDGKVDGFICAVGSGGTLAGVAEGLRARNAAIKIGIADPEGAALYNFYAHGELKSSGSSITEGIGQGRITANLEDFTPDFAYQIPDAEAVPYVFDLIEKEGICVGGSTGINIAGAVRLARDLGPGHTIVTILCDYGNRYQSKLFNPDFLTSKGLPVPDWLKTASNIAVPYEPAG

SEQ ID NO: 6894 - protein, 332 aa, Nicotiana tabacum
MVVLTKPGIDHFPIVKNCKLSSFFNGVPLIDLSKPNSKNLIVKACEEFGFFKVINHSVPTEFITKLESEAIKFFSSPLSEKQKAGPADPFGYGNKKIGPNGDVGWVEYILLSTNSEFNYHKFASILGVNPETIRAAVNDYVSAVKKMACEILEMLAEGLNIHPRNVFSKLLMDEKSDSVFRLNHYPPCPEIQQFSDNNLIGFGEHTDPQIISVLRSNNTSGLQILLKNGHWISVPPDPNSFFINVGDSLQVMTNGRFKSVRHRVLANSVKSRLSMIYFGGPPLSEKIAPLASLMEGEESLYEEFTWFEYKKSAYKTRLADNRLVLFEKVAAS

SEQ ID NO: 6895 - protein, 185 aa, Vibrio vulnificus CMCP6
MINTTIKPFSATAYKDGKFVDITEQDVLGKWSVFFFYPADFTFVCPTELGDLADHYEELQSRGVEVYSVSTDTHFTHKAWHDSSDTIGKIKYFMVGDQTGNITNNFGVMRPGQGLADRATFVIDPQGVIQAVEITAEGIGRDAEDLLRKIKAAQYVAAHPGEVCPAKWKEGEQTLAPSLDLVGKI

SEQ ID NO: 6896 - protein, 1575 aa, Oryza sativa Indica Group
MGSLTRAEEEETAAAEEWSGEAVVYVNGVRRVLPDGLAHLTLLQYLRDIGLPGTKLGCGEGGCGACTVMVSCYDQTTKKTQHFAINACLAPLYSVEGMHIITVEGIGNRQRAVWNYLCDEVVTCWLKTLRKERLAMAHGSQCGFCTPGFVMSMYALLRSSEQPPTEEQIEDSLAGNLCRCTGYRPIIDAFRVFSKRDDLLYNNSSLKNADGRPICPSTGKPCSCGDQKDINGSESSLLTPTKSYSPCSYNEIDGNAYSEKELIFPPELQLRKVTSLKLNGFNGIRWYRPLKLKQVLHLKACYPNAKLIIGNSEVGVETKFKNAQYKVLISVTHVPELHTLKVKEDGIHIGSSVRLAQLQNFLRKVILERDSHEISSCEAILRQLKWFAGTQIRNVASVGGNICTASPISDLNPLWMATGATFEIIDVNNNIRTIPAKDFFLGYRKVDLKPDEILLSVILPWTRPFEFVKEFKQAHRREDDIALVNAGMRVYIRKVEGDWIISDVSIIYGGVAAVSHRASKTETFLTGKKWDYGLLDKTFDLLKEDVVLAENAPGGMVEFRSSLTLSFFFKFFLHVTHEMNIKGFWKDGLHATNLSAIQSFTRPVGVGTQCYELVRQGTAVGQPVVHTSAMLQVTGEAEYTDDTPTPPNTLHAALVLSTKAHARILSIDASLAKSSPGFAGLFLSKDVPGANHTGPVIHDEEVFASDVVTCVGQIVGLVVADTRDNAKAAANKVNIEYSELPAILSIEEAVKAGSFHPNSKRCLVKGNVEQCFLSGACDRIIEGKVQVGGQEHFYMEPQSTLVWPVDSGNEIHMISSTQKAPQKHQKYVANVLGLPQSRVVCKTKRIGGGFGGKETRSAIFAAAASVAAYCLRQPVKLVLDRDIDMMTTGQRHSFLGKYKVGFTDDGKILALDLDVYNNGGHSHDLSLPVLERAMFHSDNVYDIPNVRVNGQVCFTNFPSNTAFRGFGGPQAMLIAENWIQHMATELKRSPEEIKELNFQSEGSVLHYGQLLQNCTIHSVWDELKVSCNFMEARKAVIDFNNNNRWRKRGIAMVPTKFGISFTTKFMNQAGALVQVYTDGTVLVTHGGVEMGQGLHTKVAQVAASSFNIPLSSVFISETSTDKVPNATPTAASASSDLYGAAVLDACQQIMARMEPVASRGNHKSFAELVLACYLERIDLSAHGFYITPDVGFDWVSGKGTPFYYFTYGAAFAEVEIDTLTGDFHTRTVDIVMDLGCSINPAIDIGQGVSNPKVIHSSKAVGEPPFFLGSAVLFAIKDAISAARAEEGHFDWFPLDSPATPERIRMACVDSITKKFASHDEQNDDGAEKSDNQVVDSLNEPNRSNTGKKRGRPKKVKAEQEDSNQLSNGKHLGENNGMHWSKGEPVIVSDALRLTSGLSWEPLVMWRALREKKTNGDVEDEHFAVKAVDCLDWNEVEINIHMFFMGYMRGRRHPMTFWPEMLKLKDWPPSSMFDQRLPRHGAEFITALPFPEYTDPRYGPLNLAVRLPAGVLKPDLGPKTYIAYGCYEELGRGDSVTKLHCDMSDAGTTPQPAHASNNVANALVVDNSLSSTPSST

SEQ ID NO: 6897 - protein, 305 aa, Helicobacter pylori J99
MILTAMQDAIGRTPIFKFTRKDYPIPLKSAIYAKLEHLNPGGSVKDRLGQYLIKEAFRTRKITSTTTIIEPTAGNTGIALALVAIKHHLKTIFVVPKKFSTEKQQIMRALGALVINTPTSEGISGAIKKSKELAESIPDSYLPLQFENPDNPAAYYHTLAPEIVQELGTNLTSFVAGIGSGGTFAGMAKYLKERIPNIRLIGVEPEGSILNGGEPGPHEIEGIGVEFIPPFFANLDIDRFETISDEEGFSYTRKLAKKNGLLVGSSSGAAFAAALKEVQRLPEGSQVLTIFPDMADRYLSKGIYS

SEQ ID NO: 6898 - protein, 381 aa, Synechococcus sp. WH 8102
MKIAFFTETFLPKVDGIVTRLTKTVRHLVEAGDEVIVFCPEGCPDEYMGARLIGVPAMPLPLYPELKLALPRPAVSEAIDSFQPDLIHVVNPAVLGLGGIWLAKSKSIPLIASYHTHLPKYLEHYGMGMLEPLLWELLKAAHNQALLNLCTSTAMVQELSDKGIQNTDLWQRGVDTDLFRPELRSDTMRARLLGGHDDRGALLLYVGRLSAEKQIERIRPVLETLPDARLALVGDGPHRQQLEKHFEGTATTFVGYLAGEELAGAYASGDAFLFPSSTETLGLVLLEAMAAGCPVVGANRGGIPDIISDGVNGCLYEPDGADGGAASLIEASQRLLGNAAERQSLRSAARSEAERWGWAGATEQLRGYYRQVLERELSAAA

SEQ ID NO: 6899 - protein, 186 aa, Streptococcus agalactiae 2603V/R
MSLVGKEIIEFSAQAYHDGKFITVTNEDVKGKWAVFCFYPADFSFVCPTELGDLQEQYETLKSLDVEVYSVSTDTHFVHKAWHDDSDVVGTITYPMIGDPSHLISQGFDVLGQDGLAQRGTFIIDPDGVIQMMEINADGIGRDASTLIDKVRAAQYIRQHTGEVCPAKWKEGAETLTPSLDLVGKI

SEQ ID NO: 6900 - protein, 754 aa, Clostridium difficile 630
MNIVGKGIKKIDGMSITTGKPVYTDDLSAKDALVVKILRSPHAYAKIKDIETSKAEMVDGVECVLTYKDVPKSRFTLAGQTYPEPSPYDRLILEDVVRYVGDEVAIVAAIDEKTAIKAMNLIKVKYEVLTPVLDFEEAIGNKTMVHDEDRHCNFDIGMQREKNIVSHHDYTKGDVEKVLSNCDVVIEETYYTQAQAHAMMETYRAYNYLDHMGRLVVVSSTQIPFHVKRHLSRALEIPASKIRVIKPRIGGGFGGKQTACVEIFSAIVTLKTGKPAKIIYDRKETFNCSTSRHAMRLKVRLGATNDGIIKAIDIKALSDTGAYGEHASTTIGLVGEKTLPMYNKVEATRFIADVVYTNKMPAGALRGYGASQGCFAVESTINMLANKLKMDPTDLRLKNVVTEGETTFAYGKTLNSVDLIKCINKGKELIGWNEKYPCKHLDNGKIRSVGMAITMQGSGIQGLDKSSAEIKLNDCGDYTLMIGSTDMGTGSDTILAQMAAEVLDTSIENITVISADTDLVPYDPGSYASSTTYVTGMAVVKAAQDLREKIISAGATKLGVEKDEVEFDGIKLTSKKGSTLLFDIAVDSTIGPDTNQLIGLASHGSPVSPPPFIAGFAETEIDTETGKVDLVNYVAVVDCGTVINKNLAKIQVEGGIVQGIGMALFEEVRYTEKGSMDTNTFMQYKIPARCDIGNVKVDFVETYEPTGPFGAKSVGEVVINTPLPAIQEAVFNGIGVRINTLPITPEKVFMEMNK

SEQ ID NO: 6901 - protein, 156 aa, Oceanicola granulosus HTCC2516
MSVNGQPAEGEVEGRTLLVDFLRNSLELTGTHVGCDTSQCGACVVHVNGAAVKACTMFALEAEGAEVTTIEGIAAPDGTLSAVQQAFQEHHGLQCGFCTPGMVMSATALLKDNPRPTEAEIREYLQGNICRCTGYHNIVKAVMAASGQDVGAIAAE

SEQ ID NO: 6902 - protein, 149 aa, Clostridium difficile 630
MLVKININGKKKSVDIEPEEYLVDTLRKVGNLSVKRGCDTGCCGLCTVLIDKKPTLSCATLTLRALDKEITTIEGLENEVKEFSEVLVKEGAEQCGFCSPGFILTVLAMKDELENPTDDEIKHYLTGNLCRCTGYMGQLRAIKTYLEVK

SEQ ID NO: 6903 - protein, 542 aa, Guillardia theta
MGVPKFFRWLSERYPLINQKIFEKSEFDCFYLDMNGIIHTCFQKIASEQNFNKDILFQKIFDYTEYLYTIIHPKKLLYLAIDGVAPRAKMNQQRSRRFRAIKDNEKKSDFDHRNRLNLTLDSNCITPGTSFMAELSYAFKIWLEKKIKTDIEWQTGCDIIFSGAEVPGEGEHKIMNFIRKLKNLKNNPDLILSHCLYGLDADLIMLGLVSHEKNFTLLREKLAWKGTSNVKEGYNYEFEKSPSDDFHLLEISLLREMLYLEFRPREFLDQDYNMERIVDDFVFMCMLIGNDFLPGIPHLDIGYGGLNLLVRSYKEIQKHIHGYLTNKSKIHVGRAELFFEKLSVESEELYFLNKGNDIENNLCSNDYKMEYYVKKLNCSVSNNKERINDLIQTYIEGLHWCLYYYHKGCPSWNWFYPEYYAPLASDLKSLKKIKIKFKKGKPFEPLVQLLAVLPPNSRNLLPISFSRLMVKKDSPVIDYYPLEYKIDMNGKKNLWEGVVILPFINESNLVLTLDNMKTRSTLNDEENTRNSFGKDVTFFSYN

SEQ ID NO: 6904 - protein, 219 aa, Bradyrhizobium sp. BTAi1
MALQIGSVAPDFEAQTTEGKIKFHDWIGDSWALLFSHPKDFTPVCTTELGALAHLKPEFDKRGVKLIGLSVDPVDKHAQWAEDIRETQGAAPNYPLIGDTDYNVSKLYDMLPAAISGDPAKRTAADNQTVRNVFIIGPDKKIKLILVYPMTTGRNFQEILRVIDSLQLTAKHRVATPADWKQGDDVIIAGSVSDDEAKTIYPNGWKAPKPYLRVVPQPK

SEQ ID NO: 6905 - protein, 397 aa, Vibrio vulnificus YJ016
MTTRTPILFVHYGDNWIRGSETTLIHLLATLDTQQFEPIVWSNCQPLLDHLTQCGITTYQDPFSVLGVIGSNKFNPLNTMKLVARAITFIQRHHIALIHVNSGAPCQWMSLAARLCHCPLLLQLHGDYPLRERFLMGFHLADNIVCVSDAISQAMQSEGLTLPQLSVVHNGVGLPSSSLDTSLKTQLSIPRQAFTFITIGSLIARKGVDRLLKALYLLKKNGEKAHLVIIGDGPERITLKHLSETLGLSEQVHWLGEKAIAAIWLKSDADAFVSGAYQEAFGLVIAEAMMAELPVIAPRTGGIPEFVSHNRNGLLYHNSGVFSLVQAMQTLMLNPVLSHKLKQTAYVDAHENLTIQCNTQTLQAHYLALMKRDQPAPQWRAMLRPLLYFFRRKELLS

SEQ ID NO: 6906 - protein, 403 aa, Pseudomonas syringae pv. tomato str. DC3000
MSQILNVTLITETFTPEINGVANTLGRLCDGLRLRGHRVELVRPRQSDEINSGAADDLMLCRGWPIPGYPGLQWGQSSMHKLLRRWQRRRPDVLYIATEGPLGLSALRAARRLGIAVISGFHTNFPQYTQQYGMGFITRLLTHYLRWFHNRSRVTLVPSVSQKVELERRGFERIELLSRGVDSQLFNPSRCSQALRESWGLQTGDIGVIHVGRLAPEKNLGLLKTGFEALKSSYPQRTIKLIVVGDGPQRSELEQQIPDAIFCGTLRGEVLATHYASADMFLFPSLTETFGNVVLEALASGLGVVAYDEAAAGQHIRHGHNGALAMPGDETAFVDAARWLLEDSENLRRVRLNARQHASRQGWTAIIDQFERQLRDACPSESSKTLRQTSDKTIRPVSSMPLD

SEQ ID NO: 6907 - protein, 377 aa, Medicago sativa subsp. falcata
MPSLSEAYRAHPVHVNHKHPDFNSLQELPESYTWTHLDDHTLINSNNTMKESANSSSVPIIDLNDPNASKLIGHACKTWGVYQVVNHGIPISLLDEIQWLGQTLFTLPSHQKLKAIRSPDGVSGYGLARISSFFPKLMWSEGFTIVGSPLDHFRQLWPQDYAKHCDTVLQYDEAMKKLAGKLMWLMLDSLGITMEDIEWAGSKAQFDEKACAAMQLNSYPSCPDPDHAMGLAPHTDSTFLTILSQNDISGLQVQREGSGWVTVPPLHGGLVVNVGDLFHILSNGLYTSVLHRVLVNRTRQRFSVAYLYGPPSNVEICPHEKLVGPTQPPLYRSVTWNEYLGTKAKHFNKALSSVSLCAPINGLFDVNDSNKSSVQVG

SEQ ID NO: 6908 - protein, 523 aa, Glycine max
MNNSTSLSINPSLSPPFRLPATQTTTLSSSFSTFPQNSLRFSCFQSFRPKPINPFCRKARLCSLQGSTSVKSRKSLVLCATNMTIAEDSLLQVVEEEEGPPDFALLDPEDNSRPRRIALFVEPSPFAYVSGYKNRFQNFIKYLREMGDEVMVVTTHEGVPKEFYGAKLIGSRSFPCPWYQKVPLSLALSPRIISAVAEFKPDIIHASSPGIMVFGALIIAKLLSVPIVMSYHTHVPVYIPRYTFSWLVQPMWWVIKFLHRAADLTLVPSAAIAKDLEEARVTAANKICLWNKGVDSESFHPRFKSHEMRLRLSNGEPEKPLIVHVGRLGVEKSLDFLKSLMDRLPEARIAFIGDGPYREELEKMFEGMPAVFTGMLGGEELSQAYASGDVFVMPSESETLGLVVLEAMSSGIPVVGARAGGIPDIIPEDQDGKIGYLYTPGDLEDCLSKLKPLLDDKELRETMGEAARLEMEKYDWRAATQKIRNENYNAAIWFWRKKRAQLLRPFQWLAQRIFHSPDPEANT

SEQ ID NO: 6909 - protein, 377 aa, Medicago sativa subsp. caerulea
MPSLSEAYRAHPVHVNHKHPDFNSLQELPESYTWTHLDDHTLINSNNTMKESANSSSVPVIDLNDPNASKLIGHACKTWGVYQVVNHGIPISLLDEIQWLGQTLFTLPSHQKLKAIRSPDGVSGYDLARISSFFPKLMWSEGFTIVGSPLDHFRQLWPQDYAKHCDTVLQYDEAMKKLAGKLMWLMLDSLGITMEDIEWAGSKAQFDEKACAAMQLNSYPSCPDPDHAMGLAPHTDSTFLTILSQNDISGLQVQGEGSGWVTVPPLHGGLVVNVGDLFHILSNGLYTSVLHRVLVNRTRQRFSVAYLYGPPSNVEICPHEKLVGPTQPPLYRSVTWNEYLGTKAKHFNKALSSVSLCAPINGLFDVNDSNKSSVQVG

SEQ ID NO: 6910 - protein, 665 aa, Arabidopsis thaliana; identical to SEQ ID NO: 2971

SEQ ID NO: 6911 - protein, 421 aa, Nocardioides sp. JS614
MRVALLSYRSKPHCGGQGIYIRHLSRELTNLGHSVEVFSGQPYPELDEGVALTKLPSLDLYREPDPFRVPKLKEFRDRIDVEEFATMCGAGFPEPKTFSLRAARALRDRVEDFDIVHDNQVLGYGLLEIEKMGLPLITTLHHPITFDRRIDMAATRNPWRKFTLSRWYGFLRMQGRVARQARRIMTPSETSKRDIVKDFGVDPERMQVILLGVDDGFVPPTEPRVPGRILAMASADAPMKGISTLLEAFAKLRTERDLELLLVTKPTPGGRTERLIDKLSIGDAVRFVHGVSDAELVELMGSAELACVPSLYEGFSLPTAELMACATPLVVSRAGAIPEVVGPDGLCADLVSPGDVGELTAAIAALLDDPERRERYGAAGRRRVEELFSWRAVAQQVAAAYEDVIADYRSEKQKEATRAHR

SEQ ID NO: 6912 - protein, 418 aa, Physcomitrella patens subsp. patens
MQWGGAGVVVLWCQKWMWRVGWVHVWKHLTLDNDRQEVGRSRRAELSDRFGHHQEDLQVIRRVDSGPGNAEGLRERRCVGHESCGLGLAGIALRGLFIIDKQGVIQHATINNLGIGRSVDETLRTLQVAASGWYLVCLGWRAARLRLDGGCRGWNGSGRTVRARQPRRGVPCWVEARGKDHEARLEAEQGVLRGHLSEWSGRCCSAAILWRVSGLLDGKSGGRVVVVEMWLLAAAESMLCRFRNDLCEAIRRGGMGGFGGGDYFFCVDRMALLEGCYFILPLSLDSDSLTLLASTLNHLLKMEFRKISILSTKHIMSEKKSVAVGRRSSLGRLPRRPSRRQDLFNVAESSIGGNEADNRGRDLESRSGVCELANCLRFFNMIIVPVLPILQPAPSLLWPIPLWLIHALQAVYDAYKMF

SEQ ID NO: 6913 - protein, 212 aa, Burkholderia sp. 383
MSLRLGDIAPDFEQESSLGPIKFHEWLGDGWGVLFSHPADYTPVCTTELGLTSKLKGEFEKRNVKVIALSVDGVESHKGWINDINETQSTVVGFPIIADADRKVSQLYDMIHPNANETLTVRSLFVIDPNKKVRLTITYPASTGRNFDEVLRVIDSLQLTDNYKVATPGNWKDGDDVVIVPSLQDPEELKKRFPKGFNAVRPYLRLTPQPNK

SEQ ID NO: 6914 - protein, 322 aa, Yersinia pestis CO92
MSKIYEDNSLTIGHTPLVRLNRIGNGRILAKVESRNPSFSVKCRIGANMIWDAEKRGILTAGKELVEPTSGNTGVALAFVAAARGYKLTLTMPETMSIERRKLLKALGANLVLTEGAKGMKGAIAKAEEIQATDPERYLILQQFSNPANPEIHEKTTGPEIWEDTDGDVDVFVSGVGTGGTLTGVSRYIKNTQGKAITTVAVEPTDSPVITQALAGQEIKPGPHKIQGIGAGFIPGNLDLSLVDRVALVTNEEAISMARRLMDEEGILAGISSGAAVAAAVKLSEEEGFTDKTIVVILPSSGERYLSTALFADLFTEQELQQ

SEQ ID NO: 6915 - protein, 476 aa, Hordeum vulgare subsp. vulgare
MRTTTRRLPPAPAAAAVLLAALTCLLLRPAAVAAAGGHAADRIVRLPGQPEVDFDMYSGYITVDEAAGRSLFYLLQEAPEEAQPAPLVLWLNGGPGCSSVAYGASEELGAFRVMPRGAGLVLNEYRWNKVANVLFLDSPAGVGFSYTNTSSDIYTSGDNRTAHDSYAFLAAWFERFPHYKYREFYVAGESYAGHYVPELSQLVHRSGNPVINLKGFMVGNGLIDDYHDYVGTFEFWWNHGIVSDDTYRRLKDACLHDSFIHPSPACDAATDVATAEQGNIDMYSLYTPVCNISSSSSSSSLSRRRTRGRYPWLTGSYDPCTERYSTAYYNRRDVQTALHANVTGAMNYTWATCSDTINTHWHDAPRSMLPIYRELIAAGLRIWVFSGDTDAVVPLTATRYSIGALGLATTTSWYPWYDDLQEVGGWSQVYKGLTLVSVRGAGHEVPLHRPRQALILFQQFLQGKPMPGRTTNVTVA

SEQ ID NO: 6916 - protein, 968 aa, Candida albicans SC5314
MGVPALFRWLSRKYPKIISPVVEEEDHEIGGAKYENPNPNGEIDNLYLDMNGIVHPCSHPEHKKPPETEDEMFLDIFKYTDRVLMMARPRKVLMIAVDGVAPRAKMNQQRARRFRAAKDAELKAKQLEIEVQERELRGEIINDAIKGKKQWDSNAITPGTPFMDRLAEALRYWVAYKLSSDPGWANLQVIISDATVPGEGEHKLMSFIRSQRSDPQYDPNTKHCIYGLDADLIFLGLATHEPHFRVLREDVFASQDKKFTIKDQIADANSNGDTVAKEDKKPFLWLHVNVLREYLQVELFTPRMSFPFELERAIDDWVFLCFFAGNDFLPHLPSLDVRDNGIDTLVQCWKRSLPILKDYVTCDGKLNLKSVEVLMSNLAYKESEIFKNKHAAEQRREENNKRRKLAQEQERALKRVYSSQVSKGKDKAPLTADVNMPLMDTSGQNVEGYANLTNSDIVQNRAILTKANLANSDAAAELKKLIDSKKTQVTVVQDQIATDSSANSETTTSESELEEIQSDNSLKRKLEPEEDKQTQSDDIKLWEPGYNKRYYEAKFHYQSDEEIEQTKRDVVRHYVEGIAWVALYYYQGCPSWNWYFPYHYAPFAADFTNLEELFPEGVKFKLGEPFRPFEQLMSVLPAASGHTLPQVFRDLMSNPDSEIIDFYPEEFEIDMNGKKMSWQGIPLLPFIDEKRLLDAVQKKYELLTPDEKSRNTNKEAELFISPANKNFSKFSEKLYKENENEVTFKYAKSGLSGKIFKLGTFNPEGVFNFPLNEGYMPNVNNSDYFQAIYHFPKTKTGKSMILNGHIAPLPALTTADKNDLLYQLDKFNNRRNGGRFNSTLDNSDYINKGPAGKELYKTYSMRRGGYRSYLQYLTNGHHPDHQSQNSQYLSYGQQKPYGGQGSYNQQGYYNQQGRYNQQGNNYNQQGRYSQQSQYNQYRSNTQRFNNNQNYNQSSNNSRSGYLPPRPQR

SEQ ID NO: 6917 - protein, 113 aa, Frankia sp. BMG5.10
PLMRSKTRIVKGGKEPEIWGFDGSSTNQAPGSNSDCVLQPVFTCPDPLRGGDNVLVLCEVQLTDFTPHPTNTRAAARAVAEKYADMSPMFGIEQEYTFFQNGRPLGWPAAGYP

SEQ ID NO: 6918 - protein, 280 aa, Oryza sativa
MMGLLSLLLVVVSCLAAPATADWYGPLAVYWGRHKDYEGSLREACDTGRYNTVIITFYSVFGYVKGRYGLDISGHPVAAVGADIKHCQSKGVQVLLSIGGQGGGYSLPSSQSAADVADNLWNAYLGGRRAGVPRPFGDAAVDGIDFFIDQGGADHYDELARQLHGRGVALTATVRCSYPDSRLQKALATGLLGRIHVRIFGDNQCTMLPLDAWEKWAAAYPRSKVWLALVASWEQDEVGYMFQKDLYYGVLQFILNKPNYGGIAIWDRYYDKKANYSGEG

SEQ ID NO: 6919 - protein, 392 aa, Burdachia sphaerocarpa
DLEPVNPADVPVTAAGALKSYKLAAKAISRLQSLPSGNISLLCDVLVKEVRDLTGYDRVMVYKFHDDEHGEVVSECRRSDMESYLGLHYPATDIPQASRFLFMKNKVRMICDCLAPPVKVIQDERLPQPLSLCGSTLRSPHGCHAQYMVNMGAIASLIMSVTINEDDDTIDGDEQQMARKLWGLVVCHHTSPRFVPFPLRYACEFLIQVFGVQITKEVELAAQVREKHILRIQTLLCDMLLRDAPVAIITQSPNVMDLVKCDGAALYYKKKFWLLGVTPTEAQIRDIAEWPVEYHSGNTGLSTDSLMEAGYSGASSLGDAVCGMAAVSITSRDFLFWFRSHTAKEIKWGGAKHDPADKDDGRKLHPRSSFKAFLEVVKWRSLPWEDMEMDAI

SEQ ID NO: 6920 - protein, 103 aa, Frankia sp. BMG5.12
IVKSGKEPEIWGFDGSSTNQAPGSNSDCVLQPVFTVPDPLRGGDNVMVLCEVQLTDFTPHPTNTRAAARKVAEKYADMTPNFGIEQEYTFFQNGRPLGWPATG

SEQ ID NO: 6921 - protein, 352 aa, Zea mays
IYVPERFAFVTRLGMDYYNILKVNRNATLEDLKKSYRRLARTWHPDKNLTGGAEAEAKFKQITEAYEVLSDPEKRAIYDQYGEEGLKGMPPPGSQSRSSTTAGPSGPSNFHYNPSDPDDFFAEFMASNKTYSFDHDRRRFQPRSHWTSARNSRSEAPSGSQKENGASTSNIEKPPPVEKTLLCTLEELYNGTKRKMKITRNVAKPDGRIEVETEVLAVEVLPGWKKGTKITFPNKGDKLHGQLAQDLTFVLDSKPHDVYNLEGNNLLVKQVIPLVDALAGAEINLTTLDGRNLPVRVEEVVRPGYEVVLENEGWPIRKEPGKKGKLVIKFDVTFPMRLSPSQRAAIRRIMGS

SEQ ID NO: 6922 - protein, 392 aa, Glandonia macrocarpa
DLEPVNPADVPVTAAGALKSYKLAAKAISRLQSLPSGNISLLCDVLVKEVRDLTGYDRVMVYKFHEDEHGEVVSECHRSDLESYLGLHYPATDIPQASRFLFMKNKVRMICDCLAPPVKVIQDERLPQPLSLCGSTLRSPHGCHAQYMANMGAIASLVMSVTINEDDDMIDGDEQQMARKLWGLVVCHHTSPRFVPFPLRYACEFLIQVFGVQITKEVELAAQVREKHIFRIQTLLCDMLLRDAPVAIITQSPNVLDLVKCDGAALYYKKKFWLLGITPTEAQIRDIAEWLLEYHSGNTGLSTDSLMEAGYPGASSLGDAVCGMAAVSITSRDFLFWFRSHTAKEIRWGGAKHDPDDKDDGRKMHPRSSFKAFLEVVKWRSLPWEDVEMDAI

SEQ ID NO: 6923 - protein, 199 aa, Glycine max
EIKVPPFTSANEFKSIEKFKIFNTNNLWVNLNAVKRLVEADALKMEIIPNPKEVDGIKVLQLETAAGAAIRFFDKAIGINVPRSRFLPVKATSDLLLVQSDLYTLEDGFVIRNKARENPENPSIELGPEFKKVSNFLGRFKSIPSIVELDSLKVAGDVWFGAGVILKGKVSIVSKPGVKLEVPDGVAIVDKEINGPEDL

SEQ ID NO: 6924 - protein, 96 aa, Glycine falcata
LYAGINISGTNGEVMPGQWEYQVGPSVGIEAGDHIWASRYILERITEQVGVVLSLDPKPIEGDWNGAGCHTNYSTKSMREDGGFEVIKKAILNLSL

SEQ ID NO: 6925 - protein, 106 aa, Glycine max
QIETAARPYAFIKFDTFMQKTKKLYQDTHTQRNIAKLNDELYEVHQIMTRNVQEVLGVGEQLDQVSQMSSRLSSESRIYADKARDLNRQKYHAAIGNCVLGIALVI

SEQ ID NO: 6926 - protein, 392 aa, Barnebya dispar
DLEPVNPADVPVTAAGALKSYKFAAKAISRLQSLPSGNIFLLCDVLVKEVRDLTGYDRVMVYKFHEDEHGEVVSECRRSDLESYLGLHYPATDIPQVSRFLFMKNKLRMICDCLAPPVKVIQDENLPQPLSLCGSTLRSPHGCHAQYMTNMGTIASLVMSVTINEDDDMKDCEQPQMPRKLWGLVVCHHTSPRFIPFPLRYACEFLIQVFGVQINKEVELAAQVREKHILRIQTLLCDMLLRDAPVAIITQSPNVMDLVRCDGAALYYKNEFWLLGVTPTEAQIRDIAEWLLECHSGNTGLSTDSLMEAGYPGASVLGDAVCGMAAISITSRDFLFWFRSHTAKEIKWGGAKHDPDDKDDGRKMHPRSSFKAFLEVVKWRSLPWEDIEMDAI

SEQ ID NO: 6927 - protein, 346 aa, Zea mays
MGVDYYKVLQVGRGASDDELKKAYRKLAMKWHPDKNPSNKKEAEAKFKQISEAYEVLSDSQKRAIYDQAGEEGLKAQVPPTGAGGPSGSSFYGGNASTFQFNPRSADDIFAEFFGFSSPFSTMGGMGGGAERGMRGSRFGMFGDDIFGSHPQFPGEASMHVPQRSQKVPPIENRLPCNLADLYKGTTKKMKISREVLDASGRTLVVEEILTIDIKPGWKKGTKITFPEKGNEAPHIIPADIVFIIDEKPHDVFTRDGNDLVMTQKITLAEALTECTVNITTLDGRNLTVQINNIIYPGYEEVVPREGMPIQKDSSKKGNLRIKFSIKFPSRLTSEQKAEIKRLLGS

SEQ ID NO: 6928 - protein, 224 aa, Cryptococcus neoformans var. neoformans JEC21
MVRSTTIFRVHDALPLAASVDDESTEKALTEYKQQSKLIFRRLNANSEPACSIESGAYTLHYLIVDKVIYMCICDNSYPRKLAFSYLDELSKEFQRSYGDKIDGATRPYAFMGFDTFIGKTTRLYRDSRSLTQGGGPAAPNSRLDQLNENLKDVTQIMTKNMEDLLWRGDSLDRMSQLSTSLRSESAKYRKAARNINLEALIRKWAPIGGIAFFIILFIWWRFF

SEQ ID NO: 6929 - protein, 76 aa, Zea mays
  misc_feature (16)..(16): Xaa can be any naturally occurring amino acid
  misc_feature (22)..(22): Xaa can be any naturally occurring amino acid
RPRVRFPSLNNSGNTXTMTSMXQAYFWEGNLHKMGAIDYITILNHRINNQNEVCMEDTPKMLDDVNGGSLIFYKGI

SEQ ID NO: 6930 - protein, 392 aa, Spachea correae
DLEPVNPADVPVSAAGALKSYKLAARAISRLQSLPSGNISLLCDVLVKEVRDLTGYDRVMVYKFHEDEHGEVVSECRRPDLEAYLGLHYPATDIPQASRFLFMKNKVRMICDCLAPPVKVIQDEKLPQSLSLCGSTLRSPHGCHAQYMANMGSIASLVMSVTVNEDDDMVDGDQQRMARKLWGLVVCHHTSPRFVPFPLRYACEFLIQVFGVQINKEVELAAQGREKHIMQTQTLLCDMLLRDAPVAIVTQSPNVMDLVKCDGAALYYRKKFWLLGVTPTEAQIRDIAEWLLEYHSGNTGLSTDSLMEAGYPGTSVLGNAVCGMAAVKITSRDFLFWFRSHTAKEIKWGGAKHDPDDKDDIRKMHPRSSFKAFLEVVKWRSLPWEDMEMDAI

SEQ ID NO: 6931 - protein, 473 aa, Zea mays
MAATAVSVDEKLDKLRAEVAKLSQISENEKAGFISLVSRYLSGEAEQIEWSKIQTPTDEVVVPYDTLTSPPEDLEETKKLLDKLVVLKLNGGLGTTMGCTGPKSVIEVRNGFTFLDLIVIQIESLNKKYGCNVPLLLMNSFNTHDDTQKIVEKYSNSNIEIHTFNQSQYPRIVTEDFLPLPSKGKSGKDGWYPPGHGDVFPSLNNSGKLDILLAQGKEYVFVANSDNLGAIVDIKILNHLINNQNEYCMEVTPKTLADVKGGTLISYEGRVQLLEIAQVPDEHVNEFKSIEKFKIFNTNNLWVNLKAVKRLVEAEALKMEIIPNPKEVDGVKVLQLETAAGAAIRFFDKAIGINVPRSRFLPVKATSDLLLVQSDLYTLVDGFVIRNPSRANPANPSIELGPEFKKVANFLARFKSIPSIVELDSLKVSGDVWFGSGITLKGKVTITAKSGVKLEVPDGAVFENKDVNGPEDL

SEQ ID NO: 6932 - protein, 392 aa, Tricomaria usillo
DLEPVNPADVPVTAAGALKSYKLASKAISRLQSLPSGNMSLLCDVLVKEVRDLTGYDRVMVYKFHEDEHGEVVSECRRSDLESYLGLHYPATDVPQASRFLFMKNKVRMICDCLAPPVKVIQDERLPQPLSLGGSTLRSPHGCHSQYMTNMGTIASLVMSVTINEEDERMDGDQQQMTTKLWGLVVCHHTSPRFVPFPLRYACEFLIQVFGVQIDKEVELVAQVREKHILQIQTMLCGMLLRDAPVAIVTQSPNVMDLVKCDGAALYFKSKTWLRGVTPTEEQIKDIAEWLLKYHSGNTGLSTDSLMEAGYPGASVLGDAVCGMAAVGITSRDFLFWFRSHTAKEINWGGAKHDPDDKDDGRKMHPRSSFKAFLEVVKWRSMPWEDMEMDAI

SEQ ID NO: 6933 - protein, 608 aa, Orobanche corymbosa
SGKPFYAIIHRVTGSLIIDFEPVNPHEVPMTAAGALQSYKLAAKAITRLQALPSGSVKRLCDTMVQEVFELTGYDRVMVYKFHDDDHGEVFSEITKPFLEPYVGLHYPATDIPQAARFLFMKNKVRMICDCLANHVTVVQDDNLPFDLTLCGSTLRAPHSCHLQYMENINSIASLVMSVVVNEGDEDGPDSSSGPNKRERLWGLVVCHNTSPRFVPFPLRYACEFLAQVFAVHVTKELEWENQLLEKNILRTQTLLCDLLLRNTPLGIVSGSPNVMDLVKCDGAVLLHKNTKYRLGLTPTDFQIHDIVSWLDEYRRDSTGLSTDSLYDAGFPGALALGNAVCGMTAARVTDKDWLFWFRSHTAGEVRWSGAKHEPGEKDDGRKMHPRSSFKAFLEVVKTRSLPWRDYEMDAIHSLQLILRNASRENDEKDSEGREIQARLNELQIDGVKEIEAVTSEMVRLIETASVPIFAVDLDGLVNGWNTKIADLTGLGVDEAIGRHFLALVEDSSADTVSKMLELALQGKEEQNVQFEIKTHGQRSESGPITLIVNACASRDVQENVVGVCFIAHDITTQKSMMDKFTRIEGDYRSIIQNPNPLIPPIFGTDEF

SEQ ID NO: 6934 - protein, 213 aa, Yarrowia lipolytica CLIB122
MVLSTLIMRASDGLPLSASVDDGQENLSEQKKQCKLVTQKLSANSADRASIESGNYVIHYLMKDGIVYYCISESSYPRKLAFSYLDELDREFQKSHGQEALKEGVRPYKFVEFDTFMQKTKRVYQDTRATHNLDKLNTELQDVTRVMTKNIEDLLHRGHSLDHMSDLSSNLRTESKKYRRAAQRINWEAMIRQYIPFIGVGLIGLFMLWWMLF

SEQ ID NO: 6935 - protein, 593 aa, Oryza sativa Japonica Group
MASAAAPKRCYYEVLGVPRDCSPADIKLAFRRLALSLHPDKQPPGSDVAAATAAFQELQHAHSVLSDPHERSYYDSHRSQILFSDHHPSSGPGRGGGVASASASPVPDLFAFFSSSAFSGFSDSGRGFYKVYGDVFDRVFAQELAYARRMGMPADAVPTPPVIGNLDSPQAQVAAFYSYWLGFGTAMDFGWAAEWDAARGESRRVRRLMEEDNKKATRKARREYNDAVRGLAAFCKKRDKRVVDMALKKKVEEEKRKAEEAARKKEEERRRKERAMAYQEPEWARVDEDEAAVFEDDEEEETRAKRKEELYCVACNKKFKSDKQWKNHEQSKKHRDKVSELRMVFEEEEEALKDAEEEEPEEVDVGFDFQPAQESEESEFSDAAEELADELSEGLEVRDEEEKGDKHLGNGEQKVGSYDETSVLEEMLSRSRRKNRKSGFVAPQEEASPAGAMDDDDDEDTSYEINNVKKKGRRRRAAKKGGTYADNGQGRKSENQPEESRHNNDENGADDKMEGPSSNEDSAAASKEDQQKGKTGNTKKNKKGTEKNTTISSEQKGTSKGKKQKEQVVFSLGRNRSCNAEDTTEKSLKRTRK

SEQ ID NO: 6936 - protein, 174 aa, Arabidopsis thaliana
MLVGENCVHETYYEILSVKEDASYEEIRNSYRSAILHSHPDKLNNTSRSSSDDEKFLKIQKAWEVLSDAELRVVYDNDLRSSRHDGITADEISIEDMSVEITGDVIDLFYQCRCGDYFCVDSSELGTMGFALLRDGDFVYVKRLGAFVASVVLPCGSCSLKTRVWVDSDMKIPI

SEQ ID NO: 6937 - protein, 362 aa, Oryza sativa
MGMDYYKILGVDKAASDDDLKKAYRKLAMKWHPDKNPNNKKEAENKFKQISEAYEVLSDPQKRAVYDQYGEEGLKGQVPPPGAGGAGPGGATFFSTGGDGPNVFRFNPRNAEDIFAEFFGSSSPFGGMGGGMGGGMGGGPGMRTGGTRFSSSIFGDDIFGSAFGGGADGHHGMHGGGAGRALKAPAIERKLPCSLEELYKGTTKKMKISREIADASGKTIPVEEILTIDVKPGWKKGTKITFPEKGNEQPNVIPADLVFIIDEKPHPVFTRDGNDLVVTQKIPLAEALTGHTVHLTTLDGRSLTIPITSVINPGYEEVVRGEGMPIPKDPSKKGNLRVKFDIKFPARLTADQKSGVKRLLGQ

SEQ ID NO: 6938 - protein, 304 aa, Oryza sativa
MVALGRRSWLVPLAMVLAVSSCLAGPAMAAGKTGQMTVFWGRNKNEGTLKETCDTGLYTTVVISFYSVFGHGRYWGDLSGHDLRVIGADIKHCQSKNIFVFLSIGGAGKDYSLPTSKSAADVADNIWNAHMDGRRPGVFRPFGDAAVDGIDFFIDQGAPDHYDDLARNLYAYNKMYRARTPVRLTATVRCAFPDPRMKKALDTKLFERIHVRFYDDATCSYNHAGLAGVMAQWNKWTARYPGSHVYLGLAAANVPGKNDNVFIKQLYYDLLPNVQKAKNYGGIMLWDRFYDKQTGYGKTVKYWA

SEQ ID NO: 6939 - protein, 293 aa, Corynebacterium efficiens YS-314
MEAVSKLLDALQIDRSDEAQPIQPIATISVTEDMATAMQLHSQGWRSVYHHEILARGLAPDDLRTMLTQRLRWAQGTLQVMLRDNPMVKKGLSAGQRLMYFATMWSYLSGFTAVIYLAAPVIYLVFGVMPVTAWSGDFFVRFLPYFIINQLLFLFVARGMRTWRGQQYSLALFPVWIKACWTATLNVWFGRPLDFAVTKKDGRDERGIPFRQIWPQLTAMVVLVLAMAIGVGRVIVGVADSMGTIVNVLWVIYDLVVLSVILQAAFYRGFTEPAEPEPESVGAAEISKKPEGE

SEQ ID NO: 6940 - protein, 612 aa, Gibberella zeae PH-1
MPSQKNSNGTGQVSHRLRNFFRMNTGGSTGSASSDKEKDKDKEKNSASTTPDPSKPRHTKFFSNTVGRLRAHTVASEGNQLEEAMSPTAHANPYFAHQGQPGLRHHNSDSVPPSPPDTPSLKVHGPDGTPATDQTTSETKEELARRLRRVASAPNAQGLFSKNDPNNERPATAELGKDPLLTSSGALGLIEPAKTPQNEEMPTHANPEDILAALPAPNMSMAFRRTYSSNSIKVRNVEVSPSSFDKIKLIGKGDVGKVYLVREKKSSRLYAMKILSKKEMIKRNKIKRALAEQEILATSNHPFIVTLYHSFQSEDYLYLCMEYCSGGEFFRALQTRPGKCIPEEDARFYAAEVTAALEYLHLMGFIYRDLKPENILLHQSGHIMLSDFDLSKQSDPGGKPTMIVGKNGARTDALPTIDTRSCIANFRTNSFVGTEEYIAPEVIKGSGHTSAVDWWTLGILIYEMLYGTTPFKGKNRNATFANILREDIPFPDHAGAPQISKKLLIKDENRRLGARAGASDIKAHPFFRTTQWALIRHMKPPIVPHAGRGVDTVNFRNVKESESVDLSGSRAMNLKGVPLDSGLATPGGEIADPFLEFNSVTLHHDGDDDHHR

SEQ ID NO: 6941 - protein, 156 aa, Arabidopsis thaliana
MACEGGGSNVRSSYYTVLGIRKDASVSDIRTAYRKLAMKWHPDRYARNPGVAGEAKRRFQQIQEAYSVLNDENKRSMYDVGLYDPHEDDDDDFCDFMQEMISMMNNVKDEGESLEDLQRMFTDMVGGDGVSYDCNNNPKGSKRPRVNVSRSSAAMR

SEQ ID NO: 6942 - protein, 124 aa, Frankia sp. BMG5.2
PLTRSKTRIVKSGKEPEIWGFDGSSTNQAPGSNSDCVLQPVFTVPDPLRGGDNVLVLCEVQLTDFTPHPTNTRAAARKVAEKYADMTPNFGIEQEYTFFQNGRPLGWPATGFPEPQGPYYCGVG

SEQ ID NO: 6943 - protein, 893 aa, Saccharomyces cerevisiae
MAGHHHEHEQERDHEQEHEHDSLQRPTTGSERTRSISFSKLLTRSWKRNASSSNNMSVSSVNLYSDPENSRESDHNNSGSEGQSSRFSKLKSMFQSGNSSKNASAHNSSQSSLEGDSASSSSKLRYVKPMTSVANASPASPPLSPTIPETDVLQTPKMVHIDQHEHEREHSNCGSPIMLSSSSFSPTVARTGTGRRRSPSTPIMPSQNSNNSSSTSAIRPNNYRHHSGSQGFSSNNPFRERAGTVRSSNPYFAYQGLPTHAMSSHDLDEGFQPYANGSGIHFLSTPTSKTNSLTNTKNLSNLSLNEIKENEEVQEFNNEDFFFHDIPKDLSLKDTLNGSPSRGSSKSPTITQTFPSIIVGFDNEYEEDNNNDKHDEKEEQQTTTDNKTRNLSPTKQNGKATHPRIKIPLRRAASEPNGLQLASATSPTSSSARKTSGSSNINDKIPGQSVPPPNSFFPQEPSPKISDFPEPRRSRRLRTKSFSNKFQDIMVGPQSFEKIRLLGQGDVGKVFLVREKKTNRVYALKVLSKDEMIKRNKIKRVLTEQEILATSNHPFIVTLYHSFQSEDYLYLCMEYCMGGEFFRALQTRKTKCICEDDARFYASEVTAALEYLHLLGFIYRDLKPENILLHQSGHIMLSDFDLSIQAKDSKVPVVKGSAQSTLVDTKICSDGFRTNSFVGTEEYIAPEVIRGNGHTAAVDWWTLGILIYEMLFGFTPFKGDNTNETFTNILKNEVSFPNNNEISRTCKDLIKKLLTKNESKRLGCKMGAADVKKHPFFKKVQWSLLRNQEPPLIPVLSEDGYDFAKLSSNKKRQTSQDSHKHLDEQEKNMFEERVEYDDEVSEDDPFHDFNSMSLMEQDNNSMIYGNTNSYGKIAYTPNSNRSRSNSHRTFFKR

SEQ ID NO: 6944 - protein, 170 aa, Medicago sativa
YCFLPALSLFSGQFIVQSLSVTFLVFLLGITVTLCLLALLEIKWSGITLHDWWRNEQFWLIGGTSAHPAAVLQGLLKVIAGVDISFTLTSKSATPEDGEDEFADLYLVKWSFLMVPPITIMMVNTIAIAVGVARTLYSPFPQWSRLVGGLFFSFWVLCHLYPFAKGLLGR

SEQ ID NO: 6945 - protein, 273 aa, Vitis vinifera
MAADYYKLLRVNRNASAEELKKAYKRLAIKWHPDKNPNHNRVEAEAKFKQISEAYDVLSDSRKRQIYDLYGYQYASFNHRDARDVFAELFGSGGKAMEKRLDCSLEELYQGSKREIKISRTVIRESGKARIVEETLLITIGPGWKKGTKITFPMKGNQEPGMTPSDLIFVVHEKPHALYEREGNDLVVKQSISLLDALTGKTLILTTLDGRNLTIPVTDIVRPGYVMVVPDEGMPMSKEPTKKGNLKIKFDVKFPPRLTAQQKYEVKRVLVGG

SEQ ID NO: 6946 - protein, 392 aa, Tetrapterys discolor
DLEPVNPADVPVTAAGALKSYKLAAKAISRLQSLPSGNISLLCDVLVKEVRDLTGYDRVMVYKFHEDEHGEVVSECRRSDLESYLGLHYPATDIPQASRFLFMKNKVRMICDCLAPPVKVIQDERLPQPLSLCGSTLRSPHGCHAQYMTNMGTIASLVMSVTVNDDDDMMDGDQQQMTRKLWGLVVCHHTSPRFVPFPLRYACEFLIQVFGVQINKEVELTAQVREKHILQIQTMLCDMLLRDAPVAIITQSPNVMDLVKCDGAALYFKKKTWLLGVTPMEEQVRDIAEWLLEYHSGNTGLSTDSLMEAGYPGASDLGDAVCGMAAVSITSRDFLFWFRSHTAKEIKWGGAKHDPDDKDDGRKMHPRSSFKAFLEVVKWRSVPWEDVEMDAI

SEQ ID NO: 6947 - protein, 145 aa, Triticum aestivum
MASSGKMEGPSAPALRRDPYEVLSVSRDSSDQEIKSAYRKLALKYHPDKNASNPEASELFKEVAYSYSILSDPEKRRQYDTAGFEALENEGMDMEIDLSNLGTVNTMFAALFSKLGVPIKTTVSPTVQDYDGTLQTSPFGINYKV

SEQ ID NO: 6948 - protein, 392 aa, Stigmaphyllon sagraeanum
DLEPVNPADVPVTAAGALKSYKLAAKAISRLQSLPSGNISLLCDVLVKEVRDLTGYDRVMVYKFHEDEHGEVVSECRRSDLESYLDLHYPATDIPQASRFLFMKNKIRMICDCMAPPVKVIQDETLPQPLSLCGSTLRSPHGCHAQYMTNMGTIASLVMSVTINEDDDTMDGDQQQMTRKLWGLVVCHHTSPRFVPFPLRYACEFLIQVFGVQINKEVELAAQVREKHILQIQTMLCDMLLRDAPVAIITQSPNVMDLVKCDGAALYFKNKTWLLGVTPTEEQIRDMAQWLLEHHSGNTGLSTDSLMEAGYPGASALGDAVCGMAAVSITSRDFLFWFRSHTAKEVKWGGAKHDPDDKDDLRKMHPRSSFKAFLEVVKWRSMPWEDIEMDAI

SEQ ID NO: 6949 - protein, 546 aa, Glycine max
FPRENFFFFRGGIPPTEEKRGPPGGGLKKRAPGGEIPGPFPELFLPLPSSHLTSAPVLSSSLPPEAAASLLSARIAMAAAADSKIDNLRDAVAKLGEISENEKAGFISLVSRYLSGEAEQIEWSKIQTPTDEVVVPYDTLAPPPEDLDAMKALLDKLVVLKLNGGLGTTMGCTGPKSVIEVRNGFTFLDLIVIQIESLNKKYGCSVPLLLMNSFNTHDDTQKIVEKYSNSNIEIHTFNQSQYPRIVTEDFLPLPSKGQTGKDGWYPPGHGDVFPSLNNSGKLDTLLSQGKEYVFMANSDNLGAIVDIKILNHLITNQNEYCMEVTPKTLADVKGGTLISYEGRVQLLEIAQVPDEHVNEFKSIEKFKIFNTNNLWVNLKAIKRLVDAEALKMEIIPNPKEVDGVKVLQLETAAGAAIRFFEKAIGINVPRSRFLPVKATSDLLLVQSDLYTLVDGYVIRNPARVKPSNPSIELGPEFKKVANFLARFKSIPSIVELDSLKVSGDVSFGSGVVLKGNVTIAAKAGVKLEIPDGAVLENKDINGPEDL

SEQ ID NO: 6950 - protein, 392 aa, Lophopterys floribunda
DLEPVNPADVPVTAAGALKSYKLAAKAISRLQSLPSGNISLLCDVLVKEVRDLTGYDRVMVYKFHEDEHGEVVSECRKSDLESYLGLHYPATDIPQASRFLFIKNKVRMICDCLAPPVKVIQDERLPQPLSLCGSTLRSPHGCHAQYMTNMGTIASLVMSVTINEDDDTMDGDQQQTTRKLWGLVVCHHTNPRFVPFPLRYACEFLIQVFGVQINKEVELAAQVREKHILQIQTMLCDMLLRDAPVAIITQSPNVMDLVKCDGAALYFKNKIWLLGVTPTEEQIRDIAEWLLEYHSGNTGLSTDSLMEAGYPGASVLGDAVCGMAAVSITSRDFLFWFRSHTAKEIKWGGAKHDPDDKDDGRKMHPRSSFKAFLEVVKWRSMPWEDVEMDAI

SEQ ID NO: 6951 - protein, 552 aa, Ashbya gossypii ATCC 10895
MKTCYYELLGVDSGASDTDLKKAYRRKALQYHPDKNIGNVQQATEIFASIRAAYEVLSDAQERAWYDAHREQILNDDFENDEEDYTVDSAVTGVTTEEILHFFNSGLYTRIDDTPAGLYQIAGKVFAKLAKDELICGRRQGLAEYSALNDDQFEKDIIELGYVQACEKYQYPDQTVFPVFGYSATSYEDLRAFYKAWGSFNTVKSFSWEDEYMYSRNYDRRTKREINKRNEKKRTQAKNEYNKTVRRFVTFIKKFDRRMKEGAKRAEAEKKRKLQETLRKQIEKDRLANEQSTGQFKLQSWQTVDQQCLDDLEKHFAGSESELKSADEEVTVLIYDCFVCNKNFKSERQLQNHNNTRSHRKAVRQIQWEMKKDSLELGLDEISDLEEFDSAYEDAMSSGPLQAAPASDLADIMAELAEIEQQLQQPASPSAQPCFEIDDQVESGEPSVAGDTEEPAVKHTDPELDRLLASLVADEQSDDWDALPNKRSRKKQTKSAKRASATQTASRPFTAAGHRCASCSQSFESRNKLFQHVQSLGHGAPPQKVKKQQRKA

SEQ ID NO: 6952 - protein, 260 aa, Hordeum vulgare subsp. vulgare; identical to SEQ ID NO: 2997

SEQ ID NO: 6953 - protein, 392 aa, Mionandra camareoides
DLEPVNPADVPVTAAGALKSYKLAAKAISRLQSLPSGNISLLCDVLVKEVRDLTGYDRVMAYKFHEDEHGEVVSECRRSDLESYLGLHYPATDIPQASRFLFMKNKVRMICDCLAPPVKVIQDERLPQPLSLCGSTLRSPHGCHAQYMTNMGTIASLGMSVTVNEDDDTMDGDQQQMTRKLWGLVVCHHTSPRFVPFPLRYACEFLIQVFGVQINKEVELAAQVREKHILQIQTMLCDMLLRDAPVAIITQSPNVMDLVKCDGAALYFKNKTWLLGVTPTEEQIRDIAEWLLKYHCGNTGLSTDSLMEAGYPGASALGDAVCGMAAVSITSRDFLFWFRSHTAKEIKWGGAKHDPDDKDDLRKMHPGSSFKAFLEVVKWRSMPWKDVEMDAI

SEQ ID NO: 6954 - protein, 616 aa, Glycine max
MTIHSVVIQKLLSTNAQVGRRVAAHHLKEFTYGFRNKMAIIDSDKTLICMRSACNFMASLARHNGRFMFINTNPLFDEIFDLMTKKVGSYSPSTNSLWRTGGFLTNSLSPKKFRSRNKKLVFGPTQPPDCIFIVDTERKSSVINEAFKLQIPVVALVDSAMPLDVYKRIAYPVPANHSVQFVYLFCNLITKTLLHEKAKSDAANPDIDAQMEEAPRKGKGKTYLDKVDVTVVLYDNLAPLPQDIEETKKLLDKLVVLKFNGSQGRNMCFDGPKSAIDICDGLTYLDLIINQIETLNSKYGSRVPLLLFNKDDIHDSSLKVLEKYSKSSVEVHTFKQGEDRELKSLGEYYSKEEVHPFDDVDVFRLLMTGGTLDSLLSQGKEYILVLKSDNVATVLDPNILNHLMINDIEYCMEVTPSNSFNLMLPTTKFKLREIGGDQDKHLKDNFKLIDTTNMWVSLRAIKRFVDTVEVRQKKPSFSKDTAAGPAIKFFDNVFGVSVPESRFLPLDATSDLLLLQSDLYTCREGVLTRNPARTNPLNPVIDLGPEFEKFGDFQSRFRSIPSIIELDSLMVRGDVWFGANITLKGQVTIAAKPGLKLEIPDGVTIENKEINDPADI

SEQ ID NO: 6955 - protein, 392 aa, Aspicarpa brevipes
DLEPVNPADVHVTAAGALKSYKLAAKAISRLQSLPSGNVSLLCDVLVKEVRDLTGYDRVMMYKFHEDEHGEVVSECRRSDLESYLGLHYPATDIPQASKFLFIKNKVRMICDCLAPSVKVIQDERLTQPLSLCGSTLRSPHGCHAQYMTNMGAIASLVMAVTVNEDEDTMDGDQQHMTRKLWGLVVCHHTSPRFVPFPLRYACEFLIQVFGVQVTKEVELAAQVREKHSLQIQTMLCDMLLRDALVAIITQSPNVMDLVKCDGAALYFKNKTWFLGVTPTEEQIRGIAEWLLKYHSGNTGLSTDSLMEAGYPGASGLGDAVCGMAAVSITSRDFLFWFRSHTAKEIKWGGAKHDPDDKDDLRKMHPRSSFKAFLEVVKWRSTPWEDIEMDAI

SEQ ID NO: 6956 - protein, 308 aa, Oryza sativa
  misc_feature (296)..(296): Xaa can be any naturally occurring amino acid
MAGSRFGSFKSEKGDPAATAAQRRDPYEVLGVGRNATDQEIKSAFRRMALKYHPDKNGDDPVASDMFQEVTFSYNILSDPDKRRQYDTSGFEAIEADSQELELDLSSLNTVNTVFAALFSKLGVPIKTTVSATVLEEALNGSVMVSQLQLGNSVHRKVEKQSAHFYSVDITEKEAKMGLVCRVKSTDRSKFKLLYFELEENGGLSLALQEDSVKTGKVTSAGMYFLGFPVYRFEQNNLAAAAKDPDSAFFKRLDSFQPCDINELKPGTHFFAVYGDNFFRSVNYTIEVVCGESFPXAEKEKLQPGDPL

SEQ ID NO: 6957 - protein, 187 aa, Macrozamia communis
DEHGEVVAEIRRSDLEPYLGLHYPATDIPQASRFLFMQNRVRMICDCRATPVRVIQAAELRQPLCLVGSTLRAPHGCHAQYMANMGSIASLVMAVVINGNDEAGGSGRSSMKLWGLVVCHHTSPRAVPFPLRYACEFLMQAFGLQLNMELQLAAQLTEKHILKTQTLLCDMLLRDAPIGIVTQSPSI

SEQ ID NO: 6958 - protein, 71 aa, Oryza sativa
  misc_feature (14)..(14): Xaa can be any naturally occurring amino acid
  misc_feature (24)..(24): Xaa can be any naturally occurring amino acid
  misc_feature (26)..(26): Xaa can be any naturally occurring amino acid
  misc_feature (38)..(38): Xaa can be any naturally occurring amino acid
  misc_feature (47)..(47): Xaa can be any naturally occurring amino acid
LISIHLGRLAFVIXNPARTNPSNXSXIELGPEFKKVAXFLARFKFNXPVIVELDTLKVSGDVWIGSGVTLK

SEQ ID NO: 6959 - protein, 166 aa, Oryza sativa
MDASAGSGNASGGAGAGASACCYYSLLGIRKNASATDVRAAYRRLAMKWHPDRCVSDPGEANRRFQRIQEAYSVLSDKGKRAMYDAGLFDPLDDDDQDFSDFMQEMLVMMDNVKNEKPDTLEDLQKMLQDIVSGDGGSRGGGVGGRVPSDGTRRTRVAPYPAQSRR

SEQ ID NO: 6960 - protein, 257 aa, Onion yellows phytoplasma OY-M
MTKKDYYHILGLDKDASPEDIKKAYRSLAKKYHPDISKEANAENKFKEVQEAYSVLGDASKKSNYDRFGDASDNGFSGFGGGGFDGFDSFGDSFFSSFGDIFGNQQTKKPSYDKKVEMTISFMDAVLGANKTIEITVEADCRVCHGKGAVSNQDVITCKRCGGNGQIITEQRTFLGNIRSRQVCPNCSGKGQEIKNKCYACHGQKRQKVKQSATFNIPAGIQEGMSLQVPGKGNFVPLSNNQKRRRSILLTFNSASS

SEQ ID NO: 6961 - protein, 290 aa, Rhizobium leguminosarum
PLWGFDGSSTQQAEGRSSDCVLKPVAIYPDPARTNGALVMCEVMMPDGVTPHASNARATILDDEDAWFGFEQEYFFYQNGRPLGFPEQGYPAPQGPYYTGVGYSNVGDVAREIVEEHLDLCLAAGINHEGINAEVAKGQWEFQIFGKGSKKAADQIWMARYLLQRLTEKYGIDIEYHCKPLGDTDWNGSGMHCNFSTKYMREIGGKAYFEALMAQFEKNLMDHINVYGPDNDKRLTGKHETAPWNKFSYGVADRGASIRVPHSFVKNDYKGYLEDRRPNSQGYPYQMRLA

SEQ ID NO: 6962 - protein, 207 aa, Microcoleus chthonoplastes PCC 7420
MAQDWVKQKTRTSKELQSITYYGILGVHPSASALDIRRAYRELSKRYHPDTTDLPKETAKTKFQQLNEAYATLSSPERRILYDRTIRYSRVNVIQPPPGLNRPVVRSRVDHSSSAYLDPTDRPLSPGELFALFILGITFVGCLVLAIVIGLTRGDNAFQVSGISLSSRVTTPPLSQLQRIPRYPPSNQLFSPSNPPSIPIFVPSLNL

SEQ ID NO: 6963 - protein, 290 aa, Bradyrhizobium liaoningense
SLWGFDGSSTQQAEGHSSDCVLKPVAVFPDAARTNGVLVMCEVMMPDGKTPHPSNKRATILDDAGAWFGFEQEYFFYKDGRPLGFPASGYPAPQGPYYTGVGYSNVGDVARKIVEEHLDLCLAAGINHEGINAEVAKGQWEFQIFGKGSKKAADEMWMARYLMLRLTEKYGIDIEFHCKPLGDTDWNGSGMHANFSTEYMRTVGGKEYFEALMAAFDKNLMDHIAVYGPDNDKRLTGKHETAPWNKFSYGVADRGASIRVPHSFVNNGYKGYLEDRRPNSQGDPYQDRSQ

SEQ ID NO: 6964 - protein, 600 aa, Physcomitrella patens subsp. patens; identical to SEQ ID NO: 291

SEQ ID NO: 6965 - protein, 193 aa, Rhizobium gallicum
QLPLWGFDGSSTMQAEGRSSDCVLKPVAVYPDPARTNGALVMCEVMMPDGVTPHPSNSRATILDDEDAWFGFEQEYFFYENGRPLGFPEQGYPAPQGPYYTGVGYKNVGSVAREIVEEHLDLCLAAGINHEGINAEVAKGQWEFQIFGKGSKRAADQIWMARYLLLRLCEKYGIDIEFHCKPLGDTDWKRSGI

SEQ ID NO: 6966 - protein, 310 aa, Triticum aestivum
LPTMAIPAKASSSFSMACLLAAIFLFSSAPRSHGGSIAIYWGQNGNEGTLAETCSTGNYAFVNIAFLCSFGSAQETPQLNLAGHCDPYSNACTNLTADINLCQSKGVKVMLSIGGGAGGYTLNSEQDAADLAKYIWDSFLGGSSPKRPLGAAVLDGVDFDIEGGNPDYYGALAAHLKAYGGKGGSKEVYLSAAPQCPFPDQWVGKALQTGLFDYVWVQFYNNPPCQYVQGDTANLMDSWKQWTSGVHAKYMFLGLPAAPAAAGSGFIPAGSLESQVLPALKGSSKYGGVMLWSKFYDDQDGYSSAIKNAV

SEQ ID NO: 6967 - protein, 289 aa, Rhizobium leguminosarum
GKHPPRTLDGVPTVEQLPFWGDVSSTQQAEGRSSDCVLKPVAIYPDPARTNGALVMCEVMMPDGVTPHASNARATILDDEDAWFGFEQEYFFYQNGRPLGFPEQGYPAPQGPYYTGVGYSNVGDVAREIVEEHLDLCLAAGINHEGINAEVAKGQWEFQIFGKGSKKAADQIWMARYLLQRLTEKYGIDIEYHCKPLGDTDWNGSGMHCNFSTKYMREVGGKAYFEALMAQFEKNLMDHINVYGPDNDKRLTGKHETAPWNKFSYGVADRGASIRVPHSFVKNDYKGYL

SEQ ID NO: 6968 - protein, 466 aa, Brassica oleracea var. medullosa; identical to SEQ ID NO: 3011

SEQ ID NO: 6969 - protein, 382 aa, Magnetospirillum magnetotacticum MS-1
MSKQDYYDLLGVEKGASPDDIKKAYRKQAMQFHPDRNPGNAEAEQKFKEINEAYDVLKDEQKRAAYDRFGHAAFEQGGPGGGGGGGFGGFGGGGFSDIFDEMFGEFMGGGRRGQSTGRGADLRYNMDISLEDAFAGKTTTVKVPSSAPCEDCKGTGGKDGAAPVTCSACHGHGKIRQQQGFFTIERTCPTCQGMGKIIKDPCRSCGGSGRTRKEKTLQVNIPAGVEDGTRIRLAGEGEAGMRGAPPGDLYIFLSIAAHRIFQRDGANIFCRVPIPMTTAVLGGTIEVPTIDGSKAKVTIPEGTQTGNQFRLRSKGMSVLRSPARGDMFIQAVVETPVNLTKRQKELLHEFNEAGEGEKAKNSPESQGFFAKVKELWEDLKEG

SEQ ID NO: 6970 - protein, 288 aa, Rhizobium leguminosarum
PTSITFDEFPTLEQLPLWGFDGSSTQQAEGRSSDCVLKPVAIYPDPARTNGALVMCEVMMPDGVTPHASNARATILDDEDAWFGFEQEYFFYQNGRPLGFPEQGYPAPQGPYYTGVGYSNVGDVAREIVEEHLDLCLAAGINHEGINAEVAKGQWEFQIFGKGSKKAADQIWMARYLLQRLTEKYGIDIEYHCKPLGDTDWNGSGMHCNFSTKYMREVGGKAYFEALMAQFDKNLMDHIDVYGPDNDKRLTGKHETAPWNKFSYGVADRGASIRVPHSFVKNDYKGYL

SEQ ID NO: 6971 - protein, 1135 aa, Nicotiana plumbaginifolia
MASGSRTKHSHQSGQGQGQVQAQSSGTSNVNYKDSISKAIAQYTADARLHAVFEQSGESGKSFDYSQSVKTTTQSVVPEQQITAYLTKIQRGGHIQPFGCMIAVDEASFGVIAYSENACEMLSLTPQSVPSLERPEILTVGTDVRTLFTPSSSVLLERAFGAREITLLNPIWIHSKNSGKPFYAILHRVDVGIVIDLEPAKTEDPALSIAGAVQSQKLAVRAISHLQSLPGGDVKILCDTVVESVRELTGYDRVMVYKFHEDEHGEVVAESKRPDLEPYIGLHYPATDIPQASRFLFKQNRVRMIVDCHATPVRVVQDESLMQPLCLVGSTLRAPHGCHAQYMANMGSIASLTLAVIINGNDEEAVGGRSSMRLWGLVVGHHTSARCIPFPLRYACEFLMQAFGLQLNMELQLASQLSEKHVLRTQTLLCDMLLRDSPTGIVTQSPSIMDLVKCDGAALYCQGKYYPLGVTPTEAQIKDIVEWLLTYHGDSTGLSTDSLADAGYPGAALLGDAVCGMAVAYITSKDFLFWFRSHTAKEIKWGGAKHHPEDKDDGQRMHPRSSFKAFLEVVKSRSLPWENAEMDAIHSLQLILRDSFKDAEASNSMAVVHAQLGEMELQGIDELSSVAREMVRLIETATAPIFAVDVDGRINGWNAKVAELTDLSVEEAMGKSLVHDLVHEESQETAENLLFNALRGEEDKNVEMKLRTFGSEQPKKAVFVVVNACSSKDYTNNIVGVCFVGQDVTGQKVVMDKFIHIQGDYKAIVHSPNPLIPPIFVSDENTCCSEWNTAMENLTGWSRGEIIGKMLVGETFGSCCRLKGPDAMTKFMIVLHNAIGGQDTDKFPFSFSDRNGKYVQALLTANKRVNMEGQIIGAFCFIQIASPELQQALRVQRQQDKKCYSQMKELAYLCQEIKSPLNGIRFTNSLLEATDLTEDQKQYLETSTACERQMSKIIRDVDLENIEDGSLTLDKEEFFLGSVIDAVVSQVMLLLRERSVQLIRDIPEEIKTLTVHGDQVRIQQVLADFLLNMVRYAPSPDGWVEIQLQPNMKQISDEVTVVHIEFRIVCPGEGLPPELVQDMFHSNRWVTKEGLGLSMCRKILKLMNGEIQYIRESERCYFLIILDLPMTGRGSKSVG

SEQ ID NO: 6972 - protein, 392 aa, Diplopterys cabrerana
DLEPVNPADVPVTAAGALKSYKLAAKAISRLQSLPSGNISLLCDVLVKEVRDLTGYDRVMVYKFHEDEHGEVVSECRRSDLEPYLGLHYPATDIPQASRFLFMKNKVRMICDCLAPPVKVIQDDRLPQPLSLCGSTLRSPHGCHAQYMTNMGTIASLVMSVTINEDDDTMDGDQQQMTRKLWGLVVCHHTSPRFVPFPLRYACEFLIQVFGVQINKEVDLAVQMREKHILQIQTMLCDMLLRDAPVAIITQSPNVMDLVKCDGAALYFRNKTWLLGVTPTEEQIRDIAEWLLKYHSGNTGLSTDSLMEAGYPGASALGDAVCGMAAVSITSGDFLFWFRSHTAKEIKWGGAKHDPDDKDDLRKMHPRSPFKAFLEVVKWRSMPWEDVEMDAI

SEQ ID NO: 6973 - protein, 385 aa, Thermococcus kodakarensis KOD1
MPKRKIQRERPKEKFSYDPRKVLKMLDEHARRILEDIKAGKNPHFDIPMRGLSNVYFDEKSRLIKMGDKLSRRYFLNVAHARKFMQTLLIMAYVKRLVSEGKHASLREAYYANKHTIPGTRENTFEDQSESDPIIEDLERMFGVLREEMHITADRRGYIYGDIVIRDGEDEFNASRLGSGGWAVPGTVEHIQFPEINVDYALVVETAAMADRLIEEKFPKRENALIIATQGQASRGVRRLIHRLHYEEGLPIIVFTDGDPYGWYIYSTIKQGSINLAYLSDKLATPESKFVGMTMDDIKKYGLENVTEKLKGIPPNKKGGPTGDYKRILEEMNYPWFQNKEWQRQLQLALKWGVRIEQQALANKSLEFVAKEYLPEKINNGDLLP

SEQ ID NO: 6974 - protein, 386 aa, Shewanella sp. ANA-3
MTAGKTPTQHSTQPLNRLLGETSGAFADLGTFLPLVLGLIALNQFSPQGIFLGFGLFAILSALFYRRPIPVQPMKVIAALVIAQGLTPGMLQASAMLMGIILLILAFSGAITWLAKQLSQAVSVGIQLAIGLQLMWMGTKMMSDFWLLGLGAFALLFVSKFLPLRYLAMPLVIAAGMLWQANSQTDIATSLNIPALSTSLHLAWPSLNEWSSAAILLVLPQLALTLTNAVIATSAMAQEKFPEDAAKLTPKNLAISSGLANLLLAPFGAAAMCHGAGGLAVQYHFGARTHLAPLIFGGTCVVIALFWDSQIAWLLGLIPVAILGSLLSIGGLQLAWSKRLIDGKPFCIFVILATAVTCLAVNAAAGLAVGILLEQGRRTWAMLAMR

SEQ ID NO: 6975 - protein, 309 aa, Trichoderma atroviride
MYFRKAAAVTSLLAALSSAQPSGPELAVYWGAEDDSTTLNDVCSDSSYGIVNLAFLDTFFAAGGFPQLSLSGLDGPSQAQQSAGATGLKDGSSLVDAIQQCQSAGKLVLLSLGGAGADVTLQSDSDGEKIADTLWNLFGGGTDNQELRPFGDIKLDGFDLDNESGNPTGYLAMVQRFKSNFQNDTSKSYFLSAAPQCPFPDASQSQDVCSELDFVWVQFYNNGDCNIAQCDFLNSVQTWSSGIGNAKLYIGALASGADGDQGFADANTLLGAIQDVKNMNLPNYAGAMLWEAQLAVQNGNFQQKIAPGL

SEQ ID NO: 6976 - protein, 330 aa, Ziziphus mauritiana
MVPQAKLVVASLILTSALIQTSEAVGGIATYWGQYTETEEGSLAEACASNLYSYINIAYLNIFGEGRYLSLNISGHCSDCTFLGEEIKACQSQGVKIFLSLGGPYGDYHLTTDGDADRVAEQLWSSFLGGSKSTGVYQPLLGDVELDGIDLDIQIGPPEEYDVLARNLKDLTKDRTRPFYLSAAPKCSAYNDSDAYLWTAVETGLFDFVWVKFYNDTSCQYNNDTAAGLDAFYRSWYDWTVSLAEGNKLLIGIPASNETDNSPLGGYIPSDVLNDQIVSVIMTSSKFGGVNVWNRYYDLKTNYSSSIILEYVNSGTKYLPLRTKFMYQNA

SEQ ID NO: 6977 - protein, 304 aa, Musa acuminata
MKTPNKASLLLFPLLSLSLFINSCVLVGILLDRKNLGQNGDEGSLTQACNTGKYSYVNMEQLLRRGNGQTPQLNLAGHCDPNNNGCTGLSSDLLSSLSIIVKVILSGSDRQIGGASGSYSLTSADDARQVATYLWNNFLGGSSGSRPLGDAVLDGVDFDIETGPFSTLHWDDLASTSPATVTLGTTAARAKAASAAPQCIIPDAHLDAAIQTGLFDYVWVQFYNNWPCQYSSGNINNIINSWNDPSGMRGWIRRLGILGLPAAPQAAGSGRQPANVLTSQILPVISCVQRVGSNSSYLNIIKVA

SEQ ID NO: 6978 - protein, 164 aa, Vitis vinifera
MAHDTPSTTTTTTPLIRPSRRWFSSFRLKTTLSVELGGSVGDLGTYIPIVLTLTLVNHLDLSTTLIFTALYNISIGFLFSIPMPVQPMKSIAVVAISDPLLSLPQIVVASLSTAATLFIFGATNLMSLLYRFIPLPVVRGVQLSQAWCFALFETLQLVYTSLVN

SEQ ID NO: 6979 - protein, 306 aa, Triticum aestivum; identical to SEQ ID NO: 3036
  misc_feature (186)..(186): Xaa can be any naturally occurring amino acid

SEQ ID NO: 6980 - protein, 698 aa, Gibberella zeae PH-1
MKNFFGTGKKPTPSPSPSSSTPPPSSSRKSATFEERDREHDSSEPPPYSSEPSSPAREKSPSKSSRKSSRPTSTTEPTKSSRSSRLSRQSTDPGHSHSHSSRRPKYEPETHPLNLPPEERKRLSALAAAMNGNSMDVDSEPVSGARSTTPPNPKANAQANFSVPIPNGSSHDDGAPPPPPHKSNPGSPTITPEEDAESYKNAGNRFFKEKNYYKAIEQYSKAVDLFPFSATYLGNRAAAYMSNGQFEHALDDCSRAADYDPHNAKILLRLARIYTGLGRPEEALTTFSRIDPPPSAKDMVPAKEMLHHIQSARDILQQGNGSGMSMVLHALDLAERGLGHRVSKPRKWQLMRGEAYLLMGRENSLGEAQNIAMNLLRNNNQDPEALVLRGRVLYGQGENDKAIQCFRMAINCDPDFRDAVKWLRIVQRLDRMKEEGNADFKAGRLQPAIEKYTNALEIDPSNKSMNSKLLQNRAQCKIKLKQYDDAIADCERAINLDPGYTKARKTKANALGGAERWDDAVKEWKAIQELEPEDRNIAKEIRRAELELKKAQRKDYYKIVGVEKNATDVEIKKAYRKMAVKLHPDKNPGDAQAEEKFKDLQEAYETLSDPQKRAAYDNGDDLMDPNDMFGGGGMGGGMGGIDPEILFSMMGQQGFGGGGGGGFRSAGGFPGGGGGAHFNFGGDPRQQRGGYPGGFNFS

SEQ ID NO: 6981 - protein, 290 aa, Rhizobium leguminosarum
YTREGSRFDVFPTLEQLPLWGFDGSSTQQAEGRSSDCVLKPVAIYPDPARTNGALVMCEVMMPDGVTPHASNARATILDDEDAWFGFEQEYFFYQNGRPLGFPEQGYPAPQGPYYTGVGYSNVGDVAREIVEEHLDLCLAAGINHEGINAEVAKGQWEFQIFGKGSKKAADQIWMARYLLQRLTEKYGIDIEYHCKPLGDTDWNGSGMHCNFSTKYMREVGGKVYFEALMAQFDKNLMEHIDVYGPDNDKRLTGKHETAPWNKFSYGVADRGASIRVPHSFVKNDYKGYL

SEQ ID NO: 6982 - protein, 380 aa, Pseudomonas syringae pv. tomato str. DC3000
MAKRDYYEVLGVERGSSEADLKKAYRRLAMKHHPDRNPDDKASEEMFKEANEAYEVLSDASKRAAYDQYGHAGVDPSMGGGGGFGGGAGGANFSDIFGDVFSDFFGGGRGGGGGGRGGAQRGSDLRYTLELNLEEAVRGTTVNIRVPTLVNCKPCDGSGAKKGSSPVTCPTCGGIGQVRMQQGFFSVQQTCPRCHGHGKIISDPCDSCHGEGRVEESKTLSVKVPPGVDTGDRIRLSGEGEAGAQGGPTGDLYVVINVREHAIFQRDGKHLFCEVPISFTDAALGGELEVPTLDGRVKLKIPEGTQTGKQFRLRGKGVAPVRGGGAGDLMCRVAVETPVNLSKRQRELLEEFRTSLENDESHSPKASGWFEGVKRFFGDL

SEQ ID NO: 6983 - protein, 476 aa, Eucalyptus grandis
MAAAATLSAPDAAKLSQLKSAVSGLGQISESEKNGFINLVSRYLSGEAQHVDWSKIQTPTDEIVVPYDSLAPTPQDPAATKSLLDKLVVLKLNGGLGTTMGCTGPKSVIEVRNGLTFLDLIVIQIENLNTKYGCNVPLLLMNSFNTHDDTLKIVEKYANSNIDIHTFNQSQYPRLVVEDFMPLPCKGQTGKDGWYPPGHGDVFASLMNSGKLDALLSQGKEYVFAANSDNLGAIVDLKILNHLMTNKNEYCMEVTPKTLADVKGGTLISYEGKVQLLEIAQVPDEHINEFKSIEKFKIFNTNNLWVNLKAIKRLVEAQALKMEIIPNPKEVDGIKVLQLETAAGAAIKFFDNAIGINVPRSRFLPVKATSDLLLVQSDLYTLVDGFVERNKARTNPSNPSIELGPEFKKVGNFLSRFKSIPSIIELDSLKVSGDVWFGTGITLKGKVTIAAKPGVKLEIPDGVVLENKEIHGPEDL

SEQ ID NO: 6984 - protein, 466 aa, Brassica napus var. napus; identical to SEQ ID NO: 3040

SEQ ID NO: 6985 - protein, 197 aa, Oryza sativa Japonica Group
MVKLTMIARVTDGLPLAEGLDDGRDQKDADFYKQQAKLLFKNLSKGQHEASRMSIETGPYYFHYIIEGRVCYLTMCDRSYPKKLAFQYLEDLRNEFERVNGSQIETAARPTQRNLAKLNDELYEVHQIMTRNVQEVLGVGEKLDQVTEMSTRLTSDTRIYADKAKDLNRQALIRKYAPVAIVIGVVLMLFWLKNKIW

SEQ ID NO: 6986 - protein, 1299 aa, Ceratodon purpureus
SSTTSAKSKHSVRVAQTTADAALEAVYEMSGDSGDSFDYSKSVGQSAESVPAGAVTAYLQRMQRGGLIQNFGCMVAVEEPNFCVIAYSENASEFLDLIPQAVPSMGEMDVLGIGTDIRTLFTPSSSAALEKAAATQDISLLNPITVHCRRSGKPLYAIAHRIDIGIVIDFEAVKMIDVPVSAAAGALQSHKLAARAITRLQALPGGDIELLCDTIVEEVRELTGYDRVMAFKFHEDEHGEVVAEIRRMDLEPYMGLHYPATDIPQASRFLLMKNRVRLIADCYASPVKLIQDLDIRQPVSLAGSTLRAPHGCHAQYMGNMGSIASLVMAVIINDNEEYSRGAIQRGRKLWGLVVCQHTSPRTVPFPLRSVCEFLMQVFGMQLNLHVELGAQLREKHILRTQTLLCDMLLRDAPIGIVSQTPNIMDLVKCDGAALYYGKRVWLLGTTPTENQIKEIADWLLEHHNDSTGLSTDSLADANYPGAHLLGDAVCGMAAAKITAKDFLFWFRSHTATEVKWGGAKHDPDEKDDGRKMHPRSSFKAFLEVVNKRSPPWEDVEMDAIHSLQLILRGSFRDIADSDTKTMIHARLNDLKLQGVEERNALANEMSRVLETAAAPILAVDSRGMINAWNAKIAQVTGLPVEEAMHCSLTKDLVLDESVVVVERLLSLALQGEEEQNVEIKLKTFGTQTTERAVILIVNACCSRDASDTVVGVFFVGQDVTEQRMFMDRFTRIQGGEKTTVQDPHPLMRPSFDGDEFGRTFKRNSALGGLKDHATGSVERLDLYLRRAEECMEVMETIPSPKFNNKQCQYLAGKLKAVLQSASLFLRISHHEHHELGASIDMGRHVEIFKLLLALAKEIESFIQGCCKDEWIKAAMTLTNVSEYVSSMGFNLELCKIAFCKSCAASGSLTLDQIEVICKDEAEVVKRNATIDVDTLFAKVIYDLTEKTLSSDQNDLAIYLLQRLKRAKPILPSFSSRPSWWNFYDDWSFSEKFFQWIQITGSLGSGSSATVEKAVWLGTPVAKKTFYGRDNEDFKREVEILAELCHPNITSMFCSPLYRRKCSIIMELMDGDLLALMQRRLDGNEDHDSPPFSTLEVVDIILQTGEGMNYLHEKGIIHRDLKSMNILVKSVKVTKSEIGYVHVKVADFGLSKTKDSSTRYSNQTWNRGTNRWMAPEVINLGYESTEGEISFDGKVPKYPLKSDVYSFGMVCYEVLTGDVPFPEEKNPNNVKRMVLEGVRPDLPAHCPIELKALITDCWNQDPLKRPSFAVICQKLKYLKYLLMTGFSSYQDSYPSTEELS

SEQ ID NO: 6987 - protein, 358 aa, Cryptococcus neoformans var. neoformans
MSQLIATKRVDLLAPYLALDQGSRVQAEYIWIDAEGGIRSKTMTLDKAPSSVADLKEWNFDGSSTNQAPADNSDVFLRPVAIFKDPFRGGANILVLCECYDNDGTPNKSNYRAHCKKVMDAAKDTEPWFGLEQEYTLFDADGQVFGWPKNGFPGPQGPYYCGVGAGKVFARDFIEAHYRACLYAGIKISGINAEVMPSQWEFQVGPCTGIEMGDHLWMPRFLLLRIGEEWGITPSLHPKPLKGDWNGAGCHSNYSTKDMRTPGKGMAAIEDAIKKLEKKHLEHIAVYGEDNDLRLTGKHETASMTTFSAGVANRGASIRIPRHVGAQGYGYLEDRRPASNVDPYRVTAILVETTVLNN

SEQ ID NO: 6988 - protein, 382 aa, Crocosphaera watsonii WH 8501
MIKSCDIFRITELGQTYVYGIQCLTQVRLVDNPYFTPQKDLIQIMIDMEDNIFKDNSTGYMDYKDYYATLGINKSSSADEIKKAFRKLAVKYHPDRNPDDKPAEERFKEISEAYEVLSDPEKRKKYDQFGQYWKQAGQSTWPGGGANVDMGNFDFSQYGNFEEFINELLGKFSTPGGGRTGNYGYGNQGTGYSGYSGGYGNQTPAPNREATLKLTFSEAFRGVQKRLNLGNEIIDVRIPAGAKNGSRIRVKGKGGNSPYSQNRGDLYLNVELTPHNFFAFEDDNLVCEVPISPDEAVLGSTIDVPTPDGMVTVKVPPGIRSGQCLRLRGKGWVNQKKGRGDQLVKIIIDTPQHITDTERNYYEKIRDSRSYQPRQHLQTISL

SEQ ID NO: 6989 - protein, 387 aa, Sulfolobus tokodaii str. 7
MSSELTSKVDKEARKKAADTLRQVFVKLIEQINNSEPPTMEIPKRTLGNTIYDEKRKLLLLGEEKLKRSFFDLNESKRFMQTVLMASIIYDALINDEYPTIRDLYYRGKHSIILKDPRGKTYEENTWDEQKESDSVIMDIEVFTSLLREDMLILSKEKGKVVGDMRIRSGNDIIDLSKMGHGAYSIEPTPDLIDFVDINAEFVLVVEKDAVFQQLHRAGFWKQYKAILVTSAGQPDRATRRFVRRLNEELKLPVYILTDADPYGWYIYSVFRIGSISLSYESERLATPNAKFLGVSMTDIFGDSNKKPYLSEQERRNYIIKAKDADIKRATEIKNYQWFKTKAWQHEIEIFLNKKSKLEIEAMASKGLKFLAFQYIPEKIKSKDYIE

SEQ ID NO: 6990 - protein, 131 aa, Oryza sativa
MKWLDTDMCRCRRTDVARDSYSDMLEGGNFSNQETLYEVLSVRKDATYDEIRAAYKSAVLNTHPDKAQMALNPLVSSSERNEFLSVQKAWEILRYPKSRAEYDKQLQSSRQNLEIVATEIETDDMIVESKK

SEQ ID NO: 6991 - protein, 1171 aa, Oryza sativa
MASGSRATPTRSPSSARPAAPRHQHHHSQSSGGSTSRAGGGGGGGGGGGGGAAAAESVSKAVAQYTLDARLHAVFEQSGASGRSFDYTQSLRASPTPSSEQQIAAYLSRIQRGGHIQPFGCTLAVADDSSFRLLAYSENTADLLDLSPHHSVPSLDSSAVPPPVSLGADARLLFAPSSAVLLERAFAAREISLLNPLWIHSRVSSNPFYAILHRIDVGVVIDLEPARTEDPALSIAGAVQSQKLVVRAISRLQALPGGDVKLLCDTVVEHVRELTGYDRVMVYRFHEDEHGEVVAESRRSNLEPYIGLHYPATDIPQASRFLFRQNRVRMIADCHAAPVRVIQDPALTQPLCLVGSTLRSPHGCHGQYMANMGSIASLVMAVIISSGGDDDHNIARGSIPSAMKLWGLVVCHHTSPRCIPFPLRYACEFLMQAFGLQLNMELQLAHQLSEKHILRTGTLLCDMLLRDSPTGIVTQSPSIMDLVKCDGAALYYHGKYYPLGVTPTEVQIKDIIEWLTMCHGDSTGLSTDSLADAGYSGAADLGDAVSGMAVAYITPSDYLFWFRSHTAKEIKWGGAKHHPEDKDDGQRMHPRSSFKAFLEVVKSRSLPWENAEMDAIHSLQLILRDSFRDSAEGTSNSKAIVNGQVQLGELELRGIDELSSVAREMVRLIETATVPIFAVDTDGCINGWNAKVAELTGLSVEEAMGKSLVNDLIFKESEETVNKLLSRALRGDEDKNVEIKLKTFGPEQSKGPIFVIVNACSTRDYTKNIVGVCFVGQDVTGQKVVMDKFINIQGDYKAIVHNPNPLIPPIFASDENTCCSEWNTAMEKLTGWSRGEVVGKLLVGEVFGNCCRLKGPDALTKFMIVLHNAIGGQDCEKFPFSFFDKNGKYVQALLTANTRSRMDGEAIGAFCFLQIASPELQQAFEIQRHHEKKCYARMKELAYIYQEIKNPLNGIRFTNSLLEMTDLKDDQRQFLETSTACEKQMSKIVKDASLQSIEDGSLVLEKGEFSLGSVMNAVVSQVMIQLRERDLQLIRDIPDEIKEASAYGDQYRIQQVLCDFLLSMVRFAPAENGWVEIQVRPNIKQNSDGTDTMLFPFRFACPGEGLPPEIVQDMFSNSRWTTQEGIGLSICRKILKLMGGEVQYIRESERSFFHIVLELPQPQQAASRGTS

SEQ ID NO: 6992 - protein, 377 aa, Bradyrhizobium japonicum USDA 110
MSTSTKRCYYETLEVERDADESKLKSSFRKLAMKFHPDRNPGDDTSEVKFKEINEAYEVLKDKDKRAAYDRFGHAAFEQGGPGGGAGFGAGFASSFSDIFEDLFGMAGQRGRGGRERGADLRYNMEITLEEAFGGKTAQIEIPVSVTCEACSGIGAKAGTKPKTCSTCGGAGRVRQSQGFFTLERTCPGCQGRGQMIEDACPSCSGQGRVTRERTLSVNIPQGVEDGTRIRLAGEGEAGVRGGPPGDLYIFLSLAQHQFFQRDGADLHCRVPISMVTAALGGEFEVPTIEKGKAKVKVPAGTQSNRRFRIASKGMPVLRSRQTGDMYVQVVVETPQNLTKKQQELLAEFEKLSSGNTQPESEGFFTKVKDFFGSRAN

SEQ ID NO: 6993 - protein, 362 aa, Vitis vinifera
MEGKRSSSQRSDLLRKIREFTRSILDDLSIGKSPVVLIDRFRNYCTDNTGNCCCSSDLSKGKEILTLQRECHARRLDVLLRVLLIVQQLLQENRHGSKRDIYYMHPSVFSDQSVVDRAINDICILLQCSRHNLNVRPLSKGLLVMGWLRFLEAGKKFDCINGPNTAYPVPVHVEEVKDIVSVAQYILVVEKESVFQRLANDKFCNKNRCIVITGRGYPDIPTRRFLRLLVEKLHLHVYCLVDCDPYGFDILTTYRFGSMQMAYDAKFLRVPEIEWLGAFPSDSEKYGLPEPCLLPLTAEDKRKTEAILHRCYLQQELLHWRLELELMLQRGVKFEIEALSVHSLSFLSENYIPSKIQVAEGV

SEQ ID NO: 6994 - protein, 1124 aa, Mougeotia scalaris
MSSSKRSQSSGRSSTQTRIQNRVTQASADAKLSTAFEVSSSSGGDSFDYTKSVTASLNPTEPLAAKSVTAYLQRMQRGSIIQSFGCMMAVEPGTFRIIAYSENVSEMLGVTPQSVPTGDHQNAIGIGTDVRSLLSPSSVSVVEKAVAANDVSMMNPIAVYSLATQKLFFAILHMNDVGLVIDLEPISSSSDSAMFSAGAVQSHKLAAKAISRLQSLPGGDICGLCDVVVEEVRELTGYDRVMAYKFHDDEHGEVVAEIRRSDLEPYLGLHYPATDIPQASRFLFIKNRIRMICDCTSPQVKVVQDSRIPQEMSLAGSTMRGVHGCHTQYMMNMGSTASLVMSVTINDTNEIAGGPGMKGRKLWGLIVCHHSTPRHIPFPIRSACEFLMQVFGLQLNMEVELAAQHREKHILRTQTLLCDMLLRDAPMGIVSQSPNVMDLVKCDGAALLFGGRCWLLGISPTQEQVKDIATWLISSHTDTTGLSTDSLVDAGYPKARELGVDVCGMAAARITENDFLFWFRGHAQKEVKWAGAKDGGSEEDGSRMHPRSSFKAFLEVVKQRSLPWEDVEMDAIHSLQLILRGSFQDIEDKEDRKIVHARLKEMHLQGMEELSSVASEMVRLIETATAPILAVDTAGCVNGWNFKISELTGLSIPEVMGKSLVKDLTHPSSKDTVEKLLYMALNGEEEQNVEIRLKTWGMQQGKGPVILMVNACASRDVSEKVVGVCFVAQDVTGEKIVQDKFTRIQGDYTTIVRSHNSLIPPIFGSDESGFCVEWNPAMERLSGVKREEAIGKMLTRELFGGILRLKNVDGLTKFMIVLNAAMSSHDTDKFPFTFYDRSGKIVEVLLTTSKRCNSEGVVTGVFCFLHTASSELQQALTVQKAAERVAEVKAKELAYIRQEIQNPLDGIHFARSFMEHTVLSEDQKQLIETSATCEKQLRRILADMDLASIEKGYLELETGEFSMATVMNSVVSQGMIQSTQKNLQLYCDTPPDFKSLSVFGDQVRLQQVLADFLLNAVQFTPPSGWVEIKVEPVVKKLPGGVSVANVDFRVSHPGEGLPEDLIDQMFDRADARVKSQEGLGLSICRKLVRLMNGEVQYRREGERNFFLLQLELPLAQRDDQASMK

SEQ ID NO: 6995 - protein, 362 aa, Zea mays
MGLDYYKILGVDKGATDDDLKKAYRKLAMKWHPDKNPNNKKEAENKFKQISEAYEVLSDPQKRAVYDQYGEEGLKGQVPPPGAGGAGPGGATFFSTGGDGPTVFRFNPRNAEDIFAEFFGGSSPFGGMGGGGMGGSGMGGGMPGMRSGGTRFSSSIFGDDIFGSAFGSGPDGHGMHAGGRAVKAPAIERKLPCSLEELYKGTTKKMKISREISDASGKTIPVEEILTIDVKPGWKKGTKITFPEKGNETPNTIPADLVFIIDEKPHPVFTRDGNDLVVTQKIPLAEALTGYTAHVTTLDGRSLTVPISSVIHPGYEEVVRGEGMPIPKDPSRKGNLRIKFDIKFPARLTADQKSGVKRLLGQ

SEQ ID NO: 6996 - protein, 293 aa, Oryza sativa
MAPRCLAALAPLAVLLLLSSCLAAAPATAQQSSSIGDTVVFWGRNKAEGSLREACDTGLYNTVIISFLSAFGRGSYKLDLSGHPVVPVGGDIKYCQSKGKTVLLAIGGQGGEYYLPSSQAAADLDDYLWNAFLGGGRSGVARPFGDAVVNGIDFFIDQGATEHYDELARLLHGHSNGGVMLTATARCVFPDQRQQAALATGLFSRIHVKLFNDGRCTWGRRESLEKWAAAYPDSRIYVSIVASPEADRDAYMSHKDLYFDVLQFINKLPNYGGIMVWNRYWDKKTGYINGDVF

SEQ ID NO: 6997 - protein, 471 aa, Oryza sativa Japonica Group
MARWPWRWRVLLPLLLLHSSPVFAQEGQDNDPSTLFKRASEMMNLRKYDGSLGLLNAVLEVDPNHSEAYRQRASVLRHKCRYKEAEGDYSKYLELKPGSSSVEKELSQLLQAQNALESAYGQFESHDFSKVLEYINKIVLVFSPNCLKAKLLKAKALLALEDYSSVISETGFILKEDEDNLDALLLRGRAYYYLADHDVASRHYQKGLRLDPEHSELKKAYFGLKNLLKKTKSAEDNAAKGKLRVSAEDYKAALAMDPDHTSYNVHLYLGLCKVLVKLGRGKEAISSCTEALNIDGELVDALTQRGEAKLLTEDWEGAVQDLKEASQKSPQDMGIREALMRAEKQLKLSKRKDWYKILGISKTASAADIKRAYKKLALQWHPDKNVDNREEAENMFREIAAAYEVLGDEDKRVRYDRGEDLDEMNMGGGGGGFNPFGGGGQQYTFHYDGGFYGGGGFPGGGFPGGFQFNFG

SEQ ID NO: 6998 - protein, 187 aa, Pseudotsuga menziesii
DEHGEVVAEIRRSDLEPYLGLHYPATDIPQASRFLFMQNRVRMICDCMATPVKLIQSEELMQPLCLVGSTLRAPHGCHAQYMANMGSVASLVMAVIINGNDDEGGGSGRNSMKLWGLVVCHHTSPRAVPFPLRYACEFLMQAFGLQLNMELQLAAQLTEKHILRTQTLLCDMLLREPQWNVTQSPSI

SEQ ID NO: 6999 - protein, 174 aa, Zea mays
  misc_feature (173)..(173): Xaa can be any naturally occurring amino acid
MAANLKWAPVLALLVVVAAMVGTTSAGNIAVYWGQNGNEGSLADACNSGLYAYVNIAFLTTFGNGQTPVLNLAGHCDPGSGSCTGQSSDIQTCQSLGIKVLLPIGGASGSYGLSSTDDANSVADYLWDNFLGGSGSSRPLGAAVLDGIDFDIENGQSALQTGQFDNVWIQFYXN

SEQ ID NO: 7000 - protein, 317 aa, Oryza sativa Japonica Group
MATRANGSSCSLASLMAAIFFLLVVSSRGAHGGRIAIYWGQNGNEGTLADTCATGNYAFVNLAFLCSFGSGQAPQLNLAGHCDAYSGACANLTADIARCQSMGVKVLLSIGGGAGGYSLASKQDVSHLARYLWESFLGGRPSAPGGRRPLGDAVLDGVDFDIEGGGGDPRYYGDLAAYLKAYSGKGAAGKEVLLSAAPQCPFPDQWVGKALDTGLFDYVWVQFYNNPPCQYAAGSGGGAANLLDAWRQWTSGVEARYIFLGLPASPGAAGSGFIPVGSLESQVLPALKASSKYGGVMLWSRYYDDQDGYSSAIKNAV

SEQ ID NO: 7001 - protein, 105 aa, Panax quinquefolius
YSTKSMRNEGGFEIIKKAIEKLGLRHKEHIAAYGEGNERRLTGRHETADINTFLWGVANRGASIRVGRDTEKEGKGYFEDRRPASNMDPYVVTAMIAETTLLWKP

SEQ ID NO: 7002 - protein, 159 aa, Arabidopsis thaliana
  misc_feature (132)..(132): Xaa can be any naturally occurring amino acid
  misc_feature (137)..(137): Xaa can be any naturally occurring amino acid
NLLEFGLRRAQGPDGGISASRYCYMGGFDATSNVAAGRLFGIPIRGTHSHAFVSSFMGLDEITDKTLTSSDGSNTCEDFISLVQNWLIRIQDSSSLHGTFGETSQSELAAFTSYALAFPNSFLALVDTYDVXAVGIXLDSGDLAYLSVEARKFFHAVEK

SEQ ID NO: 7003 - protein, 72 aa, Populus x canadensis
MSLLNDLININLSDTTEKIIAEYIWIGGSGMDLRSKARTLPGPVTDPAKLPKWNYDGSSTGQAPGEDSEVIL

SEQ ID NO: 7004 - protein, 274 aa, Zea mays
MAGRDKRRRAAPLEGDEQQLRRRLEEAALLLRRIKDVLLRVLFVVQQLLQQNKHCSKRDIYYMYPSIFVEVAVVDRAINDICILFKCSRHNLNVVPVVKGLVMGWIRFMEGEKKVYCITSVNAAFSIPVDIEAIKDVVSVAHYILVVEKETVFQRLANDKFCERNRCIVITQLAHDANLLRVPDIRWLGVFTSDFEEYCLPDCCLLRLSPEDRRKAEGILARCYLHREAPEWRSELEAMLQKGVKFEIEALSANSISFLSHEYIPQKIKQGMHL

SEQ ID NO: 7005 - protein, 226 aa, Saccharomyces pastorianus
PRVIDENVSGDILIKWTYKQTNKRHYGPQDFEVLRLLGKGTFGQVYQVKKKDTQRIYAMKVLSKKVIVKKNEIAHTIGERNILVTTASKSSPFIVGLKFSFQTPADLYLVTDYMSGGELFWHLQKEGRFSEDRAKFYIAELVLALEHLHDNDIVYRDLKPENILLDANGYIALCDFGLSKADLKDRTNTFCGTTEYLAPELLLDETGYTKMVDFWSLGVLIFEMCG

SEQ ID NO: 7006 - protein, 396 aa, Solibacter usitatus Ellin6076
MATPKHEYYETLGVPRKADAEEIRKAYRKLARKYHPDLNPGDKSSEERFKNVQEAYDILSDPKKRQMYDQFGFYSENGGYPGAGPGGQPGGGPQGAHFDGFDFSDYMSGQGGAAGGRRTQGTSSQGGGGFRDIFSQFFGGGAAAEQAEPERGADLEYVMNIDFWQAIKGTTARVNITRYDVCTTCNGTGSTGSGEVTCPQCKGVGQVTQMAGAMKFNLTCPRCGGAGKLRNACPTCGGDGRVPKTETVEIRIPPGARDGSRLRVAGKGNAGTMGAAPGDLYITTKVEPHQFFHREGDNIEIKAPIAIWEASLGAKIEVPTIDGRTLLKIPQGTVNGQKFRLREKGVLNSRTNQRGDQIVEVQLTTPDPRDEKTRQLLRDLAELHPEDPRAEMWSKV

SEQ ID NO: 7007 - protein, 355 aa, Elaeagnus umbellata
MSLLSDLLNLNISESTDRIIAEYIWIGGSGLDLRSKATLPKKVKNPSELPKWNYDGSSTNQAPGDDSEVILYPQAIFRDPFRRGNNILVMCDAYTPAGEPIPTNKRHNAAKIFSHPDVDAEEPWYGIEQEYTLLQKEVNWPLGWPLGGFPGPQGPYYCGVGADKAFGRDIVDSHYKACLYAGVNISGINGEVMPGQWEFQVGPTVGIAAGDQVWVARYILERIAEIAGVVVSFDPKPIKGHWNGAGAHTNYSTKSMRIDGGINVIKKAIEKLGLRHKEHIAAYGEGNERRLTGRHETADINTFSWGVANRGASVRVGRDTEKDGKGYFEDRRPASNMDPYVVTSMIAETTILWKP

SEQ ID NO: 7008 - protein, 357 aa, Picea sitchensis
MSSVLADLLNLDLSDVTEKVIAEYIWIGGSGMDMRSKARSLSGPVSSPKELPKWNYDGSSTGQASGHDSEVILYPQAIFPDPFRRGKHILVICDTYSPNGTALPSNKRAAAEKIFSTKAVSDEEPWYGLEQEYTLLQKDVKWPLGWPIGGFPGPQGPYYCGVGADKAWGRDIVDAHYKACLYAGINVSGTNGEVMPGQWEFQVGPSVGISAADELWCARYIMERITEKEGVVLSFDPKPIEGDWNGAGCHTNYSTKSTRKEGGFEVIKKAIEKLRLRHKEHISAYGEGNERRLTGRHETADIHTFSWGVANRGASVRVGRDTEKDGKGYFEDRRPASNMDPYIVTSMIAETTILWKP

SEQ ID NO: 7009 - protein, 403 aa, Oryza sativa
MASSGKMEGPSAPAMRRDPYEVLSVPRDSSDQEIKSAYRKLALKYHPDKNASNPEASELFKEVAYSYSILSDPEKRRQYDTAGFEALENEGMDMEIDLSNLGTVNTMFAALFSKLGVPIKTTVSPNVLEEAMSGTVTVRPLPVGSSATGKVDKQSAHFYGVTISEEQAQSGIVVRVTSAAQSKFKLLFFEQEINGGYGLALQEDSQKTGKVTSAGMYFLHFQVYRMDSTVNALAMAKDPEAAFFKRLEVLQPCEVSALKSGTHIFAVYGDNFFKPASYTIEAMCAKSYEDTTQRLKEIESKILEKRNDLRQFETEYRKALARFQEVTNRYTQEKEAVDDMLRERDDIHSSFTTERTMVNSVGAGSSSSRYPTESPENGNIDGKDKSSKKKWFNLNLNRSDKKA

SEQ ID NO: 7010 - protein, 287 aa, Oryza sativa
MTGFGSPCGACKFLRRKCVRGCVFAPYFCHEQGAAHFAAIHKVFGASNVSKLLAHLPLADRPEAAVTISYEAQARLRDPIYGCVAHIFALQQQVRIVHSIDVSLVGVAGLLILVSRRVFEQVMTLQAQLASLKAAAAQGIHHQDVGATTKGGYMSAAATAADDQLGYGGYNQWCGSNGGGAPAASQPGAYSSNGGAGHGHDSITALLAAGSDYMQHSLYHAFEHSEGAGAVDDGHAAAAAFEAAAESSSCGMAASFAADESVWRSSSSGYQDCEDLQSVAYAYLNRS

SEQ ID NO: 7011 - protein, 1121 aa, Solanum lycopersicum
MASGSGSRGKHDRNHQPKNQSQFSGTSNTNALSKAVAQYTTDARLHAAFEQSGESGKNFDYSQSVRNSTESVTEHQITAYLNKMQRGGHIQPFGCTIAVEEASFCVIAYSENACEMLDIMPQSVPSLEKNEILKIGTDVRTLFSSSSSGLLEGAFGAREITLLNPIWVHSKNSGKPFYAILHRIDVGIVIDLEPARTEDPALSIAGAVQSQKLAVRAISLLQSLPGGDIDLLCDTVVKSVRELTGYDRVMVYKFHDDEHGEVVAESRRSDLEPYIGLHYPATDIPQASRFLFKQNRVRMIVDCTAIPVRVIQDESLMQPLCLVGSTLRAPHGCHPQYMVNMGNVASLTLAVVINGNDDEVVGGRNAMRLWGLVVGHHSSARFIPFPLRYACEFLMQAFGLQLNMELQLASQLAEKRVLRTQTVLCDMLLRDSPTGIVTQNPSIVDLVKCDGAALYYQGRYYPLGITPTAAQIKGIVEWLLTCHVDSTGLSTDSLADAGYPEAASLGAAVCGMAVAYVTSKYFLFWFRSHTASEIKWGGAKHHPEDKDDWQKMHPRSSFKAFLEVVKNRSLPWENAEMDAIHSLQLILRDSFKDASNSKSIVRVQLREEGLQGMDELRSVAREMVRLVETATAPIFAVDVEGRINAWNAKVAELTELSVEEAIGKSLVHDLVHEESQTTAQNLLRKALRGEEDKNIEIKLRTFGAEQLKKTVFVEVNACSNKDYTNNIVGVSFIGQDITAQKVVLDKFVRIQGDYKAIMHSPNPLIPPIFVSDENTCCFEWNTAMEKLSGWNKEEIIGKMLVGEIFGTFCRLKGPDDMTNFMIMLHKAIGGQEIDKFPFSFSDRNGKFVQALLTANKRVNVDGQIIGAFCFLQIASPELQKTLMQRQQEKTSNIHMKELAYICRELKNPLNGIRFTNSLLEATELTENQKQFLETSAACERQMSKIIRDIDLDNIEDGSLELEKGEFFLASVIDAVVSQVMLLLRERGVQLIRDIPDEIKTLRVYGDQVRIQQVFADFLQIMASYAPPREGWVEVHLRPSIKQISDGVTIVHIEFRIVCPGEGLPPELIQDMFHNSLWVTQQGLGLSMCRRILQLMNGQVQYIRESERCFFLIILQLPMLIQ

SEQ ID NO: 7012 - protein, 382 aa, Methanosarcina acetivorans C2A
MATKRDYYEILGLPKDASVEDIKKTYRKLALQYHPDRNKDPGAEDKFKEISEAYAVLSDTEKRAQYDRFGHAGIDNQYSAEDIFRGADFGGFGDIFEMFFGGGRRGGPMGPRRGSDLQYDLYITFEEAAFGVRKDIDIPRTERCSTCSGTGAKPGTSPKRCPTCGGTGQVRTTRSTLGMQFISTTTCSTCHGRGQIIESPCPVCGGAGRVRNKRTITVNVPAGADSGMSLRLSGEGDSGEPGAPSGDLYIIIHVMEHRHFKRVDYDVISELSITFTQAALGADVMVDTLYGKVKMNIPAGTQTHSVFRLRDKGIQRLHGHGKGDQLVRVIIKTPTKLNQEQKELLRQFENLSKGKKPQEEEKSKAEKHKKGIFEKVKDAFES

SEQ ID NO: 7013 - protein, 442 aa, Oryza sativa
MAGSKFGSFKSEKGSSAGAAAGAGAAAQRRDPYEVLGVGRNATEQEIKSAFRRMALKYHPDKNADDPVASDKFQEATFSYNILSDPDKRRQYDSSGFEAIEADSQELELDLSSLNTVNTVFAALFSKLGVPIKTTVSATVLEEALNGSVGISQLELGQSVFRKVEKQSAHFYSVDITDKEAKMGLVCRVQSTAKSKFKLLYFEPEENGGLSLALQEDSVKTGKVTSAGMFFLGFPVYRFEQNNSVAAAKDPDSAFFKRLDGFQPCEVNELKAGTHFFAVYGDNFFKSATYNIEVVCAEPFSTEKEKLRCVEAKILAKRSELSKFESEYREVLAKFTEMTSRYAQEMQTIDELLKERNAIHASYTNNTTLQRSSSSNKGKTSSKESKSDDDQTVKKEKKSKSKSMEGSRSDDDGPRKEKKPKERLRRKKWFNIHLKVDKRRPC

SEQ ID NO: 7014 - protein, 979 aa, Yarrowia lipolytica CLIB122
MKFSTIANFGASLMSLATSVAAFDPAGSNNVVLYWGQASAGSQEPLGSYCESNAADVYVVSFLNSFNGNGDLTLTISGCNDNFAGGLANCPAIAADIKKCQSLGKKVFISLGGAVGSYGFTSDAGGANFADTLWNTFGGGTAAERPFGDAIVDGYDLDIENQQQMGYVALVKRLREHFASSSGQYYISATPQCPYPDASVGEALAGADIDFAYVQFYNNYCGVNNPGQFNFDTWDNFAKTVSPNKNIKIYLGVPGAVSAASTGYIDGATLKSYVDKVKQYSSFGGIMMWDASQAFLNKEGGVSYAQIAKNALGGAGPVVSVASTPVVSVASSSAWAPSSASVWTPESSSAPAPAPWAPSSAPAPAPWAPSSAPAPGAPAPAVSSPAPWAPSSAPAPAPVSTHTPDNGMWKPENGPSVVSSLAAPSGPVFAAESGSVESGVEADTTVTEQHTVTSVGETVTTTVPTAVETSEISSAAEAAAETSSIPESSPSSSKAKHTVYHTTIESVYIDTTVVNVPGPSPTSEGVSTSEGVAEGVVPSSGASPSSASPSGASPSVSPSSVASLAAPSNPAFAAESGEIKNKSENAASGTSSVAGAPSSAAGPALSASPAPSSSAELTTTTTSSVFTTKTLTGTTVSVSGEAAAEETSESSAETPEASQTSESAPVSSETAVETTPISSEAAAAVETGASAPASSTPASSTPAPASSAPVSSAPAPAPAPSKVSKVAPSDLLSQATTVSASATAATISLADSAPQKTISPESAHPPCDGKQGNDLAKCLNGIYGNQEVISKLSVQDKQKPVPTDAAASEAAAPTGGATASEASPSPASPTDAGKPAEKPAEKPADKPAEDPAEKPATSSAASSAASASAPTSAADKPSSDTPSTSKPLADSGCTEGEVGCSPAGEFIMCNFNKWVHFACPPTTTCFAIASGKNAVVGCNYIDAPIPLIKRSDQSLISHRPPPTLQQRRQNNVDVFAMLK

SEQ ID NO: 7015 - protein, 785 aa, Yarrowia lipolytica CLIB122
MVDDVFKRNRSTSASAALTLGPGDDTTTAKDSGKEITFPQRLKSFFKFNNTNSPVANSGNGPDEEIAFPKYDPTPTIHVQGVPGASNTSPPPDDKETKSSFKQRFLRGRSPSTPSTKDTNTPDQHNQHHGSVPTVPDIPSEFAPKLHYPKHLAAHTPEDEAVDPMDSTKPVPVVDEWPVQPAHMSGSASPNSPNFHSPPSSPSPNNNSNNYNYNNNNSSNYGGLGVPGQHPRKNIRRVASEPNVKNAISNSHSHSGGHHQQHLPIIPAGSEDVRLQDLVREEQQHPSDPITDRDRTHSAPLNDGINHGNGSHGQNSRSGSATPQSRSRTNSKSFARTYSSNSIKVCDVEVGPSSFEKIRLLGRGDVGKVYLVKEKKSTKLYAMKVLSKKEMIKRNKIKRAFAEQEILATSNHPFIVTLYHSFQSNDYLYLCMEYCMGGEFFRALQTRERKCVAEADAQFYAAEVTAALEYLHLMGYIYRDLKPENILLHQSGHIMLSDFDLSKQSEQLGAPTIQSSTNVPQLDTKSCIANFRTNSFVGTEEYIAPEVIRGNGHTSAVDWWTLGILIYEMLFGMTPFKGKNRNLTFSNVLKQEVNFPSGSGYQSISSSCKNLIRKLLIKDEHKRMGSKAGASDIKNHPFFKNTQWALLRNQTPPLVPVPSRGADAVNFRTMKDSSSVDFVTDKKQDKSISSVLSVNTDRSSTNSVAGPRSYGREGDYDPFQNFNSVTLHHVGADSEGEDDDGDITITNQDIPHTFQPNPAKSPNMKNSSGFFFGGQKDKLWKTNRT

SEQ ID NO: 7016 - protein, 73 aa, Achimenes admirabilis
ISGTNGEVMPGQWEFQVGPSVGIEAGDHIWCARYLLERITEQAGVVLSLDPKPIEGDWNGAGCHTNYSTKSMR

SEQ ID NO: 7017 - protein, 200 aa, Oryza sativa
  misc_feature (28)..(28): Xaa can be any naturally occurring amino acid
MQQGRGRGRRRMMQGSSYYAVLGVHPGXASAAEIRAAYHRLAMKWHPDKITSGRVDAEEAKSRFQQVHEAYQVLSDEKRRALYDSGMYDPLDDDQEEDVEGFHDFLQEMVSLMATVGREEPVYCLDELRSMLDGMMQDFASSELPSPSGGFFAGAPSSPFADTGAAQQQRGVGSASARAHAHPQVVGNSACLSRMAFSSY

SEQ ID NO: 7018 - protein, 483 aa, Sorghum bicolor; identical to SEQ ID NO: 3111

SEQ ID NO: 7019 - protein, 657 aa, Sorghum bicolor; identical to SEQ ID NO: 3112

SEQ ID NO: 7020 - protein, 358 aa, Oryza sativa Japonica Group
MSGKLCFLASVLLSMSTVVDLAMAASGGVNIAVYWGQNGSEGTLGETCGTGLYAYVNLAFLSTFGAGRAPVLNLADHCDAPSGTCASLAADIASCQAAGVKVLLSIGGGALGYNLSSPSDARDLAAYLWDNFLGGGATGASRPLGDAVLDGVDFDIESPSRFYDDLARNLASLYTRAPRPPRGGKTYLLTAAPQCPYPDASLAAALATGLFDHVWVQFYNNPPCQYAAPGDASALRSAWAQWTAGLPAATVFLGLPASLDAADSGFVDADTLASQVLPVVEGAANYGGIMLWSRSYDKDSSFSVKLQAALQNRNKPTGAGASSHTKRRICKWLTFVYSEFLIQYVVLHYYPSQLQFYN

SEQ ID NO: 7021 - protein, 411 aa, Glycine max
  misc_feature (226)..(226): Xaa can be any naturally occurring amino acid
  misc_feature (236)..(236): Xaa can be any naturally occurring amino acid
MGMGSKMEGPSTPAIRRDPYEVLSVSRDSTDQEIKTAYRKLALKYHPDKNASNPEASELFKEVAYSYSILSDPEKRRQYDSAGFEALDADSMDMEIDLSNLGTVNTMFAALFSKLGVPIKTTISANVLEEALNGTVTVRPLPIGSSVSGKVEKQCAHFFGVTINEHQAESGIVVRVTSTAQSKFKLLYFEQDANGGYGLALQEDSEKTGKVTSAGMYFLHFQVYRXMDSTVNALAXPKDPEGAFFKRLEGLQPCEVSELKPGTHIFAVYGDNFFKTASYTIEAVCAKSYEDTTQKLKDIEAQILRKRNELRQFEAEYRKALARYQEVTDRYTKEKQSVDELLKQRDGIHSSFTTVKSTNFSGSGSNLSNGCSSKINGDESPGEDGGSDGKDKSGKKKWFNLNLRGSDKKLI

SEQ ID NO: 7022 - protein, 95 aa, Protea effusa
LYAGINISGTNGEVMPGQWEYQVGPSVGIEAGDHIWCSRYLLERITEQAGVVLTLDPKPIEGDWNGAGCHTNYSTKSMREDGGFEVIKKAILNLS

SEQ ID NO: 7023 - protein, 63 aa, Protea holosericea
MPGQWEYQVGPSVGIEAGDHIWCSRYLLERITEQAGVVLTLDPKPIEGDWNGAGCHTNYSTKS

SEQ ID NO: 7024 - protein, 455 aa, Guillardia theta; identical to SEQ ID NO: 3117

SEQ ID NO: 7025 - protein, 380 aa, Oryza sativa Japonica Group; identical to SEQ ID NO: 1250

SEQ ID NO: 7026 - protein, 811 aa, Oryza sativa; identical to SEQ ID NO: 1251
  misc_feature (275)..(275): Xaa can be any naturally occurring amino acid

SEQ ID NO: 7027 - protein, 1146 aa, Populus tremula
MASQSQRQSNQPAHNQAQSSGTSNMRQHHHPTESVSKAIAQYTVDAQLHAVFEQSGGTGKSFDYSKSVRTPNQSVPEEQITAYLSKIQRGGHIQPFGCMIAADEQSFRVIAYSENAKDMLGLTPQSVPSLEKQEILFVGADVRILFRPSSAVLLEKAFGAREITLLNPIWIHSKNSGKPFYAILHRIDVGIVIDLEPARTEDPALSIAGAVQSQKLAVRAISQLQSLPGGDIKLLCDTVVDSVRELTGYDRVMVYKFHEDEHGEVVAENKRVDLEPYIGLHYPSTDIPQASRFLFKQNRVRMIVDCHAIPVSVIQDEGLMQPLCLVGSTLRAPHGCHAQYMENMGSIASLAMAVIIYGNDEEAIGGRNSMRLWGLVVCHHTSARCIPFPLRYACEFLMQAFGLQLNMELQLASQLLEKHVLRTQTLLCDMLLRDSPTGIVTQSPSIMDLVKCDGAALYYQGQYYPLGVTPTEAQIKDIVEWLLTLHGDPTGLSTDSLADAGYPGAAFLGDAVCGMAVAYIAERDFLFWFRSHTAKEVKWGGAKHHPEDKDDGQRMHPRSSFKAFLEVVKSRSLPWENAEMDAIHSLQLILRDSFRDAEATNSKAVVHNQLKDMELQGMDELSSVAREMVRLIETATAPIFAVDVDGRINGWNAKVAELTGLSVEEAMGKSLVHDLVYKEYEEIVDKLIHRAVKGEEDKNVEIKLRTFCSEHQKKAVFVVVNACSSKDYMDNIVGVCFVGQDVTGQKVVMDKYVLIQGDYKAIVHSPNPSIPPIFASDENTCCLEWNTAMEKLTGWSRGEVVGKMLVGEVFGSCCRLKGPDALTKFMIALHNAIGGIDTDKLPFSFFDRNEKNVQTLLTANKRVNMKGDIIGAFCFLQIASPELQPSLKVQKQQEKKSFARMKELAYICQEIKNPLSGIHFTNSLLENTDLTEDQQQFLETSAACEKQILKIIRDIDLESIENGSLELEKAEFLLGSVINAVVSQAMLLLRERNLQLLRDIPEEIKTLAVYGDQARIQQVLADFLLNMVRYAPSSAGWVEIHVCPTLKQISDGHTLVHTEFRYLERVLQTRMLGLQHPPRSFLNCKLTLVMLHREGMVPKIQFQGLSVCQGRLIWLSFPENTTVALYPLTIWFLLLHRHQSRSITHT

SEQ ID NO: 7028 - protein, 1146 aa, Populus tremula
MASQSQRQSNQPAHNQAQSSGTSNMRQHHHPTESVSKAIAQYTVDAQLHAVFEQSGGTGKSFDYSKSVRTPNQSVPEEQITAYLSKIQRGGHIQPFGCMIAADEQSFRVIAYSENAKDMLGLTPQSVPSLEKQEILFVGADVRILFRPSSAVLLEKAFGAREITLLNPIWIHSKNSGKPFYAILHRIDVGIVIDLEPARTEDPALSIAGAVQSQKLAVRAISQLQSLPGGDIKLLCDTVVDSVRELTGYDRVMVYKFHEDEHGEVVAENKRVDLEPYIGLHYPSTDIPQASRFLFKQNRVRMIVDCHAIPVSVIQDEGLMQPLCLVGSTLRAPHGCHAQYMENMGSIASLAMAVIIYGNDEEAIGGRNSMRLWGLVVCHHTSARCIPFPLRYACEFLMQAFGLQLNMELQLASQLLEKHVLRTQTLLCDMLLRDSPTGIVTQSPSIMDLVKCDGAALYYQGQYYPLGVTPTEAQIKDIVEWLLTLHGDPTGLSTDSLADAGYPGAAFLGDAVCGMAVAYIAERDFLFWFRSHTAKEVKWGGAKHHPEDKDDGQRMHPRSSFKAFLEVVKSRSLPWENAEMDAIHSLQLILRDSFRDAEATNSKAVVHNQLKDMELQGMDELSSVAREMVRLIETATAPIFAVDVDGRINGWNAKVAELTGLSVEEAMGKSLVHDLVYKEYEEIVDKLIHRAVKGEEDKNVEIKLRTFCSEHQKKAVFVVVNACSSKDYMDNIVGVCFVGQDVTGQKVVMDKYVLIQGDYKAIVHSPNPSIPPIFASDENTCCLEWNTALEKLTGWSRGEVVGKMLVGEVFGSCCRLKGPDALTKFMIALHNAIGGIDTDKLPFSFFDRNEKNVQTLLTANKRVNMKGDIIGAFCFLQIASLELQPSLKVQKQQEKKSFARMKELAYICQEIKNPLSGIHFTNSLLENTDLTEDQQQFLETSAACEKQILKIIRDIDLESIENGSLELEKAEFLLGSVINAVVSQAMLLLRERNLQLLRDIPEEIKTLAVYGDQARIQQVLADFLLNMVRYAPSSAGWVEIHVCPTLKQISDGHTLVHTEFRYLERVLQTRMLGLQHPPRSFLNCKLTLVMLHREGMVPKIQFQGLSVCQGRLIWLSFPENTTVALYPLTIWFLLLHRHQSRSITHT

SEQ ID NO: 7029 - protein, 221 aa, Picea sitchensis
MFLQRIAYLYDCMFYAGISVLVVLYAILHAACLLSAKSLTPKISDPESIWFLSAMCFQHGMSFLEFWWASHGSFQQWWNDERFWWISNASCFLLGTLEAFFISIGLLETGFSVTPKSSETDNASPYEITASPLFISLVMLVMMFSVATVTAAALVINGGTESFNYMCGELLCGMWSLVILYPILSQLLKVRKGIDKVPLSVMLPSVIGTIVFCVMVNTYIF

SEQ ID NO: 7030 - protein, 1146 aa, Populus tremula
MASQSQRQSNQPAHNQAQSSGTSNMRQHHHPTESVSKAIAQYTVDAQLHAVFEQSGGTGKSFDYSKSVRTPNQSVPEEQITAYLSKIQRGGHIQPFGCMIAADEQSFRVIAYSENAKDMLGLTPQSVPSLEKQEILFVGADVRILFRPSSAVLLEKAFGAREITLLNPIWIHSKNSGKPFYAILHRIDVGIVIDLEPARTEDPALSIAGAVQSQKLAVRAISQLQSLPGGDIKLLCDTVVDSVRELTGYDRVMVYKFHEDEHGEVVAENKRVDLEPYIGLHYPSTDIPQASRFLFKQNRVRMIVDCHAIPVSVIQDEGLMQPLCLVGSTLRAPHGCHAQYMENMGSIASLAMAVIIYGNDEEAIGGRNSMRLWGLVVCHHTSARCIPFPLRYACEFLMQAFGLQLNMEFQLASQLLEKHVLRTQTLLCDMLLRDSPTGIVTQSPSIMDLVKCDGAALYYQGQYYPLGVTPTEAQIKDIVEWLLTLHGDPTGLSTDSLADAGYPGAAFLGDAVCGMAVAYIAERDFLFWFRSHTAKEVKWGGAKHHPEDKDDGQRMHPRSSFKAFLEVVKSRSLPWENAEMDAIHSLQLILRDSFRDAEATNSKAVVHNQLKDMELQGMDELSSVAREMVRLIETATAPIFAVDVDGRINGWNAKVAELTGLSVEEAMGKSLVHDLVYKEYEEIVDKLIHRAVKGEEDKNVEIKLRTFCSEHQKKAVFVVVNACSSKDYMDNIVGVCFVGQDVTGQKVVMDKYVLIQGDYKAIVHSPNPSIPPIFASDENTCCLEWNTALEKLTGWSRGQVVGKMLVGEVFGSCCRLKGPDALTKFMIALHNAIGGIDTDKLPFSFFDRNEKNVQTLLTANKRVNIKGDIIGAFCFLQIASPELQPSLKVQKQQEKKSFARMKELAYICQEIKNPLSGIHFTNSLLENTDLTEDQQQFLETSAACEKQILKIIRDIDLESIENGSLELEKAEFLLGSVINAVVSQAMLLLRERNLQLLRDIPEEIKTLAVYGDQARIQQVLADFLLNMVRYAPSSAGWVEIHVCPTLKQISDGHTLVHTEFRYLERVLQTRMLGLQHPPRSFLNCKLTLVKLHREGMVPKIQFQGLSVCQGRLIWLSFPENTTVALYPLTIWFLLLHRHQSRSITHT

SEQ ID NO: 7031 - protein, 169 aa, Oryza sativa
  misc_feature (17)..(17): Xaa can be any naturally occurring amino acid
  misc_feature (32)..(32): Xaa can be any naturally occurring amino acid
  misc_feature (34)..(34): Xaa can be any naturally occurring amino acid
  misc_feature (38)..(38): Xaa can be any naturally occurring amino acid
  misc_feature (51)..(51): Xaa can be any naturally occurring amino acid
  misc_feature (62)..(62): Xaa can be any naturally occurring amino acid
  misc_feature (65)..(65): Xaa can be any naturally occurring amino acid
  misc_feature (82)..(82): Xaa can be any naturally occurring amino acid
  misc_feature (87)..(87): Xaa can be any naturally occurring amino acid
  misc_feature (90)..(90): Xaa can be any naturally occurring amino acid
  misc_feature (113)..(113): Xaa can be any naturally occurring amino acid
  misc_feature (118)..(118): Xaa can be any naturally occurring amino acid
  misc_feature (126)..(126): Xaa can be any naturally occurring amino acid
  misc_feature (130)..(130): Xaa can be any naturally occurring amino acid
  misc_feature (149)..(149): Xaa can be any naturally occurring amino acid
  misc_feature (162)..(162): Xaa can be any naturally occurring amino acid
SGGARRERRTTKRGERXEAGAGRAQTRDNEKXGXSSRXARDRRGEEEQGEXAKRGGGTKHFXLPXDTLAAPPEDGEETRPPXNKPAXRKXNGGPGTTRGGTGPKPATEGRNGXTGRDXTATQSEAXNTKXGSKGPPPPRNAPNTQEDTXKTAEKDTKPNKEXQTRKQSQ

SEQ ID NO: 7032 - protein, 313 aa, Zea mays
  misc_feature (186)..(186): Xaa can be any naturally occurring amino acid
MGRRSSQFPSMALAMATVLMALGGVAATARAGGGIAIYWGQNGNEGTLAQTCATGNYRLVNVAFLPTFGRGQTPALNLAGHCDPASGGCTGVGADVKACQRMGVKVLLSIGGGVGSYGLSSRADARSVAAYLWDNYLGGGGGGSESRPLGDAVLDGVDFDIESGGGMYWDDLARFLKSYSRAGAGXARRPVYLSAAPQCPFPDASLGTALATGLFDYVWVQFYNNPPCQYSASAGVGSLAQAWAQWTSIRAGRVFLGLPAAPQAAGSGFVPASDLVAQVLPVVKNSTKYGGIMLWSRYYDGLTGYSDAVKSYV

SEQ ID NO: 7033 - protein, 1146 aa, Populus tremula
MASQSQRQSNQPAHNQAQSSGTSNMRQHHHPTESVSKAIAQYTVDAQLHAVFEQSGGTGKSFDYSKSVRTPNQSVPEEQITAYLSKIQRGGHIQPFGCMIAADEQSFRVIAYSENAKDMLGLTPQSVPSLEKQEILFVGADVRILFRPSSAVLLEKAFGAREITLLNPIWIHSKNSGKPFYAILHRIDVGIVIDLEPARTEDPALSIAGAVQSQKLAVRAISQLQSLPGGDIKLLCDTVVDSVRELTGYDRVMVYKFHEDEHGEVVAENKRVDLEPYIGLHYPSTDIPQASRFLFKQNRVRMIVDCHAIPVSVIQDEGLMQPLCLVGSTLRAPHGCHAQYMENMGSIASLAMAVIIYGNDEEAIGGRNSMRLWGLVVCHHTSARCIPFPLRYACEFLMQAFGLQLNMELQLASQLLEKHVLRTQTLLCDMLLRDSPTGIVTQSPSIMDLVKCDGAALYYQGQYYPLGVTPTEAQIKDIVEWLLTLHGDPTGLSTDSLADAGYPGAAFLGDAVCGMAVAYIAERDFLFWFRSHTAKEVKWGGAKHHPEDKDDGQRMHPRSSFKAFLEVVKSRSLPWENAEMDAIHSLQLILRDSFRDAEATNSKAVVHTQLKDMELQGMDELSSVAREMVRLIETATAPIFAVDVDGRINGWNAKVAELTGLSVEEAMGKSLVHDLVYKEYEEIVDKLIHRAVKGEEDKNVEIKLRTFCSEHQKKAVFVVVNACSSKDYMDNIVGVCFVGQDVTGQKVVMDKYVLIQGDYKAIVHSPNPSIPPIFASDENTCCLEWNTALEKLTGWSRGEVVGKMLVGEVFGSCCRLKGPDALTKFMIALHNAIGGIDTDKLPFSFFDRNEKNVQTLLTANKRVNIKGDIIGAFCFLQIASPELQPSLKVQKQQEKKSFARMKELAYICQEIKNPLSGIHFTNSLLENTDLTEDQQQFLETSAACEKQILKIIRDIDLESIENGSLELEKAEFLLGSVINAVVSQAMLLLRERNLQLLRDIPEEIKTLAVYGDQARIQQVLADFLLNMVRYAPSSAGWVEIHVCPTLKQISDGHTLVHTEFRYLERVLQTRMLGLQHPPRSFLNCKLTLVMLHREGMVPKIQFQGLSVCQGRLIWLSFPENTTVALYPLTIWFLLLHRHQSRSITHT

SEQ ID NO: 7034 - protein, 339 aa, Oryza sativa Japonica Group
MGMDYYNILKVNRNATLEDLKKSYRRLARTWHPDKNPTGGAEAEAKFKQITEAYEVLSDPEKRAIYDRYGEEGLKGMPPPGSQSRTSAAAGSSGPSNFRYNPSDPDDFFAEFMASNKPYSFDQERTRFQPRSQWTAGNTRGEASSASHKESSTSTSQLEKPPAIEKTLLCTLEELYNGTKRKMKITRNVANTDGKVEIETEVLPVEVLPGWKKGTKITFPNKGDRLSGQLPQDLTFVIDLKPHDVYLLEGNNLVATQVIPLVDALAGTTIHLKTLDGRNLPIRVEEVVRPGHEIVLANEGWPIRKEPGKKGNLKIKFDVTFPTRLSSSQRAAIRQIMGG

SEQ ID NO: 7035 - protein, 1146 aa, Populus tremula
MASQSQRQSNQPAHNQAQSSGTSNMRQHHHPTESVSKAIAQYTVDAQLHAVFEQSGGTGKSFDYSKSVRTPNQSVPEEQITAYLSKIQRGGHIQPFGCMIAADEQSFRVIAYSENAKDMLGLTPQSVPSLEKQEILFVGADVRILFRPSSAVLLEKAFGAREITLLNPIWIHSKNSGKPFYAILHRIDVGIVIDLEPARTEDPALSIAGAVQSQKLAVRAISQLQSLPGGDIKLLCDTVVDSVRELTGYDRVMVYKFHEDEHGEVVAENKRVDLEPYIGLHYPSTDIPQASRFLFKHNRVRMIVDCHAIPVSVIQDEGLMQPLCLVGSTLRAPHGCHAQYMENMGSIASLAMAVIIYGNDEEAIGGRNSMRLWGLVVCHHTSARCIPFPLRYACEFLMQAFGLQLNMELQLASQLLEKHVLRTQTLLCDMLLRDSPTGIVTQSPSIMDLVKCDGAALYYQGQYYPLGVTPTEAQIKDIVEWLLTLHGDPTGLSTDSLADAGYPGAAFLGDAVCGMAVAYIAERDFLFWFRSHTAKEVKWGGAKHHPEDKDDGQRMHPRSSFKAFLEVVKSRSLPWENAEMDAIHSLQLILRDSFRDAEATNSKAVVHTQLKDMELQGMDELSSVAREMVRLIETATAPIFAVDVDGRINGWNAKVAELTGLSVEEAMGKSLVHDLVYKEYEEIVDKLIHRAVKGEEDKNVEIKLRTFCSEHQKKAVFVVVNACSSKDYMDNIVGVCFVGQDVTGQKVVMDKYVLIQGDYKAIVHSPNPSIPPIFASDENTCCLEWNTALEKLTGWSRGEVVGKMLVGEVFGSCCRLKGPDALTKFMIALHNAIGGIDTDKLPFSFFDRNEKNVQTLLTANKRVNMKGDIIGAFCFLQIASPELQPSLKVQKQQEKKSFARMKELAYICQEIKNPLSGIHFTNSLLENTDLTEDQQQFLETSAACEKQILKIIRDIDLESIENGSLELEKAEFLLGSVINAVVSQAMLLLRERNLQLLRDIPEEIKTLAVYGDQARIQQVLADFLLNMVRYAPSSAGWVEIHVCPTLKQISDGHTLVHTEFRYLERVLQTRMLGLQHPLRSFLNCKLTLVKLHREGMVPKIQFQGLSVCQGRLIWLSFPENTTVALYPLTIWFLLLHRHQSRSITHT

SEQ ID NO: 7036 - protein, 511 aa, Glycine max
LHWPFVLVSISKSTTTPSLLFSIIIISTPFTLSHSSLESSTAMATAAEKLSALKSAVAGLNEISENEKNGFISLVGRYLSGEAQHVEWSKIQTPTDEVVVPYDTLAPTPEGSSEVKNLLDKLVVLKLNGGLGTTMGCTGPKSVIEVRDGLTFLDLIVIQIENLNSKYGSNVPLLLMNSFNTHDDTQKIVEKYQNSNIEIHTFNQSQYPRLVVEDFLPLPSKGHTDKDGWYPPGHGDVFPSLLNSGKLDALLSQGKEYVFVANSDNLGAIVDLKILNHLIQNKNEYCMEVTPKTLADVKGGTLISYEGRVQLLEIAQVPDEHVNEFKSIEKFKIFNTNNLWVNLNAVKRLVEADALKMEIIPNPKEVDGIKVLQLETAAGAAIRFFDKAIGINVPRSRFLPVKATSDLLLVQSDLYTLEDGFVIRNKARENPENPSIELGPEFKKVSNFLGRFKSIPSIVELDSLKVAGDVWFGAGVILKGKVSIVSKPGVKLEVPDGVAIVDKEINGPEDL

SEQ ID NO: 7037 - protein, 382 aa, Pyrococcus furiosus DSM 3638
MKLKRGKPKEKFSYDPQKVLKKLEDLAYKILEEVKAGKNPYFDVPTRGLSNVYFDEEARLIKLGDKLSRRYFLNVAHARKFMQTLILMAYVKRLVSEGKHASLREAYYANKHTIPGTHENTFEDQSESDPIIEDLERMLGVLREEMHITADRRGYVYGDIVIKDGEDEFNASKLGMGGWAVPGTVEHIQFPEINVDYVLVVETAAMADRLIEEKYPKRERALIIATQGQASRGVRRLIHRLHYEEGLPIIVFTDGDPYGWYIYSTIKQGSINLAYLSEKLATPDAKFVGMTMDDIKEYGLEHVTEKLKGIPPDKKGGPTGDYKRLIEELNYPWFQNKEWQRQLKLALKWGVRIEQQALANKSLEFVAKEYLPEKIREGKLLP

SEQ ID NO: 7038 - protein, 149 aa, Triticum aestivum
  misc_feature (68)..(68): Xaa can be any naturally occurring amino acid
  misc_feature (137)..(137): Xaa can be any naturally occurring amino acid
MDASTDIRAAYRRLAMKWHPDRWASDPGATGEAKRRFQRIQEAYSVLSDKGKRAMYDAGLFDPLHDDXQDFSDFMQEMLVMMDSVKNEKPDTLEDLQKMLDDIVNGDGGSRATAGAGGSGGGGGGCGGRVPPEANRXTRVAPYPQPSRR

SEQ ID NO: 7039 - protein, 669 aa, Podospora anserina
PPQLPRPLSSTPGFGHDGPLLRRIFVSVLESANTSHPLELKETHLGPLTSTFSRSPSTSTITDKDSKSQGDISGAVTPTNENTIAASEALTQAPVVAPPKPGILVVTLHEGQGFSLPEQHRASFNNPAHGGNSLSTGNALNMSSSIRPSSSSRTSGFMGRPQTSGGFSGIPTNHGRISSKYMPYALIDFDKLQVFVNSVEGTPENPLWAGSNTQYKFDVSRVTELVIHLYIRNPNAPPGSGRSQDIFLGVARINPRFEEKQPYVEDPKASKKDREKAAAEHANREKTLGQTGVEWVDVQYGTGKIKIGVEYVENRAGKLKIEDFELLKVVGKGSFGKVMQVKKKDTNRIYALKTIRKAHIISRSEVAHTLAERSVLAQINNPFIVPLKFTFQSPEKLYFVLAFVNGGELFHHLQKEQRFDVNRSRFYTAELLCALECLHGFNVIYRDLKPENILLDYQGHIALCDFGLCKLDMKDEDRTNTFCGTPEYLAPELLMGNGYNKTVDWWTLGVLLYEMLTGLPPFYDENTNEMYRKILSEPLHFPSQEVVPPAAKDLLTKLLNRDPQQRLGANGSAEIKAHPFFHAIDWRKLLQRKYEPTFKPSVVDALDTANFDPEFTSEPPQDSYVEGPVLSQTMQNQFTGFSYNRPIAGLGDAGGSVRDPSFVGSIQDR

SEQ ID NO: 7040 - protein, 480 aa, Aspergillus niger
MPSLGGLLKKRRTKDSQTLSKELEAGSAQTQTSPNAAEDHHNHNHHQHHHHLFHHHHQPQPATNSGSAANTPPQPQDSVPQQSNRSSGAEKSSDGQVASMQSAVTQASPSAHHTSGLPQPNANAASIQNIINPSQQGAMHSASSGHTQSHHAGRSDARTTKGKYSLDDFSLQRTLGTGSFGRVHLVQSKHNHRFYAVKVLKKAQVVKMKQIEHTNDERRMLNRVRHPFLITLWGTWQDSRNLYMVMDFVEGGELFSLLRKSQRFPNPVAKFYAAEVTLALEYLHTQNIIYRDLKPENLLLDRHGHLKITDFGFAKEVPDITWTLCGTPDYLAPEVVSSKGYNKSVDWWSLGILIFEMLCGFTPFWDSGSPVKIYENILRGRVKYPPYLHPDAVDLLSQLITADLTKRLGNLHGGSDDVKNHPWFAEVTWDRLARKDIDAPYVPPIRGGQGDASQYDRYPEETEQYGMAGEDPHGHLFPDF

SEQ ID NO: 7041 - protein, 230 aa, Arabidopsis thaliana
MASSNSEKINENLYAVLGLKKECSKTELRSAYKKLALRWHPDRCSSMEFVEEAKKKFQAIQEAYSVLSDSNKRFLYDVGAYNTDDDDDQNGMGDFLNEMATMMNQSKPSDNNTGDSFEQLQDLFNEMFQGDAAAFPSSSSCSTSNFTSSRSFVFDTNSQRSSSFATSSMGMNNDPFGYDPRAHSFSLGVDHQQEFKKGKNNGGRRNRRKNNVPSAGHETSSSNNYGVPTS

SEQ ID NO: 7042 - protein, 373 aa, Neisseria meningitidis
MSNQDFYATLGVARTATDDEIKKAYRKLAMKYHPDRNPDNKEAEEKFKEVQKAYETLSDKEKRAMYDQYGHAAFEGGGQGGFGGFGGFGGAQGFDFGDIFSQMFGGGSGRAQPDYQGEDVQVGIEITLEEAAKGVKKRINIPTYEACDVCNGSGAKPGTSPETCPTCKGSGTVHIQQAIFRMQQTCPTCHGAGKHIKEPCVKCRGAGRNKAVKTVEVNIPAGIDDGQRIRLSGEGGPGMHGEPAGDLYVTVRIRAHKIFQRDGLDLHCELPISFATAALGGELEVPTLDGKVKLTVPKETQTGRRMRVKGKGVKSLRSSATGDLYCHIVVETPVNLTDRQKELLEEFERISTGLENQTPRKKSFLDKLRDLFD

SEQ ID NO: 7043 - protein, 731 aa, Populus trichocarpa
MERIAESKALPAKLPVASQVSSRAYVVSGREVSQAPKLQTGLVRDVAGRFNAHQSQITDFPVPVRPWKGKDSAAIEDDLMLNVVVTSKGSGDSFDEGEPSSFSGASHPPEPIDTDLIMKTVYVPISQKKAEPGCLVKSMSVKGPFLEDLSIRVSPKKPSPVILSPAESLIEEPNDLLVLPSPFTVPRRSQNTENSLLPPDSEEKECVWDASLPPSGNVSPHSSIDSTGVVTAMSIVNSCASTYRSDVITSDGMLTIDRNCESTKGSVSVRGDSLESAKTSVSRASDSSGLSDDSNWSNITGSANKPHKGNDPRWNAILAIRARDGILGMSHFRLFKRLGCGDIGSVYLSELSGTRCFFAMKVMDKASLASRKKLTRAQTEREILQLLDHPFLPTLYTHFETDRFSCLVMEYCPGGDLHTLRQRQPGKHFSEHAARFYAAEVLLALEYLHMLGVVYRDLKPENVLVRDDGHIMLSDFDLSLRCAVSPTLIRTSFDSDPSKRAAGGAFCVQPACIEPSSVCIQPACFLPRIFAQKNKKKTRKSRHDLGLPACALPELVAEPTAARSMSFVGTHEYLAPEIIKGEGHGSAVDWWTFGIFLHELLYGKTPFKGSGNRATLFNVVGQQLRFPDSPATAYASQDLIRGLLVKEPQHRLGVKRGATEIKQHPFFESVNWALIRCSTPPEVPRPVETEPSPGKFGAVDKIGVGIVGSSSKRMAGTDMKSGGKYLDFEFF

SEQ ID NO: 7044 - protein, 1146 aa, Populus tremula
MASQSQRQSNQPAHNQAQSSGTSNMRQHHHPTESVSKAIAQYTVDAQLHAVFEQSGGTGKSFDYSKSVRTPNQSVPEEQITAYLSKIQRGGHIQPFGCMIAADEQSFRVIAYSENAKDMLGLTPQSVPSLEKQEILFVGADVRILFRPSSAVLLEKAFGAREITLLNPIWIHSKNSGKPFYAILHRIDVGIVIDLEPARTEDPALSIAGAVQSQKLAVRAISQLQSLPGGDIKLLCDTVVDSVRELTGYDRVMVYKFHEDEHGEVVAENKRVDLEPYIGLHYPSTDIPQASRFLFKQNRVRMIVDCHAIPVSVIQDEGLMQPLCLVGSTLRAPHGCHAHYMENMGSIASLAMAVIIYGNDEEAIGGRNSMRLWGLVVCHHTSARCIPFPLRYACEFLMQAFGLQLNMELQLASQLLEKHVLRTQTLLCDMLLRDSPTGIVTQSPSIMDLVKCDGAALYYQGQYYPLGVTPTEAQIKDIVEWLLTLHGDPTGLSTDSLADAGYPGAAFLGDAVCGMAVAYIAERDFLFWFRSHTAKEVKWGGAKHHPEDKDDGQRMHPRSSFKAFLEVVKSRSLPWENAEMDAIHSLQLILRDSFRDAEATNSKAVVHTQLKDMELQGMDELSSVAREMVRLIETATAPIFAVDVEGRINGWNAKVAELTGLSVEEAMGKSLVHDLVYKEYEEIVDKLIHRAVKGEEDKNVEIKLRTFCSEHQKKAVFVVVNACSSKDYMDNIVGVCFVGQDVTGQKVVMDKYVLIQGDYKAIVHSPNPSIPPIFASDENTCCLEWNTALEKLTGWSRGEVVGKMLVGEVFGSCCRLKGPDALTKFMIALHNAIGGIDTDKLPFSFFDRNEKNVQTLLTANKRVNMKGDIIGAFCFLQIASPELQPSLKVQKQQEKKSFARMKELAYICQEIKNPLSGIHFTNSLLENTDLTEDQQQFLETSAACEKQILKIIRDIDLESIENGSLELEKAEFLLGSVINAVVSQAMLLLRERNLQLLRDIPEEIKTLAVYGDQARIQQVLADFLLNMVRYAPSSAGWVEIHVCPTLKQISDGHTLVHTEFRYLERVLQTRMLGLQHPLRSFLNCKLTLVMLHREGMVPKIQFQGLSVCQGRLIWLSFPENTTVALYPLTIWFLLLHRHQSRSITHT

SEQ ID NO: 7045 - protein, 339 aa, Cyanothece sp. PCC 7424
MASTDFKDYYGVLGVNKTASGEDIKKAFRKLAVKYHPDRNPGDKQAEDRFKEISEAYEVLSDPDKRSKYDQFGQYWKQAGQTPRGWSPNGAGVNVNVGDFDFSQFGTFEEFINELLGRASTTGGTRNRSYNYRTRTSPTGYGDFGGFNDFSSGFAGQSSPVSADRESHIRLTLREAFQGVKKTLALGDEKIEVNIPAGTKSGNRLRVRGKGKTNPYSSERGDLYLIVELQPHAFFQFEGDNLICEVPITPDEAVLGASIDVPTPDGMVTMKIPAGIRSGQTLRLRGKGWPNIKGGRGDQLVRVVIDTPKTVSNTELEYYQKIRDTRSYDPRSHLHQVHL

SEQ ID NO: 7046 - protein, 219 aa, Oryza sativa
  misc_feature (20)..(20): Xaa can be any naturally occurring amino acid
MVKLTMVARVTDGLPLAEGXRHDGRDQKDADFYKQQAKLLFKNLSKGQHEASRMSIETGPYFFHYIIEGRVCYLTMCDRSYPKKLAFQYLEDLKNEFERVNGSQIETAARPYAFIKFDTFIQKTKKLYLDTRTQRNLAKLNDELYEVHQIMTRNVQEVLGVGEKLDQVTEMSTRLTSDTRMYADKAKDLNRQALIRKYAPVAIVIGVGLMLFWLKNKIW

SEQ ID NO: 7047 - protein, 1146 aa, Populus tremula
MASQSQRQSNQPAHNQAQSSGTSNMRQHHHPTESVSKAIAQYTVDAQLHAVFEQSGGTGKSFDYSKSVRTPNQSVPEEQITAYLSKIQRGGHIQPFGCMIAADEQSFRVIAYSENAKDMLGLTPQSVPSLEKQEILFVGADVRILFRPSSAVLLEKAFGAREITLLNPIWIHSKNSGKPFYAILHRIDVGIVIDLEPARTEDPALSIAGAVQSQKLAVRAISQLQSLPGGDIKLLCDTVVDSVRELTGYDRVMVYKFHEDEHGEVVAENKRVDLEPYIGLHYPSTDIPQASRFLFKQNRVRMIVDCHAIPVSVIQDEGLMQPLCLVGSTLRAPHGCHAQYMENMGSIASLAMAVIIYGNDEEAIGGRNSMRLWGLVVCHHTSARCIPFPLRYACEFLMQAFGLQLNMELQLASQLLEKHVLRTQTLLCDMLLRDSPTGIVTQSPSIMDLVKCDGAALYYQGQYYPLGVTPTEAQIKDIVEWLLTLHGDPTGLSTDSLADAGYPGAAFLGDAVCGMAVAYIAERDFLFWFRSHTAKEVKWGGAKHHPEDKDDGQRMHPRSSFKAFLEVVKSRSLPWENAEMDAIHSLQLILRDSFRDAEATNSKAVVHTQLKDMELQGMDELSSVAREMVRLIETATAPIFAVDVDGCINGWNAKVAELTGLSVEEAMGKSLVHDLVYKEYEEIVDKLIHRAVKGEEDKNVEIKLRTFCSEHQKKAVFVVVNACSSKDYMDNIVGVCFVGQDVTGQKVVMDKYVLIQGDYKAIVHSPNPSIPPIFASDENTCCLEWNTALEKLTGWSRGEVVGKMLVGEVFGSCCRLKGPDALTKFMIALHNAIGGIDTDKLPFSFFDRNEKNVQTLLTANKRVNIKGDIIGAFCFLQIASPELQPSLKVQKQQEKKSFARMKELAYICQEIKNPLSGIHFTNSLLENTDLTEDQQQFLETSAACEKQILKIIRDIDLESIENGSLELEKAEFLLGSVINAVVSQAMLLLRERNLQLLRDIPEEIKTLAVYGDQARIQQVLADFLLNMVRYAPSSAGWVEIHVCPTLKQISDGHTLVHTEFRYLERVLQTRMLGLQHPLRSFLNCKLTLVMLHREGMVPKIQFQGLSVCQGRLIWLSYPENTTVALYPLTIWFLLLHRHQSRSITHT

SEQ ID NO: 7048 - protein, 665 aa, Anabaena variabilis ATCC 29413
MTSLFINNAPTFSGNSRSTLKKRTLLFRYLAEINLIFGLWYLQWRITNSINFDALWLSIPLLLAEIYSYIGGVMFVIGLWRPLVRQIKSLDQLTPPLPPTDWPIVDVFITCYNEPPEMVEQTAQAALAIDYPPTKLYVYVLDDGNSPTMRAMTERLCIADLQSPLLQQEANRIDAERSHLVERLQNLESFTPNIQVAEEWLSKSSSVPSQDTTKTEVLAQSLQQFIRWLSPKHHSVTERLKTERQALAAAIRQKELELVELARLRYIARPKPVGVPHHAKAGNLNYAIFSGETSGELILTLDADHIPKPQFLKRVLPYFYTYNLFNGKYEQNRIAFVQTPQDFYNIPPSDPFGHRASLFYGPLQQGKDGMNAAFYTGTNAILRREALINVGLQYFADDFTKDEKRLDEFQLVGGLSSNSITEDMNTAMRLHGAGWKSVYHHELLAEGLAPDDLSSTLKQRLRWAQGTIQVLVRENPLSKPGLTFWQRLQYFKTMYSYFSGFATLIFISCPIIYFFTEISPVKTYGIDFIVHFLPTFIINRLTFIVAIWGIPASEIWRSEQYAIALFPVFIQAVWSVFTGQKINFQVTPKQRQSGIYLQMIWPQLMFLLLTIIGIVWSLYNFVIGHLNHPWVNLLNSSWAIYNLLLLSGIIRASVWQMPKDHSNKI

SEQ ID NO: 7049 - protein, 1146 aa, Populus tremula
MASQSQRQSNQPAHNQAQSSGTSNMRQHHHPTESVSKAIAQYTVDAQLHAVFEQSGGTGKSFDYSKSVRTPNQSVPEEQITAYLSKIQRGGHIQPFGCMIAADEQSFRVIAYSENAKDMLGLTPQSVPSLEKQEILFVGADVRILFRPSSAVLLEKAFGAREITLLNPIWIHSKNSGKPFYAILHRIDVGIVIDLEPARTEDPALSIAGAVQSQKLAVRAISQLQSLPGGDIKLLCDTVVDSVRELTGYDRVMVYKFHEDEHGEVVAENKRVDLEPYIGLHYPSTDIPQASRFLFKQNRVRMIVDCHAIPVSVIQDEGLMQPLCLVGSTLRAPHGCHAQYMENMGSIASLAMAVIIYGNDEEAIGGRNSMRLWGLVVCHHTSTRCIPFPLRYACEFLMQAFGLQLNMELQLASQLLEKHVLRTQTLLCDMLLRDSPTGIVTQSPSIMDLVKCDGAALYYQGQYYPLGVTPTEAQIKDIVEWLLTLHGDPTGLSTDSLADAGYPGAAFLGDAVCGMAVAYIAERDFLFWFRSHTAKEVKWGGAKHHPEDKDDGQRMHPRSSFKAFLEVVKSRSLPWENAEMDAIHSLQLILRDSFRDAEATNSKAVVHTQLKDMELQGMDELSSVAREMVRLIETATAPIFAVDVDGCINGWNAKVAELTGLSVEEAMGKSLVHDLVYKEYEEIVDKLIHRAVKGEEDKNVEIKLRTFCSEHQKKAVFVVVNACSSKDYMDNIVGVCFVGQDVTGQKVVMDKYVLIQGDYKAIVHSPNPSIPPIFASDENTCCLEWNTAMEKLTGWSRGEVVGKMLVGEVFGNCCRLKGPDALTKFMIALHNAIGGIDTDKLPFSFFDRNEKNVQTLLTANKRVNMKGDIIGAFCFFRIASPELQPSLKVQKQQEKKSFARMKELAYICQEIKNPLSGIHFTNSLLENTDLTEDQQQFLETSAACEKQILKIIRDIDLESIENGSLELEKAEFLLGSVINAVVSQAMLLLRERNLQLLRDIPEEIKTLAVYGDQARIQQVLADFLLNMVRYAPSSAGWVEIHVCPTLKQISDGHTLVHTEFKYLERVLQTRMLGLQHPLRSFLNCKLTLVMLHREGMVPKIQFQGLSVCQGRLIWLSYPENTTVALYPLTIWFLLLHRHQSRSITHT

SEQ ID NO: 7050 - protein, 768 aa, Musa acuminata
MAYKFHEDEHGEVIAECRKSDLEPYLGLHYPATDIPQASRFLFTKNKVRMICDCSASPVQVIQEKRLSQPLSLCGSTLRAPRGCHAQYMANMGSTASLVMSITICEHKDEASGGDQQQKGQKLWSLVVCHHTSPMLVPFPLRYACEFLMHVFGVQLNKEVELAAQTKEKHILRTQTLRCDMLLHDAPIGIFTQSPNVMDLVKSDGAALYFRNQVWLLGMTPTELQIRDIVAWLMEYHDGSTGLSTDSMTEAGYPGAAELGDAVCGMAAIKITSRDFIFWFRSHTTKETKWGNINGWNSKAADLTGLPVQEAIGMPLIDLVEDDSVEVAIKVLQLALRGEEEKNIEIKLKSFSNQDSNSSIILVVNSCCSHDMKDNIVGVCFVGQDVTRQKLMMDKNTRIQNDYVAVVRNPSKLIPPIFIINESGCCSEWNSAMEKVSGTKRRGAIDKMLVGELFCHHGFGYQVKDHDALTKLKIVLNGVMAALLSVNKRMNSEGKIAGTLWFLHVASPELQHSLQVQKMSEQVATNSLKELAYLRQEIRNSLNGITFMQDLMETTDLTDEQKQLLRRKALCQEPLAKILDGMDLENIEQCYMELDSVEFHLGETLDVVINQVMTLSRERQVVLLQDWSAEVSSMHLYGDNLRLQQILADFLSSALQFAPVSQGSILLQAVARKELTVTGVQMVHIEFRIIDPAPGIPEALVQEMFQHSQGISRGGHGLYVSQKLVKIMNGTVQYVRETERSSGIILLEFPLVKPHRLENMITELLACL

SEQ ID NO: 7051 - protein, 1146 aa, Populus tremula
MASQSQRQSNQPAHNQAQSSGTSNMRQHHHPTESVSKAIAQYTVDAQLHAVFEQSGGTGKSFDYSKSVRTPNQSVPEEQITAYLSKIQRGGHIQPFGCMIAADEQSFRVIAYSENAKDMLGLTPQSVPSLEKQEILFVGADVRILFRPSSAVLLEKAFGAREITLLNPIWIHSKNSGKPFYAILHRIDVGIVIDLEPARTEDPALSIAGAVQSQKLAVRAISQLQSLPGGDIKLLCDTVVDSVRELTGYDRVMVYKFHEDEHGEVVAENKRVDLEPYIGLHYPSTDIPQASRFLFKQNRVRMIVDCHAIPVSVIQDEGLMQPLCLVGSTLRAPHGCHAQYMENMGSIASLAMAVIIYGNDEEAIGGRNSMRLWGLVVCHHTSARCIPFPLRYACEFLMQAFGLQLNMELQLASQLLEKHVLRTQTLLCDMLLRDSPTGIVTQSPSIMDLVKCDGAALYYQGQYYPLGVTPTEAQIKDIVEWLLTLHGDPTGLSTDSLADAGYPGAAFLGDAVCGMAVAYIAERDFLFWFRSHTAKEVKWGGAKHHPEDKDDGQRMHPRSSFKAFLEVVKSRSLPWENAEMDAIHSLQLILRDSFRDAEATNSKAVVHTQLKDMELQGMDELSSVAREMVRLIETATAPIFAVDVEGRINGWNAKVAELTGLSVEEAMGKSLVHDLVYKEYEEIVDKLIHRAVKGEEDKNVEIKLRTFCSEHQKKAVFVVVNACSSKDYMDNIVGVCFVGQDVTGQKVVMDKYVLIQGDYKAIVHSPNPSIPPIFASDENTCCLEWNTALEKLTGWSRGEVVGKMLVGEVFGSCCRLKGPDALTKFMIALHNAIGGIDTDKLPFSFFDRNEKNVQTLLTANKRVNMKGDIIGAFCFLQIASPELQPSLKVQKQQEKKSFARMKELAYICQEIKNPLSGIHFTNSLLENTDLTEDQQQFLETSAACEKQILKIIRDIDLESIENGSLELEKAEFLLGSVINAVVSQAMLLLRERNLQLLRDIPEEIKTLAVYGDQARIQQVLADFLLNMVRYAPSSAGWVEIHVCPTLKQISDGHTLVHTEFRYLERVLQTRMLGLQHPLRSFLNCKLTLVKLHREGMVPKIQFQGLSVCQGRLIWLSFPENTTVALYPLTIWFLLLHRHQSRSITHT

SEQ ID NO: 7052 - protein, 187 aa, Triticum aestivum
  misc_feature (130)..(130): Xaa can be any naturally occurring amino acid
MATGGDNGCGGGGAAAPGGGDLYAVLGLSKECSDADLKLAYRKLAMRWHPDRCSSSSGTKRMEEAKEKFQEIQGAYSVLSDANKRFLYDVGVYQEEEDSDDSMQGMGDFLGEMAHMMSQTRPARQESFEXLQQLFGDMFQSDIVSCGARLTDVGRAARSSRRPHQARRRLDRSPDPGTLVPRLVYFV

SEQ ID NO: 7053 - protein, 238 aa, Zea mays
MTGFGSPCGACKFLRRKCVRGCVFAPYFCHEQGAAHFAAIHKVFGASNVSKLLAHLPLADRAEAAVTISYEAQARLRDPIYGCVAHIFALQQQAQLASLKAQAAQGQQGVHEDAKGYVGSAAAEQLGYGYPWCSGNGGAAAAAGAVGAPAAQPGAYGNGAHESLTALLGSSDYMQQSLYHAFEQAGADDDDGRQGYGFEAAAESSSLGAEESGWRSSSGYQDCEDLQSVAYAYLNHRS

SEQ ID NO: 7054 - protein, 1146 aa, Populus tremula
MASQSQRQSNQPAHNQAQSSGTSNMRQHHHPTESVSKAIAQYTVDAQLHAVFEQSGGTGKSFDYSKSVRTPNQSVPEEQITAYLSKIQRGGHIQPFGCMIAADEQSFRVIAYSENAKDMLGLTPQSVPSLEKQEILFVGADVRILFRPSSAVLLEKAFGAREITLLNPIWIHSKNSGKPFYAILHRIDVGIVIDLEPARTEDPALSIAGAVQSQKLAVRAISQLQSLPGGDIKLLCDTVVDSVRELTGYDRVMVYKFHEDEHGEVVAENKRVDLEPYIGLHYPSTDIPQASRFLFKQNRVRMIVDCHAIPVSVIQDEGLMQPLCLVGSTLRAPHGCHAQYMENMGSIASLAMAVIIYGNDEEAIGGRNSMRLWGLVVCHHTSARCIPFPLRYACEFLMQAFGLQLNMELQLASQLLEKHVLRTQTLLCDMLLRDSPTGIVTQSPSIMDLVKCDGAALYYQGQYYPLGVTPTEAQIKDIVEWLLTLHGDPTGLSTDSLADAGYPGAAFLGDAVCGMAVAYIAERDFLFWFRSHTAKEVKWGGAKHHPEDKDDGQRMHPRSSFKAFLEVVKSRSLPWENAEMDAIHSLQLILRDSFRDAEATNSKAVVHNQLKDMELQGMDELSSVAREMVRLIETATAPIFAVDVDGRINGWNAKVAELTGLSVEEAMGKSLVHDLVYKEYEEIVDKLIHRAVKGEEDKNVEIKLRTFCSEHQKKAVFVVVNACSSKDYMDNIVGVCFVGQDVTGQKVVMDKYVLIQGDYKAIVHSPNPSIPPIFASDENTCCLEWNTAMEKLTGWSRGEVVGKMLVGEVFGSCCRLKGPDALTKFMIALHNAIGGIDTDKLPFSFFDRNEKNVQTLLTANKRVNMKGDIIGAFCFLQIASPELQPSLKVQKQQEKKSFARMKELAYICQEIKNPLSGIHFTNSLLENTDLTEDQQQFLETSAACEKQILKIIRDIDLESIENGSLELEKAEFLLGSVINAVVSQAMLLLRERNLQLLRDIPEEIKTLAVYGDQARIQQVLADFLLNMVRYAPSSAGWVEIHVCPTLKQISDGHTLVHTEFRYLERVLQTRMLGLQHPLRSFLNCKLTLVMLHREGMVPKIQFQGLSVCQGRLIWLSFPENTTVALYPLTIWFLLLHRHQSRSITHT

SEQ ID NO: 7055 - protein, 68 aa, Zea mays
PRVRFLGRFKSIPSIVELDSLKVSGDVWFGSGIVLKGKVTITAKPGVKLEIPDGAVIGNKDISGPEDL

SEQ ID NO: 7056 - protein, 1130 aa, Solanum tuberosum
MASGSRTKHSHHSSSQAQSSGTSNVNYKDSISKAIAQYTADARLHAVFEQSGESGKFFDYSQSVKTTTQSVPERQITAYLTKIQRGGHIQPFGCMIAVDEASFRVIAYSENACEMLSLTPQSVPSLEKCEILTIGTDVRTLFTPSSSVLLERAFGAREITLLNPIWIHSKNSGKPFYAILHRVDVGIVIDLEPARTEDPALSIAGAVQSQKLAVRAISHLQSLPGGDIKLLCDTVVESVRELTGYDRVMVYKFHEDEHGEVVAESKRSDLEPYIGLHYPATDIPQASRFLFKQNRVRMIVDCHATPVRVTQDESLMQPLCLVGSTLRAPHGCHAQYMANMGSIASLTLAVIINGNDEEAVGGGRNSMRLWGLVVGHHTSVRSIPFPLRYACEFLMQAFGLQLNMELQLASQLSEKHVLRTQTLLCDMLLRDSPPGIVTQSPSIMDLVKCDGAALYYQGKYYPLGVTPTEAQIKDIVEWLLAYHGDSTGLSTDSLPDAGYPGAASLGDAVCGMAVAYITSKDFLFWFRSHTAKEIKWGGAKHHPEDKDDGQRMHPRSSFKAFLEVVKSRSSPWENAEMDAIHSLQLILRDSFKDAEASNSKAIVHAHLGEMELQGIDELSSVAREMVRLIETATAPIFAVDVEGRINGWNAKVAELTGVSVEEAMGKSLVHDLVYKESQETAEKLLYNALRGEEDKNVEIKLRTFGAEQLEKAVFVVVNACASKDYTNNIVGVCFVGQDVTGEKVVMDKFINIQGDYKAIVHSPNPLIPPIFASDENTCCSEWNTAMEKLTGWSRGEIVGKMLVGEIFGSCCRLKGPDAMTKFMIVLHNAIGGQDTDKFPFSFFDRNGKYVQALLTANKRVNMEGDTIGAFCFIQIASPELQQALRVQRQQEKKCYSQMKELAYICQEIKSPLNGIRFTNSLLEATNLTENQKQYLETSAACERQMSKIIRDIDLENIEDGSLTLEKEDFFLGSVIDAVVSQVMLLLREKGVQLIRDIPEEIKTLTVHGDQVRIQQVLADFLLNMVRYAPSPDGWVEIQLRPSMMPISDGVTVVHIELRIICPGEGLPPELVQDMFHSSRWVTQEGLGLSMCRKMLKLMNGEIQYIRESERCYFLIILDLPMTRKGPKSVG

SEQ ID NO: 7057 - protein, 362 aa, Sorghum bicolor; identical to SEQ ID NO: 3174

SEQ ID NO: 7058 - protein, 369 aa, Methanosarcina mazei Go1
MEGEKGSKTRKGDALAREKLLEIAEKIYNQFEEEVVPSVSLPSRTKANLEYSDESDVWVYGDRESERSAKTVKGAFQLLKTTYATDFLINEHLARNRGSTLRELYYISEGWDYAKFKEQGESDRLIEDLEILTSLQREYFHMRPEEDGATMFGPIEITEQTKRGERNIHCQKDVGEGGYQIPFNVENIEFQKHDASMIIAIETGGMYARLMENGFDEAYNAILVHLKGQPARSTRRIIKRMNEELGIPVAVFTDGDPWSYRIYASVAYGAIKSAHLSEFMATPAAKFLGLQPSDIVEYELSTDKLTEQDVSALRSELSDPRFESDYWKEQIQLQLDIGKKAEQQAFAGKGLDFVTEVYLPNRLKEMGMI

SEQ ID NO: 7059 - protein, 385 aa, Bordetella pertussis Tohama I
MAKRDYYEVLGVAKNASDEDLKKAYRKLAMKYHPDRNPDSKEAEEKFKEAKEAYEVLGDEQKRAAYDRYGHAGVDPNAAGMGGGMGGGMGGGMGGGMGGGFADAFGDIFGEIFGAGRRGGGGPQVYRGADLKYALEITLEQAASGFDTEIRVPSWENCDTCHGSGAKAGTSPKTCRTCGGSGAVRMQQGFFSVQQTCPTCHGTGKEITDPCPSCDGVGRTRRNKTLQVKIPAGIDDGMRIRSSGNGEPGINGGPPGDLYVEIHIKQHKIFQRDGDDLHCELTIPFTTAALGGELQVPTLGGKAEISIPEGTQSGKTFRLRAKGIRGVRGSYPGDLYCHVVVETPVRLSDEQKAILRQFEASLNDGGDRHSPQSKSWTDRVKEFFS

SEQ ID NO: 7060 - protein, 293 aa, Lupinus albus
MASLKQVSLILFPLLLLISSSFKLSNAAGIVIYWGQNGNEGSLADACNTNNYQYVNIAFLSTFGNGQTPELNLAGHSRDGLNADIKGCQGKGIKVLLSLGGGAGSYSLNSADDATNLANYLWNNFLGGTSDSRPFGDAVLDGIDFDIEAGGAQHYDELARALNGFSSQKKVYLGAAPQCPIPDAHLDAAINTGLFDYVWVQFYNNPQCQYACGNTNNLINSWNQWTSSQAKQVFLGLPASEAAAPSGGFIPTDVLISQVLPTIKTSPKYGGVMLWNGFNDIQTGYSDAIKASV

SEQ ID NO: 7061 - protein, 194 aa, Brassica napus
MEILDLLDHPFLPALYASFQTKTHICLITDYYPGGELFMLLDRQPRKVLKEDAVKFYAAQVVVALEYLHCQGIIYRDLKPENVLIQGNGDISLTDFDLSCLTSCRPQLLIPSIDEKKKKKQQKSQQSPVFMAEPMRASNSFVGTEEYIAPEIITGAGHTCAVDWWALGILMYEMLYGYTPFRGKTRQKTFANVL

SEQ ID NO: 7062 - protein, 290 aa, Agrobacterium tumefaciens
EFPTLEQLPLWGFDGSSTQQAEGHSSDCVLKPVAIYPDPARTNGVLVMCEVMMPDGVTPHASNSRATILDDEDAWFGFEQEYFFYQDGRPLGFPEQGYPAPQGPYYTGVGFKNVGSVAREIVEEHLDFCLEAGINHEGINAEVAKGQWVFQVFGKGSKRAADQIWIARYLLVRLCEQYGIDVEFHCKPLGDTDWNGSGMHCNFSTKFLREVGGKEYFEALMAAFAKNWKEHIDVYGPDNHLRLTGKHETAPWNKFSYGVADRGASIRVPHSFVNNGYRGYLEDRRPNSQG

SEQ ID NO: 7063 - protein, 377 aa, Pereskia aculeata
  misc_feature (7)..(7): Xaa can be any naturally occurring amino acid
  misc_feature (118)..(118): Xaa can be any naturally occurring amino acid
  misc_feature (120)..(124): Xaa can be any naturally occurring amino acid
  misc_feature (151)..(151): Xaa can be any naturally occurring amino acid
  misc_feature (174)..(174): Xaa can be any naturally occurring amino acid
  misc_feature (204)..(204): Xaa can be any naturally occurring amino acid
TDVPAAXAGAFKSYKLAAKAISRLQSLPSHNLPLLCDVFVKEVSELTGYDRVMVYKFHEDEHGEVISEYRRPDLEPYLGLHYPATDIPQASRFLFLKNRVRMICDCSATPVEVIQDKXLXXXXXSWGSILRAPHGSHAHYMANMGSIAFSXMAVTINEDEDEVKSDPSTGKRLXGLVVCHHTSSRLIPFPLRYACELLVQVFGXQINKEVELAAQIRESHILRIQTVLCDMLLRDSPVAIVTQSPNVMDLVKCDGAALYYKGQVWLLGISPTEDQIKNITQWLLEYHGSTKGLSTDSLMEAGYPGASELGDAVCGMAAVRIRSKDVLFWFRSHTAKEIKWGGAKHDPVDNDDGRKMHPRSSFKAFLEVVKWRSQPWE

SEQ ID NO: 7064 - protein, 456 aa, Arabidopsis thaliana
MESQSQRGQHETPKRSRFTGMFHKLKTNLVFRSKLAEINGAMGDLGTYIPIVLALTLAKDLDLGTTLIFTGIYNAITGAVYGVPMPVQPMKSIAAVAISSTAEDFGIPEIMAAGICTGGILFVLGISGLMQLVFNIIPLSVVRGIQLSQGLAFAMSAVKYIRKEQNFSKSKSVGDRPWLGLDGLVLALVCVLFIVLVNGDGEEEEEEEEGDGSRGRGRWGSVRKVIANVPSALLIFLLGVVLAFIRKPSIVHDIKFGPSKMKIVRISRKAWRNGFLKGTVPQLPLSVLNSVVAVCKLSYDLFPEKEFSAASVSMTVGLMNMVGCWFGAMPTCHGAGGLAGQYKFGGRSGGCVALLGVAKLVLGLVLGGSLVGILEKFPVGVLGALLLFAGVELAMAARDMNTKGDAFVMLMCTSVSLGSNAAIGFVAGDLLYVVLWMRNYGRAKPSSLPPQSGEHA

SEQ ID NO: 7065 - protein, 105 aa, Zea mays
  misc_feature (27)..(27): Xaa can be any naturally occurring amino acid
  misc_feature (65)..(65): Xaa can be any naturally occurring amino acid
  misc_feature (75)..(75): Xaa can be any naturally occurring amino acid
  misc_feature (89)..(89): Xaa can be any naturally occurring amino acid
LPLFPSDLYTLFDGFDILNSFRANPPXPGIELGPEFKKVDKYLARIKYIPSIGELDTLNGSCDGXAGSGMTLKGXVTISAKPSTKLLIXEGNVLENKDVNGPEDL

SEQ ID NO: 7066 - protein, 328 aa, Leifsonia xyli subsp. xyli str. CTCB07
MASQDWFDKDFYKVLGVSKDVSDAELKKTYRKLARKYHPDSNPGDSAAEAKFKEISEAYSVLSDAEERKEYDQVRAMGSGARFTAPGSGAPGGGFDDVFGGMFGGGQQRGQYYAGGGNFDDVLGGLFGNGRFGTTTGGYRGYGGPARGRDITAHTAIDFLTATKGETISLQAADGKPFKVKIPAGVADGQKIKLRGKGEPSPDGGEAGDIVLTVSVRKHPVFERDGLNLRVTVPVTFAEAALGATIEVPTLGGDPVKLRVAPGTPSGRVLRVRGRGVQTAKGTGDLLAVVQIAVPSHLSGEAKEALEAFAEKLLDENPREDLLAKARS

SEQ ID NO: 7067 - protein, 377 aa, Calymmanthium substerile
TDVPAAAAGAFKSYKLAAKAISRLQSLPSHNMALLCDVLVKEVSELTGYDRVMVYKFHEDEHGEVISEYRRPDMEPYLGLHYPATDIPQASRFLLLKNRVRMVCDCLATPVKVIQGKKWAQPLSLGGSILRAPHGCHALYMANMGSIASLVMAVTINEDEDEVKSDPSTGKRLWGLVVCHHTSSRFIPFPLRYACELLVQVFGIQINKEVELAAQIRESHILRIQTVLCDMLLRDSPVAIVTQSPNVMDLVKCDGAALYYKGQVWLLGITPTEEQIKNITQWLLKYHGSTKGLSTDSLMEAGYPGASELGDAVCGMAAVRISSKDVLFWFRSHTAKEMKWGGAKHDPVDSDDGRKMRPRSSFKAFLEVVKWRSQPWE

SEQ ID NO: 7068 - protein, 182 aa, Zea mays
  misc_feature (173)..(173): Xaa can be any naturally occurring amino acid
MSSSGKMEGPSAPVVRRDPYEVLSVPRDSSDQEIKSAYRKLALKYHPDKNASNPEASELFKEVAYSYSILSDPEKRRQYDTAGFEELENEGMDMEIDLSNLGTVNTMFAALFSKLGVPIKTTISPTVLEEAMNGTVTVRPLPVGTSATGKVDKQCAHFFGVTISEEQAHSGMXVRVTSPAQS

SEQ ID NO: 7069 - protein, 63 aa, Protea piscina
  misc_feature (40)..(46): Xaa can be any naturally occurring amino acid
MPGQWEYQVGPSVGIEAGDHIWCSRYLLERITEQAGVVLXXXXXXXEGDWNGAGCHTNYSTKS

SEQ ID NO: 7070 - protein, 389 aa, Sulfolobus solfataricus P2
MSSEFISKVDKEARRKAASILRDKFLNLVEQLKKGEPLVMEIPMRTLSNAIYDEKRKLLLLGEKKLKRNFLDMNEAKRFMQTVLMASIIYDALVSDEYPTIRDLYYRGKHSLLLKSIDGNKIVSEENTWDEQKESDSVIVDIEVFTSLLREEMLILSKEKGKVVGNLRIRSGNDTIDLSKTGHGAYAIEPTPDLIDFIDVDAEFVLVVEKDAVFQQLHRAGFWKQYKSILITSAGQPDRATRRFVRRLNEELKLPVYILTDADPYGWYIFSVFRIGSISLSYESERLATPDAKFLGVSMSDIFGNSRKKPYLSEAERKNYIIKAKEADIKRAEEIKNYEWFKTKAWEEEINTFLHRKAKLEIEAMASKGLKFLAFQYIPEKITNKDYIA

SEQ ID NO: 7071 - protein, 246 aa, Oryza sativa Indica Group
MSTTHALSPSRLPQLDAAGCTAVTVAAAAAMCCAPPLMIPPSLPPLDANANANAVVGSWQWVLWRGSRDSYSDMLEGGNFSNQETLYEVLSVRKDATYDEIRAAYKSAVLNTHPDKAQMALNPLVSSSERNEFLSVQKAWEILRYPKSRAEYDKQLQSSRQNLEIVATEIEIDDMIVESTADSVELLYPCRCGDYFSITSRELGQIGISVREDGEMELHTSYSVPASVVLGCGSCSLKARLVTNKT

SEQ ID NO: 7072 - protein, 377 aa, Talinum paniculatum
TDVPAAAAGAFKSYKLAAKAISRLQSLPSRNMLILCDVLVKEVSELTGYDRVMVYKFHEDEHGEVISEYRKPDLEPYLGLHYPATDIPQASRFLFLKNRVRMICDCLASTVKVIQDQKLTQPLSLGGSILRAPHGCHAQYMANMGSIASLVMAVMINEDEDEVKSDPSSGKRLWGLVVCHHTGSRFIPFPLRYACELLVQVFGIQINKEVELAAQIRESHILRIQTVLCDMLMRDSPIAIVTQSPNVMDLVKCDGAALYYKGQVWLLGITPTEEQIKDITQWLLEYHGSTKGLSTDSLMEAGYPGASELGDAVCGMAAVRISSKDFLFWFRSHTAKEIKWGGAKHDPIDNDDRRKMHPRSSFKAFLEVVKWRSQPWE

SEQ ID NO: 7073 - protein, 1128 aa, Oryza sativa Indica Group
MSSSRPTQCSSSSSRTRQSSRARILAQTTLDAELNAEYEEYGDSFDYSKLVEAQRTTGPEQQARSEKVIAYLHHIQRAKLIQPFGCLLALDEKTFNVIALSENAPEMLTTVSHAVPSVDDPPKLRIGTNVRSLFTDPGTTALQKALGFADVSLLNPILVQCKTSGKPFYAIVHRATGCLVVDFEPVKPTEFPATAAGALQSYKLAAKAISKIQSLPGGSMEVLCNTVVKELFDLTGYDRVMAYKFHEDDHGEVFAEITKPGLEPYLGLHYPATDIPQAARFLFMKNKVRMICDCRARSIKIIEDESLHLDISLCGSTLRAPHSCHLQYMENMNSIASLVMAVVVNENEDDDEVGADQPAQQQKRKKLWGLLVCHHESPRYVPFPLRYACEFLAQVFAVHVNKEFELERQVREKSILRMQTMLSDMLLRESSPLSIVSGTPNIMDLVKCDGAALLYGGKVWRLQNAPTESQIRDIAFWLSDVHRDSTGLSTDSLHDAGYPGAAALGDMICGMAVAKINSKDILFWFRSHTAAEIRWGGAKHDPSDKDDSRRMHPRLSFKAFLEVVKMKSLPWNDYEMDAIHSLQLILRGTLNDDIKPTRAASLDNQVGDLKLDGLAELQAVTSEMVRLMETATVPILAVDSNGLVNGWNQKVAELTGLRVDEAIGRHILTVVEESSVPVVQRMLYLALQGKEEKEVKFEVKTHGSKRDDGPVILVVNACASRDLHDHVVGVCFVAQDMTVHKLVMDKFTRVEGDYKAIIHNPSPLIPPIFGADEFGWCSEWNAAMTKLTGWHRDEVINKMLLGEVFDSTNASCLVKNKDAFVSLCILINSALAGDETEKAPFSFFDRNGKYIECLLSVNRKVNADGVITGVFCFIQVPSHELQHALHVQQASQQNALTKLKAYSYMRHAINNPLSGMLYSRKALKNTGLNEEQMKEVNVADSCHRQLNKILSDLDQDSVMNKSSCLDLEMVEFVLQDVFVAAVSQVLITCQGKGIRVSCNLPERYMKQTVYGDGVRLQQILSDFLFVSVKFSPVGGSVEISCSLTKNSIGENLHLIDLELRIKHQGKGVPADLLSQMYEDDNKEQSDEGMSLAVSRNLLRLMNGDVRHMREAGMSTFILSVELASAPAK

SEQ ID NO: 7074 - protein, 336 aa, Zea mays
MGADYYKVLGVDRGASDDDLKKAYRKLAMRWHPDKNSTNKKEAETKFKEISVAYEVLSDPKKRAIYDQLGEEGLKGQPPPGAGGPGTSPFFPGGAHSTAHHFNPRSADDIFKEFFGSPGMGGMRTEPGFQRSMFGNDIFSSRFRAEGSTSMQQPLRKAAAIENPLPVGLADLYKGVTKKMKISRETIDASGRISNTEDILTIQVKAGWKKGTRITFPDKGNEAPNMKPADIVFIIDEKPHDVFTREGNDLVVTEKISLVEALTGYTARVTTLDGRSLSLHINSIIHPKYEEVMPGEGMPVPKDPTKKGNLRIKFNIMFPSRLTSDQKAGIKRLLGS

SEQ ID NO: 7075 - protein, 103 aa, Brassica napus
MGLDYYNILKVNRNATEDDLKKSYRRLAMKWHPDKNPNTKLEAEAKFKQISEAYDLLSDPQKRAIYDQYGEEGLTDMPPPGSTGNNGRANGFNPRNAEDIFAE

SEQ ID NO: 7076 - protein, 427 aa, Triticum aestivum
MAQAVVPAMQCQVGVRGRSAVPARQPAGRVWGVRRTARATSGFEVLALGPETTGVIQRMQQLLDMDTTPFTDKIIAEYIWVGGSGIDLRSKSRTISKPVEDPSELPKWNYDGSSTGQPPGEDSEVILYPQAIFKDPFRGGNNILVICDTYTPQGEPVPTNKRHMAAQIFSDPKVTAQVPWFGIEQEYTLMQRDVNWPLGWPVGGYPGPQGPYYCAVGSDKSFGRDISDAHYKACLYAGIEISGTNGEVMPGQWEYQVGPSVGIDAGDHIWASGYILERITEQAGVVLTLDPKPIQGDWNGAGCHTNYSTLSMREDGGFDVIKKAILNLSLRHDLHIAAYGEGNERRLTGLHETASISDFSWCVANRGCSIRVGRETEAKGKGYLEDRRPPSNMDPYTVTALLAETTILWEPTLEAEALAAKKLALKV

SEQ ID NO: 7077 - protein, 1146 aa, Populus tremula
MASQSQRQSNQPAHNQAQSSGTSNMRQHHHPTESVSKAIAQYTVDAQLHAVFEQSGGTGKSFDYSKSVRTPNQSVPEEQITAYLSKIQRGGHIQPFGCMIAADEQSFRVIAYSENAKDMLGLTPQSVPSLEKQEILFVGADVRILFRPSSAVLLEKAFGAREITLLNPIWIHSKNSGKPFYAILHRIDVGIVIDLEPARTEDPALSIAGAVQSQKLAVRAISQLQSLPGGDIKLLCDTVVDSVRELTGYDRVMVYKFHEDEHGEVVAENKRVDLEPYIGLHYPSTDIPQASRFLFKQNRVRMIVDCHAIPVSVIQDEGLMQPLCLVGSTLRAPHGCHAQYMENMGSIASLAMAVIIYGNDEEAIGGRNSMRLWGLVVCHHTSARCIPFPLRYACEFLMQAFGLQLNMELQLASQLLEKHVLRTQTLLCDMLLRDSHTGIVTQSPSIMDLVKCDGAALYYQGQYYPLGVTPTEAQIKDIVEWLLTLHGDPTGLSTDSLADAGYPGAAFLGDAVCGMAVAYIAERDFLFWFRSHTAKEVKWGGAKHHPEDKDDGQRMHPRSSFKAFLEVVKSRSLPWENAEMDAIHSLQLILRDSFRDAEATNSKAVVHNQLKDMELQGMDELSSVAREMVRLIETATAPIFAVDVEGRINGWNAKVAELTGLSVEEAMGKSLVHDLVYKEYEEIVDKLIHRAVKGEEDKNVEIKLRTFCSEHQKKAVFVVVNACSSKDYMDNIVGVCFVGQDVTGQKVVMDKYVLIQGDYKAIVHSPNPSIPPIFASDENTCCLEWNTALEKLTGWSRGEVVGKMLVGEVFGSCCRLKGPDALTKFMIALHNAIGGIDTDKLPFSFFDRNEKNVQTLLTANKRVNMKGDIIGAFCFLQIASPELQPSLKVQKQQEKKSFARMKELAYICQEIKNPLSGIHFTNSLLENTDLTEDQQQFLETSAACEKQILKIIRDIDLESIENGSLELEKAEFLLGSVINAVVSQAMLLLRERNLQLLRDIPEEIKTLAVYGDQARIQQVLADFLLNMVRYAPSSAGWVEIHVCPTLKQISDGHTLVHTEFRYLERVLQTRMLGLQHPPRSFLNCKLTLVKLHREGMVPKIQFQGLSVCQGRLIWLRFPENTTVALYPLTIWFLLLHRHQSRSITHT

SEQ ID NO: 7078 - protein, 302 aa, Arabidopsis thaliana
MDGGYDQSGGASRYFHNLFRPELHHQLQPQPQLHPLPQPQPQPQPQQQNSDDESDSNKDPGSDPVTSGSTGKRPRGRPPGSKNKPKPPVIVTRDSPNVLRSHVLEVSSGADIVESVTTYARRRGRGVSILSGNGTVANVSLRQPATTAAHGANGGTGGVVALHGRFEILSLTGTVLPPPAPPGSGGLSIFLSGVQGQVIGGNVVAPLVASGPVILMAASFSNATFERLPLEDEGGEGGEGGEVGEGGGGEGGPPPATSSSPPSGAGQGQLRGNMSGYDQFAGDPHLLGWGAAAAAAPPRPAF

SEQ ID NO: 7079 - protein, 54 aa, Glycine max
IRLEDSLMVRGDVWFGANITLKGQVTIAAKPGLKLEIPDGVTIENKEINDPADI

SEQ ID NO: 7080 - protein, 1146 aa, Populus tremula
MASQSQRQSNQPAHNQAQSSGTSNMRQHHHPTESVSKAIAQYTVDAQLHAVFEQSGGTGKSFDYSKSVRTPNQSVPEEQITAYLSKIQRGGHIQPFGCMIAADEQSFRVIAYSENAKDMLGLTPQSVPSLEKQEILFVGADVRILFRPSSAVLLEKAFGAREITLLNPIWIHSKNSGKPFYAILHRIDVGIVIDLEPARTEDPALSIAGAVQSQKLAVRAISQLQSLPGGDIKLLCDTVVDSVRELTGYDRVMVYKFHEDEHGEVVAENKRVDLEPYIGLHYPSTDIPQASRFLFKQNRVRMIVDCHAIPVSVIQDEGLMQPLCLVGSTLRAPHGCHAQYMENMGSIASLAMAVIIYGNDEEAIGGRNSMRLWGLVVCHHTSARCIPFPLRYACEFLMQAFGLQLNMELQLASQLLEKHVLRTQTLLCDMLLRDSPTGIVTQSPSIMDLVKCDGAALYYQGQYYPLGVTPTEAQIKDIVEWLLTLHGDPTGLSTDSLADAGYPGAAFLGDAVCGMAVAYIAERDFLFWFRSHTAKEVKWGGAKHHPEDKDDGQRMHPRSSFKAFLEVVKSRSLPWENAEMDAIHSLQLILRDSFRDAEATNSKAVVHNQLKDMELQGMDELSSVAREMVRLIETATAPIFAVDVEGRINGWNAKVAELTGLSVEEAMGKSLVHDLVYKEYEEIVDKLIHRAVKGEEDKNVEIKLRTFCSEHQKKAVFVVVNACSSKDYMDNIVGVCFVGQDVTGQKVVMDKYVLIQGDYKAIVHSPNPSIPPIFASDENTCCLEWNTALEKLTGWSRGEVVGKMLVGEVFGSCCRLKGPDALTKFMIALHNAIGGIDTDKLTFSFFDRNEKNVQTLLTANKRVNIKGDIIGAFCFLQIASPELQPSLKVQKQQEKKSFARMKELAYICQEIKNPLSGIHFTNSLLENTDLTEDQQQFLETSAACEKQILKIIRDIDLESIENGSLELEKAEFLLGSVINAVVSQAMLLLRERNLQLLRDIPEEIKTLAVYGDQARIQQVLADFLLNMVRYAPSSAGWVEIHVCPTLKQISDGHTLVHTEFRYLERVLQTRMLGLQHPPRSFLNCKLTLVMLHREGMVPKIQFQGLSVCQGRLIWLSFPENTTVALYPLTIWFLLLHRHQSRSITHT

SEQ ID NO: 7081 - protein, 1075 aa, Acacia mangium
MESEGEAGAKPKTALGAQVCQICGDSVGKTVDGEPFIACDVCAFPVCRPCYEYERKDGNQSCPQCKTRYKRHKGSPAILGDGEEDGVADDGTSDLNYDSENQNQKQKISERMLSWHMTYGRTEEIGAPNYDKEVSHNQIPLLTNGQEVSGELSAASPERLSMASPGGPGGKRVHSLPYSSDINQSPNIRAVDPGLGNVAWKERVDGWKMKQEKNVVPMSTGQAASERGAGDIDASTDVLVDDSLLNDEARQPLSRKVSIPSSRINPYRMVIILRLIILCFFLHYRITNPVRNAYPLWLVSVICEIWFALSWILDQFPKWLPVNRETYLDRLALRYDREGEPSQLAAVDIFVSTVDPLKEPPLVTANTALSILAVDYPVDKVSCYVSDDGAAMLTFEALSETAEFARKWVPFCKKYNIEPRAPEWYFTQKIDYLKDKVQTSFVKDRRAMKREYEEFKVRVNALVAKAQKIPEEGWVMQDGTPWPGNNTRDHPGMIQVFLGQSGGLDAEGNELPRLVYVSREKRPGFQHHKKAGAMNALVRVSAVLTNGPFLLNLDCDHYINNSKALREAMCFMMDPNLGKHVCYVQFPQRFDGIDRNDRYANRNTVFFDINLRGLDGIQGPVYVGTGCVFNRTALYGYEPPLKPKHKKPGLLSSLCGGSRKKSSKSSKKGSDKKKSSKHVDPTIPIYNLEDIEEGVEGAGFDDEKSLLMSQMSLEKRFGQSAVFVASALMENGGVPQSATPDTLLKEAIHVISCGYEDKSDWGSEIGWIYGSVTEDILTGFKMHARGWRSIYCMPKRPAFKGSAPINLSDRLNQVLRWALGSVEILFSRHCPIWYGYSGRLKWLERFAYVNTTIYPITAIPLVMYCTLPAVCLLTNRFIIPQISNIASIWFISLFISIFATGILEMRWSGVGIDEWWRNEQFWVIGGVSAHLFAVVQGLLKVLAGIDTNFTVTSKASDEDGDFAELYMFKWTTLLIPPTTLLIINMVGVVAGISYAINSGYQSWGPLFGKLFFAFWVIIHLYPFLRGLMGRQNRTPTIVVVWSILLASIFSLLWVRADPFITRVRGPDTEQCGINC

SEQ ID NO: 7082 - protein, 155 aa, Physcomitrella patens subsp. patens
SRKPRGRPPGSKNKPKPPVIITRENGNAMRPHVLEVASGHDVWESVTDFARRRQRGVCVMGGSGTVTNVTLRQPTTPGATVTIHGRFEIISLSGSYLPPPAPSPPTGLTISFAGASGQVLGGCVAGALTAASPVLVIATSFTGATYDRLPLADDE

SEQ ID NO: 7083 - protein, 1146 aa, Populus tremula
MASQSQRQSNQPAHNQAQSSGTSNMRQHHHPTESVSKAIAQYTVDAQLHAVFEQSGGTGKSFDYSKSVRTPNQSVPEEQITAYLSKIQRGGHIQPFGCMIAADEHSFRVIAYSENAKDMLGLTPQSVPSLEKQEILFVGADVRILFRPSSAVLLEKAFGAREITLLNPIWIHSKNSGKPFYAILHRIDVGIVIDLEPARTEDPALSIAGAVQSQKLAVRAISQLQSLPGGDIKLLCDTVVDSVRELTGYDRVMVYKFHEDEHGEVVAENKRVDLEPYIGLHYPSTDIPQASRFLFKQNRVRMIVDCHAIPVSVIQDEGLMQPLCLVGSTLRAPHGCHAHYMENMGSIASLAMAVIIYGNDEEAIGGRNSMRLWGLVVCHHTSTRCIPFPLRYACEFLMQAFGLQLNMELQLASQLLEKHVLRTQTLLCDMLLRDSPTGIVTQSPSIMDLVKCDGAALYYQGQYYPLGVTPTEAQIKDIVEWLLTLHGDPTGLSTDSLADAGYPGAAFLGDAVCGMAVAYIAERDFLFWFRSHTAKEVKWGGAKHHPEDKDDGQRMHPRSSFKAFLEVVKSRSLPWENAEMDAIHSLQLILRDSFRDAEATNSKAVVHNQLKDMELQGMDELSSVAREMVRLIETATAPIFAVDVEGRINGWNAKVAELTGLSVEEAMGKSLVHDLVYKEYEEIVDKLIHRAVKGEEDKNVEIKLRTFCSEHQKKAVFVVVNACSSKDYMDNIVGVCFVGQDVTGQKVVMDKYVLIQGDYKAIVHSPNPSIPPIFASDENTCCLEWNTALEKLTGWSRGEVVGKMLVGEVFGSCCRLKGPDALTKFMIALHNAIGGIDTDKLPFSFFERNEKNVQTLLTANKRVNIKGDIIGPFCFFQIASPEFQPSLKVQKQQEKKSFARMKELAYICQEIKNPLSGIHFTNSLLENTDLTEDQQQFLETSAACEKQILKIIRDIDLESIENGSLELEKAEFLLGSVINAVVSQAMLLLRERNLQLLRDIPEEIKTLAVYGDQARIQQVLADFLLNMVRYAPSSAGWVEIHVCPTLKQISDGHTLVHTEFRYLERVLQTRMLGLQHPPRSFLNCKLTLVMLHREGMVPKIQFQGLSVCQGRLIWLSFPENTTVALYPLTIWFLLLHRHQSRSITHT

SEQ ID NO: 7084 - protein, 197 aa, Oryza sativa Japonica Group
MQQGRGRRRMMQGSSYYAVLGVHPGASAAEIRAAYHRLAMKWHPDKITSGRVDAEEAKSRFQQVHEAYQVLSDEKRRALYDSGMYDPLDDDQEEDVEGFHDFLQEMVSLMATVGREEPVYCLDELRSMLDGMMQDFASSELPSPSGGFFAGAPSSPFADTGAAQQQRGVGSASARAHAHPQVVGNSACLSRMAFSSY

SEQ ID NO: 7085 - protein, 1146 aa, Populus tremula
MASQSQRQSNQPAHNQAQSSGTSNMRQHHHPTESVSKAIAQYTVDAQLHAVFEQSGGTGKSFDYSKSVRTPNQSVPEEQITAYLSKIQRGGHIQPFGCMIAADEQSFRVIAYSENAKDMLGLTPQSVPSLEKQEILFVGADVRILFRPSSAVLLEKAFGAREITLLNPIWIHSKNSGKPFYAILHRIDVGIVIDLEPARTEDPALSITGAVQSQKLAVRAISQLQSLPGGDIKLLCDTVVDSVRGLTGYDRVMVYKFHEDEHGEVVAENKRVDLEPYIGLHYPSTDIPQASRFLFKQNRVRMIVDCHAIPVSVIQDEGLMQPLCLVGSTLRAPHGCHAQYMENMGSIASLAMAVIIYGNDEEAIGGRNSMRLWGLVVCHHTSARCIPFPLRYACEFLMQAFGLQLNMELQLASQLLEKHVLRTQTLLCDMLLRDSHTGIVTQSPSIMDLVKCDGAALYYQGQYYPLGVTPTEAQIKDIVEWLLTLHGDPTGLSTDSLADAGYPGAAFLGDAVCGMAVAYIAERDFLFWFRSHTAKEVKWGGAKHHPEDKDDGQRMHPRSSFKAFLEVVKSRSLPWENAEMDAIHSLQLILRDSFRDAEATNSKAVVHNQLKDMELQGMDELSSVAREMVRLIETATAPIFAVDVEGRINGWNAKVAELTGLSVEEAMGKSLVHDLVYKEYEEIVDKLIHRAVKGEEDKNVEIKLRTFCSEHQKKAVFVVVNACSSKDYMDNIVGVCFVGQDVTGQKVVMDKYVLIQGDYKAIVHSPNPSIPPIFASDENTCCLEWNTALEKLTGWSRGEVVGKMLVGEVFGSCCKLKGPDALTKFMIALHNAIGGIDTDKLPFSFFDRNEKNVQTLLTANKRVNIKGDIIGAFCFLQIASPELQPSLKVQKQQEKKSFARMKELAYICQEIKNPLSGIHFTNSLLENTDLTEDQQQFLETSAACEKQILKIIRDIDLESIENGSLELEKAEFLLGSVINAVVSQAMLLLRERNLQLLRDIPEEIKTLAVYGDQARIQQVLADFLLNMVIYTQSSAGWVEIHVCPTLKQISDGHTLVHTEFRYLERVLQTRMLGLQHPPRSFLNCKLTLVKLHREGMVPKIQFQGLSVCQGRLIWLSFPENTTVALYPLTIWFLLLHRHQSRSITHT

SEQ ID NO: 7086 - protein, 352 aa, Coccidioides posadasii
MYCLRTALLPVIGLFNAAYARLDTDSASNLAVYWGQNSYNQGSGNLTQQPLGYYCENTNIDVFQLAFVTVINGIGGAPQVNFANQGDNCTTFPGTDLLNCPQIGADITKCQGKGKTIILSIGGATYSEGGFGTEEEAIAGANLIWETFGPQTNSSRPRPFGDATVDGFDLDFEATVRNMVPFASRLRSLMAADASKKYFLTVAPQCPYPDLYNKEMLEGKVDFDAVFVQFYNNFCGLNTFEPGQEEQKSFNLGEWSEWAKTVSKNKKVKVIVGAPANQRAAGSGYVDASKLAEIVKYSRKFSSFGGVMLWDASQAYANGNFIETVKGALNSGFAGCRFGWRRTQMPMAHPVV

SEQ ID NO: 7087 - protein, 470 aa, Vitis vinifera
  misc_feature (26)..(26): Xaa can be any naturally occurring amino acid
  misc_feature (262)..(262): Xaa can be any naturally occurring amino acid
  misc_feature (280)..(280): Xaa can be any naturally occurring amino acid
  misc_feature (298)..(298): Xaa can be any naturally occurring amino acid
MKHKLKLLNLLTSTLNYFATEPKSGXDRRQQWIHRGEKLHRLHLKSDGRETPHEDRIRAFFGRKRGNTQECANGADTMLPRSILCAFVVYVDDLFKDTKEGDYAIMDHYEALGIGRNASKGEIKEAFRKLALKYHPDKHAQSPKAVRDGATLRFKQVSEAYEVLSDDRKRSLYNLRSSTAPPGFSGGYAHSYHYNNERPRYSSRPNADAFVSKFEVVLRFLTTRAFLLNVAFAGYCFPSLSFGLCLLGFFGLRLSLGEKGRXFSKRLLYAFFEHCGRREXEERLEMSSLSVSEMVVLXQLENISTVPSKQAHLKMDRNMSWPQGWVSAAPRPWFMCALLGGMAIIDRSGETLWKMNNSGKSFDEAMESIGKAKAHKDDMYSFLGGPCSSESVSQSSIDINAWQGKLKMGDGTSLSAWEHFLVWVHKSINMIELLMVLVATHHACVGDLPLLGWSPLTAPVVFLVSVPNVE

SEQ ID NO: 7088 - protein, 1146 aa, Populus tremula
MASQSQRQSNQPAHNQAQSSGTSNMRQHHHPTESVSKAIAQYTVDAQLHAVFEQSGGTGKSFDYSKSVRTPNQSVPEEQITAYLSKIQRGGHIQPFGCMIAADEQSFRVIAYSENAKDMLGLTPQSVPSLEKQEILFVGADVRILFRPSSAVLLEKAFGAREITLLNPIWIHSKNSGKPFYAILHRIDVGIVIDLEPARTEDPALSIAGAVQSQKLAVRAISQLQSLPGGDIKLLCDTVVDSVRELTGYDRVMVYKFHEDEHGEVVAENKRVDLEPYIGLHYPSTDIPQASRFLFKQNRVRMIVDCHAIPVSVIQDEGLMQPLCLVGSTLRAPHGCHAQYMENMGSIASLAMAVIIYGNDEEAIGGRNSMRLWGLVVCHHTSTTCIPFPLRYACEFLMQAFGLQLNMELQLASQLLEKHVLRTQTLLCDMLLRDSHTGIVTQSPSIMDLVKCDGAALYYQGQYYPLGVTPTEAQIKDIVEWLLTLHGDPTGLSTDSLADAGYPGAAFLGDAVCGMAVAYIAERDFLFWFRSHTAKEVKWGGAKHHPEDKDDGQRMHPRSSFKAFLEVVKSRSLPWENAEMDAIHSLQLILRDSFRDAEATNSKAVVHNQLKDMELQGMDELSSVAREMVRLIETATAPIFAVDVDGRINGWNAKVAELTGLSVEEAMGKSLVHDLVYKEYEEIVDKLIHRAVKGEEDKNVEIKLRTFCSEHQKKAVFVVVNACSSKDYMDNIVGVCFVGQDVTGQKVVMDKYVLIQGDYKAIVHSPNPSIPPIFASDENTCCLEWNTAMEKLTGWSRGEVVGKMLVGEVFGSCCRLKGPDALTKFMIALHNAIGGIDTDKLPFSFFDRNEKNVQTLLTANKRVNIKGDIIGPFCFFQIASPEFQPSLKVQKQQEKKSFARMKELAYICQEIKNPLSGIHFTNSLLENTDLTEDQQQFLETSAACEKQILKIIRDIDLESIENGSLELEKAEFLLGSVINAVVSQAMLLLRERNLQLLRDIPEEIKTLAVYGDQARIQQVLADFLLNMVRYAPSSAGWVEIHVCPTLKQISDGHTLVHTEFRYLERVLQTRMLGLQHPPRSFLNCKLTLVMLHREGMVPKIQFQGLSVSQGRLIWLSFPENTTVALYPLTIWFLLLHRHQSRSITHT

SEQ ID NO: 7089 - protein, 187 aa, Triticum aestivum
MVDHRQLGVADADLYAVLGLKKECSDADLRLAYRRLAMTWHPDRCSASGSSARVQEAKERFQEIQSAYSDLSAAAAYLLLSDSGKRLLYDVGVYDSDDDRLDEQHVSGMGGFFGEMAEMMSQATPTDSFEELQQLFVDMFQADLVAGGFGGAPPMGRRVQAPASPSCTSGPSASCNGVNCSMGSCPS

SEQ ID NO: 7090 - protein, 349 aa, Oryza sativa Indica Group
MGVDYYKVLGVDRGAGDDDLKKAYHKLAMRWHPDKNPTNNKKEAEAKFKQISEAYEVLSDPQKRTIYDQVGEEGLKGQPPPGAGGPGASPFYPGGAHSNSFHFNPRSADDIFAEFFGFRGPFSSMGGMPSVSGGMRGDPRFPGFGNEYFSSRFGGEGSTSMHQPSHQLAKPPPIENRLPVSLADLYKGVTKKMKISREIIDFNGRVSQQEEILQIEVKPGWKRGTKITFEEKGNQAPNMKPADIVFIIEEKPHDIFIREGNDLVITEKISLVEALTGYTARIITLDARSLSVPINSVIHPDYVEVVPGEGMPNPKGPNKKGDLKIKFNIRFPSRLTSDQKAGFKRLLGS

SEQ ID NO: 7091 - protein, 95 aa, Arabidopsis thaliana
  misc_feature (40)..(42): Xaa can be any naturally occurring amino acid
  misc_feature (44)..(51): Xaa can be any naturally occurring amino acid
ARHRFVAGKSKLLLEFGARRAQGPDGAISASKYCYLGGFXXXSXXXXXXXXFYFLLSPFPPPPFYSILLPFPFPPHPPPLSLSLPSFLIFPSSSS

SEQ ID NO: 7092 - protein, 369 aa, Coprinopsis cinerea
MVLSFLKQIEACGAVILDDGEESQGKKQRPKLEIQLADRKRLTVDGEPAKRSLKFPKRFATGSSRSMAQLFRVLDIMHEGLVTGTPTTKRDIYYKDVALFGRQSVVDTLVDDLAATWGTQRCDLNVRAASKGLVCGAGITINLYSGEVVQGNDTEPSNIPAGEDIESFGVDEDIAWVLVVEKEAVFQTLCQLGVTHGLNIGKGIMVTGKGYPDIATRHLVKSLGDALPKHVALAALVDCDPYGIDILSVYRYGSQSMRHENDTLATRRIKWLGLRISEVMEWDLDPSLLLPLTDYDENKIRSMLKRPHLPRRWRDELEATQARGRKAEIEVLCSLPRDQALRIGVGDSMNNPLLAYVEQKLHSLISRAS

SEQ ID NO: 7093 - protein, 187 aa, Cryptomeria japonica
DEHGEVVAEIRRSDLEPYLGLHYPATDIPQASRFLFMQNRVRMICDCRANPVGVIQVEELKQPLCLVGSTLRAPHGCHAQYMANMGSIASLVMAVIVNGNGNDEEGSSGRVKLWGLVVCHHTSPRAVPFPLRSACEFLMQTFGLQINMEMQLAAQLTENNILRTQTLLCDMLLRDAPIGIVTQSPSI

SEQ ID NO: 7094 - protein, 357 aa, Bradyrhizobium sp. BTAi1
MLGSHLSIRQRGSMTKYKLEYIWLDGYKPVPNLRGKTQIKEFSSFPTLEQLPLWGFDGSSTMQAEGHSSDCVLKPVAVYPDAARTNGVLVMCEVMMPDGKTPHPSNARATILDDPDAWFGFEQEYFFYKDGRPLGFPEYGYPAPQGPYYTGVGFKNVGDVARKIVEEHLDLCLAAGINHEGINAEVAKGQWEFQVFGKGSRTAADQMWMARYLMLRLTEKYGIDIEFHCKPLGDTDWNGSGMHCNFSTKYMREVGGKEYFEKLMDAFKEARADHIAVYGPDNHMRLTGKHETASIDTFSWGVADRGASIRVPHSFVNNGYKGYLEDRRPNSQGDPYQIASQVLKTISTVPTGAKAAA

SEQ ID NO: 7095 - protein, 158 aa, Linum usitatissimum
GWIYGSITEDILTGFKMHCHGWRSIYCIPERPAFKGSAPINLSDRLHQVLRWALGSMEIFLSRHCPLWYGYGGRLKLLERLSYINATIYPLTSIPLLIYCTLPAVCFLTGKFIIPELNNAANLWFLSLFICIFATSLLEMRWSGVGIDEWWRNEQFWV

SEQ ID NO: 7096 - protein, 87 aa, Oryza sativa
NRFGPAPLIKLGSDFKKVSSFQSRIPSIPKIVELDHLTITGPVNLGRGVTLKGTVIIVATEGSTIDIPPGSILENVVVQGSLRLLEH

SEQ ID NO: 7097 - protein, 290 aa, Arabidopsis thaliana; identical to SEQ ID NO: 456

SEQ ID NO: 7098 - protein, 286 aa, Zea mays
MGRNRKGRKARVSHDADADADADGSEDERATTAGRSLYEILGVEKTASQQEIKKAYHKLALRLHPDKNPGDEEAKEKFQQLQKVISILGDAEKRALYDETGITDDDALVGEAANNLQEYFRTMYKKVTEADIEEFEAKYRGSDSEKTDLKELYTKYKGNMNMLFCAMICSEPKLDSHRFKDIIDEAIGEGELKSTKVYEKWTKKISGMEPPTNPLERRVKKRKNSEENDLILAISQRRAERKKQFNSILSNIMSKCDSKASSSEPTEEEFEQAQQRLESRRAKRRK

SEQ ID NO: 7099 - protein, 1019 aa, Adiantum capillus-veneris
MDPYQQDAASSSGTGYSLHRPPPPDASSSTSGVPTVPRDTHGSLEVFSPAGYIPSGPTSSMFARGSDKQFKPGVHIADRQPVIDFGKFPSPLRPYEEDVASEDFSIEPAEAEKAEESGKEDLHTDWPTEAEKASPAPAEKGDHKILSDDGVAERAAQWGLVVKGRAGVGARTSNEEKRTDSFQQQRGTSLSVRSSEDSEHGGLYIPRVSKDLKDALETFQQTFVVSDATRPDYPILYASAGFFKMTGYSSKEVIGRNCRFLQGADTDPDDVERIRESLAEGKNYCGRLLNYKKDGTAFWNLLTIAPIKDEEGNVLKFIGMQVEVSKHTEGHKVKALRPNGLPESLIKYDARQKDRAVMDVSELIQAVKHPHHNGHAPQHHPPSSVKSTIAEVPSVATVPPMTDRRSSLGPGKSDSMSDGIPKRHRSSGFRSLIGLDKFGKSAQQEPIEFIEPEILMTRDEETDSLDELDDKERLQEIRRGIDLATTLERIEKNFVITDPRLPDNPIIFASDSFLELTEYTREEIIGRNCRFLQGQDTDQKTVQKIRDAIREQREITVQLLNYTKTGKRFWNLFHLQPMRDQKGELQYFIGVQLDGSEQLEPIQKRLSEKTEKEGAKIVRATALNVEEAVGELPDANLTPDDLWANHSKSVSAKPHKVHSDLWKALQKIRERGEKIGLKHFRPVKPLGFGDTGSVHLVELRGSGELFAIKAMEKSVMLNRNKVHRACAEREILAVLDHPFLPALYASFQTQTHVCLVTDFCPGGELFLLLDRQPRKVFSEETARFYLAEIIIALEYLHCQGIIYRDLKPENVLLQRDGHVVLTDFDLSFITSCNPQLVRPPSPPGRRRKYKQMPPPFFMAEPVTTSNSFVGTEEYIAPEVITGAGHSSAVDWWAVGILLYEMIYGRTPFRGKNRQKTFANVLHKDLTFPSSIPASLAARQLINGLLHRDPANRLGSATGAYEIKNHAFFRGINWPLIRDMVPPPLEAPLELVGKDPDFDSREALEWDELEASSTFVSDVF

SEQ ID NO: 7100 - protein, 1152 aa, Medicago truncatula
MASTSRGEKTEPNTSSSSSQRRHQLQITTTKEPEQQNNNNNKSMKKAIAQYTEDARLHAVFEQSGDSFDYSQSIRLTTAAHSQSVPEQQITAYLAKIQRGGFIQPFGSMIAVDEPSFRVLAYSENARDMLGITPQSVPSLEDDDESSSSGFNIGTDVRSLFTHSSGVLLEKAFAAREISLMNPIWIHSRSTGKPFYGILHRIDVGVVIDLEPARSEDPALSIAGAVQSQKLAVRAISQLQSLPGGDVKVLCDAVVESVRELTGYDRVMVYKFHEDEHGEVVAESKRIDLEPYIGLHYPATDIPQASRFLFKQNRVRMIVDCNASPVRVFQDEALVQPVCLVGSTLRAPHGCHAQYMANMGSIASLAMAVIINGNDEDGVGIGGTGRNSMRLWGLVVCHHTSARCIPFPLRYACEFLMQAFGLQLNMELQLAAQSLEKRVLRTQTLLCDMLLRDSPTGIVTQSPSIMDLVKCNGAALFYQGNYYPLGVTPTESQIRDIIEWLLAFHGDSTGLSTDSLADAGYPGAASLGDAVCGMAVAYITEKDFLFWFRSHTAKEIKWGGAKHHPEDKDDGQRMHPRSSFKAFLEVVKSRSMQWDNAEMDAIHSLQLILRDSFKEAENNDSKAVVHTHMAELELQGVDELSSVAREMVRLIETATAPIFAVDVNGRINGWNAKVSELTGLLVEDAMGKSLLHDLVYKESQETVDKLLSHALKGEEDKNVEIKMRTFGPGNQNKAVFIVVNACSSKDYTNNIVGVCFVGQDVTGQKVVMDKFINIQGDYKAIVHSPNALIPPIFASDDNTCCLEWNNAMEKLSGWSRTDVIGKLLVGEVFGSFCQLKGSDAMTKFMIVLHNALGGQDTDKFPFSFVDRHGKFVQTFLTANKRVNMDGQIIGAFCFLQIVSPELQQALTVQRQQDSSCFARMKELAYICQEVKNPLSGIRFTNSLLESTCLTDEQKQLLETSVACEKQMLKIIRDIDLDIIDNGSLELEKREFLLENVINAVVSQVMLLLRERNLQLIRDIPEEIKALAVYGDQLRIQQVLADFLMNVVRYAPSPDGWVEIHVFPRIKQISDGLTLLHAEFRMVCPGEGLPPELIQDMFHNSKWVTQEGLGLSMSRKIIKLMNGEVQYVREAERCYFLVVLELPVTRRSLKNVN

SEQ ID NO: 7101 - protein, 377 aa, Portulaca oleracea
TDVPAVAAGAFKSYKLAAKAISRLQSLPSRNMSLLCDVLVKEVTELTAYDRVMVYKFHEDEHGEVISEYRKPGLDPYLGLHYPATDIPQASRFLFLKNRVRMICNCLATPVKVIQDKKLAQPLSLGGSILRVPHGCHAQYMANMGSIASLVMAVTINEDDDEVKSDPSTGKRLWGLVVCHHTSPKFISFPLRYACELLVQVFGIQINKEVELVAQIRESHILRIQTVLCDMLMRDSPVAIVTQSPNVMDLVKCDGAALYYNGQVWLLGITPTEEQIKNLTLWLLKYHGSTKGLSTDSLMEAGYPCASDLGDAVCGMAAVRISSKDFLFWFRSHTAKEVKWGGAKHDPTDNDNGRKMHPRSSFKAFLDVVKWRSQPWE

SEQ ID NO: 7102 - protein, 121 aa, Zea mays
MDGASKEPLRKDYYKVLEVDYDASDDTIKLSYRRLALMWHPDKHKGNSNATTKFQEINEAYKVLSDPAKRLEYDVSGCYEIDQYTLREYLTKFKGMILTCNGLGIDHSSKWARHLRELKPH

SEQ ID NO: 7103 - protein, 290 aa, Mesorhizobium plurifarium
EFPTLEQLPLWGFDGSSTNQAEGHSSDCVLKPVAVYPDPARTNGVLVLCEVMMPDGVTPHVSNKRATILDDEGAWFGFEQEYFFYKDGRPLGFPETGYPAPQGPYYTGVGYKNVGSVARQIVEEHLDQCLAAGINHEGINAEVAKGQWEFQIFGKGSKKAADQMWMARYLLQRLTEKYGIDIEFHCKPLGDTDWNGSGMHCNFSTAYMREVGGKAYFEALMAQFDKNLMDHIAVYGPDNDKRLTGKHETAPWNKFSYGVADRGASIRVPHSFVKNDYKGYLEDRRPNSQG

SEQ ID NO: 7104 - protein, 218 aa, Triticum aestivum
MVKLTMIARITDGLPLAEGLDDGRDLKDADFYKQQAKLLFKNLSKGQHESSRLSIETGPYYFHYIIESRVCYLTMCDRSYPKKLAFQYLEDLKNEFERVNGSQIETAARPYAFIKFDTFIQKTRRLYLDTRTQRNLAKLNDELYEVHQIMTRNVQEVLGVGEKLDQVSQLSSRLTSDTRMYADKAKDLNRQALIRKYAPVAIVMGIVLMLFWIKNKIW

SEQ ID NO: 7105 - protein, 128 aa, Mesorhizobium plurifarium
KGSKKAADQMWMARYLLLRLTEKYGIDIEFHCKPLGDTDWNGSGMHCNFSTAYMREVGGKAYFEALMAQFDKNLMDHIAVYGPDNDKRLTGKHETAPWNKFSYGVADRGASIRVPHSFVKNDYKGYLK

SEQ ID NO: 7106 - protein, 377 aa, Quiabentia verticillata
TDVPAAAAGAFKSYKFAAKAISGLQSLPSRNMSLLCDVLVKEVSELTGYDRVMVYKFHEDEHGEVISEYRTPDLEPYLGLHYPATDIPQASRFLFLKNRVRMICDCLAAPVKVIQDKKLAQPLSLGGSILRAPHGCHAQYMANMGTIASLVMAVTINEDEDEVKSDPSTGTRLWGLVVCHHTSSRFIPFPLRYACELLVQVFGIQINKEVELAAQIRESHILRIQTVLCDMLLRDSPVAIVTQSPNVMDLVKCDGAALYYKGQVWLLGITPTDEQIKNITQWLLEYHGSTKGLSTDSLMEAGYPGASELGDAVCGMAAVRISSKDVLFWFRSHSAREIKWGGAKHDPVDSDDRSKMHPRSSFKAFLEVVKWRSQPWE

SEQ ID NO: 7107 - protein, 263 aa, Zea mays
MTAGQCGNIQDQEAAPGADLYAVLGLNRECTDAELRVAYRRLAMIWHPDRCSASGSSARVEEAKERFQEIQGAYSVLSDSNKRLLYDVGIYDSEDDDADLSGMGDFLGEMADMMSQATPTESFEELQQLFVDMFQDDLDGAGFFGGLPTSRSAQGPSSTSLPPSTSPLRPTPPARSKGAQTPSSFNGAGRRGSTAKRPRTGWAGLEPDLGLSGFCFMVSKSKERPAAWACDGGDERSGSKQRLSTSRLRLRWWDVALAAEPNQ

SEQ ID NO: 7108 - protein, 218 aa, Arabidopsis thaliana
MVKMTLIARVTDGLPLAEGLDDGRDLPDSDMYKQQVKALFKNLSRGQNDASRMSVETGPYVFHYIIEGRVCYLTMCDRSYPKKLAFQYLEDLKNEFERVNGPNIETAARPYAFIKFDTFIQKTKKLYQDTRTQRNIAKLNDELYEVHQIMTRNVQEVLGVGEKLDQVSEMSSRLTSESRIYADKAKDLNRQALIRKWAPVAIVFGVVFLLFWVKNKLW

SEQ ID NO: 7109 - protein, 75 aa, Passiflora amethystina
GTNGEVMPGQWEYQVGPSVGIDAGDHIWCSRYILERITEQAGVVLTLDPKPIEGDWNGAGCHTNYSTSSMREDGG

SEQ ID NO: 7110 - protein, 489 aa, Saccharomyces cerevisiae; identical to SEQ ID NO: 470

SEQ ID NO: 7111 - protein, 57 aa, Passiflora antioquiensis
WEYQVGPSVGIDAGDHIWCSRYILERITEQAGVVLSLDPKPIEGDWNGAGCHTNYST

SEQ ID NO: 7112 - protein, 1146 aa, Populus tremula
MASQSQRQSNQPAHNQAQSSGTSNMRQHHHPTESVSKAIAQYTVDAQLHAVFEQSGGTGKSFDYSKSVRTPNQSVPEEQITAYLSKIQRGGHIQPFGCMIAADEQSFRVIAYSENAKDMLGLTPQSVPSLEKQEILFVGADVRILFRPSSAVLLEKAFGAREITLLNPIWIHSKNSGKPFYAILHRIDVGIVIDLEPARTEDPALSIAGAVQSQKLAVRAISQLQSLPGGDIKLLCDTVVDSVRELTGYDRVMVYKFHEDEHGEVVAENKRVDLEPYIGLHYPSTDIPQASRFLFKQNRVRMIVDCHAIPVSVIQDEGLMQPLCLVGSTLRAPHGCHAQYMENMGSIASLAMAVIIYGNDEEAIGGRNSMRLWGLVVCHHTSARCIPFPLRYACEFLMQAFGLQLNMELQLASQLLEKHVLRTQTLLCDMLLRDSPTGIVTQSPSIMDLVKCDGAALYYQGQYYPLGVTPTEAQIKDIVEWLLTLHGDPTGLSTDSLADAGYPGAAFLGDAVCGMAVAYIAERDFLFWFRSHTAKEVKWGGAKHHPEDKDDGQRMHPRSSFKAFLEVVKSRSLPWENAEMDAIHSLQLILRDSFRDAEATNSKAVVHTQLKDMELQGMDELSSVAREMVRLIETATAPIFAVDVEGRINGWNAKVAELTGLSVEEAVGKSLVHDLVYKEYEEIVDKLIHRAVKGEEDKNVEIKLRTFCSEHQKKAVFVVVNACSSKDYMDNIVGVCFVGQDVTGQKVVMDKYVLIQGDYKAIVHSPNPSIPPIFASDENTCCLEWNTALEKLTGWSRGEVVGKMLVGEVFGSCCRLKGPDALTKFMIALHNAIGGIDTDKLTFSFFDRNEKNVQTLLTANKRVNIKGDIIGAFCFLQIASPELQPSLKVQKQQEKKSFARMKELAYICQEIKNPLSGIHFTNSLLENTDLTEDQQQFLETSAACEKQILKIIRDIDLESIENGSLELEKAEFLLGSVINAVVSQAMLLLRERNLQLLRDIPEEIKTLAVYGDQARIQQVLADFLLNMVRYAPSSAGWVEIHVCPTLKQISDGHTLVHTEFRYLERVLQTRMLGLQHPPRSFLNCKLTLVKLHREGMVPKIQFQGLSVSQGRLIWLSFPENTTVALYPLTIWFLLLHRHQSRSITHT

SEQ ID NO: 7113 - protein, 369 aa, uncultured marine bacterium 560
MAQRDYYEVLGVKKGSAEAEIKKAYKRLAMKYHPDRNAGDKASAEKKFKEVRKAYDIISDPQKRSAYDQFGHAGVEQQGAGGFGGGNPFGGGAGGFGDIFGDIFGGGNTKPDNRGPDLRYDLEIDLKQAAKGDTVRIRVPKNDTCDTCSGTGAKPGTKVKTCGNCHGSGQIQMQQGFFSIQRPCNQCHGTGEKIDTPCRTCGGQGIVRKQKTLSVKIPAGVDTGNRIRLSSEGEAGLRGGPSGDLYVQIHIKDHQIFQREGNDLYCEVPIDFAKATLGGSIEVPTLDGKLKINIPSGTQTAKLFRLRGKGMPAMRYNGSGDLLCQVKLETPVNLNSKQKQLLKDFSSSCNAKQYPESNSFFGKMKSFFE

SEQ ID NO: 7114 - protein, 135 aa, Oryza sativa Indica Group
RVTEVAGVVLSLDPKPIPGDWNGAGAHTNFSTKSMREPGGYEVIKKAIDKLALRHKEHIAAYGEGNERRLTGRHETADINTFKWGVANRGASIRVGRDTEKEGKGYFEDRRPASNMDPYVVTGMIAETTLLWKQN

SEQ ID NO: 7115 - protein, 453 aa, Candida albicans
MLSFKSLLAAAVVASSALASASNQVALYWGQNGAGGQERLAQYCQEADVDIILLSFLNLFPDPLNVNFANQCGNTFESGLLHCSQIGADIKTCQSLGKTVLLSLGGGVGDYGFSDVASATKFADTLWNKFGAGEDPERPFDDAVVDGFDFDIEHGGATGYPELATALRGKFAKDTSKNYFLSAAPQCPYPDASLGDLLSKVPLDFAFIQFYNNYCSINGQFNYDTWSKFADSAPNKNIKLFVGVPATSNIAGYVDTSKLSSAIEEIKCDSHFAGVSLWDASGAWLNTDEKGENFVVQVKNVLNQNACVAPSSSATTQSTTTTSSAVTQSTTTTSAAITQSATTTSAAVATKSNQIVTSSSSSSSSIFYGNSTTESSTGIATGTVLPTGSNENAATTGSGSNTKLAISTVTDVQKTVITITSCSEHKCVATPVTTGVVVVTDIDTVYTTLLSFD

SEQ ID NO: 7116 - protein, 1146 aa, Populus tremula
MASQSQRQSNQPAHNQAQSSGTSNMRQHHHPTESVSKAIAQYTVDAQLHAVFEQSGGTGKSFDYSKSVRTPNQSVPEEQITAYLSKIQRGGHIQPFGCMIAADEQSFRVIAYSENAKDMLGLTPQSVPSLEKQEILFVGADVRILFRPSSAVLLEKAFGAREITLLNPIWIHSKNSGKPFYAILHRIDVGIVIDLEPARTEDPALSIAGAVQSQKLAVRAISQLQSLPGGDIKLLCDTVVDSVRELTGYDRVMVYKFHEDEHGEVVAENKRVDLEPYIGLHYPSTDIPQASRFLFKHNRVRMIVDCHAIPVSVIQDEGLMQPLCLVGSTLRAPHGCHAHYMENMGSIASLAMAVIIYGNDEEAIGGRNSMRLWGLVVCHHTSARCIPFPLRYACEFLMQAFGLQLNMELQLASQLLEKHVLRTQTLLCDMLLRDSPTGIVTQSPSIMDLVKCDGAALYYQGQYYPLGVTPTEAQIKDIVEWLLTLHGDPTGLSTDSLADAGYPGAAFLGDAVCGMAVAYIAERDFLFWFRSHTAKEVKWGGAKHHPEDKDDGQRMHPRSSFKAFLEVVKSRSLPWENAEMDAIHSLQLILRDSFRDAEATNSKAVVHNQLKDMELQGMDELSSVAREMVRLIETATAPIFAVDVDGRINGWNAKVAELTGLSVEEAMGKSLVHDLVYKEYEEIVDKLIHRAVKGEEDKNVEIKLRTFCSEHQKKAVFVVVNACSSKDYMDNIVGVCFVGQDVTGQKVVMDKYVLIQGDYKAIVHSPNPSIPPIFASDENTCCLEWNTALEKLTGWSRGEVVGKMLVGEVFGSCCRLKGPDALTKFMIALHNAIGGIDTDKLPFSFFERNEKNVQTLLTANKRVNMKGDIIGAFCFLQIASPELQPSLKVQKQQEKKSFARMKELAYICQEIKNPLSGIHFTNSLLENTDLTEDQQQFLETSAACEKQILKIIRDIDLESIENGSLELEKAEFLLGSVINAVVSQAMLLLRERNLQLLRDIPEEIKTLAVYGDQARIQQVLADFLLNMVRYAPSSAGWVEIHVCPTLKQISDGHTLVHTEFRYLERVLQTRMLGLQHPPRSFLNCKLTLVMLHREGMVPKIQFQGLSVCQGRLIWLSFPENTTVALYPLTIWFLLLHRHQSRSITHT

SEQ ID NO: 7117 - protein, 1146 aa, Populus tremula
MASQSQRQSNQPAHNQAQSSGTSNMRQHHHPTESVSKAIAQYTVDAQLHAVFEQSGGTGKSFDYSKSVRTPNQSVPEEQITAYLSKIQRGGHIQPFGCMIAADEQSFRVIAYSENAKDMLGLTPQSVPSLEKQEILFVGADVRILFRPSSAVLLEKAFGAREITLLNPIWIHSKNSGKPFYAILHRIDVGIVIDLEPARTEDPALSIAGAVQSQKLAVRAISQLQSLPGGDIKLLCDTVVDSVRELTGYDRVMVYKFHEDEHGEVVAENKRVDLEPYIGLHYPSTDIPQAPRFLFKQNRVRMIVDCHAIPVSVIQDEGLMQPLCLVGSTLRAPHGCHAQYMENMGSIASLAMAVIIYGNDEEAIGGRNSMRLWGLVVCHHTSARCIPFPLRYACEFLMQAFGLQLNMELQLASQLLEKHVLRTQTLLCDMLLRDSPTGIVTQSPSIMDLVKCDGAALYYQGQYYPLGVTPTEAQIKDIVEWLLTLHGDPTGLSTDSLADAGYPGAAFLGDAVCGMAVAYIAERDFLFWFRSHTAKEVKWGGAKHHPEDKDDGQRMHPRSSFKAFLEVVKSRSLPWENAEMDAIHSLQLILRDSFRDAEATNSKAVVHNQLKDMELQGMDELSSVAREMVRLIETATAPIFAVDVDGRINGWNAKVAELTGLSVEEAMGKSLVHDLVYKEYEEIVDKLIHRAVKGEEDKNVEIKLRTFCSEHQKKAVFVVVNACSSKDYMDNIVGVCFVGQDVTGQKVVMDKYVLIQGDYKAIVHSPNPSIPPIFASDENTCCLEWNTAMEKLTGWSRGEVVGKMLVGEVFGSCCRLKGPDALTKFMIALHNAIGGIDTDKLPFSFFDRNEKNVQTLLTANKRVNIKGDIIGPFCFLQIASPEFQPSLKVQKQQEKKSFARMKELAYICQEIKNPLSGIHFTNSLLENTDLTEDQQQFLETSAACEKQILKIIRDIDLESIENGSLELEKAEFLLGSVINAVVSQAMLLLRERNLQLLRDIPEEIKTLAVYGDQARIQQVLADFLLNMVRYAPSSAGWVEIHVCPTLKQISDGHTLVHTEFRYLERVLQTRMLGLQHPPRSFLNCKLTLVMLHREGMVPKIQFQGLSVCQGRLIWLSFPENTTVALYPLTIWFLLLHRHQSRSITHT

SEQ ID NO: 7118 - protein, 1146 aa, Populus tremula
MASQSQRQSNQPAHNQVQSSGTSNMRQHHHPTESVSKAIAQYTVDAQLHAVFEQSGGTGKSFDYSKSVRTPNQSVPEEQITAYLSKIQRGGHIQPFGCMIAADEQSFRVIAYSENAKDMLGLTPQSVPSLEKQEILFVGADVRILFRPSSAVLLEKAFGAREITLLNPIWIHSKNSGKPFYAILHRIDVGIVIDLEPARTEDPALSIAGAVQSQKLAVRAISQLQSLPGGDIKLLCDTVVDSVRELTGYDRVMVYKFHEDEHGEVVAENKRVDLEPYIGLHYPSTDIPQASRFLFKHNRVRMIVDCHAIPVSVIQDEGLMQPLCLVGSTLRAPHGCHAQYMENMGSIASLAMAVIIYGNDEEAIGGRNSMRLWGLVVCHHTSARCIPFPLRYACEFLMQAFGLQLNMELQLASQLLEKHVLRTQTLLCDMLLRDSPTGIVTQSPSIMDLVKCDGAALYYQGQYYPLGVTPTEAQIKDIVEWLLTLHGDPTGLSTDSLADAGYPGAAFLGDAVCGMAVAYIAERDFLFWFRSHTAKEVKWGGAKHHPEDKDDGQRMHPRSSFKAFLEVVKSRSLPWENAEMDAIHSLQLILRDSFRDAEATNSKAVVHNQLKDMELQGMDELSSVAREMVRLIETATAPIFAVDVDGRINGWNAKVAELTGLSVEEAMGKSLVHDLVYKEYEEIVDKLIHRAVKGEEDKNVEIKLRTFCSEHQKKAVFVVVNACSSKDYMDNIVGVCFVGQDVTGQKVVMDKYVLIQGDYKAIVHSPNPSIPPIFASDENTCCLEWNTALEKLTGWSRGEVVGKMLVGEVFGSCCKLKGPNSLTKFMIALHNAIGGIDTDKLPFSFFDRNEKNVQTLLTANKRVNMKGDIIGAFCFLQIASPELQPSLKVQKQQEKKSFARMKELAYICQEIKNPLSGIHFTNSLLENTDLTEDQQQFLETSAACEKQILKIIRDIDLESIENGSLELEKAEFLLGSVINAVVSQAMLLLRERNLQLLRDIPEEIKTLAVYGDQARIQQVLADFLLNMVIYTQSSAGWVEIHVCPTLKQISDGHTLVHTEFRYLERVLQTRMLGLQHPPRSFLNCKLTLVMLHREGMVPKIQFQGLSVCQGRLIWLSFPENTTVALYPLTIWFLLLHRHQSRSITHT

SEQ ID NO: 7119 - protein, 158 aa, Linum usitatissimum
GWIYGSVTEDILTGFKMHCHGWRSVYCIPKRPAFKGSAPINLSDRLHQVLRWALGSVEIFFSRHCPIWYGYGGGLKWLERFSYINSVVYPWTSIPLLVYCTLPAVCFLTGKFIIPELNNAANLWFLSLFICIFATSLLEMRWSGVGIDEWWSNEQFWV

SEQ ID NO: 7120 - protein, 170 aa, Vitis vinifera
MECSQGSPSYYSVLGIRTDSSIEEIRRAYRKLAMKWHPDKWTRTPSVLGEAKRKFQQIQEAYSDQRKRTVYDAGLYNPBEEEDEGFSDFLQEMISLMANVKRELLLVLSTVSVLPMYRVRSTLGRNYKTPKWVGTGSPLLRHCICPWWKFSEDVQRGLNYNKGNVQNPWM

SEQ ID NO: 7121 - protein, 297 aa, Oryza sativa Indica Group
MASRALTPMQLIGTVFVALLATCHAGGIAVYWGQNDGEASLAETCASGNYEFVIIAFLPKFGKGQTPRVDLASHCDPASGGCTGQSKDIRACQRRGVKVLLSIGGGDGSYGLASPGDARQVAMYLWNNFLGGSSSSRPLGDAVLDGIDFDIELGGAKFWDDLARDLKSLGRSGGRRVVLSAAPQCPFPDEWDGGAISTGLFDAVWVQFYNNPECQFSAGRGAFMDAWRKWESVPAGRLFLGLPASKDAAGTGFVPAGELNSRVLPLIRGSPKYGGVMLWSKYYDDQTGYSSAIKSHV

SEQ ID NO: 7122 - protein, 352 aa, Oryza sativa
MGVDYYKLLQVERGATEEELKKAYRKLAMKWHPDKNPNSKKEAEAKFKQISEAYEVLSDSQKRAVYDQYGEEGLKGQVPPPGAGGPGGSSYYGGDGSTFRFNPRSADDIFAEFFGFSSPFSSMGGMGGMGGMGGGVDRGMRGSKFGMYDNDIFGSFSQFPGEASMHAPQRPQKAAPIENRLPCNLADLYKGTTKKMKISREILDSSGRTMVVEEILTIDIKPGWKKGTKITFPEKGNESPHVIPADIVFVIDEKPHDLFTREGNDLVMTQKISLAEALTGCTVQVTALDGRNLTVPINNVVYPGYEEVVLREGMPIPKDPSKKGNLRIKFNIKFPSRLTSEQKSEIKRLLAS

SEQ ID NO: 7123 - protein, 296 aa, Oryza sativa Indica Group
MQMLIMVVVALAGLAAGARAGDIAIYWGQNGNEGTLAQTCATGNYRFVIVAFLPVFGKGQTPVLNLAGHCDPASNGCTGVGADIKSCQSLGIKVMFSIGGGVGNYGLSSRDDAKQVAAYLWNNYLGGTSPSRPLGDAVMDGIDFDIESGGGMYWDDLARYLKAYSRQGSSKKPVYLTAAPQCPFPDASLGVALSTGLFDYVWVQFYNNPPCQYSSSNGVGNLASAWKQWTSIPAGRVFLGLPAAAAAAGSGFVETSDLVSKVLPVVKKSPKYGGIMLWSRYYDGLTGYSDKVKSSV

SEQ ID NO: 7124 - protein, 1146 aa, Populus tremula
MASQSQRQSNQPAHNQAQSSGTSNMRQHHHPTESVSKAIAQYTVDAQLHAVFEQSGGTGKSFDYSKSVRTPNQSVPEEQITAYLSKIQRGGHIQPFGCMIAADEQSFRVIAYSENAKDMLGLTPQSVPSLEKQEILFVGADVRILFRPSSAVLLEKAFGAREITLLNPIWIHSKNSGKPFYAILHRIDVGIVIDLEPARTEDPALSIAGAVQSQKLAVRAISQLQSLPGGDIKLLCDTVVDSVRELTGYDRVMVYKFHEDEHGEVVAENKRVDLEPYIGLHYPSTDIPQASRFLFKQNRVRMIVDCHAIPVSVIQDEGLMQPLCLVGSTLRAPHGCHAQYMENMGSIASLAMAVIIYGNDEEAIGGRNSMRLWGLVVCHHTSARCIPFPLRYACEFLMQAFGLQLNMELQLASQLLEKHVLRTQTLLCDMLLRDSPTGIVTQSPSIMDLVKCDGAALYYQGQYYPLGVTPTEAQIKDIVEWLLTLHGDPTGLSTDSLADAGYPGAAFLGDAVCGMAVAYIAERDFLFWFRSHTAKEVKWGGAKHHPEDKDDGQRMHPRSSFKAFLEVVKSRSLPWENAEMDAIHSLQLILRDSFRDAEATNSKAVVHTQLKDMELQGMDELSSVAREMVRLIETATAPIFAVDVEGRINGWNAKVAELTGLSVEEAMGKSLVHDLVYKEYEEIVDKLIHRAVKGEEDKNVEIKLRTFCSEHQKKAVFVVVNACSSKDYMDNIVGVCFVGQDVTGQKVVMDKYVLIQGDYKAIVHSPNPSIPPIFASDENTCCLEWNTALEKLTGWSRGEVVGKMLVGEVFGSCCRLKGPDALTKFMIALHNAIGGIDTDKLTFSFFDRNEKNVQTLLTANKRVNMKGDIIGAFCFLQIASPELQPSLKVQKQQEKKSFARMKELAYICQEIKNPLSGIHFTNSLLENTDLTEDQQQFLETSAACEKQILKIIRDIDLESIENGSLELEKAEFLLGSVINAVVSQAMLLLRERNLQLLRDIPEEIKTLAVYGDQARIQQVLADFLLNMVRYAPSSAGWVEIHVCPTLKQISDGHTLVHTEFRYLERVLQTRMLGLQHPPRSFLNCKLTLVKLHREGMVPKIQFQGLSVCQGRLIWLSFPENTTVALYPLTIWFLLLHRHQSRSITHT

SEQ ID NO: 7125 - protein, 158 aa, Linum usitatissimum
GWIYGSVTEDILTGFKMHCRGWKSVYCCPERAAFRGSAPINLSDRLHQVLRWALGSIEIFMSHHCPLWYGWGGKLKFLQRLAYINTVVYPFTSIPLLAYCTIPAVCLLTGKFIIPQISNLASIWFLALFLSIIATSVLELRWSGVSIEDLWSNEQFWV

SEQ ID NO: 7126 - protein, 378 aa, Shewanella oneidensis MR-1
MSKRDYYEVLGVGRDASEREIKKAYKRLAMKFHPDRNPGDKAAEASFKEVKEAYEILTDANKKAAYDQFGHAGVDPNRGGGGGYGGAGDFGDIFGDVFGDIFGGGRRGGGQRQAARGSDLRYNLELSLEEAVKGLTKELRIPTLASCDVCDGSGAKKGTSATTCTTCHGQGQVQMRQGFFTVQQPCPTCHGRGKIIKDPCAKCHGDGRVEKTKTLSVKIPAGVDTGDRIRLAGEGEAGEFGAPAGDLYVQVSVREHAIFVRDGNNLYCEVPISFSKAALGGEIEVPTLDGKVSLKIPAETQTGRMFRLRGKGVKSVRSHAVGDLLCKVVMETPVNLNERQKELLREFEATLTGESKKHSPKAEGFFDGVKKFFQDLNS

SEQ ID NO: 7127 - protein, 387 aa, Clostridium perfringens str. 13
MAKRDYYEVLGLQKGASDDEIKRAFRKMAMKYHPDRNPGDKEAEENFKEVNEAYDVLKDPDKKAKYDQFGHAAFDGSGGFGGGGFGGFDAGGFDFSEMGGFGDIFESFFGGGFGGGSSRRRNAPQRGADLEYRLNITFEEAVFGCEKEISITRTENCETCHGTGAKAGTSPKTCPKCNGSGQIRVQRQTPLGSFVSTTTCDQCGGTGKVIEDPCPDCKGKGTVRKNRKITVKIPAGVDTGNIIPLRGQGEQGANNGPAGDLYIRVNVAPSKIFRREGSDIYYDYKISMAKAALGAEITVPTVDGNVKYKVPAGTQPGTKFRLKGKGVPHVNGGGRGNQYVHMVVEVPKHLNKEQEEALKAFMKASGESVDDIDEKDEGFFSKFKKKK

SEQ ID NO: 7128 - protein, 397 aa, Puelia ciliata
TGYDRVMVYRFHDDEHGEVVAESRHADLEPYLGLHYPATDIPQASRFLFRQNRVRMIADCHAAPVRVIQDPALPQPLCLVGSTLRAPHGCHAQYMANMGSIASLVMAVIITSGGDDEHNMARGGISSAMKLWGLVVCHHTSPRCIPFPLRYACEFLMQAFGLQLNMELQLAHQLSEKHILRTQTLLCDMLLRDSPTGIVTQSPSIMDLVKCDGAALYYHGKYYPLGVTPTEAQIKDIIEWLTLCHGDSTGLSTDSLADAGYHGAAALGDAVCGMAVAYITPSDYLFWFRSHTAREIKWGGAKHRPEDKDDGQRMHPRSSFKAFLEVVKSRSLPWEHAEMDAIHSLQLILRDSFRDAAEGTSNSKAIVNGQVQLGELELRGIDELSSVAREMVRLIET

SEQ ID NO: 7129 - protein, 393 aa, Sesleria insularis
EPARTEDPALSIAGAVQSQKLAVRAISRLQALPGGDVKLLCDTVVEHVRELTGYDRVMVYKFHDDEHGEVLAESRRADLEPYLGLHYPATDIPQASRFLFRQNRVRMIADCHAAPVRVIQDPAMPQPLCLVGSTLRSPHGCHAQYMANMGSIASLVMAVIISSGGEDNMSRGGAVPSAMKLWGLVVCHHTSPRCIPFPLRYACEFLMQAFGLQLNMELQLAHQLSEKHILRTQTLLCDMLLRDSPTGIVTQSPSIMDLVKCDGAALYYHGKYYPLGITPTGAQIKDIIEWLKVCHGDSTGLSTDSLADAGYPGATALGDAVCGMAVAYITPSDYLFWFRSHTAKEIKWGGAKHHPEDKDDGQRMHPRSSFKAFLEVVKSRSLPWENAEMDAIH

SEQ ID NO: 7130 - protein, 382 aa, Sorghum halepense
EPARTEDPALSIAGAVQSQKLAVRAISRLQALPGGDIKLLCDTVVEHVRELTGYDRVMVYRFHEDEHGEVVAESRRDNLEPYLGLHYPATDIPQASRFLFRQNRVRMIADCHATPVRVIQDPGMSQPLCLVGSTLRAPHGCHAQYMANMGSIASLVMAVIISSGGDDEQTGRGGISSAMKLWGLVVCHHTSPRCIPFPLRYACEFLMQAFGLQLNMELQLAHQLSEKHILRTQTLLCDMLLRDSPTGIVTQSPSIMDLVKCDGAALYYHGKYYPLGVTPTESQIKDIIEWLTVCHGDSTGLSTDSLADAGYLGAAALGDAVCGMAVAYITPSDYLFWFRSHTAKEIKWGGAKHHPEDKDDGQRMHPRSSFKAFLEVVKSRSL

SEQ ID NO: 7131 - protein, 185 aa, Sandersonia aurantiaca
MSLLSDLVNLNLTDTTEKIIAEYIWIGGTGMDLRSKARTLPGPVSDPSKLPKWNYDGSSTGQAPGQDSEVILYPQAIFKDPFRRGNNILVMCDCYTPAGSPSHQQRHIAAKLFSHPDVVVEEPWYGIEQEYTLLQKDVKWPIGWPIGGYPGPQGPYYCAAGADKAFGRDVVDAHYKACLYAGINI

SEQ ID NO: 7132 - protein, 393 aa, Sporobolus giganteus
EPARTEDPALSVAGAVQSQKLAVRAISRLQALPGGDVKLLCDTVVEHVRELTGYDRVMVYRFHEDEHGEVVAESRRDDLEPYLGLHYPATDIPQASRFLFRQNRVRMIADCHATPVRVIQDPGLSQPLCLVGSTLRAPHGCHAQYMANMGSIASLVMAMIIIVVVMTKQTSRSGISSAMKLWGLVVCHHTSPRFIPFPLRYACEFLMQAFGLQLNMELQLAHQLSEKHILRTQTLLCDLLLRDSPTGIVTQSPSIMDLVKCDGAALYYHGKYYPLGVTPTESQIKDIIEWLTVCHGDSTGLSTDSLADAGYHGAAALGDAVCGMAVAYITPSDYLFWFRSHTAKEIKWGGAKPHPEDKDDGQRMHPRSSFKAFLEVVKSRSLPWENAEMDAIH

SEQ ID NO: 7133 - protein, 276 aa, Mesorhizobium plurifarium
FDGSSTNQAEGHSSDCVLKPVAVYPDPARTNGVLVMCEVMMPDGVTPHVSNKRATILDDEGAWFGFEQEYFFYKDGRPLGFPESGYPAPQGPYYTGVGYKNVGDIARTIVEEHLDLCLAAGINHEGINAEVAKGQWEFQIFGKGSKKAADQMWMARYLLLRLTEKYGIDIEFHCKPLGDTDWNGSGMHCNFSTAYMREVGGKAYFEALMAQFDKNLMDHIAVYGPDNDKRLTGKHETAPWNKFSYGVADRGASIRVPHSFVKNDYKGYLEDRRPIS

SEQ ID NO: 7134 - protein, 394 aa, Streptochaeta angustifolia
EPASTEDPALSIAGAVQSQKLAVRAISRLQALPGGDVKLLCDTVVEHVRELSGYDRVMVYRFHDDEHGEVVAENRRADLEPYLGLHYPAMDIPQASRFLFRQNRVRMIADCHAAPVRVIQDPSLKQPLCLVGSTLRAPHECHAQYMANMGSIASLVMAVIISSGGDDENSVGRSGISSATKLWGLVVCHHTSPRCIPFPLRYACEFLMQAFGLQLNMELQLAHQLSEKHILRTQTLLCDMLLRDSPTGIVMQSPSIMDLVKCDGAALYYHRKYYPLGITPTEAQIKDIIDWLAMCHGDSTGLSTDSLADAGYPGAAALGDAVCGMAVAYITPNDYLFWFRSHTAKEIKWGGAKHHPEDKDDGQRMHPRSSFKAFLEVVKSRSLPWENAEMDAIH

SEQ ID NO: 7135 - protein, 216 aa, Magnaporthe grisea 70-15
MIRSTQIARLDGLMLCASVDEDASDSALAEVKSQVKLVLRRLNRNSETQASIESGSAYTLHYLIAGDVVYVCISDRSYPRKLAFTYLSDLATEFANTYSQAQVTSPNLRPYAFVEFDTFIGRTRATYTDARATQNLDKLNDELRDVTKVMTKNIEDLLYRGDSLERMGELSSRLRDDSKKYRRAAVRINWELMLKQYGPFAGLGAFILFFLWWRFF

SEQ ID NO: 7136 - protein, 397 aa, Streptogyna americana
TGYDRVMVYRFHDDEHGEVVAESRRADLEPYLGLHYPATDIPQASRFLFRQNRVRMIADCHAAPVKVIQDPALPQPLCLVGSTLRAPHGCHAQYMANMGSIASLVMAVIISSGGDDEHNMMRGGIPSAMKLWGLVVCHHTSPRCIPFPLRYACEFLMQAFGLQLNMELQLAHQLSEKHILRTQTLLCDMLLRDSPTGIVTQSPSIMDLVKCDGAALYYHGKYYPLGVTPTEAQIKDIIEWLTLCHGDSTGLSTDSLADAGYPSAAALGDAVCGMAVAYITPSDYLFWFRSHTAKEIKWGGAKHHPEDKDDGQRMHPRSSFKAFLEVVKSRSLPWENAEMDAIHSLQLILRDSFRDAAEGTSNSKAIVNGQVQLGELELRGIDELSSVAREMVRLIET

SEQ ID NO: 7137 - protein, 396 aa, Thysanolaena maxima
  misc_feature (393)..(393): Xaa can be any naturally occurring amino acid
TGYDRVMVYRFHEDEHGEVVAESRRDGLEPYLGLHYPATDIPQASRFLFRQNRVRMIVDCHATAVRVIQDPGLSQPLCLVGSTLRAPHGCHAQYMANMGSIASLVMAVIISSGGDDEQTMRGGISSAMKLWGLVVCHHTSPRFIPFPLRYACEFLMQAFGLQLNMELQLAHQLSEKHILRTQTLLCDMLLRDSPTGIVTQSPSIMDLVKCDGAALYYHGRYYPLGVTPTEFQIKDIIEWLTACHGDSTGLSTDSLADAGYHGAAALGDAVCGMAVAYITPSDYLFWFRSHTAKEIKWGGAKHHPEDKDDGQRMNPRSSFKAFLEVVKSRSLPWENAEMDAIHSLQLILRDSFRDSAEGTSNSKAIVNGQVQLGELELRGINELSSVAREMVRXIET

SEQ ID NO: 7138 - protein, 394 aa, Zizania aquatica
EPARTEDPALSIAGAVQSQKLAVRAISRLQALPGGDVKLLCETVVEHVRELTGYDRVMVYRFHEDEHGEVVAESRRNDLEPYLGLHYPSTDIPQASRFLFRQNRVRMIADCHSAPVRVIQDPALPQPLCLVGSTLRAPHGCHAQYMANMGSIASLVMAVIISSAGDDEHNMARGGIPSAMKLWGLVVCHHTSPRCIPFPLRYACEFLMQAFGLQLNMELQLAHQLSEKHILRTQTLLCDMLLRDSPTGIVTQSPSIMDLVKCDGAALFYHGKYCRLGVTPTEAQIKDIIEWLTVCHGDSTGLSTDSLADAGYPGAATLGDAVSGMAVAYITPSDYLFWFRSHTAKEIKWGGAKHHPEDKDDGQRMHPRSSFQAFLEVVKSKSLPWENAEMDAIH

SEQ ID NO: 7139 - protein, 396 aa, Zea mays
MAASKKSKKKTSAMAGRDKRRRAAPLEGDEQQLRRRLEEAALLLRRIKGLVRWIVEEVAAGRSPSIVLHRYRNYCSSADSASPSPCACSYDIPVGTDVLSLLHKDYHTSRLNVLLRVLFVVQHLLQQNKHCSKRDIYYMYPSIFVEVAVVDRAINDICILFKCSRHNLNVVPVVKGLVMGWIRFMEGEKKVYCITSVNAAFSIPVDIEAIKDVVSVAHYILVVEKETVFQRLANDKFCERNRCIVITGRGYPDIPTRRFLRYLVELLHLPAYCLVDSDPYGFDILATYKFGSLQLAHDANLLRVPDIRWLGVFTSDFEEYCLPDCCLLRLSPEDRRKAEGILARCYLHREAPEWRSELEAMLQKGVKFEIEALSANSISFLSHEYIPQKIKQGMHL

SEQ ID NO: 7140 - protein, 479 aa, Desulfovibrio vulgaris subsp. vulgaris str. Hildenborough
MESSAPMSPRPEHATHSARESFSRLMREERLPGELIDLFLGYHGEIEASHTGLIGENDILPAKVEDFTHLDSLTRYAPEGRKLMHRAVCIRLNGGLGTSMGMTHAKSLLPARHDRSFLDIIHGQAEHQRKAHGGASPLLFMNSYATHADTLRALESMAAPEHMPRCFLQHRFPKVDRATLLPVRSHEAGDMAWNPPGHGDIYAALVLSGMLDALLSEGRRWALVANADNLGASLDPAILGYMAAHRIPFLMECARRTPADSKGGHLARTPEGGLVLREVAQCPADDMAHFQDIHRYGLFNTNNIWLDLAALRDRVERYGLLRLPLILNPKTLDPRDPESTPVWQVETAMGAAIALFPGATAIVTPRRRFLPVKRCNDLLLLWSDCFSLGEDFHLNRRVAHDSPLPRIDLDPKHYGTWDRLMQRFPHGAPAMRSCTAMQVRGDVRFGDDVALDGEVRIRNSAKAQAVIPDGTRLSGEVHL

SEQ ID NO: 7141 - protein, 59 aa, Passiflora arborea
MPGQWEYQVGPSVGIEAGDHIWCSRYILERITEQAGVVLTLDPKPIEGDWNGAGCHTNY

SEQ ID NO: 7142 - protein, 200 aa, Brassica napus
  misc_feature (2)..(2): Xaa can be any naturally occurring amino acid
  misc_feature (13)..(13): Xaa can be any naturally occurring amino acid
  misc_feature (22)..(22): Xaa can be any naturally occurring amino acid
PXGPKTNPNPPIXVTHDSPNSXLRAHAVEISSGNDICETLSDYARRKQRGLCILSANGCVNNVTLRQPASSGGIVTLHGRFEILSLLGSILPSSAPLGITGLTIYLAGPQGQVVGGGVVGGLIASGPVVLMAASFMNAVFDRLPLDDDEAASMHNQQYYQNGRSRPLDDIHGLPQNLLTNGNSGSDIYSWGAAQRAMSKP

SEQ ID NO: 7143 - protein, 121 aa, Oryza sativa
MDGASEKPPHKDYYKVLEVDYDASDDTIKLSYRRLALMWHPDKHKGDNDVTAKFQEINEAYTVLSDPAKRLEYDLSGCYELNRYTLREYLTRFKGMILTCNGLGIDHSSKWARHLRELEPH

SEQ ID NO: 7144 - protein, 173 aa, Triticum aestivum
MLQGSGISNQKTLYEVLSVPEDATYDEIRAAYKCAALNTHPDKAQATLEPSVSTGEQHGFFSVQKAWETLRYPKCRAEYDKQLQSSRQSLDVIATDIEIEDMIVESSGDGVELLYACRCGDYFSITACELGEMGISVSEDGEIEAQAPDSLPTSVVLGCGSCSLKTRLIINKA

SEQ ID NO: 7145 - protein, 188 aa, Mesorhizobium septentrionale
IKDYAEFPTLEQLPLWGFDGSSTQQAEGHSSDCVLKPVAVFPDPARTNGVLVMCEVMMPDGVTPHSSNKRATILDDEGAWFGFEQEYFFYKDGRPLGFPESGYPAPQGPYYTGVGYSNVGSVARQIVEEHLDQCLAAGINHEGINAEVAKGQWEFQIFGKGSKKAADQMWMARYLMQRLTEKYGIDIE

SEQ ID NO: 7146 - protein, 59 aa, Passiflora aurantia
MPGQWEYQVGPSVGIDAGDHIWCSRYILERITEQAGVVLTLDPKPIEGDWNGAGCHTNY

SEQ ID NO: 7147 - protein, 178 aa, Vitis vinifera
MLLYKNSFEQTYYDILSVKEDASYEEIRGCYRSAILNSHPDKLQKTTETSNTDPEFLKIQKAWETLSDPRSRAVYDSGLQASRQDTATAEDLSLEDMTIEDDGKVLELFYQCRCGDYFSVDSSELGEMGYAVFRDGSKISLQTPDSLPASFILPCGSCSLKVRLLINADTAVVVSDNL

SEQ ID NO: 7148 - protein, 59 aa, Passiflora auriculata
WEYQVGPSVGIEAGDHIWCSRYILERITEQAGVVLTLDPKPIEGDWNGAGCHTNYSTQS

SEQ ID NO: 7149 - protein, 59 aa, Passiflora auriculata
WEYQVGPSVGIEAGDHIWCSRYILERITEQAGVVLTLDPKPIEGDWNGAGCHTNYSTKS

SEQ ID NO: 7150 - protein, 1146 aa, Populus tremula
MASQSQRQSNQPAHNQAQSSGTSNMRQHHHPTESVSKAIAQYTVDAQLHAVFEQSGGTGKSFDYSKSVRTPNQSVPEEQITAYLSKIQRGGHIQPFGCMIAANEQSFRVIAYSENAKDMLGLTPQSVPSLEKQEILFVGADVRILFRPSSAVLLEKAFGAREITLLNPIWIHSKNSGKPFYAILHRIDVGIVIDLEPARTEDPALSIAGAVQSQKLAVRAISQLQSLPGGDIKLLCDTVVDSVRELTGYDRVMVYKFHEDEHGEVVAENKRVDLEPYIGLHYPSTDIPQAPRFLFKQNRVRMIVDCHAIPVSVIQDEGLMQPLCLVGSTLRAPHGCHAHYMENMGSIASLAMAVIIYGNDEEAIGGRNSMRLWGLVVCHHTSARCIPFPLRYACEFLMQAFGLQLNMELQLASQLLEKHVLRTQTLLCDMLLRDSPTGIVTQSPSIMDLVKCDGAALYYQGQYYPLGVTPTEAQIKDIVEWLLTLHGDPTGLSTDSLADAGYPGAAFLGDAVCGMAVAYIAERDFLFWFRSHTAKEVKWGGAKHHPEDKDDGQRMHPRSSFKAFLEVVKSRSLPWENAEMDAIHSLQLILRDSFRDAEATNSKAVVHNQLKDMELQGMDELSSVAREMVRLIETATAPIFAVDVDGRINGWNAKVAELTGLSVEEAMGKSLVHDLVYKEYEEIVDKLIHRAVKGEEDKNVEIKLRTFCSEHQKKAVFVVVNACSSKDYMDNIVGVCFVGQDVTGQKVVMDKYVLIQGDYKAIVHSPNPSIPPIFASDENTCCLEWNTALEKLTGWSRGEVVGKMLVGEVFGSCCKLKGPNSLTKFMIALHNAIGGIDTDKLPFSFFDRNEKNVQTLLTANKRVNMKGDIIGAFCFLQIASPELQPSLKVQKQQEKKSFARMKELAYICQEIKNPLSGIHFTNSLLENTDLTEDQQQFLETSAACEKQILKIIRDIDLESIENGSLELEKAEFLLGSVINAVVSQAMLLLRERNLQLLRDIPEEIKTLAVYGDQARIQQVLADFLLNMVRYAPSSAGWVEIHVCPTLKQISDGHTLVHTEFRYLERVLQTRMLGLQHPPRSFLNCKLTLVMLHREGMVPKIQFQGLSVCQGRLIWLSFPENTTVALYPLTIWFLLLHRHQSRSITHT

SEQ ID NO: 7151 - protein, 418 aa, Chromobacterium violaceum ATCC 12472; identical to SEQ ID NO: 3267

SEQ ID NO: 7152 - protein, 55 aa, Passiflora biflora
WEYQVGPSVGIDAGDHIWCSRYILERITEQVGVVLTLDPKPIEGDWNGAGCHTNY

SEQ ID NO: 7153 - protein, 1144 aa, Populus tremula
MASQSQRQSNQPAHNQAQSSGTSNMRQHHHPTESVSKAIAQYTVDAQLHAVFEQSGGTGKSFDYSKSVRTPNQSVPEEQITAYLSKIQRGGHIQPFGCMIAADEQSFRVIAYSENAKDMLGLTPQSVPSLEKQEILFVGADVRILFRPSSAVLLEKAFGAREITLLNPIWIHSKNSGKPFYAILHRIDVGIVIDLEPARTEDPALSIAGAVQSQKLAVRAISQLQSLPGGDIKLLCDTVVDSVRELTGYDRVMVYKFHEDEHGEVVAENKRVDLEPYIGLHYPSTDIPQASRFLFKHNRVRMIVDCHAIPVSVIQDEGLMQPLCLVGSTLRAPHGCHAQYMENMGSIASLAMAVIIYGNDEEAIGGRNSMRLWGLVVCHHTSARCIPFPLRYACEFLMQAFGLQLNMELQLASQLLEKHVLRTQTLLCDMLLRDSPTGIVTQSPSIMDLVKCDGAALYYQGQYYPLGVTPTEAQIKDIVEWLLTLHGDPTGLSTDSLADAGYPGAAFLGDAVCGMAVAYIAERDFLFWFRSHTAKEVKWGGAKHHPEDKDDGQRMHPRSSFKAFLEVVKSRSLPWENAEMDAIHSLQLILRDSFRDAEATNSKAVVHNQLKDMELQGMDELSSVAREMVRLIETATAPIFAVDVDGRINGWNAKVAELTGLSVEEAMGKSLVHDLVYKEYEEIVDKLIHRAVKGEEDKNVEIKLRTFCSEHQKKAVFVVVNACSSKDYMDNIVGVCFVGQDVTGQKVVMDKYVLIQGDYKAIVHSPNPSIPPIFASDENTCCLEWNTALEKLTGWSRGEVVGKMLVGEVFGSCCKLKGPDALTKFMIALHNAIGGIDTDKLPFSFFDRNEKNVQTLLTANKRVNMNIIGAFCFLQIASPELQPSLKVQKQQEKKSFARMKELAYICQEIKNPLSGIHFTNSLLENTDLTEDQQQFLETSAACEKQILKIIRDIDLESIENGSLELEKAEFLLGSVINAVVSQAMLLLRERNLQLLRDIPEEIKTLAVYGDQARIQQVLADFLLNMVRYAPSSAGWVEIHVCPTLKQISDGHTLVHTEFRYLERVLQTRMLGLQHPPRSFLNCKLTLVMLHREGMVPKIQFQGLSVCQGRLIWLSFPENTTVALYPLTIWFLLLHRHQSRSITHT

SEQ ID NO: 7154 - protein, 1146 aa, Populus tremula
MASQSQRQSNQPAHNQAQSSGTSNMRQHHHPTESVSKAIAQYTVDAQLHAVFEQSGGTGKSFDYSKSVKTPNQSVPEEQITAYLSKIQRGGHIQPFGCMIAANEQSFRGIAYSENAKNMLGLTPQSVPSLEKQEILFVGGDVRIFFRPSSAVLLEKTFGAREITLLNPIWIHSKNSGKPFYAILHRIDVGIVIDLEPARTEDPALSIAGAVQSQKLAVRAISQLQSLPGGDIKLLCDTVVDSVRELTGYDRVMVYKFHEDEHGEVVAENKRVDLEPYIGLHYPSTDIPQASRFLFKQNRVRMIVDCHAIPVSVIQDEGLMQPLCLVGSTLRAPHGCHAQYMENMGSIASLAMAVIIYGNDEEAIGGRNSMRLWGLVVCHHTSARCIPFPLRYACEFLMQAFGLQLNMELQLASQLLEKHVLRTQTLLCDMLLRDSPTGIVTQSPSIMDLVKCDGAALYYQGQYYPLGVTPTEAQIKDIVEWLLTLHGDPTGLSTDSLADAGYPGAAFLGDAVCGMAVAYIAERDFLFWFRSHTAKEVKWGGAKHHPEDKDDGQRMHPRSSFKAFLEVVKSRSLPWENAEMDAIHSLQLILRDSFRDAEATNSKAVVHNQLKDMELQGMDELSSVAREMVRLIETATAPIFAVDVDGRINGWNAKVAELTGLSVEEAMGKSLVHDLVYKEYEEIVDKLIHRAVKGEEDKNVEIKLRTFCSEHQKKAVFVVVNACSSKDYMDNIVGVCFVGQDVTGQKVVMDKYVLIQGDYKAIVHSPNPSIPPIFASDENTCCLEWNTALEKLTGWSRGEVVGKMLVGEVFGSCCRLKGPDALTKFMIALHNAIGGIDTDKLPFSFFDRNEKNVQTLLTANKRVNIKGDIIGAFCFLQIASPELQQSLKVQKQQEKKSFARMKELAYICQEIKNPLSGIHFTNSLLENTDLTEDQQQFLETSAACEKQILKIIRDIDLESIENGSLELEKAEFLLGSVINAVVSQAMLLLRERNLQLLRDIPEEIKTLAVYGDQARIQQVLADFLLNMVIYTQSSAGWVEIHVCPTLKQISDGHTLVHTEFRYLERVLQTRMLGLQHPPRSFLNCKLTLIKLHREGMVPKIQFQGLSVCQGRLIWLSFPENTTVALYPLTIWFLLLHRHQSRSITHT

SEQ ID NO: 7155 - protein, 417 aa, Physcomitrella patens subsp. patens
MADSEGQDAGTTVSRPSAGRRDPYEVLGLSRDASEQQIKSTYRKLALKYHPDKNTGNPEAAEKFKEVAYSYGILSDPEKRRQYDNAGFDAVDLEGLDMELDLSNLGTVNTMFAALFSKLGVPIKTTISATVLEEALNGTVTIRPLPLGRAVNDKVEKQGAHFFGITISEAQAEAGVVIRVVSSVQSKFKLLYFEQEENGGLGLALQEDSVKTGKVTSAGFYFLHFQVYRLDPTVNALAIAKDPDAAFFKRLEGLQPCEMSELKAGTHIFAVYGDNFFKSASYTIEAICAESCLETAVKLKEVEAQILLKRNELRQFETEYREVLARFQAVTNKYTQEKQVVEELLKTREKIQESFTSVPSAPKKVSSSNTAKGSGEDSLLSADESESPTSGLNAEKSKKSNKWFNLNFKTSMGSTGK

SEQ ID NO: 7156 - protein, 1146 aa, Populus tremula
MASQSQRQSNQPAHNQVQSSGTSNMRQHHHPTESVSKAIAQYTVDAQLHAVFEQSGGTGKSFDYSKSVRTPNQSVPEEQITAYLSKIQRGGHIQPFGCMIAADEQSFRVIAYSENAKDMLGLTPQSVPSLEKQEILFVGADVRILFRPSSAVLLEKAFGAREITLLNPIWIHSKNSGKPFYAILHRIDVGIVIDLEPARTEDPALSIAGAVQSQKLAVRAISQLQSLPGGDIKLLCDTVVDSVRELTGYDRVMVYKFHEDEHGEVVAENKRVDLEPYIGLHYPSTDIPQAPRFLFKQNRVRMIVDCHAIPVSVIQDEGLMQPLCLVGSTLRAPHGCHAQYMENMGSIASLAMAVIIYGNDEEAIGGRNSMRLWGLVVCHHTSARCIPFPLRYACEFLMQAFGLQLNMELQLASQLLEKHVLRTQTLLCDMLLRDSPTGIVTQSPSIMDLVKCDGAALYYQGQYYPLGVTPTEAQIKDIVEWLLTLHGDPTGLSTDSLADAGYPGAAFLGDAVCGMAVAYIAERDFLFWFRSHTAKEVKWGGAKHHPEDKDDGQRMHPRSSFKAFLEVVKSRSLPWENAEMDAIHSLQLILRDSFRDAEATNSKAVVHTQLKDMELQGMDELSSVAREMVRLIETATAPIFAVDVDGRINGWNAKVAELTGLSVEEAMGKSLVHDLVYKEYEEIVDKLIHRAVKGEEDKNVEIKLRTFCSEHQKKAVFVVVNACSSKDYMDNIVGVCFVGQDVTGQKVVMDKYVLIQGDYKAIVHSPNPSIPPIFASDENTCCLEWNTALEKLTGWSRGEVVGKMLVGEVFGSCCRLKGPDALTKFMIALHNAIGGIDTDKLPFSFFDRNEKNVQTLLTANKRVNIKGDIIGPFCFLQIASPELQQSLKVQKQQEKKSFARMKELAYICQEIKNPLSGIHFTNSLLENTDLTEDQQQFLETSAACEKQILKIIRDIDLESIENGSLELEKAEFLLGSVINAVVSQAMLLLRERNLQLLRDIPEEIKTLAVYGDQARIQQVLADFLLNMVRYAPSSAGWVEIHVCPTLKQISDGHTLVHTEFRYLERVLQTRMLGLQHPPRSFLNCKLTLVMLHREGMVPKIQFQGLSVCQGRLIWLSFPENTTVALYPLTIWFLLLHRHQSRSITHT

SEQ ID NO: 7157 - protein, 1144 aa, Populus tremula
MASQSQRQSNQPAHNQAQSSGTSNMRQHHHPTESVSKAIAQYTVDAQLHAVFEQSGGTGKSFDYSKSVRTPNQSVPEEQITAYLSKIQRGGHIQPFGCMIAADEQSFRGIAYNENAKNMRGLTPQSVPSLEKQEILFVGGDVRILFRPSSAVLLEKTFGAREITLLNPIWIHSKNSGKPFYAILHRIDVGIVIDLEPARTEDPALSIAGAVQSQKLAVRAISQLQSLPGGDIKLLCDTVVDSVRELTGYDRVMVYKFHEDEHGEVVAENKRVDLEPYIGLHYPSTDIPQASRFLFKQNRVRMIVDCHAIPVSVIQDEGLMQPLCLVGSTLRAPHGCHAQYMENMGSIASLAMAVIIYGNDEEAIGGRNSMRLWGLVVCHHTSARCIPFPLRYACEFLMQAFGLQLNMELQLASQLLEKHVLRTQTLLCDMLLRDSPTGIVTQSPSIMDLVKCDGAALYYQGQYYPLGVTPTEAQIKDIVEWLLTLHGDPTGLSTDSLADAGYPGAAFLGDAVCGMAVAYIAERDFLFWFRSHTAKEVKWGGAKHHPEDKDDGQRMHPRSSFKAFLEVVKSRSLPWENAEMDAIHSLQLILRDSFRDAEATNSKAVVHNQLKDMELQGMDELSSVAREMVRLIETATAPIFAVDVDGCINGWNAKVAELTGLSVEEAMGKSLVHDLVYKEYEEIVDKLIHRAVKGEEDKNVEIKLRTFCSEHQKKAVFVVVNACSSKDYMDNIVGVCFVGQDVTGQKVVMDKYVLIQGDYKAIVHSPNPSIPPIFASDENTCCLEWNTALEKLTGWSRGEVVGKMLVGEVFGSCCRLKGPDALTKFMIALHNAIGGIDTDKLPFSFFDRNEKNVQTLLTANKRVNINIIGAFCFLQIASPELQPSLKVQKQQEKKSFARMKELAYICQEIKNPLSGIHFTNSLLENTDLTEDQQQFLETSAACEKQILKIIRDIDLESIENGSLELEKAEFLLGSVINAVVSQAMLLLRERNLQLLRDIPEEIKTLAVYGDQARIQQVLADFLLNMVRYAPSSAGWVEIHVCPTLKQISDGHTLVHTEFRYLERVLQTRMLGLQHPLRSFLNCKLTLVMLHREGMVPKIQFQGLSVCQGRLIWLSFPENTTVALYPLTIWFLLLHRHQSRSITHT

SEQ ID NO: 7158 - protein, 377 aa, Pseudomonas aeruginosa PAO1
MAKRDFYEVLGVERGASEADLKKAYRRLAMKYHPDRNPGDKEAEDKFKEANEAYEVLSDASKRAAYDQYGHAGVDPNMGGGAGAGFGGASFSDIFGDVFSDFFGGGGARGGSRGGAQRGADLRYTLDLDLEEAVRGTTVTIRVPTLVGCKTCNGSGAKPGTTPVTCTTCGGIGQVRMQQGFFSVQQTCPRCHGTGKMISDPCGSCHGQGRVEEQKTLSVKVPAGVDTGDRIRLTGEGEAGSMGGPAGDLYVVVNVREHPIFQRDGKHLYCEVPISFADAALGGELEVPTLDGRVKLKIPESTQTGKLFRLRGKGVAPVRGGGAGDLMCKVVVETPVNLDKRQRELLEEFRKSLQSDTSHSPKASGWFEGMKRFFDDL

SEQ ID NO: 7159 - protein, 396 aa, Methanococcoides burtonii DSM 6242
MSTTRDYYEILGVSKDASDTELKKAYRKLAMKFHPDKNKEADAEEKFKEISEAYAVLSDAEKKAQYDRFGHAGIDGRYSTEDIFRNADFGDFGDLGDIFGSIFGGGGGFGGFGGGGRRRQGPTRGSDLRYDLGVTLEQAAFGEKVHINVPRAENCETCGGTGAKEGTSPKTCATCRGSGQVTHARRTPLGNFMTTTTCDACHGKGQVIESPCPVCRGSGKQKKVRKMGVSIPKGADTGLRLKMSGEGEAGSPGAPSGDLYIVIHVKQHDEFERIGDDIVYGIPISFSQAALGAEIKVPTLHGKVKMKIKPGTQTHSILRLKGKGMPRLHGHGQGDQLVKVIVETPTDLTGKQKELLDEFDRLSTGNSKGSKGKGFFDKVKDTFESAISTISPGTVE

SEQ ID NO: 7160 - protein, 469 aa, Glycine max
  misc_feature (101)..(101): Xaa can be any naturally occurring amino acid
MAPSISDEMPSTTTSLLRRNRWLPSSIKLKTTLFSELSGAVGDLGTYIPIVLALSLVNNLDLTTTLVFTALYNIATGLLFGLPMPVQPMKSIAAVAISAAXPLTIPQISAAGLSVAAVLLLLGATGLMSVLYRYLPLPVVRGVQLSQGLSFAFSAVKYIRYDQDLAKSKSGPPRPWLAVDGVAVALAAVLFLVLTTGAGDEPPPPPPQQQEEEIDDRREKVRRRLRVLSTIPAALIVFLFGLVLCFIRDPSIFGDLRFGPSRISLIKITWEDLKIGFVSAAIPQIPLSVLNSVIAVCKLSGDLFPEREASAMHVSVSVGLMNFVGCWFGAMPCCHGAGGLAGQYRFGGRSGASVVFLGIAKLVLALVFGNSLGRILGQFPIGILGVLLLFAGIELAMAAKDMNTKQESFVMLVCAAVSLTGSSAALGFFVGIVLYLLLKLREVECRGFGFCGSNHTKSSLEDEQASLIA

SEQ ID NO: 7161 - protein, 259 aa, Oryza sativa
MTGFGSPCGACKFLRRKCVRGCVFAPYFCHEQGAAHFAAIHKVFGASNVSKLLAHLPLADRPEAAVTISYEAQARLRDPIYGCVAHIFALQQQVMTLQAQLASLKAAAAQGIHHQDVGATTKGGYMSAAATAADDQLGYGGYNQWCGSNGGGAPAASQPGAYSSNGGAGHGHDSITALLAAGSDYMQHSLYHAFEHSEGAGAVDDGHAAAAAFEAAAESSSCGMAASFAADESVWRSSSSGYQDCEDLQSVAYAYLNRS

SEQ ID NO: 7162 - protein, 577 aa, Mesotaenium caldariorum
VFGLQLNMEVELSSQLREKHILRTQTLLCDMLLRDAPMGIVSQSPNITDLVKCDGAALFYHGRAWLLGVTPSEAQVRDIAAWLLDSHKDSTGLSTDSLADAGYPNADSLGVSVCGMAAARITSKDFLFWFRSHAQKEVKWAGAKQEPGDRDREEGEEGGRMHPRSSFQAFLEVVKQRSLPWEDVEMDAIHSLQLILRGSFQDMEGEGGGSQQGNKRMINARLNDLKLQGMDELSTVANEMVRLIETATAPILAVDSLGCVNGWNAKVSELTGLPVSEAMGKSLVKDLVQRESREAVERVLYMALNGEEEQNVEIQLKTWGPQLHSHGGTVILVVNACASRDVSESVVGVCFVGQDVTGEKEVLDKFIRIQGDYTTIVRSRNSLIPPIFGSDEYGCCTEWNPAMEKLTGVRREDVIGRMLTGDVFGSALRLRGSDGLTQFMIVLNRAMDGADTDKFPFTFYDREGKCVDSLLTANKRTDADGAITGVFCFLHTVSLELQQALSVQKAAERVAEAKAKELAYIRQEIQNPLDGIHFARSFIEHTELSEDQKQLMETSATCEKQLRRILDDMDLESIEEG

SEQ ID NO: 7163 - protein, 218 aa, Vitis vinifera
MVKLTLIARVTDGLPLAEGLDDGRDLKDAEFYKQQVKALFKNLSKGQNEPSRMSIETGPYIFHYIIEGRVCYLTMCDRAYPKKLAFQYLEDLKNEFERVNGNQIETAARPYAFIKFDTFIQKTKKLYQDTRTQRNIAKLNDELYEVHQIMTRNVQEVLGVGEKLDQVSQMSSRLTSESRIYADKARDLNRQALIRKWAPVAIVFGVVFLLFWIRKKIW

SEQ ID NO: 7164 - protein, 1142 aa, Mesotaenium caldariorum
MSTSRMSQSSGESTAKTKREVRVAQATADAKLNTAFEASAAVGGSFDYTKSVGASLNAGSEAIPSSAVTAYLQRMQRGGITQTFGCMLMVEEGSFRVRAFSENAGEMLDLVPQAVPSMGQQSLIAVGTDIRTLFTSASVSLLEKAAMATDVSVMNPVSLQSRAAKKPFFAVLHRIDVGLVVDLEPVRPSDPNVSAAGAMQSHKLAAKAISRLQSLPGGDIGLLCDAVVEEVRELTGYDRVMAYKFHEDEHGEVIAEIRRSDLEPYLGLHYPATDIPQAARFLFMKNRVRIICDCSAPPVKVIQDPTMKHPISLAGSTLRGVHGCHAQYMANMGSVASLVMAVIINDNSSEEGATAAGGILHKGRKLWGLVVCHHSSPRYVPFPLRSACEFLMQVFGLQLNMEVELSSQLREKHILRTQTLLCDMLLRDAPMGIVSQSPNITDLVKCDGAALFYHGRAWLLGVTPSEAQVRDIAAWLLDSHKDSTGLSTDSLADAGYPNADSLGVSVCGMAAARITSKDFLFWFRSHAQKEVKWAGAKQEPGDRDREEGEEGGRMHPRSSFQAFLEVVKQRSLPWEDVEMDAIHSLQLILRGSFQDMEGEGGGSQQGNKRMINARLNDLKLQGMDELSTVANEMVRLIETATAPILAVDSLGCVNGWNAKVSELTGLPVSEAMGKSLVKDLVQRESREAVERVLYMALNGEEEQNVEIQLKTWGPQLHSHGGTVILVVNACASRDVSESVVGVCFVGQDVTGEKEVLDKFIRIQGDYTTIVRSRNSLIPPIFGSDEYGCCTEWNPAMEKLTGVRREDVIGRMLMGDVFGSALRLRGSDGLTQFMIVLNRAMDGADTDKFPFTFYDREGKCVDSLLTANKRTDADGAITGVFCFLHTVSLELQQALSVQKAAERVAEAKAKELAYIRQEIQNPLDGIHFARSFIEHTELSEDQKQLMETSATCEKQLRRILDDMDLESIEEGYLELETGEFMMATVMNSVVSQGMVQSSKKGLQLFCDTPPEFKSMCVFGDQVRLQQVLADFLMNAVQFTPASGWVEIKVVPNVRSLPGGITMAHMEFRVTHSGEGLPEDLVHQMFDRADAHSKSQEGLGLSMCRKIVRLMSGEVRYVREPGKSYFLVLLDLPLAQREDAGSAM

SEQ ID NO: 7165 - protein, 203 aa, Echinacea simulata
DARRDDLNAAIFNLKEIESYDDYERSLLISQMSFEKTFGMSSVFIESTLMENGGLAESANPATMINEAIHVISCGYEEKTAWGKEIGWIYGSVTEDILTGFKMHCRGWRSIYCMPVRPAFRGSAPINLSDRLHQVLRWALGSVEIFLSRHCPLWYGWGGGRLKLLQRFAYINTIVYPFTSLPLVAYCTLPAICLLTGKFIIPT

SEQ ID NO: 7166 - protein, 387 aa, Blastopirellula marina DSM 3645
MAVKADYYEVLGVSRTANGDEISKAYRKLAIKFHPDSHPDDENASLKFKQAAEAYEVLSDAEKRGRYDQYGHAGVEGGHRQFSDAEDIFEAFGDIFGGGVFGDLFGGRGRTRSGRRVSKGADIKAQVTLDLEEAARGVEKTITFDRREPCETCKGSGAAAGSQAERCTRCGGHGQVVQQAGILRVQTTCPSCAGAGVKITDPCRSCRGQGFQNRRVELDVNIPAGVDDQMRVRLSGEGQPSPNGGPAGDCYCFISLRRHKLFERDGEHLILKMPISYTQAVLGAQIEVPTLIDGAHMLTVPKGTASGEVFKVRGQGMPDPHGRGKGDLYVQTYIEVPKKLDTRQEELLRELAEFEHTNVSPHRKSFLESIRDYLFSSGDEDEAVKEK

SEQ ID NO: 7167 - protein, 357 aa, Picrophilus torridus DSM 9790
MAKDYYAILGVDRNASQDDIKKAFRELAKKYHPDANPGNKEAEEKFKEIAEAYEVLSDPQKRKQYDETGTTDFNAGSGFNWQDFTHFDDINDIFNQFFGGNFGDTFFGGYTNQPDLDIYLRVNISLEDAYYGASKNVKYRRNAMCEHCSGTGAENKVLITCPTCHGSGQERITRGQGFFRMVTVTECRTCHGRGKIPQKPCTVCHGTGTVSKNEDISVNIPKGADTNLKLRLKNMGNSYGGVTGDLYIVLIVNNPPGIRRSGQDIYVEHTIDFPEAALGGEEEIKLFRESYNLKIPAGTQPGEILKIKGAGMPRINGHGSGDLNVIIKIEVPKHLTSRQKELLEEFRNEKKKSWFHF

SEQ ID NO: 7168 - protein, 63 aa, Protea aurea subsp. aurea
  misc_feature (30)..(31): Xaa can be any naturally occurring amino acid
  misc_feature (40)..(47): Xaa can be any naturally occurring amino acid
MPGQWEYQVGPSVGIEAGDHIWCSRYLLEXXTEQAGVVLXXXXXXXXGDWNGAGCHTNYSTKS

SEQ ID NO: 7169 - protein, 59 aa, Passiflora biflora
WEYQVGPSVGIDAGDHIWCSRYILERITEQVGVVLTLDPKPIEGDWNGAGCHTNYSTKS

SEQ ID NO: 7170 - protein, 243 aa, Vitis vinifera
MAAGEEKSNDFYAVLGLKKECTASELRNAYKRLALMWHPDRCSSSGNSKFVEEAKKKFQAIQEAYSVLSDANKRFLYDVGAYDSDDDENGMGDFLNEMAVMMSQTKSNENGKESFEELQELFEDMFQRDVDAFNSASHHPMNSFPSSTSTSSYCESSNANNKRNSAEMGSGRMMSAGESSAFDAHFQSFCFGAARQGDFRRGKGARGGIPGGANGRRRRTGRKQKVSSGHDVSSNDYYSHVYT

SEQ ID NO: 7171 - protein, 75 aa, Passiflora caerulea
GTNGEVMPGQWEYQVGPSVGIDAGDHIWCSRYILERITEQAGVVLTLDPKPIEGDWNGAGCHTNYSTKSMREDGG

SEQ ID NO: 7172 - protein, 60 aa, Passiflora candida
VMPGQWEYQVGPSVGIDAGDHIWCSRYILERITEQAGVVLSLDPKPIEGDWNGAGCHTNY

SEQ ID NO: 7173 - protein, 377 aa, Klebsiella pneumoniae subsp. pneumoniae MGH 78578
MAKQDYYEILGVSKTAEEREIKKAYKRLAMKYHPDRNQGDKEAEAKFKEIKEAYEILTDAQKRAAYDQYGHAAFEQGGMGGGGGFGGGADFSDIFGDVFGDIFGGGRGRQRAARGADLRYNMELTLEEAVRGVTKEIRIPTLEECDVCHGSGAKAGSKPQTCPTCHGAGQVQMRQGFFAVQQTCPHCQGRGTLIKDPCNKCHGHGRVEKTKTLSVKIPAGVDTGDRIRLAGEGEAGEHGAPAGDLYVQVQVKQHAIFEREGNNLYCEVPINFTMAALGGEIEVPTLDGRVNLKIPGETQTGKLFRMRGKGVKSVRGGAQGDLLCRVVVETPVGLNEKQKQLLKELQESFGGPTGENNSPRSKSFFDGVKKFFDDLTR

SEQ ID NO: 7174 - protein, 60 aa, Passiflora capsularis
WEYQVGPSVGIDAGDHIWCSRYILERITEQAGVVLSLDPKPIEGDWNGAGCHTNYSTKSR

SEQ ID NO: 7175 - protein, 1144 aa, Populus tremula
MASQSQRQSNQPAHNQAQSSGTSNMRQHHHPTESVSKAIAQYTVDAQLHAVFEQSGGTGKSFDYSKSVRTPNQSVPEEQITAYLSKIQRGGHIQPFGCMIAADEQSFRGIAYNENAKNMRGLTPQSVPSLEKQEILFVGGDVRILFRPSSAVLLEKTFGAREITLLNPIWIHSKNSGKPFYAILHRIDVGIVIDLEPARTEDPALSIAGAVQSQKLAVRAISQLQSLPGGDIKLLCDTVVDSVRELTGYDRVMVYKFHEDEHGEVVAENKRVDLEPYIGLHYPSTDIPQASRFLFKQNRVRMIVDCHAIPVSVIQDEGLMQPLCLVGSTLRAPHGCHAQYMENMGSIASLAMAVIIYGNDEEAIGGRNSMRLWGLVVCHHTSARCIPFPLRYACEFLMQAFGLQLNMELQLASQLLEKHVLRTQTLLCDMLLRDSPTGIVTQSPSIMDLVKCDGAALYYQGQYYPLGVTPTEAQIKDIVEWLLTLHGDPTGLSTDSLADAGYPGAAFLGDAVCGMAVAYIAERDFLFWFRSHTAKEVKWGGAKHHPEDKDDGQRMHPRSSFKAFLEVVKSRSLPWENAEMDAIHSLQLILRDSFRDAEATNSKAVVHNQLKDMELQGMDELSSVAREMVRLIETATAPIFAVDVDGCINGWNAKVAELTGLSVEEAMGKSLVHDLVYKEYEEIVDKLIHRAVKGEEDKNVEIKLRTFCSEHQKKAVFVVVNACSSKDYMDNIVGVCFVGQDVTGQKVVMDKYVLIQGDYKAIVHSPNPSIPPIFASDENTCCLEWNTAMEKLTGWSRGEVVGKMLVGEVFGSCCKLKGPDALTKFMIALHNAIGGIDTDKLPFSFFDRNEKNVQTLLTANKRVNINIIGAFCFLQIASPELQPSLKVQKQQEKKSFARMKELAYICQEIKNPLSGIHFTNSLLENTDLTEDQQQFLETSAACEKQILKIIRDIDLESIENGSLELEKAEFLLGSVINAVVSQAMLLLRERNLQLLRDIPEEIKTLAVYGDQARIQQVLADFLLNMVRYAPSSAGWVEIHVCPTLKQISDGHTLVHTEFRYLERVLQTRMLGLQHPLRSFLNCKLTLVMLHREGMVPKIQFQGLSVCQGRLIWLSFPENTTVALYPLTIWFLLLHRHQSRSITHT

SEQ ID NO: 7176 - protein, 81 aa, Oryza sativa
  misc_feature (70)..(70): Xaa can be any naturally occurring amino acid
VSLFGTDPVNPSIELGPEFKKVANFLARFKSIPSIVELDTLKVSGDVWSGSGVSLKVKVTITVISGKLEXIQDGAVLLNKD

SEQ ID NO: 7177 - protein, 307 aa, Triticum aestivum
  misc_feature (270)..(270): Xaa can be any naturally occurring amino acid
MAAPAFGGRRRPASAAALLAVATLVVVFLAGPAMAAGNKTGQVTVFWGRNKAEGTLREACDSGLYTMVIMSFLDVYGPNGKYHLDLSGHPIAGIGDDIKHCQFVGVPVSLSIGGFGSGYSLPSKQAALDLFDYLWNAFFGGSKPGVHRPFGDVWLDGVDLFLEHGTNPTDRYDVLALELAKHNIRGGPGKPLHLTATPRCEFPPAGYLKRALDTGIFERVHVRIYDDADCEGYWHLAWDRWTAAYPATRFYVGMTASETTHGWVHPKNVXYDVAPSVQKADNYGGFMIWERYADTLSKYTSMVKYYA

SEQ ID NO: 7178 - protein, 676 aa, Zea mays
MACNRRRKLLCACLLLACAAPAAAAAVNISVYWGQNSNEGSLGQTCSSGRYALVAMAFLSTFGSGQTPVLNLAGHCDPASGGCTALAADIAACQARGVRVLLSIGGGAGSYNLSSASDAESVATYLWDNFLGGTSSSRPLGDAVLDGIDMDIEISPSSHFDGLARNLTSLYGGDRRGRKYLLTAAPQCPYPDASLGAALATGLFDHVWVQFYNNPGCEYQQKDGDGVANLAASWKAWTQSLPSSASVFLGLPASPAAAGSGYVPPDDLVSRVLPAVSGSANYGGLMLWNRYYDNSTGYSARILSSNIIAGTAGVSGLCAIIALAALMWWYKRRYGMVIPWRRGVSGVESFLQKQGALLHPKGYTYSEVKRMTRSFAHKLGQGGYGAVYRGSMPDGREVAVKMLTGMLEGDGEEFMNEVASISRTSHVNIVTLVGYCLQGPKRALLYEYMPNGSLERYTFGSSSGEDALSWDRLFGIVVGVARGLEYLHTGCNTRIVHFDIKPHNILLDQDMCPKISDFGLAKLCGQKASRVSIAGARGTVGYIAPEVFSRSYEAVGSKADVYSYGMVVLEMVGARKNVHVSATDDGGNSSSSRYFPQWLYENLDQFCRPTTTSNGEIRGDDDDATEVLLVRKMVVVGLWCIQSKPDSRPSMGQVLEMLESNAADLQLPPKALCTAY

SEQ ID NO: 7179 - protein, 82 aa, Oxalis laxa var. hispidissima
INISGTNGEVMPGQWEYQVGPSVGIEAGDHIWASRYILERITEQAGVVLTLDPKPIDGDWNGAGCHTNYSTKSMREEGGFEV

SEQ ID NO: 7180 - protein, 203 aa, Echinacea simulata
DARRDDLNAAIFNLKEIESYDDYERSLLISQMSFEKTFGMSSVFIESTLMENGGLAESANPATMINEAIHVISCGYEEKTAWGKEIGWIYGSVTEDILTGFKMYCRGWRSIYCMPVRPAFKGSAPINLSDRLHQVLRWALGSVEIFLSRHCPLWYGWGGGRLKLLQRFAYINTIVYPFTSLPLVAYCTLPAICLLTGKFIIPT

SEQ ID NO: 7181 - protein, 720 aa, Saccharomyces cerevisiae
MTQQEYRSPSQRLSKGRSMSLPKIFARNLRSLQNNAPPGKNINVNCLNVNSCSLSASPSSQINMACNGNKQDLPIPFPLHVECNDSWSSSKLNKFKSMFNHNRSKSSGTTDASTSEKGTHKREPRSTIHTELLQSSIIGEPNVHSTTSSTLIPNEAICSTPNEISGSSSPDAELFTFDMPTDPSSFHTPSSPSYIAKDSRNLSNGSLNDINENEELQNFHRKISENGSASPLANLSLSNSPIDSPRKNSETRKDQIPMNITPRLRRAASEPFNTAKDGLMREDYIALKQPPSLGDIVEPRRSRRLRTKSFGNKFQDITVEPQSFEKIRLLGQGDVGKVYLMRERDTNQIFALKVLNKHEMIKRKKIKRVLTEQEILATSDHPFIVTLYHSFQTKDYLYLCMEYCMGGEFFRALQTRKSKCIAEEDAKFYASEVVAALEYLHLLGFIYRDLKPENILLHQSGHVMLSDFDLSIQATGSKKPTMKDSTYLDTKICSDGFRTNSFVGTEEYLAPEVIRGNGHTAAVDWWTLGILIYEMLFGCTPFKGDNSNETFSNILTKDVKFPHDKEVSKNCKDLIKKLLNKNEAKRLGSKSGAADIKRHPFFKKVQWSFLRNQDPPLIPALNDNGCELPFILSCNKHPKRNSVSEQETKMFCEKVANDDEIDEADPFHDFNSMSLTKKDHNILTYSENYTYGKILYKATCTRPRHNSSHRSFFKDIIPEL

SEQ ID NO: 7182 - protein, 423 aa, Zea mays
MAQAVVPAMQCRVGVKAAAGRVWSAGRTRTGRGGASPGFKVMAVSTGSTGVVPRLEQLLNMDTTPYTDKVIAEYIWVGGSGIDIRSKSRTISKPVEDPSELPKWNYDGSSTGQAPGEDSEVILYPQAIFKDPFRGGNNVLVICDTYTPQGEPLPTNKRHRAAQIFSDPKVAEQVPWFGIEQEYTLLQKDVNWPLGWPVGGFPGPQGPYYCAVGADKSFGRDISDAHYKACLYAGINISGTNGEVMPGQWEYQVGPSVGIEAGDHIWISRYILERITEQAGVVLTLDPKPIQGDWNGAGCHTNYSTKTMREDGGFEEIKRAILNLSLRHDLHISAYGEGNERRLTGKHETASIGTFSWGVANRGCSIRVGRDTEAKGKGYLEDRRPASNMDPYIVTGLLAETTILWQPSLEAEALAAKKLALKV

SEQ ID NO: 7183 - protein, 686 aa, Dryopteris filix-mas
TPSEFQVQDLAEWLLGSSEEIASSGVTCTDSLAEAGYPGATALGDAVCGMAAARITPNSDFLFWFRSHTAKEVFWGGAEHDPQARDDDSRLLPRSSFKAFLEIVKRRSLPWEEVEVDAIRSLQLILREDLEEFCAAAAGADVEDVDSLVPLSIKLSLKESEEMGGAEDSKKLERATSAAAGGTGGGGWEKMSLPSSLAQEWMEAIRGTGDGGASGGVPFDWDAISVFQQTSFVVVDALKPDLPIIFASTGFFNLTGYTSREVIGGNCRFLQGPDTNPEDVASIRDAVVPRGTGTFCGRLLNYRKDGSNFWNLLTIAPIKDDTGTIVKLVGVQLEVSKYTEGSRANRLRPNGLPQSLIKYDVRHQDKVSALVAQIVAALTKPYKVEPPRPSYAMRASLTGQTIQPLSPGRAAAARPYSASDVPQTAAIPREGGGRRRHRSSTFLSLLGMEEKDSEEDQFPEPELIMMDNASVGRPGSLDDRERTRRGIDLATTLERIGHSFVITDPRLPDNPIIFASDQFLELTEYSREEVLGENCRFLQGRDTDLKAVQLIRDAVKEGRDITVQLLNYTRGGRPFWNLFHLQAMRDKKGNLQYFIGVQQETDTLDRVEQEKAEVVRATAQNVDVAARELPDANLTPDHLWERHSKVVTPLPHSKINSPCWYAIRKVQRRLRRGERLGLKHFRPIKP

SEQ ID NO: 7184 - protein, 341 aa, Physcomitrella patens subsp. patens
MGVDYYSVLKVPRTATVDDLKRAYRKLAMRWHPDKNPNSKKEAEAKFKQISEAYDVLSDPQKRQIYDQEGEEGLKGGMPPPGSSHGFANGGAAQSFRFNPRNAEDIFAEFFGSASPFGGIGGMGGRGGGMYGGFGSGDSMFRTTDGSQGFRSFGDAPPPQRKAPAVSNKLLCSLEELYKGSTRKMKISRSVPDASGRIVPAEEILTIDIKPGWKKGTKITFAEKGNGQLGVTPGDLVFVIEDKPHMTYKRDGNDLIVSKKISLVEALTGCSFSLLALDGRTLSVSISDVITPGYEKVIPKEGMPVAKESGRKGNLRIKFDVVFPTRLSSEQKSGVKKLLGA

SEQ ID NO: 7185 - protein, 321 aa, Trichoderma atroviride
MPSLTALASALALVPSVFAGWNVNSKQNIAVYWGQNSAGQQSTQQRLSTYCSDANINVIDIALNGITPPMTNFANAGDRCTPFSDNPWLLSCPEIEADIKTCQANGKTILLSLGGDSYTQGGWSSASAAQAAANQVWAMFGPVQSGSSAERPFGSAIVDGFDFDFEATTNNLAAFGAQLKSLSNAAGGKKYYFSAAPQCFFPDAAVGALINAVPMDWIQIQFYNNPCGVSGYTPGTSSQNNYNYQTWDTWAKTSPNPNVKLLVGIPAGPGAGRGYVSGSQLTSVFQYSKGFSSTFAGAMMWDMSQLYQNTGFEAQVVNALR

SEQ ID NO: 7186 - protein, 657 aa, Hypolepis punctata
TPLEFQIQELAEWLLGSSEEIASTGVTCTDSLAEAGYPGAAALGDAVCGLAAARITPNSDFLFWFRSHTAKEVFWGGAEHDPEARDDDSRMLPRSSFKAFLEIVKKRSLPWEEVEVDAIRSLQLILREELEKFCAAAAAAATASASDRDDVDSLVPSSKKLSLKENEEMGTGGGWGKMSLPPSLVQEWMEAIRGGAGDGRASGGGGGDFNWDPTCMFQQTSFVVVDALKPDLPIIFASTGFFNLTGYTSTEVIGANCRLLQGPDTNPEDVASIREALAQDTGTFCRKLLNYRKDGSSFWNLLTIAPIKDDRGSIVKLIGVQLEVSKYTEGSRANRLRPNGLPQSLIKYDVRHRDKVSVFVAELVAALTKPDKVELTKPSSTMQFSLTGQTIKPLSKTAAMPREGGGRRRHGSNTFLSLLGVEKKDPVEDQFPEPRLIMVDDNSVGRPESLDDPERTRRGIDLATTLERIGQSFVITDPRLPNNPIIFASDQFLELTEYSREEVLGNNCSFLQGRDTDANTVQLIRDAVAEQRDVTVQLLNYTRGGRPFWNLFHLHAMRDEKGELQYFIGVQQETVAPRVPEDMPDRVKQVHTTAQNVDVAARELPDANLSPDHLWVRHSKVITPLPHSKMNNSSWYAIRRVQRRVRLGLKHFRPIKP

SEQ ID NO: 7187 - protein, 202 aa, Echinacea tennesseensis
ARRDDLNAAIFNLKEIESYDDYERSLLISQMSFEKTFGMSSVFIESTLIENGGLAESANPATMINEAIHVISCGYEEKTAWGKEIGWIYGSVTEDILTGFKMHCRGWRSIYCMPVRPAFKGSAPINLSDRLHQVLRWALGSVEIFLSRHCPLWYGWGGGRLKLLQRFAYINTIVYPFTSLPLVAYCTLPAICLLTGKFIIPT

SEQ ID NO: 7188 - protein, 331 aa, Zea mays
  misc_feature (184)..(184): Xaa can be any naturally occurring amino acid
  misc_feature (206)..(206): Xaa can be any naturally occurring amino acid
HASAHASAHASAHASGPHASAHASGQFPSMALAMATVLMALGGVAATARAGGGIAIYWGQNGNEGTLAQTCATGNYRFVNVAFLPTFGRGQTPALNLAGHCDPASGGCTGVGADVKACQRMGVKVLLSIGGGVGSYGLSSRADARSVAAYLWDNYLGGGGSESRPLGDAVLDGVDFDIESGGGXMYWDDLARFLKSYSRRGRGRAXRPVYLSAAPQCPFPDASLGTALATGLFDYVWVQFYNNPPCQYSASAGVGSLAQAWAQWTSIRAGRVFLGLPAAPQAAGSGFVPASDLVAQVLPVVKNSTKYGGIMLWSRYYDGLTGYSDAVKSYV

SEQ ID NO: 7189 - protein, 692 aa, Onoclea sensibilis
TPSEFQIQDLVEWLLGSSEDIASSGVTCTDSLAEVGYPGAAALGDAVCGMAAARITPNSDFLFWFRSHTAKEVFWGGAEHDPQARDDDSRLLPRSSFKAFLEIVKRRSLPWEEVEVDAIRSLQLILREDLEEFCAAAAAGADGEDVDSLVPSSKKLSLKEREGSGAENSKKLERATSAAVGAAGGTGGRWEKMLLPSSLAQEWMEAIRGTGDGGASGGGGGVPFDWDAISVFQQTSFVVVDALKLDLPIIYASTGFFNLTGYTSREVIGGNCRFLQGPETNPAVIDSIREALVPQGTGTFCGRLLNYRKDGSSFWNLLTIAPIKDDSGTIVNLIGVQLEVSKYTEGSRENRLRPNGLPQSLIKYDVRHQDKVSALIAQLVAALTKPHKVEPPRPSYTMRFSLTGQTIEPLSPGQAAAAARPCSTSDVPQTTSIPREGRGRRRHRSSTFLSLLGMEEKDSEEDQFPEPELIMVADASVGRLRSSDDPERTRRGIDLATTLERIGHSFVITDPRLPGNPIIFASDQFLELTEYSREEVLGENCRFLQGRDTDRKAVQLIRDAVEEGRDVTVQLLNYTKGGRPFWNLFHLQAMRDKKGNLQYFIGVQQETDTPDRVEHEKAKVVRATAQNVDVAARELPDANLTLDHLWERHSKEVTPLPHSKINSPCWYAIRRVQRRLRRGERLGLKHFRPIKP

SEQ ID NO: 7190 - protein, 607 aa, Oryza sativa
MASAAAPKRCYYEVLGVPRDCSPADIKLAFRRLALSLHPDKQPPGSDVAAATAAFQELQHAHSVLSDPHERSYYDSHRSQILFSDHHPSSGPGRGGGVASASASPVPDLFAFFSSSAFSGFSDSGRGFYKVYGDVFDRVFAQELAYARRMGMPADAVPTPPVIGNLDSPHAQVAAFYSYWLGFGTAMDFGWAAEWDAARGESRRVRRLMEEDNEKATRKARREYNDAVRGLAAFCKKRDKRVVDMALKKKVEEEKRKAEEAARKKEEERRRKERAMAYQEPEWARVDEDEAAVFEDDEEEETRAKRKEELYCVACNKKFKSDKQWKNHEQSKKHRDKVSELRMVFEEEEEALKDAEEEEPEEVDVGFDFQPAQESEESEFSDAAEELADELSEGLEVRDEEEKGDKHLGNGEQKVGSYDETSVLEEMLSRSRRKNRKSGFVAPQEEASPAGAMDDDDDEDTSYEINNVKKKGRRRRAAKKGGTYADNGQGRKSENQPEESRHNNDENGADDKMEGPSSNEDSAAASKEDQQKGKTGNTKKNKKGTEKNTTISSEQKGTSKGKKQKEVSKAPSNDCETCGSTFDSRNKLFSHLEETGHAMLKTRQKNR

SEQ ID NO: 7191 - protein, 297 aa, Zea mays
MATGSSLVPLLLIAVAVAQIVGSQAGSISIYWGQNGGEGTLADTCATGNYRFVNLAFLAAFGNGQPPVLNLAGHCDPTNGGCASLSGDIKSCQSSGVKVMLSIGGGAGSYYLSSAADAKDVATYLWNNFLGGQSSSRPLGDAVLDGIDFDIEGGTNQHWDDLARYLKGYSNSGRRVYLTAAPQCPFPDSWIGGALNTGLFDYVWVQFYNNPPCQYSSGSTTNLADAWKQWLSIPAKQIFLGLPASPQAAGSGFIPADDLKSQVLPLIKNSGKYGGIMLWSKYYDDQDGYSSSVKSDV

SEQ ID NO: 7192 - protein, 370 aa, Oceanobacter sp. RED65
MSKRDYYEVLGVDRQADAKEIKRAYRKLAMKYHPDRNPDDADADAKFKEASEAYEILGDQEKRAAYDQFGHAGVDGSAGAGAGGFGGGNFSDIFGDVFGDIFGGGGGRRGGPQRGNDLKYNLELSLEEAVKGTEKTIKVPTLVDCEVCDGSGAKAGSKPTVCGTCNGQGQVRMQQGFFAVQQTCPTCQGQGTIIKDPCDSCHGQGVKEETKTLNVKIPPGVDNGDRIRLNGEGEAGAMGGPAGDLYVEAHIKPHSIFERDGRNLYCDVPISIADAALGGEIEVPTLDGRVNLKIPAETQSGKLFRLRGKGVLPVRGGPQGDLLCRVMVETPVNLNDKQKEILREFQASLKGEKHSPRKKTWFDNVKAFFE

SEQ ID NO: 7193 - protein, 65 aa, Passiflora cincinnata
GTNGEVMPGQWEYQVGPSVGIDAGDHIWCSRYILERITEQAGVVLSLDPKPIEGDWNGAGCHTNY

SEQ ID NO: 7194 - protein, 65 aa, Passiflora cincinnata
GTNGEVMPGQWEYQVGPSVGIDAGDHIWCSRYILERITEQAGVVLFLDPKPIEGDWNGAGCHTNY

SEQ ID NO: 7195 - protein, 395 aa, Staphylococcus aureus subsp. aureus COL [sequence omitted]

SEQ ID NO: 7196 - protein, 58 aa, Passiflora cinnabarina
WEYQVGPSVGIDAADHIWCSRYILERITEQAGVVLTLDPKPIEGDWNGAGCHTNYSTK

SEQ ID NO: 7197 - protein, 58 aa, Passiflora cirrhiflora
WEYQVGPSVGIDAGDHIWCSRYILERITEQAGVVLSLDPKPIEGDWNGAGCHTNYSTK

SEQ ID NO: 7198 - protein, 95 aa, Oxalis pachyrrhiza
LYAGINISGTNGEVMPGQWEYQVGPSVGIEAGDHIWASRYILERITEQAGVVLTLDPKPIDGDWNGAGCHTNYSTKSMREEGGFEVIKKAILNLS

SEQ ID NO: 7199 - protein, 58 aa, Passiflora citrifolia
WEYQVGPSVGIEAGDHIWCSRYILERITEQAGVVLTLDPKPIEGDWNGAGCHTNYSTK

SEQ ID NO: 7200 - protein, 367 aa, Zea mays
ASKYCFMGGFDATSNVLAGNLFGIPLRGTHSHAFVSSYMSLDEIPNKALRNKDGSRVCEDFVSLVQEWLQKFQAADSLGGVFGDTNKSELAAFASYALAFPSNFLALVDTYDVIRSGIPNFCAVALALHDLGYKASGIRLDSGDLAYLSIEARKVFRAVEKEFNLPGFAKMVITASNDLNEETIDALNKQGHEVDAFGIGTYLVTCYSQAALGCVFKLVEINNRPRIKLSEDVAKVSIPCKKRCFRLYGKEGYPLVDIMIRESEPSPKAGERILCRHPFIESKRAYVVPQHVEELLQYYWPGTSDKPRAELPSLEKIRSRCMQQLEKLRPDHIRRLNPTPYKVSVSAKLYDFIHCLWLNEAPVGELQ

SEQ ID NO: 7201 - protein, 92 aa, Oxalis megalorrhiza
GINISGTNGEVMPGQWEYQVGPSVGIEAGDHIWASRYILERITEQAGVVLTLDPKPIDGDWNGAGCHTNYSTKSMREEGGFEVIKKAILNLS

SEQ ID NO: 7202 - protein, 118 aa, Triticum aestivum
  misc_feature (55)..(55): Xaa can be any naturally occurring amino acid
  misc_feature (86)..(86): Xaa can be any naturally occurring amino acid
MAAAAVAADSKIDNLRDAVAKLGEISENEKAGFISLVSRYLSGEAEQIEWSKIQXTPTDEVVVPYDTLAPPPEDLDAMKGLLDKLXVLKLNGGSGHMGCTGPKSVIEVRMGYILDLWD

SEQ ID NO: 7203 - protein, 92 aa, Oxalis spiralis
LYAGINISGTNGEVMPGQWEYQVGPSVGIEAGDHIWASRYILERITEQAGVVLTLDPKPIDGDWNGAGCHTNYSTKSMRDEGGFEVIKKAIL

SEQ ID NO: 7204 - protein, 190 aa, Rhizobium sullae
LWGFDGSSTMQAEGRSSDCVLKPVAIYPDPARTNGVLVMCEVMMPDGVTPHASNARATILDDEDAWFGFEQEYFFYENGRPLGFPESGYPAPQGPYYTGVGYSNVGSVAREIVEEHLDLCLAAGINHEGINAEVAKGQWEFQIFGKGSKKAADQIWMARYLLQRLTEKYGIDIEYHCKPLGDTDWNGSGI

SEQ ID NO: 7205 - protein, 180 aa, Triticum aestivum
  misc_feature (174)..(174): Xaa can be any naturally occurring amino acid
  misc_feature (176)..(179): Xaa can be any naturally occurring amino acid
MADEKLAKLREAVTGLGQISDKEKSGFISLVSRYLSGNEEQIEWGKIHTPTDEVVVPYDTLAAPPEDLAATKALLDKLAVLKLNGGLGTTMGCTGPKSVIEVRNGFTFLDLIVVQIESLNKKYGSNVPLLLMNSFNTHDDTLKIVEKYANSNIQIHTFNQSQYPRVVADEFLPXPXXXXT

SEQ ID NO: 7206 - protein, 91 aa, Oxalis spiralis
INISGTNGEVMPGQWEYQVGPSVGIEAGDHIWASRYILERITEQAGVVLTLDPKPIDGDWNGAGCHTNYSTKSMRDEGGFEVIKKAILNLS

SEQ ID NO: 7207 - protein, 339 aa, Symbiodinium sp. C3
KNFYEILGVQRNATDSEIKKAYKKLALKWHPDKNKSPGAEDKFKEISEAYDVLSDKEKREVFDKYGEEGLKGVPRSDNESNVHFGGPGFTKTFVFTSGHARDTFARAFGDDDEFADIIGGLGGFSFLNDHRKTPGFRSGGNDHFMFDGFSPLKKKQKVQDPSIERDLTVTFEELSNGCTKKMKISRKVYDERGTFKKEEKILTVNVKPGWKTGTKITFPKEGDRKPGIVPADVIMIVKDKPHPLFTRDGSNNLIYTAKISLRDSLTGGQVEIPLLDGRKISLPLNEVVRPGYTSRIQEEGLPLPKNPSKRADLIVKYDIQFPEDVSSVQRDILRDVLPS

SEQ ID NO: 7208 - protein, 214 aa, Kluyveromyces lactis NRRL Y-1140
MIRSTLIFREDGLPLCASVDDDTDPSLQEQKKKVKILISRFTPTSANEATVESGDFEIHYIRLNTVVYIVVAERNYPRNLAFSYLADIQQEFEHSYGGQLSKSNVRPYEFVSFDNFLQKTKKVYNDKRVQGNMDQLNQDLKGVKQIMTKNIEDLLYRGDSLDKMSDMSASLRQDAKKYRASAQKINFDLLISQYAPIAIIAFFFVFLLWWMFLR

SEQ ID NO: 7209 - protein, 111 aa, Glycine max
  misc_feature (23)..(23): Xaa can be any naturally occurring amino acid
DLFFFLDITLHGTYYQILSVKEXYDEIRNSYRSAILHSHPDKLNGCSSDEKFLKIQKAWQVLSDAELRVVYDNDLRSSRLDGVTADELIQNCLVQLWKFSGKLFDFCTHLC

SEQ ID NO: 7210 - protein, 150 aa, Apium graveolens var. dulce
REFDFIAEYIWIGGTGVDVRSKSRTISKPVEHPSELPKWNYDGSSTGQAPGDDSEVILYPQAIFKDPFRGGNNILVICDTYTPQGEPIPTNKRHKAAQIFSDAKVLGEVPWFGIEQEYTLMQQNVNWPLGWPVGGYPGPQGPYYCAITSE

SEQ ID NO: 7211 - protein, 355 aa, Thermodesulfovibrio yellowstonii DSM 11347
MERKDYYKILGISKDASQEEIKKAYRKLARKYHPDLNPGNKEAEEKFKEINEAYAVLSDPQKREEYDRGGSFDFKGFDFGGFDFTKGFDLGDIFGDIFGETFTTAQPFYLKGEDIVIPITLSFEEAYNGVVKPIHYQRYIECSVCHGSGADKIDICKKCNGTGRIQASRGFLRVNQTCPQCGGTGRTASSKCRNCGGIGRILTVETLKAKIPAGVDNGSTVKVKGYGNAGKGGAPYGDLILDVTVTPHPFFTRKGDDIYIELPVTFVEAALGAKIDVPIADGGFVKMKIPEGTQSGQKFRISGKGFPSPKNGNRGDLYVVIKIAVPKGLTQSEKEEVKKIERLYKENPRQFMLGR

SEQ ID NO: 7212 - protein, 76 aa, Brassica napus
IELGLEFKKVPSFLGRFKSIPSIVELDSLKVSGDVWFGSGVVLKGKVSVKANAGTKLEIPDNAVLENKDINGPEDL

SEQ ID NO: 7213 - protein, 104 aa, Zea mays
  misc_feature (61)..(61): Xaa can be any naturally occurring amino acid
  misc_feature (75)..(75): Xaa can be any naturally occurring amino acid
  misc_feature (82)..(82): Xaa can be any naturally occurring amino acid
VAFICLKSRSLNHEADHIAGSRNHTAPDEDGLPFDTVMWAAEDVEDTINLVDKFVVLKISXRVDMTMGSTGPKSXIEARSAXTFLELIGIQLECVNKMYGRNEA

SEQ ID NO: 7214 - protein, 428 aa, Oryza sativa
MAQAVVPAMQCQVGAVRARPAAAAAAAGGRVWGVRRTGRGTSGFRVMAVSTETTGVVTRMEQLLNMDTTPFTDKIIAEYIWVGGTGIDLRSKSRTISKPVEDPSELPKWNYDGSSTGQAPGEDSEVILYPQAIFKDPFRGGNNILVMCDTYTPAGEPIPTNKRNRAAQVFSDPKVVSQVPWFGIEQEYTLLQRDVNWPLGWPVGGYPGPQGPYYCAVGSDKSFGRDISDAHYKACLYAGINISGTNGEVMPGQWEYQVGPSVGIEAGDHIWISRYILERITEQAGVVLTLDPKPIQGDWNGAGCHTNYSTKSMREDGGFEVIKKAILNLSLRHDLHISAYGEGNERRLTGLHETASIDNFSWGVANRGCSIRVGRDTEAKGKGYLEDRRPASNMDPYVVTALLAETTILWEPTLEAEVLAAKKLALKV

SEQ ID NO: 7215 - protein, 103 aa, Escherichia coli
AKQDYYEILGVSKTAEEREIRKAYKRLAMKYHPDRNQGDKEAEAKFKEIKEAYEVLTDSQKRAAYDQYGHAAFEQGGMGGGGFGGGADFSDIFGDVFGDIFGG

SEQ ID NO: 7216 - protein, 1307 aa, Ceratodon purpureus
MSATKKTYSSTTSAKSKHSVRVAQTTADAALEAVYEMSGDSGDSFDYSKSVGQSAESVPAGAVTAYLQRMQREGLIQNFGCMVAVEEPNFCVIAYSENASEFLDLIPQAVPSMGEMDVLGIGTDIRTLFTPSSSAALEKAAATQDISLLNPITVHCRRSGKPLYAIAHRIDIGIVIDFEAVKMIDVPVSAAAGALQSHKLAARAITRLQALPGGDIELLCDTIVEEVRELTGYDRVMAFKFHEDEHGEVVAEIRRMDLEPYMGLHYPATDIPQASRFLLMKNRVRLIADCYASPVKLIQDPDIRQPVSLAGSTLRAPHGCHAQYMGNMGSIASLVMAVIINDNEEYSRGAIQRGRKLWGLVVCQHTSPRTVPFPLRSVCEFLMQVFGMQLNLHVELAAQLREKHILRTQTLLCDMLLRDAPIGIVSQTPNIMDLVKCDGAALYYGKRVWLLGTTPTENQIKEIADWLLEHHNDSTGLSTDSLADANYPGAHLLGDAVCGMAAAKITAKDFLFWFRSHTATEVKWGGAKHDPDEKDDGRKMHPRSSFKAFLEVVNKRSPPWEDVEMDAIHSLQLILRGSFRDIADSDTKTMIHARLNDLKLQGVEERNALANEMSRVLETAAAPILAVDSRGMINAWNAKIAQVTGLPVEEAMHCSLTKDLVLDESVVVVERLLSLALQGEEEQNVEIKLKTFGTQTTERAVILIVNACCSRDASDFVVGVFFVGQDVTEQRMFMDRFTRIQGGEKTTVQDPHPLMRPSFDGDEFGRTFKRNSALGGLKDHATGSVERLDLYLRRAEECMEVMETIPSPKFNNKQCQYLAGKLKAVLQSASLFLRISHHEHHELGASIDMGRHVEIFKLLLALAKEIESFIQGCCKDEWIKAAMTLTNVSEYVSSMGFNLELCKIAFCKSCAASGSLTLDQIEVICKDEAEVVKRNASIDVDTLFAKVIYDLTEKTLSSDQNDLAIYLLQRLKRAKPILPSFSSRPSWWNFYDDWSFSEKFFQWIQITGSLGSGSSATVEKAVWLGTPVAKKTFYGRNNEDFKREVEILAELCHPNITSMFCSPLYRRKCSIIMELMDGDLLALMQRRLDRNEDHDSPPFSILEVVDIILQTSEGMNYLHEKGIIHRDLKSMNILVKSVKVTKSEIGYVHVKVADFGLSKTKDSSTRYSNQTWNRGTNRWMAPEVINLGYESTEGEISFDGKVPKYPLKSDVYSFGMVCYEVLTGDVPFPEEKNPNNVKRMVLEGVRPDLPAHCPIELKALITDCWNQDPLKRPSFAVICQKLKYLKYLLMTGFSSYQDSYPSTEEPS

SEQ ID NO: 7217 - protein, 51 aa, Passiflora citrifolia
  misc_feature (42)..(42): Xaa can be any naturally occurring amino acid
WEYQVGPSVGIEAGDHIWCSRYILERITEQAGVVLTLDPKPXEGDWNGAGC

SEQ ID NO: 7218 - protein, 55 aa, Passiflora coccinea
WEYQVGPSVGIDAGDHIWCSRYILERITEQAGVVLSLDPKPIEGDWNGAGCHTNY

SEQ ID NO: 7219 - protein, 563 aa, Oryza sativa Indica Group
MAAVAGSASAGANGSAAAHRVGAPTNPMATALLTDQYQFSMAYAYWKAGKHADRAVFDLYFRKNPFGGEFTVFAGLEECIKFIANFKFTEDDILFLQSVMPMCEDAFFDYLRKTDCSDVEVYSIPEGSVVFPKVPLMRVEGPVAVVQLLETPFVNLINYASLVTTNAARHRHVAGKSKVLLEFGLRRAQGPDGAISASKYCFMGGFDATSNVLAGNLFGIPLRGTHSHAYVSSYMSLDEIPDKSLKSKDGSRVCKDFVSLVKEWLQKIQLADSLCGVFGETNQSELAAFASYALAFPTNFLALVDTYDVMRSGIPNFCAVALALHDLGYKASGIRLDSGDLAYLSIEARKVFRTLEKEFNVPAFGKMIITASNDLNEETIDALNKQGHEVDSFGIGTYLVTCYSQAALGCVFKLVEINSRPRIKLSEDVAKVSIPCKKRCFRLYGKEGYPLVDIMMRESEPSPKAGERILCRHPFLESKRAYVVPQHVEELLQCYWPGTSNKPRVELPSLEEIRGRCMQQLEKLRPDHIRRLNPTPYKVSVSAKLYEFIHSLWLNEAPVGELQ

SEQ ID NO: 7220 - protein, 559 aa, Cryptococcus neoformans var. neoformans JEC21
MLPLPSPSYSGSPAHHMDKEDKDILLVEGKNSCHRIDLSGSSEDSGRDTIQVDDDSGDEDDLVWALIADDLNSDASTHDIEDRNEEAQEALFEQLIRRTEAMRNPATQTASLQTQFEVSDDDENDFVIDEPYSESLIEDGIQVSDEGRENALKFLQSIVLSFLEQISTSLGTIFSHETSKVHKKELKGLKRRKIYAAEAEQKKETDQCLETGKIGVTISLKNRKSGSYQAIMLPDSPLQSPDRQSSIMRMTCIMRVASTLYEAILDRNVITLRDVYYRDKQLFERQPVVDKIVDDLVATAGLRRRDFYVCASAKGLIASSSLVIRYRTGDEIILSATRANLVDPAEKIDVIEAPNGLDWVLIVEKDAIFQSLCGAGILQDERIGHGVLITGKGFPDLATRQILRLIADTFPCVKMYALVDADPHGLKILSTYMYGSKANAYSTDYGDLPLGDRVQWLGLRASHWSDLHISYDHLIPLEQSDIQMAMSMLRDHQTLPVEWKRELSHMLHLHRKAEIEIIIASSWSSDHVGSNGSGDREGDRQPLPDVERLINYIVKNMGF

SEQ ID NO: 7221 - protein, 369 aa, Helicobacter pylori 26695
MELSYYEILEVEKHSNQETIKKSYRKLALKYHPDRNAGDKEAEEKFKLINEAYGVLSDEKKRALYDRYGKKGLNQAGASQGDFSDFFEDLGSFFEDAFGFGARGSKRQKSSIAPDYLQTLELSFKEAVFGCKKTIKVQYQSVCESCDGTGAKDKALETCKQCNGQGQVFMRQGFMSFAQTCGACQGKGKIVKTPCQACKGKTYILKDEEIDAIIPEGIDDQNRMVLKNKGNEYEKGKRGDLYLEAQVKEDEHFKREGCDLFIKAPVFFTTIALGHTIKVPSLKGDELELKIPRNARDKQTFAFRNEGVKHPESSYRGSLIVELQVIYPKSLNKEQQELLEKLHASFGYEGEPHKSVLETCISKIKDWFK

SEQ ID NO: 7222 - protein, 95 aa, Oxalis medicaginea
  misc_feature (3)..(3): Xaa can be any naturally occurring amino acid
LYXGINISGTNGEVMPGQWEYQVGPSVGIEAGDHIWASRYILERITEQAGVVLTLDPKPIDGDWNGAGCHTNYSTKSMRDEGGFEVIKKAILNLS

SEQ ID NO: 7223 - protein, 440 aa, Gibberella zeae PH-1
MAPSWLNDIRRINRNNFATLRAAPWAELSGSLGDLGTLLPLMIALTAQGSIDLGSTLVFTGIFNILTGAFYGIPLPVQPMKAIASAAIQNHSSMGVVTAAGQWVGAAVLVMSVTGLLRWVVRVVPLPVVKGIQLGAGLSLILGAGSSLLQPLHWAHPALDNRIWALVAFLVLVGTQKLPRFPYALHFFILALVLAFVKVTASHESLPWFYAWRPRFSMPRWIGNGDSPALWMAIGQLPLTTLNSIIAVTALSHDLLPELPTPSVTSIGISVAMMNLTSTWFGSMPVCHGAGGLAAQYRFGARSGSSIIMLGIFKLALGLFFGETLVDLLRHYPKSLLGIMVVAAGLELAKVGNSLNQGASDLWHTASGQGPRRQRDLSEDERLERWTVMLMTTAGILAFRNDAVGFFAGMLCHGAYRLSERLAERYSHRISPVEREALLR

SEQ ID NO: 7224 - protein, 336 aa, Zea mays
MGADYYKVLGVDRGASDDDLKKAYRKLAMRWHPDKNSTNKKEAETKFKEISVAYEVLSDPKKRAIYDQLGEEGLKGQPPPGAGGPGTSPFFPGGVHSTAHHFNPRSADDIFKEFFGSPGMGGMRTEPGFQRSVFGNDIFSSRFRAEGSTSMQQPLRKAAAIENPLPVGLADLYKGVTKKMKISRETIDASGRISNTEDILTIQVKAGWKKGTRITFPDKGNEAPNMKPADIVFIIDEKPHDVFTREGNDLVVTEKISLVEALTGYTARVTTLDGRSLSLHINSIIHPKYEEVMPGEGMPMPKDPTKKGNLRIKFNIMFPSRLTSDQKAGIKRLLGS

SEQ ID NO: 7225 - protein, 396 aa, Frankia sp. CcI3
MSVRDMVEKDYYAALGVPKDASATDIKKAYRGLARELHPDKNPGDAKAEARFKEVSEAYDVLSDEGRRREYDEARALFAAGGRPGGGFGGPGRAGGYGGFGAPGTGYGSGPNLNLDDLLGGANGGLGGIFDNLFQRSSPGRGPRRGADIEAEVTIPFEKSLTGLEASVRLPGAATCTTCTGSGARPGTTPRTCPTCRGLGVVSRSQGGFALSEPCRDCLGKGTLIDHPCPDCRGTGRREREQRIRIPAGVSDGQRLRVRGRGIPGERGGPAGDLEVTVHVLRHPVFEREGSNLAITLPVTITEAALGASIRVPTLDGAPLTMKVPAGTSSGRRLRARGRGVPTAGGGNGDLIVTLEVTVPKPSDLSPRARTALLEFAQAHPEDPRAPLMERMEAGG

SEQ ID NO: 7226 - protein, 92 aa, Oxalis lotoides
  misc_feature (1)..(1): Xaa can be any naturally occurring amino acid
XINISGTNGEVMPGQWEYQVGPSVGIEAGDHIWASRYILERITEQAGVVLTLDPKPIDGDWNGAGCHTNYSTKSMRDEGGFEVIKKAILNLS

SEQ ID NO: 7227 - protein, 95 aa, Oxalis subintegra
  misc_feature (89)..(89): Xaa can be any naturally occurring amino acid
LYAGINISGTNGEVMPGQWEYQVGPSVGIEAGDHIWASRYILERITEQAGVVLTLDPKPIDGDWNGAGCHTNYSTKSMRDEGGFEVIKXAILNLS

SEQ ID NO: 7228 - protein, 233 aa, Zea mays
MVSSPFDLKIWGFGSASRARSGPSSFFPLLYLIGFFASFTQGSSERNRKEGRLIRVKEAMEHKEAGCQAPEGPILCINNCGFFGSAATMNMCSKCHKEMITKQDQAKLAASSIDSIVDGSDAVMEPGGAGSNTVVAVAQVELQKKNVQQPADVAEPNEGVAAISKGGKVGPNRCSACRKRVGLTGFNCRCGNLYCALHRYSDKHDCKFDYRTAARDAIAKANPVVKADKLDKI

SEQ ID NO: 7229 - protein, 348 aa, Fulvimarina pelagi HTCC2506
MTKYKLEYIWLDGYTPVPNLRGKTQIKSFDDFPTLEQLPLWGFDGSSTQQAEGHSSDCVLKPVAVYPDPARRDGVLVMCEVMMPDGTTPHVSNKRATILDDEGAWFGFEQEYFFYKNGRPLGFPEQGYPEPQGKYYTGVGYSAVGDIARTIVEEHLDLCLAAGINHEGINAEVAKGQWEFQIFGKGSKKAADEMWMARYLLQRLTEKYCIDIEYHCKPLGDTDWNGSGMHANFSTKYMREVGGKEYFESLMGAFEQNLEDHIAVYGPDNHMRLTGKHETAPWNKFSYGVADRGASVRVPHSFVNNGYKGYLEDRRPNSQGDPYQIASQILKTIAEVEERTEGGISVAA

SEQ ID NO: 7230 - protein, 77 aa, Escherichia coli
AKQDYYEILGVSKTAEEREIRKAYKRLAMKYHPDRNQGDKEAEAKFKEIKEAYEVLTDSQKRAAYDQYGHAAFEQGG

SEQ ID NO: 7231 - protein, 89 aa, Oxalis unduavensis
  misc_feature (1)..(1): Xaa can be any naturally occurring amino acid
XINISGTNGEVMPGQWEYQVGPSVGIEAGDHIWASRYILERITEQAGVVLTLDPKPIDGDWNGAGCHTNYSTKSMRDEGGFEVIKKAIL

SEQ ID NO: 7232 - protein, 430 aa, Arabidopsis thaliana
MAQILAASPTCQMRVPKHSSVIASSSKLWSSVVLKQKKQSNNKVRGFRVLALQSDNSTVNRVETLLNLDTKPYSDRIIAEYIWIGGSGIDLRSKSRTIEKPVEDPSELPKWNYDGSSTGQAPGEDSEVILYPQAIFRDPFRGGNNILVICDTWTPAGEPIPTNKRAKAAEIFSNKKVSGEVPWFGIEQEYTLLQQNVKWPLGWPVGAFPGPQGPYYCGVGADKIWGRDISDAHYKACLYAGINISGTNGEVMPGQWEFQVGPSVGIDAGDHVWCARYLLERITEQAGVVLTLDPKPIEGDWNGAGCHTNYSTKSMREEGGFEVIKKAILNLSLRHKEHISAYGEGNERRLTGKHETASIDQFSWGVANRGCSIRVGRDTEAKGKGYLEDRRPASNMDPYIVTSLLAETTLLWEPTLEAEALAAQKLSLNV

SEQ ID NO: 7233 - protein, 546 aa, Debaryomyces hansenii
MFVSLIVSQLILLIKIVSALEVGSSNNVAVYWGQNSGGSQDRLSTYCESDSVDIVLLSFLNNFPNDFNLNFANQCGMTFEDGVLHCSAIGEDIKTCQAAGKTVLLSLGGGIGNYGFTSDAEAVDFASTLWNKFGAGTSADERPFDDAVVDGFDFDIENNNQVGYVALANELRTLFDQDSSKSYYLSASPQCPYPDQSVGDLLSNANLDFAFIQFYNNYCSLDQSEFNWNTWSDFAKSAPNDDIKLFVGLPGAPASGNGYVDAATVAKTIDEIKCDQALGGISLWDASSAFTNVNANDVNYIEQVASILNSEECSASSSSSVASSSTTQSSSSSTSNDMTASATSSNEITGASSASSLVSTLPHYSNGSVTSGLVSSDEGTTATVTGIQTTIITVTSCSDNHCSKVPIETGVTVVTEGSTSYTTYCPLDNTPSTETVSDVATTVITVTSCQDNKCDFATVTTGLTVVTEFDTVYTTYCPLTTESTAQNTITNSASVTQSDKTIAHSTVYPTSQNQTVAAIETYAEGMGSLVAGSWTLAIAAIFASLL

SEQ ID NO: 7234 - protein, 190 aa, Oryza sativa
MPHLAASPTSAAAAAPASARVAFLRPGRVPRPPLQTARGLRPDLGTLRTAEQPTLYDLLGISSEGTLDEVRAAYRRMARKYHPDVSPPDAAAENTRRFIEVQEAYETLSDPSRRATYDRALARGVCRLAFSSSRRVAPYYYQDQEDKSGWRRTWGDQIEELKRRSMTKDSEENLSWGARMRRRTETSSSE

SEQ ID NO: 7235 - protein, 356 aa, Camellia sinensis
MSLLSDLCNLNLSESTEKIIAEYIWIGGSGMDLRSKARTLNAPVSDPSKLPQWNYDGSSTGQAPGEDSEVILYPQAIYKDPFRRGNNILVMCDAYTPGGEPIPTNKRFDAAKIFSHPDVVAEEPWYGIEQEYTLLQKEVKWPIGWPVGGYPGPQGPYYCGIGADKAFGRDIVDAHYKACLYAGINISGINGEVMPGQWEFQVGPSVGISSGDQLWMARYILERITEIAGVVVSFDPKPIEGDWNGAGAHTNYSTKSMRSDGGFEVIKKAIEKLGLKHKEHIAAYGEGNERRLTGKHETADINTFLWGVANRGASIRVGRDTEKAGKGYFEDRRPASNMDPYVVTSMIANTTILWKP

SEQ ID NO: 7236 - protein, 375 aa, Rubrobacter xylanophilus DSM 9941
MPAGKRDYYEVLGLSRDASEQDIKRAYRRLARKYHPDANPNDPEAEERFKELNEAYEVLSNPEARRAYDTYGHQVPSGASGRPGGDPFGGFQDIFEAFFGDRFGDPFFDLGRRRQPSRGGDTEAEVEISLEEAAFGTEREVQVQTIRNCPACDGAGGTETRLCGACGGSGVVRTVRETLLGQVMHQQTCSACGGSGRVVVDRCRECRGSGRVSEVVGRRIRIPAGIEDGMRLRVPGWGHAGEPGASSGDLYVKIRVKEHPELMRDGEDLIHRASVTFVQAALGTEVEVPTLEGTETVRIEPGTQPGTTLVLRGEGMPRMRGVGRGDLKVVVDVMVPTRLTGEQRKLLERFEAASGEETYNGRSGSFFDRLRGVFR

SEQ ID NO: 7237 - protein, 187 aa, Glycine max
MASLKQVSPLLLLFPLLLISLFKSSHAAGIAIYWGQNGNEGSLADACNTGNYQFVNIAFLSTFGNGQTPQLNLAGHCEPSTNGCTKFSDEIKACQGKGIKVLLSLGGASGSYSLGSAEEATQLATFLWNNFLGGQSSSRPLGDAVLDGIDFDIEAGGGNHWDELARALNGFSSQKKVYLAAAPQCPI

SEQ ID NO: 7238 - protein, 379 aa, Thermosynechococcus elongatus BP-1
MLRERLRFSWQELSGSFGDLGTDLPLLIGVIIAAQLDSASVFTLFGVAQILTGIVYGLPMPMQPLKAMAVIVMTEKLSGPILWAGGWMVGAMMLVLTLTGILTQLARWIPQPVVRGCQLGLGLSLASIALKTYLPTGDAFGYLLGAIGFLILLLLPKERGIPAGLLVVLLGGGVAMSRVLADPEWHITIAWRFPHLQPLEPQALMPGLLILALPQLPLSIANAVIATQQTAQDLFPDRPLSIGQIGLTYSLTNLILPFFGGVPLCHGCSGLAGHYALGARTGGAVVIYGSFYLVLGLLFGSSVDTLLEVFPLSILGVILLFEAWVLMSFIKDQAPMPENWMITLLVGAIALSVPQGFLVGTLVGTTLHYLSKKMPLQLS

SEQ ID NO: 7239 - protein, 203 aa, Echinacea tennesseensis
DARRDDLNAAIFNLKEIESYDDYERSLLISQMSFEKTFGMSSVFIESTLMENGGLAESANPATMINEAIHVISCGYEEKTAWGKEIGWIYGSVTEDILTGFKMHCRGWRSIYCKPVRPAFKGSAPINLSDRLHQVLRWALGSVEIFLSRHCPLWYGWGGGRLKLLQRFAYINTIVYPFTSLPLVAYCTLPAICLLTGKFIIPT

SEQ ID NO: 7240 - protein, 108 aa, Zea mays
  misc_feature (76)..(76): Xaa can be any naturally occurring amino acid
  misc_feature (95)..(95): Xaa can be any naturally occurring amino acid
SLRTNTLWVNLKAIYTLVGAAALKRESLSNPSEGDGVKVARLLTETGSALRLFDITTGTNVTRSRLLPVTATCDLXLVQPDLYTLTEGFVIRCPXERSSANASIELGP

SEQ ID NO: 7241 - protein, 374 aa, Clostridium acetobutylicum ATCC 824
MANKDYYEVLGLEKGASDDEIKKAFRKLAIKYHPDKNRGNKEAEEKFKEINEAYQVLSDPDKKANYDRFGTADFNGGGGFGDFSGGFGDFGDLGDIFNSFFGGGFSGGSSRARKDAPQRGNDMEYSISLTFEEAVFGVEKSINITRSENCETCGGTGAKKGTSPKTCDKCGGTGTIRVQRNTPLGSFVTQSSCDKCGGRGTIISDPCHECHGAGHVRKKRKISVKIPAGVDTGNVIPLRGQGEHGKNGGPAGDLYISIKVTPHKKFKREGFDIYIDTHISFPKAALGTDMTVPTIDGDVKYTIPAGTQSGTVFRLKGKGVQRVNGGGRGNQYVKVIVDTPKALNDKQREALKMFMEASGEAKSEKKSGFKRFFE

SEQ ID NO: 7242 - protein, 575 aa, Gossypium herbaceum
  misc_feature (301)..(301): Xaa can be any naturally occurring amino acid
  misc_feature (476)..(477): Xaa can be any naturally occurring amino acid
  misc_feature (482)..(482): Xaa can be any naturally occurring amino acid
YLGSAGALDVDGKELPRLVYVSREKRPGYQHHKKAGAENALVRVSAVLTNAPFILNLDCDHYINNSKAMREAMCFLMDPQFGKKLCYVQFPQRFDGIDRHDRYANRNVVFFDINMLGLDGLQGPVYVGTGCVFNRQALYGYDPPVSEKRPKMTCDCWPSWCCCCCGGSRKKSKKKGEKKGLLGGLLYGKKKKKMMGKNYVKKGSAPVFDLEEIEEGLEGYEELEKSSLMSQKNFEKRFGQSPVFIASTLMENGGLPEGTNSTSLIKEAIHVISCGYEEKTEWGKEIGWIYGSVTEDILTGXKMHCRGWKSVYCVPKRPAFKGSAPINLSDRLHQVLRWALGSVEIFLSRHCPLWYGYGGKLKWLERLAYINTIVYPFTSIPLLAYCTIPAVCLLTGKFIIPTLSNLTSVWFLALFLSIIATGVLELRWSGVSIQDWWRNEQFWVIGGVSAHLFAVFQGLLKVLAGVDTNFTVTAKXXEDIEXGELYLFKWTTLLIPPTTLIILNMVGVVAGVSDAINNGYGSWGPLFGKLFFAFWVILHLYPFLKGLMGRQNRTPTIVVLWSILLASIFSLVWVR

SEQ ID NO: 7243 - protein, 59 aa, Passiflora coriacea
WEYQVGPSVGIDAGDHIWCSRYILERITEQAGVVLSLDPKPIEGDWNGAGCHTNYSTKS

SEQ ID NO: 7244 - protein, 575 aa, Gossypium raimondii
  misc_feature (131)..(131): Xaa can be any naturally occurring amino acid
  misc_feature (277)..(277): Xaa can be any naturally occurring amino acid
  misc_feature (327)..(327): Xaa can be any naturally occurring amino acid
YLGSAGALDVDGKELPRLVYVSREKRPGYQHHKRAGAENALVRVSAVLTNAPFILNLDCDHYINNSKAMREAMCFLMDPQFGKKLCYVQFPQRFDGIDRHDRYANRNVVFFDINMLGLDGLQGPVYVGTGXVFNRQALYGYDPPVSEKRQKMTCDCWPSWCCCCCRGSRKKSKKKGEKKGLLGGLLYGKKKKKMMGKNYVKKGSAPVFDLEEIEEGLEGFEELEKSSLMSQKNFEKRFGQSPVFIASTLMENGGLPEGTNSTSLIKEAIHVISCGYXEKTEWGKEIGWIYGSVTEDILTGFKMHCRGWKSVYCVPKRPAFKGSAPIXLSDRLHQVLRWALGSVEIFLSRHCPLWYGYGGKLKWLERLAYINTIVYPFTSIPLLAYCTIPAVCLLTGKFIIPTLSNLTSVWFLALFLSIIATGVLELRWSGVSIQDWWRNEQFWVIGGVSAHLFAVFQGLLKVLAGVDTNFTVTAKAAEDTEFGELYLFKWTTLLIPPTTLIILNMVGVVAGVSDAINNGYGSWGPLFGKLFFAFWVILHLYPFLKGLMGRQNRTPTIVVLWSVLLASIFSLVWVR

SEQ ID NO: 7245 - protein, 160 aa, Guillardia theta
MHAVLGGLPLLLPCTSAFLPSTPSSLLSSRSLTLKSAAARHASPLPRPSLAARPSPRFAAALRMAHGKCRAEYIWIGGRGGCGDDYRSKTRVLDKRPTSVSELPLWNYDGSSTGQAPGGDSEIYLQPAFMCADPMRGGDNILVLCEMIDPKNNPFPTGAL

SEQ ID NO: 7246 - protein, 267 aa, Isochrysis galbana
SSTGQAPGEGSEVIIKPKAIFKDPFRPGDNILVLTDTYTPAGEPLPTNTRVKAVKAFEGCESEKPWFGIEQEYTLFNLDKVTPLGWPKGGYPGPQGPYYCGAGADRSFGRFISEAHYKACLYAGISISGTNAEVMPGQWEYQVGPCEGIAGADEMMVSRYILQRVCEDFGAHVTFDPKPIQGDWNGAGCHTNFSTEKMHKEGGYAVIEQATRRLGAKHAEHIAAYGEGNERRLTGKHETASIDRFSYGVANRGCSIRIPRSTNADGY

SEQ ID NO: 7247 - protein, 73 aa, Sinningia striata
  misc_feature (40)..(40): Xaa can be any naturally occurring amino acid
ISGTNGEVMPGQWEFQVGPSVGIEAGDHIWCARYLLERIXEQAGVVLSLDPKPIEGDWNGAGCHTNYSTKSMR

SEQ ID NO: 7248 - protein, 575 aa, Gossypium barbadense
  misc_feature (292)..(292): Xaa can be any naturally occurring amino acid
  misc_feature (329)..(329): Xaa can be any naturally occurring amino acid
YLGSAGALDVDGKELPRLVYVSREKRPGYQHHKKAGAENALVRVSAVLTNAPFILNLDCDHYINNSKAMREAMCFLMDPQFGKKLCYVQFPQRFDGIDRHDRYANRNVVFFDINMLGLDGLQGPVYVGTGCVFNRQALYGYDPPVSEKRPKMTCDCWPSWCCCCCRGSRKKSKKKGEKKGLLGGLLYGKKKKKMMGKNYVKKGSAPVFDLEEIEEGLEGYEELEKSSLMSQKNFEKRFGQSPVFIASTLMENGGLPEGTNSTSLIKEAIHVISCGYEEKTEWGKEIGWIYGXVTEDILTGFKMHCRGWKSVYCVPKRPAFKGSAPINLXDRLHQVLRWALGSVEIFLSRHCPLWYGYGGKLKWLERLAYINTIVYPFTSIPLLAYCTIPAVCLLTGKFIIPTLSNLTSVWFLALFLSIIATGVLELRWSGVSIQDWWRNEQFWVIGGVSAHLFAVFQGLLKVLAGVDTNFTVTAKAAEDTEFGELYLFKWTTLLIPPTTLIILNMVGVVAGVSDAINNGYGSWGPLFGKLFFAFWVILHLYPFLKGLMGRQNRTPTIVVLWSILLASIFSLVWVR

SEQ ID NO: 7249 - protein, 73 aa, Passiflora crassifolia
NGEVMPGQWEYQVGPSVGIDAGDHIWCSRYILERITEQAGVVLTLDPKPIEGDWNGAGCHTNYSTKSMREDGG

SEQ ID NO: 7250 - protein, 73 aa, Sinningia douglasii
  misc_feature (41)..(42): Xaa can be any naturally occurring amino acid
ISGTNGEVMPGQWEFQVGPSVGIEAGDHIWCARYLLERITXXTGVVLSLDPKPIEGDWNGAGCHTNYSTKSMR

SEQ ID NO: 7251 - protein, 97 aa, Arabidopsis thaliana
MACEGGGSNVRSSYYTILGIRKDASVSDIRTAYRKLAMKWHPDRYARNPGVAGEAKRRFQQIQEAYSVLNDENKRSMYDVGLYDPHEDDDDVRNTFL

SEQ ID NO: 7252 - protein, 197 aa, Triticum aestivum; identical to SEQ ID NO: 1366
  misc_feature (162)..(162): Xaa can be any naturally occurring amino acid
  misc_feature (168)..(168): Xaa can be any naturally occurring amino acid
  misc_feature (173)..(173): Xaa can be any naturally occurring amino acid
  misc_feature (183)..(183): Xaa can be any naturally occurring amino acid
  misc_feature (188)..(188): Xaa can be any naturally occurring amino acid

SEQ ID NO: 7253 - protein, 575 aa, Gossypium barbadense
YLGSAGALDVDGKELPRLVYVSREKRPGYQHHKKAGAENALVRVSAVLTNAPFILNLDCDHYINNSKAMREAMCFLMDPQFGKKLCYVQFPQRFDGIDRHDRYANRNVVFFDINMLGLDGLQGPVYVGTGCVFNRQALYGYDPPVSEKRPKMTCDCWPSWCCCCCRGSRKKSKKKGEKKGLLGGLLYGKKKKKMMGKNYVKKGSAPVFDLEEIEEGLEGYEELEKSSLMSQKNFEKRFGQSPVFIASTLMENGGLPEGTNSTSLIKEAIHVISCGYEEKTEWGKEIGWIYGSVTEDILTGFKMHCRGWKSVYCVPKRPAFKGSAPINLSDRLHQVLRWALGSVEIFLSRHCPLWYGYGGKLKWLERLAYINTIVYPFTSIPLLAYCTIPAVCLLTGKFIIPTLSNLTSVWFLALFLSIIATGVLELRWSGVSIQDWWRNEQLWVIGGVSAHLFAVFQGLLKVLAGVDTNFTVTAKAAEDTEFGELYLLKWTTLLIPPTTLIILNMVGVVAGVSDAINNGYGSWGPLFGKLFFAFWVILHLYPFLKGLMGRQNRTPTIVVLWSILLASIFSLVWVR

SEQ ID NO: 7254 - protein, 75 aa, Passiflora crenata
GTNGEVMPGQWEYQVGPSVGIDAGDHIWCSRYVLERITEQAGVVLSLDPKPIEGDWNGAGCHTNYSTKSMREDGG

SEQ ID NO: 7255 - protein, 277 aa, Phyllostachys edulis
KWNYDGSSTGQAPGEDSEVILYPQAIFKDPFRRGNNILVMCDCYTPAGEPIPTNKRYNAAKIFSSPEVAAEEPWYGIEQEYTLLQKDTNWPLGWPIGGFPGPQGPYYCGIGAEKSFGRDIVDAHYKACLYAGINISGINGEVMPGQWEFQVGPSVGISSGDQVWVARYILERITEIAGVVVTFDPKPIPGDWNGAGAHTNYSTESMRKEGGYEVIKAAIEKLKLRHREHIAAYGEGNERRLTGRHETADINTFSWGVANRGASVRVGRETEQNGKGY

SEQ ID NO: 7256 - protein, 89 aa, Oxalis cf. melilotoides EE190
GINISGTNGEVMPGQWEYQVGPSVGIEAGDHIWASRYILERITEQAGVVLTLDPKPIDGDWNGAGCHTNYSTKSMRDEGGFEVIKKAIL

SEQ ID NO: 7257 - protein, 73 aa, Sinningia kautskyi
  misc_feature (46)..(46): Xaa can be any naturally occurring amino acid
  misc_feature (55)..(55): Xaa can be any naturally occurring amino acid
ISGTNGEVMPGQWEFQVGPSVGIEAGDHIWCARYLLERITEQAGVXLSLDPKPIXGDWNGAGCHTNYSTKSMR

SEQ ID NO: 7258 - protein, 910 aa, Oryza sativa
  misc_feature (15)..(15): Xaa can be any naturally occurring amino acid
  misc_feature (124)..(124): Xaa can be any naturally occurring amino acid
  misc_feature (141)..(141): Xaa can be any naturally occurring amino acid
  misc_feature (881)..(881): Xaa can be any naturally occurring amino acid
SKEQQQQRGYQLPRXDSRGSLEVFNPSSASSFRTAAAAPKSASPFLAIPDREEDNVVAQQRAAEWGLVLQTDHHTGLPQGVSARPSSGSARTSSEDNPQQQAERRRHPHGCRKELRAALTVFQXQTFVVSDATHPNHPIMXASAGFFNMTGYTSKEVVGRNCRFLQGSGTDPHEIDKIRQSLANGSNYCGRILNYKKDGTPFWNLLTIAPIKDEDGRLLKFIGMQVEVSKYTEGKKDTVVRPNGLSESLIKYDARQKDHARSSVSELLLALKNPRSLSESSNNTLKRKSQESLSMSMTEVPSKRSSESGSRRNSRSGTRSSLQKINEVPDQGNRTRKSGLRAFMGFLGMGHGSVEKNMLKPRDEDPLIDSDDERPESFEDEFRRKEMRRGIDLATTLERIEKNFVITDPRLPDNPIIFASDSFLQLTEYNREEILGRNCRFLQGPETDRATVRKIRDAIDNQAEVTVQLINYTKSGKKFWNLFHLQPMRDQKGDVQYFIGVQLDGTEHVQDDAAKEGVVLVKKTADNIDEAAKELPDANLRPEDLWANHSKVVLPNPHMKDTASWRAIQKVLESGESIGLKHFRPVKPLGSGDTGSVHLVELLNTGEYFAMKAMDKSIMLNRNKVHRATAERQILDLLDHPFLPTLYASFQTKTHICLITDYCPGGELFVLLDNQPLKVLHEDAVRFYAAEVVVALEYLHCQGIIYRDLKPENILLHRDGHISLTDFDLSCLTSCRPQVFLPEDADEKKGRKNGSYPIFFAEPMRASNSFVGTEEYIAPEIITGAGHTSAVDWWALGILLYEMLYGYTPFRGKTRQRTFANILHKDIRFPASISVSLAARQLMYRLLHRDPANRLGSYEGANEIKGHPFFRGINWPLIRAXAPPKLEIPLFSKDDMEKKGLVTNNRTDMF

SEQ ID NO: 7259 - protein, 395 aa, Oryza sativa Indica Group
MSSSLLTDLVNLDLSESTDKVIAEYIWIHLILNHHQFLFMVVLLVSLSQNAGSLLSILHLKEVNHTLSGPVDDPSKLPKWNFDGSSTGQATGDDSEVILHPQAIFRDPFRKGKNILVMCDCYAPNGEPIPTNNRYNAARIFSHPDVKAEEPWYGIEQEYTLLQKHINWPLGWPLGGYPGPQGPYYCAAGADKSYGRDIVDAHYKACLFAGINISGINAEVMPGQWEFQIGPVVGVSAGDHVWVARYILERITEIAGVVVSFDPKPIPGDWNGAGAHTNYSTKSMRSNGGYEVIKKAIKKLGMRHREHIAAYGDGNERRLTGRHETADINNFVWGVANRGASVRVGRDTEKDDKGYFEDRRPASNMDPYLVTAMIAETTILWEPSHGHGHGQSNGK

SEQ ID NO: 7260 - protein, 95 aa, Oxalis humbertii
LYAGINISGTNGEVMPGQWEYQVGPSVGIEAGDHIWASRYILERITEQAGVVLTLDPKPIDGDWNGAGCHTNYSTKRMRDEGGFEVIKKAILNLS

SEQ ID NO: 7261 - protein, 493 aa, Rhizopus niveus
MISCNILGITIAAFITSTLAAYSSNGVNVMYYWGQNSAGGSNTQGSLVSYCQSGQVDVIILSFLNKFNMGGLPEINLASACEQTFFPNTNLLHCPTVGSDIKTCQSNGVKVLLSLGGAAGSYGFSSDSEGQTFAETIWNLFGGGTSDTRPFDDAVIDGIDLDIEGGSSTGYAAFVTALRSKGHFLIGAAPQCPFPDAILGSVIDAVGLDFVNVQFYNNVCSVASGSSFNFDVWNDWAKNKSPNKNIKVMLTVPGSSTAAGSGYASIAELGPIVSSVISQYSSFGGVSVWDASQAWNNNGFHSELYSIVHGSSAALGQAARKTPFPNTSSITTTSLATASSALFPLLYAGRSCSSQSKVSCTSTGSYTICNYGKWVTAPCPPGVICLSSAQSNNTDLTVSAQFFITSFAGGSFKAIINARRTTLTPFEKMKTIEFTVPDHVRLSQCNLGKIEQVGRSVRIRLKDHPNMAFVLNLSGNVSSDAFVAPDPSSWRFS

SEQ ID NO: 7262 - protein, 540 aa, Rhizopus microsporus var. oligosporus
MLARTFLGMAISAFLASTGVQAAWSSNGPNVMYYWGQNSAGGSNTQASLGTYCESGQVDAVLLSFLHVFNVGGTPEINLSSACAGTYFPNTQLLSCPAVGADIKKCQDKGVKVILSLGGAAGVYGFTSDAQGQQFAQTIWNLFGGGSSDTRPFGDAVIDGVDLDIEGGASTGYAAFVNALRQKFSSNFLIGAAPQCPFPDAILGSVLNSASFDYVNVQFYNNYCSATGSSFNFDTWDNWAKTTSPNKNVKIMFTIPGSPTAAGSGYVPMSTLQTIVPSLASEYSSYGGVSVWDASQAWNNGDFSSQLYSLVHSGGSTPPPSSSTIKTTTKATTTSTKTTTTAAPTATSAPGSCPVANQSCSTQNQYACTADGKYAVCDHGKWVVSSCPSGTVCIPTTDGTSIYCGYATGSGSTCPSASALEIAAASFGSKNGPVPRPYKASKVAAQLAVTSTDKNSFEAVINARRTTLTPFEKSVTIEFTTPSNIKFTESDMGPVRQVGNKVRIQAKNDYNESMTLVVKVKGSINSGVFVAPSTSAWKFK

SEQ ID NO: 7263 - protein, 312 aa, Triticum aestivum
  misc_feature (262)..(262): Xaa can be any naturally occurring amino acid
MASRQFPAMLLLTAVTMAGLAAGARAGGIAIYWGQNGNEGTLAQACATGNYKFVNVAFLFTFGKGQKPLLNLAGHCDPATSGSCTFVGADVKSCQSRGIKVLLSIGGGVGSYGLSSAADAKQVAEYLWENYLGGTSTTRPLGDAVLDGVDFDIESGGSAHWDDLARELKKYSGKGSAYKPVYLAAAPQCPFPDAMLGGLGGAFGTGLFDYVWVQFYNNPPCQYTKAGGAGNLASAWQQWASIPARQVFLGLPAAPAAAGGAXAAGSGFVEPSDLLSEVLPVVQKSPKYGGIMLWSRFFDGQTGFSDKVKSSV

SEQ ID NO: 7264 - protein, 95 aa, Oxalis lucumayensis subsp. lucumayensis
  misc_feature (93)..(93): Xaa can be any naturally occurring amino acid
LYAGINISGTNGEVMPGQWEYQVGPSVGIEAGDHIWASRYILERITEQAGVVLTLDPKPIDGDWNGAGCHTNYSTKSMRDEGGFEVIKKAILXLS

SEQ ID NO: 7265 - protein, 379 aa, Xanthobacter autotrophicus Py2
MAKRDYYETLGCDRGADDTVLKASYRKLAMKWHPDRSQGNGEAEVMFKEVNEAYEVLKDPQKRAAYDRFGHAAFENGGGGGPGFGNDFASSFADIFDDLFGGAMNRGRGGGQQRGRGADLRYNMEITLEEAFSGKTAQIKIPTSVSCETCSGTGAKPGTQPKACRMCGGAGKIRHAQGFFTLERTCPNCQGRGSVIEDPCSDCGGAGRVTRERNLSVQIPAGVEDGTRIRLGGEGEAGVRGGAAGDLYIFLSIEPHTFFQREGADLYCRVPISMVTAALGGTVEVPTIDGDKSKVKIPEGTQSQKRFRLSGKGMPIMRARNHGDMYVQVVVETPQKLTKRQKELLAEFEKDSSGETHPESTGFFAKVKEFFQGAAGEGA

SEQ ID NO: 7266 - protein, 224 aa, Zea mays
MDGGSGNASSGGAAVCCYYALLGVRKSASATDIRTAYRRLAMKWHPDRWASDPGAAGEAKRRFQRIQEAYSVLSDKGKKAMYDAGLFDPLDDDDQDFSDFMQEMLVMMDNVKNEKPDTLEDLQKMLADIVNGDGGDGVGGRVPPAPPDVARRTRVAPHPQPQQALVDCVSYRPRRRNNCRSWPGAVSCMVYRVDRARGPVSCMVSLGRRRFQLQLPLRSTNAHL

SEQ ID NO: 7267 - protein, 217 aa, Picea sitchensis
MAMKPILYRERGASLVLQADSCRAKPNSFHNLVKSRYFSGNLKPISGACHHRWHAGRDVQGNYSKVASEEQQSMSLYDLLGIPKNGSLAEIKQAYKQLARRYHPDVCPNPDQSEEYTRRFVQVQEAYEVLSDPPRRALYDQHLAMGFKHYSYSTFSARKRRQYCTQQDVGREDWKSRWESQLAGLKRRSAYKDAGRPLSWAARVRRENAQSSQPSEE

SEQ ID NO: 7268 - protein, 469 aa, Oryza sativa Japonica Group
MAVTADVKLEGLRAATDKLDQISENEKSGFISLVSRYLSGEAEQIEWSKIQTPTDEVVVPYDTLSAAPEDLNETKKLLDKLVVLKLNGGLGTTMGCTGPKSVIEVRNGFTFLDLIVIQIESLNKKYGCNVPLLLMNSFNTHDDTQKIVEKYSNSNIEIHTFNQSQYPRIVTEDFLPLPSKGKTGKDGWYPPGHGDVFPSLNNSGKLDTLLAQGKEYVFVANSDNLGAIVDIKILNHLIHNQNEYCMEVTPKTLADVKGGTLISYEGRVQLLEIAQVPDEHVNEFKSIEKFKIFNTNNLWVNLKAIKRLVEAEALKMEIIPNPKEVDGVKVLQLETAAGAAIRFFEKAIGINVPRSRFLPVKATSDLLLVQSDLYTLVDGFVIRNPARTNPSNPSIELGPEFKKVANFLARFKSIPSIVELDTLKVSGDVWFGSGVTLKGKVTITAKSGKLEIPDGAVLENKDINGPEDL

SEQ ID NO: 7269 - protein, 187 aa, Cycas revoluta
DEHGEVVAEIRRSDLEPYLGLHYPATDIPQASRFLFMQNRVRMICDCRATPVKVIQAAELNLPLCLVGSTLRAAHGCHSQYMANMGSIASLVLAVIINANDEEGWSGRSSVKLWGLVVCHHTSARAIPFPVRYACEFLMQAFGLQLNMELQLAAQMTEKHILRTQTLLCDMLLRDAPIGIVTQSPSI

SEQ ID NO: 7270 - protein, 76 aa, Zea mays
  misc_feature (55)..(55): Xaa can be any naturally occurring amino acid
MQNGHGTHDDTQKTAEKHSNSNIDIHALNHRQYPRIDTRDFLPLTTGGKSGMAGXDPPGHGDVCPTLNNTGKLDIA

SEQ ID NO: 7271 - protein, 301 aa, Vitis vinifera
MARTPQSTPLLISLSVLALLQTSYAGGIAIYWGQNGNEGTLTQTCNTGKYSYVNIAFLNKFGNGQTPEINLAGHCNPASNGCTSVSTGIRNCQNRGIKVMLSIGGGAGSYSLSSSNDAQNVANYLWNNFLGGQSSSRPLGDAVLDGIDFDIELGSTLHWDDLARALSRIEFQQERGRKVYLTAAPQCPFPDKVPGTALNTGLFDYVWVQFYNNPPCQYSSGNTNNLLNSWNRWTSSINSTGSFMGLPASSAAAGRGFIPANVLTSQILPVIKRSPKYGGVMLWSKYYDDQSGYSSSIKSSV

SEQ ID NO: 7272 - protein, 424 aa, Blastocladiella emersonii
TLIDKLMEKTKKVVGSSDKDAPAPASPSSPSTAAGAGSASSTASSTTTAAASGNLSIPSPLVAGSTTSSSISHAQKMATAAHTNSDYSPSPAATPSAPLDAVAERRRRKTTLADLELRQTLGTGSFGRVHLVRLRSTGKYYAMKVLKKAEVVKHKQVEHTLNEKGILEQIDHPFLVALHSSFQDSANLYMVMEYVTGGELFTYLRRSQRFSNNVAKFYAAEVVLAFEYLHSKDIIYRDLKPENLLLDAQGHVKITDFGFAKHVPDITWTLCGTPDYLAPEIIQSRGYGRAVDWYALGVLIFEMLAGYPPFYDEDHVRMYEKILQGKVKWPSHFDPAAKDLLKRLLTTDLTKRYGNLKGGSKDIKMHKWFAGLDWTKLFNKQIPPPYTPPNRGDGDTSNFDAYPEETEPYGKVQPDPYAQLFKDF

SEQ ID NO: 7273 - protein, 380 aa, Pseudomonas syringae pv. syringae B728a
MAKRDYYEVLGVERGSSEADLKKAYRRLAMKHHPDRNPDDKASEELFKEANEAYEVLSDASKRAAYDQYGHAGVDPSMGGGGGFGGGAGGANFSDIFGDVFSDFFGGGRAGGGGGRGGAQRGSDLRYTLELNLEEAVRGTNVNIRVPTLVNCKPCDGSGAKKGSSPVTCPTCGGIGQVRMQQGFFSVQQTCPRCHGHGKIISDPCDSCHGEGRVEESKTLSVKVPPGVDTGDRIRLSGEGEAGTQGGPTGDLYVVINVREHAIFQRDGKHLFCEVPISFTDAALGGELEVPTLDGRVKLKIPEGTQTGKQFRLRGKGVAPVRGGGAGDLMCRVAVETPVNLSKRQRELLEEFRTSLENDESHSPKASGWFEGVKRFFGDL

SEQ ID NO: 7274 - protein, 392 aa, Fusobacterium nucleatum subsp. nucleatum ATCC 25586
MAKRDYYEVLGIDKSASENDIKKAYRKAAMKYHPDKFANASDAEKKDAEEKFKEINEAYQILSDSQKKQQYDQFGHAAFEQGGAGFGGGFNAGGFDFGDIFGDIFGGGGFGGFEGFSGFGGSSRRSYVEPGNDLRYNLEITLEEAAKGVEKTIKYKRTGKCENCHGTGGEDDKMKTCPTCNGQGTIRTQQRTILGVMQSQSVCPDCHGTGKVPEKKCKHCHGTGTAKETVEKKVNVPAGIDDGQKLKYAGLGEASQNGGPNGDLYVVIRIKSHDIFVRDGENLYCEVPISYSTAVLGGEVEIPTLNGKKMIKVPEGTESGKLLKVKGEGIKSLRGYGQGDIIVKITIETPKKLTDKQKELLQKFEESLNEKNYEQKSSFMKKVKKFFKDIID

SEQ ID NO: 7275 - protein, 60 aa, Passiflora edulis
VMPGQWEYQVGPSVAIDAGDHIWCSRYILERITEQAGVALSLDPKPIEGDWNGAGCHTNY

SEQ ID NO: 7276 - protein, 91 aa, Zea mays
  misc_feature (21)..(21): Xaa can be any naturally occurring amino acid
  misc_feature (43)..(43): Xaa can be any naturally occurring amino acid
DKDALITLVSSCLSGEAEQIXWSQIHTPTEDVLAPNDILSPPXPEDLMEYKNLMYKLDVLKLNEVVGTTMDCTGPKAVIVARKGYTFLDLI

SEQ ID NO: 7277 - protein, 55 aa, Passiflora edulis
WEYQVGPSVGVDAGDHIWCSRYILERITEQAGVVLSLDPKPIEGDWNGAGCHTNY

SEQ ID NO: 7278 - protein, 326 aa, Zea mays
MGVDYYKVLGVGRGATDDELKKAYRRLAMKYHPDKNPTPQADTLFKQVSEAYDVLSDPQKRAIYDQYGEEGLKAGAPPPAASTHGAGAGVHRFRFNTRSAEEIFSEIFGGGFAGAGPRTPGGGVPSGFPMFGGAAGAGEASSAASQRKAPPIERPLACTLEDLYKGATKKMKISRDVLDATGRPTNREEILTIDIKPGWKKGTKITFPEKGNEARNVVPSDLVFIVEERAHPRFRRDGNDLIYTHKISLVEALTGCTVQVTTLDGRTLTVPVKSVVSPTYEEVVPGEGMPITREPSRKGSLRIKFQIKFPTSLTGDQKAAIQQLLS

SEQ ID NO: 7279 - protein, 771 aa, Vitis vinifera; identical to SEQ ID NO: 1385

SEQ ID NO: 7280 - protein, 58 aa, Passiflora edulis
WEYQVGPSVAIDAGDHIWCSRYILERITEQAGVVLSLDPKPIEGDWNGAGCHTNYSTK

SEQ ID NO: 7281 - protein, 73 aa, Sinningia cardinalis
ISGTNGEVMPGQWEFQVGPSVGIEAGDHIWCARYLLERITEQTGVVLSLDPKPIEGDWNGAGCHTNYSTKSMR

SEQ ID NO: 7282 - protein, 553 aa, Saccharomyces castellii
MFPRSDKDVDQLVGNLNQLGLNKPNARFVSVTPTRANKENRSSLSPSPSPNKTKRFTADETELKNSPKKLPHDFYKKALSNDTKRIVNVCQMYFLDYYCDMFDYVISRRQRTKSVLNYLERNQNSLSTEELNNEWTAYLQQEHDVLRKRRLKPKNKDFEMITQVGQGGYGQVYLARKRDTKEVCALKILNKKLLFKLNETNHVLTERDILTTTRSDWLVKLLYAFQDTESLYLAMEFVPGGDFRTLLINTRFLRNTHARFYISEMFCAVNALHELGYTHRDLKPENFLIDSEGHIKLTDFGLAAGTISTERIQSMKIRLEEVKNLEFPAFTEKSIEDRRKMYTHLRQTEVNYANSMVGSPDYMALEVLEGKKYDFTVDYWSLGCMLFESLVGYTPFSGSSTNETYENLRHWKKTLRRPVLDNGRPAFSDRTWDIITRLIADPINRLRSFEHIKRMPYFAEVNFNTLRQSAPPFTPQLDSETDAGYFDDFTNEADMAKYADVFKRQNKLSSMVDDSAVDSKLVGFTFRHRNGQKGLSGILYNGSEHSDPFATFY

SEQ ID NO: 7283 - protein, 630 aa, Arabidopsis thaliana
MASSSRSEKRCHYEVLGISKESSPDEIRSSYRRLALQRHPDKLMKAAGLSEAEATAQFQELVHAYEVLSDPKERAWYDSHRSQILFADHSSAGGSKSGGSVPDLFAFFSPTVYSGYSDTGKGFYKVYYDVFNSVYLNEIKFARTLGLRMDSVREAPIMGNLESPYAQVTAFYNYWLGFCTVMDFCWVDEYDVMGGPNRKSRRMMEEENKKSRKKAKREYNDTVRGLAEFVKKRDKRVIDMLVKKNAEMEKKKEEERERKKKMEKERLERAMNYEEPEWAKAHEGEDEGAGLSELEEEDDDAKRKNEQLYCIVCSKKFKSEKQWKNHEQSKKHKEKVAELRESFTDYEEENEEEEIDGPLDSPESVEELHEKLQEELNIDNEERDVKKEVVGEADETDDEYFVAEEDMQGSSESEDEDDEMTLLKKMVSGQKNKQKNVVSKEEDEDETEVEIEGDTAEFSEFDNQKSTGRNKEAKEERNKQNAGNDMADDTSKVQIPGEGGNPDENMNATESASGALADSQKDEANSMEYDNRKSTGRRRRSKKGKDKNNQGELNEKSSEADDTQYVNRDMESQDYKKAPRSKKSTRGMKTKGTTKKNSSNECDRCGEEFESRTKLHKHLADSGHATVKSR

SEQ ID NO: 7284 - protein, 57 aa, Passiflora edulis
WEYQVGPSVAIDAGDHIWCSRYILERITEQAGVVLSLDPKPIEGDWNGAGCHTNYST

SEQ ID NO: 7285 - protein, 573 aa, Saccharomyces castellii
MSERKMENLTGTMHQLNFNLPNQPNRGSTSQFASLDNFSTPTKYKNDKLNGSPIPPGARRYEIDDSDSKMDIDGSSYNDIDITNSPKKLPQGFQTMASNNKTQRLVSVCKMYFLDYYCDMFDYVISRRQRTKKVLEYLEQKKNENVDLNSLNNEWNGYIQREHQVLRKRRLKPKHKDFEMITQVGQGGYGQVYLPGKKDTNEVCALKILNKKLLFKLNETNHVLTERDILTTTRSQWLVKLLYAFQDTQNLYLAMEFVPGGDFRTLLINTRFLKSTHARFYISEMFLAVNALHDLGYTHRDLKPENFLIDAKGHIKLTDFGLAAGTISNDRIQSMKVRLEEVKNLEFPEFSDKSIEDRRQMYQKYRETEVNYANSMVGSPDYMALEVLEGKKYDFTVDYWSLSCMLFESLVGYTPFSGSSTNETYENLRHWKKTLRRPMLDNGRPAFSDRTWDFITRLIADPINRLRSFEHVKRMTYFESVDFNTLRDLSPPFIPQLDNETDAGYFDDFTNEADMAKYADVFKRQNKLSTMVNDADIDSKLVGFTFRHRYGKNGSSGVLYNGLEQSDPFSTFY

SEQ ID NO: 7286 - protein, 1127 aa, Oryza sativa
MPGDTTHSVNFGTSKNWQCSSASVAALSCEVLGAAALQSMEASETLASDAAIADCLARALRRGSQRVAEAACNAIMDLSASSAGREHLAGSAVLQSILYLFSQVEFISGVIDIRSTECSKSASKANKSFYLMVDTLVFMVNSCQVDTLHNLQQDVVRKVLPLLHKIWKNVDKLGSSTDCINSKNQLQRKEHEISEAIFRLSMNIACPAHLEPDEVRRSIFGQSVSDYENFLLNYWEKSTYLVTRKQKNLHVDSVFTSLLNEFDLKTPDTIIQSLVNGIVSCPAIASDELDISSFLREVQGSLGATVKYRQDIRVVRINDQCDQTSIGYAMEEHFFDDGMTFQDADAFVEKCKDAFKNGFSVALRGMEFRSEKIAAIASAVADLFGQPSVGANIYFSPPRAQGLARHYDDHCVLVWQLLGCKKWMIWPDTKLLLPRLYEPFEPLDDLVDDCGGRMEILLEGDIMYVPRGFVHEAHTDVDVGGFEVNSTVDCSLHLTLAIEVEPPFEWEGFTHIALHCWTEKHWSSPFVKSQEEARTSLFALLLHVAIRLLSKNDATFRKACMVAAKLPPSSSCTTTHSKALRSNQRSFFDEIIKKIDRSCNFKEALMCIGLAVREKNDEPFQWMCWLRHLPQHGGTNDQVDFCNILGALEELLEAVSCNLEQSLTEFTDFKLKFCRLSELAVVPAMQCQVGAVRARPAAAAAAAGGRVWGVRRTGRGTSGFRVMAVSTETTGVVTRMEQLLNMDTTPFTDKIIAEYIWVGGTGIDLRSKSRTISKPVEDPSELPKWNYDGSSTGQAPGEDSEVILYPQAIFKDPFRGGNNILVMCDTYTPAGEPIPTNKRNRAAQVFSDPKVVSQVPWFGIEQEYTLLQRDVNWPLGWPVGGYPGPQGPYYCAVGSDKSFGRDISDAHYKACLYAGINISGTNGEVMPGQWEYQVGPSVGIEAGDHIWISRYILERITEQAGVVLTLDPKPIQADSVICFVIRLRLILQITKSMREDGGFEVIKKAILNLSLRHDLHISAYGEGNERRLTGLHETASIDNFSWGVANRGCSIRVGRDTEAKGKGYLEDRRPASNMDPYVVTALLAETTILWEPTLEAEVLAAKKLALKFLENHATFHSPVNILVEHHT

SEQ ID NO: 7287 - protein, 75 aa, Passiflora edulis f. flavicarpa
GTNGEVMPGQWEYQVGPSVGVDAGDHIWCSRYILERITEQAGVVLSLDPKPIEGDWNGAGCHTNYSTKSMREDGG

SEQ ID NO: 7288 - protein, 172 aa, Sinorhizobium xinjiangense
WGFDGSSTNQAEGRSSDCVLKPVAVYPDPVRTNGVLVMCEVMMPDGRTPHPSNSRATILDDEGAWFGFEQEYFFYKNGRPLGFPEQGYPAPQGPYYTGVGYSNVGDVARKIVEEHLDICLAAGINHEGINAEVAKGQWEFQVFGKGSKRAADEVWMARYLLQRLTEKYGIDV

SEQ ID NO: 7289 - protein, 123 aa, Zea mays
MAAADNTNPKDYYKVLEVEYDATDENIKLNYRRLALKWHPDKHGGDSAVTAKFQEIIEAYNVLSDPAKRLDYDLTGICEIEKYSLQEYLARFKSMILTCNGLGINQTDRWSQQLIENFESLDK

SEQ ID NO: 7290 - protein, 91 aa, Oxalis cf. ptychoclada EE916
  misc_feature (1)..(1): Xaa can be any naturally occurring amino acid
  misc_feature (4)..(4): Xaa can be any naturally occurring amino acid
XNIXGTNGEVMPGQWEYQVGPSVGIEAGDHIWASRYILERITEQAGVVLTLDPKPIDGDWNGAGCHTNYSTKSMRDEGGFEVIKKAILNLS

SEQ ID NO: 7291 - protein, 162 aa, Physcomitrella patens subsp. patens
RKPRGRPPGSKNKPKPPVIITRENGNAMRPHILEVAGGCDVGDSVASFSRRRQRGICVMGASGTVSNVTLRQPTTPGATVTFHGRFEIISLSGAFLPHPSSAPTTGLTVSLAGAAGQVLGGSVVGTLMAAGPVLVIAASFIGLTYERLPLDNDDDGLTMGPG

SEQ ID NO: 7292 - protein, 170 aa, Zea mays
  misc_feature (60)..(60): Xaa can be any naturally occurring amino acid
  misc_feature (83)..(83): Xaa can be any naturally occurring amino acid
MDGGGSGNASGGSGGASTCCYYALLGIRKNASATDIRAASRRLARKWHPDRWASDPRRRXGEANQRFQRIQEAYSVLSDKGKXRAMYDAGLFDPLDDDDQDFSDFMQEMLVMMDSVKNEKPDTLEDLQKMLEDIVKGDGGGGSGAGGRAPTDGARRTRVAPYPQPQRARR

SEQ ID NO: 7293 - protein, 261 aa, Zea mays
MEMTGFGSPCGACKFLRRRCARGCVFAPYFCDEQGAAHFAAIHKVFGASNASKLLAHLPLADRPEAAATISYEAQARLRDPTYGCVAHIFALQQQVMALQTQLASLTVTAQGQQRVHDVDDAKGYVGTAAAGQLGCSSNGSVAPATYGNVGHESLTALLRSESDYLQQSPCHAFEHAGADDKDDDGRQGNTFDFEAAADSSSFGAEESGWRSLSGYRDCEDLWWWRRRRQQLSYRRRRPSSPFRFGVGTRPSCSTRQSALT

SEQ ID NO: 7294 - protein, 431 aa, Spinacia oleracea
MAQILAPSMQCQMKLSKGLTSSMTPSPWTSILLKQGQKGSIKCSTKFRVCASLQSDHGTVNRVEQLLNLDVTPYTDKIIAEYIWIGGTGIDLRSKSRTLSKPVEHPSELPKWNYDGSSTGQAPGQDSEVILYPQAIFKDPFRGGNNILVICDAYTPAGEPIPTNKRHKAAEIFNNQKVASEVPWFGIEQEYTLLQPNVSWPLGWPVGAYPGPQGPYYCGVGADKSFGRDVSDAHYKACLYAGINISGTNGEVMPGQWEFQVGPSVGIEAGDHVWCARYLLERITEQIGVVMTLDPKPIEGDWNGAGCHTNYSTKTMREEGGFEVIKKAILNLSLRHKDHISAYGEGNERRLTGKHETADINTFSWGVANRGCSIRVGRDTEKEGKGYLEDRRPASNMDPYVVTGLLAETTILWEPTLEAEALAAQKLSLNV

SEQ ID NO: 7295 - protein, 95 aa, Oxalis paucartambensis
LYAGINISGTNGEVMPGQWEYQVGPSVGIEAGDHIWASRYILERITEQAGVVLTLDPKPIDGDWNGAGCHTNYSTKSMRDEGGFEVIKKAIFNLS

SEQ ID NO: 7296 - protein, 870 aa, Coccidioides immitis RS
MGLTNILAAFIAVSSLFIQSLALNPYAKSNLAVYWGQGAGQNRLSYFCEKTSFDIIVVGFINVFPDQGPAGWPGSNFGNQCADSYYYTKNGTKTKLLDGCYQIKEDLPKCKALGKTILLSLGGGAVHDFYEVKSEESALNFADFLWGAFGPLTPDWTGPRPFGEASVDGFDFDIEKGSNFAPQCIMPDKYLSHAISNSAFDFIFIQFYNNPSCSAKRWVTNPKSVTYTVDDWVKYIRKSGNPLAKLFIGLPASKSAAAKEDYLTPGEATKIVSTYMAKYPSTFGGMMVWEATASENNKLGGLPYADIMKEVLLRCDPDPPTSTVTSTISASTSTQTSSQSTTMETKTLSASTTPSSPSTVSPSSTMQTTSTGSTSTGTGTTSSQVTSSTTISTRSASTETVTTRSQEPPSTTISTRPASTETVTTRSQEPPSSTISTRSASTETVTTRSQEPPSSTISTRSASTETSTSSQDSPSTTISTKSAPTGTVTTRSQDLPSTTISTRSPETETETVTTKSQDSPSITLSTRSSSAETVSTRSQHSSSTTISTKSAPTETGTTSEHSTSMPVSTRSASTETVITRSQNSDSQSMTVSTRSPSTESITTRSQGSPSETFSTKSVPVDTISTELPSQTHSTTDSTPVSSSPTIPSGSTTIIPGTASDPVSAPTTTVPPNPTLTLAPSSSTTEDRTTITTIITTSYVTVCPTGFTTVTITYTTTYCPETASLTPTQAPIPGAPAPPPDGWTTIVTVCPQCAPTPTTVTLTVPTRSAFLPAPTETRPVVTVVPVPENPIKNVKPSESGDFVTVTTVAPATVTKTLEYNNPVDSDVNVQPTGGSSPVEFEGGAMTVRSMDVVAKALITAGAAVLGLFLGL

SEQ ID NO: 7297 - protein, 599 aa, Oryza sativa Japonica Group
MAAVAGSASAGANGSAAAHRVGAPTNPMATALLTDQYQFSMAYAYWKAGKHADRAVFDLYFRKNPFGGEFTVFAGLEECIKFIANFKFTEDDILFLQSVMPMCEDAFFDYLRKTDCSDVEVYSIPEGSVVFPKVPLMRVEGPVAVVQLLETPFVNLINYASLVTTNAARHRHVAGKSKVLLEFGLRRAQGPDGAISASKYCFMGGFDATSNVLAGNLFGIPLRGTHSHAYVSSYMSLDEIPDKSLKSKDGSRVCKDFVSLVKEWLQKIQLADSLCGVFGETNQSELAAFASYALAFPTIFLALVDTYDVMRSGIPNFCAVALALHDLGYKASGIRLDSGDLAYLSIEARKVFRTLEKEFNVPAFGKMIITASNDLNEETIDALNKQGHEVDSFGIGTYLVTCYSQAALGCVFKLVEINSRPRIKLSEDVAKCHDGFQVSIPCKKRCFRLYGKEGYPLVDIMMRESEPSPKAGERILCRHPFLESKRAYVVPQHVEELLQCYWPGTSNKPRVELPSLEEIRGRCMQQLEKLRPDHIRRLNPTPYKVIDSETKAAKHWYNIRTPYSELKLEQNKNVVAPCVGCWAGFLVVFMVQGKLKIPE

SEQ ID NO: 7298 - protein, 542 aa, Rhizopus microsporus var. oligosporus
MLTRTFLGMAISAFLASTGVQAAWSSHGPNVMYYWGQNSAGGSNTQASLGTYCESGQVDAVLLSFLHVFNVGGIPEINLSSACAGTYFPNTQLLSCPAVGADIKKCQDKGVKVILSLGGAAGVYGFTSDAQGQQFAQTIWNLFGGGNSDTRPFGDAVIDGVDLDIEGGSSTGYVAFVNALRQKFSSNFLIGAAPQCPFPDAILGSVLNSASFDYVNVQFYNNYCSATGSSFNFDTWDNWAKTTSPNKNVKIMFTVPGSSTAAGSGYVPMSTLQTIVPSLASKYSSYGGVSVWDASQAWNNGGFNSQLYSLVHSGGSTPPPPSSSSATKTTTKTTATSTKTTTTTAPTATSTPGSCPVANQPCSTQNQYACTADGKYAVCDHGKWVASSCPSNTVCIPTTDGASIYCGYATGSGSTCPSVSALEITAASLGSKNGPVPRPYKASKVAAQLAVTSTDKNSFEAVINARRTTLTPFEKSVTIEFTTPSNIKFTESDMGPVRQVGNKVRIQAKNDYNESMTLVVKVKGSINSGVFVAPSTSAWNFK

SEQ ID NO: 7299 - protein, 459 aa, Chlamydomonas reinhardtii
MPAPCSSGLAPRTDLQSTQPLLYTKRAAAYISLRSLTQALRDLNKAVELDDAFVQGYINRGKLQRQMCNYDAAERDFKRVLELKPGQKVAEQELQRTLASRSKMEAVQAAVRAAEAAKAEAAKAAGDGAEPPNTSAADLERIKPTLESLYEDSPDCVQAQVLEAQMMFAAAEYEQVVAVTGRIVKADDRQLDALVLRGRAYFYLYDHDMAKRHFGEALKYDPDHGAARKEFNKVKDYDRKRARAEKALEARDWEAAEKGYIDALHVDRDHRKGNEALWFGLCRARAALARIDLAITACANTLILAPGHREAKLLMVRTMLEAERFDEAQVKAREFLSQHQNDGEFHELAREAERRLKMAKRKDYYKVLGIDKTAGDREIKRAYRDLAKKYHPDKVSADEREASEAQFREIAEAYEVLSDEGKRQAYDSGQDLEEMQHGGGGGGHPFFQQGGMHFTFRFG

SEQ ID NO: 7300 - protein, 379 aa, Staphylococcus aureus subsp. aureus MRSA252
MAKRDYYEVLGISKDASKDEIKKAYRKLSKKYHPDINKEEGADEKFKEISEAYEVLSDDNKRASYDQFGHDGPQGFGGQGFNGSDFGGFSGFGGGGFEDIFSSFFGGGRQRDPNAPQKGDDLQYTMTLTFEEAVFGTTKEISIRKDVTCETCHGDGAKPGTSKKTCSYCNGAGHVAVEQNTILGRVRTEQVCPKCNGSGQEFEEACPTCHGKGTENKTVKLEVKVPEGVDNEQQIRLAGEGSPGVNGGPAGDLYVVFRVKPSETFKRDGDDIYYKLNVSFPQAALGDEIKIPTLNNEVMLTIPAGTQTGKQFRLKEKGIKNVHGYGYGDLYVDIKVVTPTKLTDRQKELMKEFAQLNGEEINDQPSNFKDRAKRFFKGE

SEQ ID NO: 7301 - protein, 147 aa, Zea mays
  misc_feature (105)..(105): Xaa can be any naturally occurring amino acid
ASGGKGGFSSQRHHGKSQSHVAFENTSTNVAASQMRNALNRRADTVTDPAEGRYFETEMDNFFALFRRYLNDKAKGTAIDWNRIAPPKADQVVSYDDLANTEAVXYFFFLAVVNLNGGLGTSMGCLGPKSVIQVPQRMSFLDLSMRQ

SEQ ID NO: 7302 - protein, 292 aa, Trichosanthes kirilowii
MAAHKITTALSVIFLLAPIFQSSHAAGIAIYWGQNGNEGSLSFTCSTGNYQFVNIAFLSSFGSGRTPVLNLAGHCNPSNNGCAFLSSQIKACQSRGIKVLLSIGGGAGSYSLSSADDARQVANFIWNNFLGGRSSSRPLGDAVLDGVDFDIESGSGQFWDTLARQLKGLGRVLLAAAPQCPIPDAHLDAAIKTGLFDFVWVQFYNNPPCMFANGKANNLLNSWNRWLSFPVGKLFMGLPAAAAAAPSGGFIPANVLISQVLPKIKTSPKYGGVMLWSKFFDNGYSNAIKGSL

SEQ ID NO: 7303 - protein, 395 aa, Staphylococcus aureus subsp. aureus Mu50
MLDKNQLAKYKQDHLCEYEKIMSNNEKEALEEKVASLDLDFIAKLYNDLYINKKTIDDVSAVSEVKYDIKSQMSDDEIKRLEEQGLQAIKEGQFAVLLMAGGQGTRLGYKGPKGSFEIEGVSLFELQANQLKTLNHQSGHTIQWYIMTSDINHEETLAYFEAHSYFGYDQEAIHFFKQDNIVALSEEGKLILNQQGRIMETPNGNGGVFKSLDKAGYLEEMSNNGVKYIFLNNIDNVLVKVLDPLFAGFTVEHDYDITSKTIQPKPGESVGRLVNVDCKDTVLEYSELDPEVANQFNNANIGIHAFKLGFILNAVNRELPYHLAIKNLKQLDENFGVIEQPTLKFELFYFDIFTYGTSFVTLQVPREEEFSPLKNKEGKDSVATATEDLRRMGLI

SEQ ID NO: 7304 - protein, 430 aa, Lotus japonicus
  misc_feature (263)..(263): Xaa can be any naturally occurring amino acid
  misc_feature (284)..(284): Xaa can be any naturally occurring amino acid
MAQILAPSTQWQTRITKTSPNASPITSNMWSSLLWKQNKKVARASKFRVLAIKSDGSTINRLEGLLNLDVTPYTDKFIAEYIWIGGTGVDVRSKSRTISKPVSHPSELPKWNYDGSSTGQAPGDDSEVILYPQAIFRDPFRGGNNILVICDAYTPQGEPIPTNKRHRAAEIFSNPKVQAEIPWYGIEQEYTLLQTDVKWPLGWPVGGYPGPQGPYYCAAGADKSFGRDISDAHYKACLYAGINISGTNGEVMPGQWEYQVGPXVGIEAGDHIWASRYLLERITXQAGVVLTLDPKPIEGDWNGAGAHTNYSTKSMREEGGFEVIKKAILNLSLRHQDHIRAYGEGNERRLTGKHETADINTFSWGVANRGCSIRVGRDTEKEGKGYLEDRRPASNMDPYVVTALLAETTLLWEPTLEAEALAAQKIQLKV

SEQ ID NO: 7305 - protein, 337 aa, Glycine max
  misc_feature (209)..(209): Xaa can be any naturally occurring amino acid
MGVDYYKLLQVDRNASDEDLKKAYRKLAMKWHPDKNPNNKRDAEAKFKQISEAYDVLSDPQKRGVYDQYGEEGLKGQVPPPGAGGFSGGSDGGPTMFRFNPRSADDIFSEFFGFSSPYGMGDMGGRAGPSGYPRFADDLFASFSRSAAGEGSSNVPRKGAPIEKTLQCSLEDLYKGTTKKMKISRDVIDSSGRLTHVESILTIQIKPGXKKGLTIIFLRQGHDHRGVILSDFVFIIDETLHGVFKRDGNDLVITQNIFLVEALTGYTAQLTTLDGRNLTVSTNSIISPTYEEVIKGEGMPIPKEPSKKGNLRIKFNIKFPSRLTSEQKTGIKRLLTS

SEQ ID NO: 7306 - protein, 473 aa, Candida albicans SC5314
MLSFKSLLAAAVVASSALASASNQVALYWGQNGAGGQERLAQYCQEADVDIILLSFLNLFPDPLNVNFANQCGNTFESGLLHCSQIGADIKTCQSLGKTVLLSLGGGVGDYGFSDVASATKFADTLWNKFGAGEDPERPFDDAVVDGFDFDIEHGGATGYPELATALRGKFAKDTSKNYFLSAAPQCPYPDASLGDLLSKVPLDLAFIQFYNNYCSINGQFNYDTWSKFADSAPNKNIKLFVGVPATSNIAGYVDTSKLSSAIEEIKCDSHFAGVSLWDASGAWLNTDEKGENFVVQVKNVLNQNACVAPSSSATTQSTTTTSSAVTQSTTTTSAAITQSATTTSAAVATKSNQIVTSSSSSSSSIFYGNSTTESSTGIATGTVLPTGSNENAATTGSGSNTKLAISTVTDVQKTVITITSCSEHKCVATPVTTGVVVVTDIDTVYTTYCPLTNSQVYVSVKTVVCTDINMCS

SEQ ID NO: 7307 - protein, 273 aa, Hevea brasiliensis
GGIAIYWGQNGNEGTLTQTCSTRKYSYVNIAFLNKFGNGQTPQINLAGHCNPAAGGCTIVSNGIRSCQIQGIKVMLSLGGGIGSYTLASQADAKNVADYLWNNFLGGKSSSRPLGDAVLDGIDFDIEHGSTLYWDDLARYLSAYSKQGKKVYLTAAPQCPFPDRYLGTALNTGLFDYVWVQFYNNPPCQYSSGNINNIINSWNRWTTSINAGKIFLGLPAAPEAAGSGYVPPDVLISRILPEIKKSPKYGGVMLWSKFYDDKNGYSSSILDSV

SEQ ID NO: 7308 - protein, 239 aa, Ostreococcus tauri
MTHGDATMVRATLLARVNDGLPLAESLDASTRTTPSVDPVEDGTETAKRQAKALFKKLSDPSSGPPPSRMTIETTSELLMHYVIHENVCYLCVCDRTYPKKLAYAYLEELQNEFSERHGEEVGTVGRPYAFIKFDTFIQRTKKLYSDARTQRNLNKLNDDLHDIQQIMTRNINDIMGQGERLDRVSAMSGNLSEASKKYSKKARDLSRQALIQKYMPLAIFCGIVILTLMLRRYVFTYG

SEQ ID NO: 7309 - protein, 321 aa, Nostoc punctiforme PCC 73102
MPTANDFKDYYNILGVSKTATSDEIKRAYRKLARKYHPDVNPGNPEAEEKFKDINEANEVLSNPEKREKYDSFGQYWKQAEASGTPPGGTSTYAENFDQYSNFDDFINDLLGGLGGRTRAGRTYYRTSARQPDDFGSFGSQAPAPDSEAAIALSFSEAFHGVQKRLQLDDETINVRIPAGAKPGSRIRIKGKGRPSPFSQQRGDLYLTIELLPHPFFQFSDDNLTCEVPIRPDEAVLGAQIQVPTPEGRVTLSVPKGVRSGQSLRLRGKGWTQPKGGRTDLIVKLQIVSPKELSEIERDCYEKIQANSSFNPRTALEGVTL

SEQ ID NO: 7310 - protein, 57 aa, Passiflora edulis f. flavicarpa
WEYQVGPSVGVDAGDHIWCSRYILERITEQAGVVLSLDPKPIEGDWNGAGCHTNYST

SEQ ID NO: 7311 - protein, 214 aa, Arabidopsis thaliana
MVKLTIVGRVEDGLPLAQDQTYVNQEDNTSFLLYKQQAEFLLKQVSKDSLLHPKMTILLDHHSFHFLVEKKICYIALSDSSYPRKLLFNYLQNLNKELDKLDEKALIQKISKPYSFIRFGKIIGRIRKQYIDTRTQANLSKLNALRKQELDVVTEHLNDIIQRQQILGVLRSSNDCFNHLELTMSSGYFVKMDTSDDYYSRYSCSFQSKLDYDR

SEQ ID NO: 7312 - protein, 58 aa, Passiflora edulis f. flavicarpa
WEYQVGPSVGVDAGDHIWCSRYILERITEQAGVVLSLDPKPIEGDWNGAGCHTNYSTK

SEQ ID NO: 7313 - protein, 379 aa, Anaplasma marginale str. St. Maries
MSGNDYYEILEVSRNASAEEIKKSYRKMVFKYHPDKNPGDKKAEEKFKKISEAYEVLSNPEKRAAYDRYGHSTFTSGGASGFDFTSGFSTDFSDIFQDFFGGGFGKSQRASSREHLRGSDLRYDVEVSLEDAFKGIKVPISYVTNVKCSSCSGIGSEGAVNSVKCGNCNGAGSVRTRKGFLTIEEVCNVCNGEGEVIKNKCRRCGGSGRVRNEVSLLVTVPKGIETGNKVRVNGKGEAGFRGAQEGDLYVYIRVKEHKFFTRRSSDLHCSVPIKMTIAALGGEIEMPSIDGSWTKLKIPEGTQSGDQIRMRGKGMPEVNSKDRRGDMYVHVTVETPVKLTKQQVDLLKKFEEESSANCSPKYQGFFQKIKDIWRDISSG

SEQ ID NO: 7314 - protein, 73 aa, Sinningia barbata
  misc_feature (25)..(25): Xaa can be any naturally occurring amino acid
  misc_feature (38)..(38): Xaa can be any naturally occurring amino acid
  misc_feature (41)..(41): Xaa can be any naturally occurring amino acid
  misc_feature (50)..(50): Xaa can be any naturally occurring amino acid
  misc_feature (52)..(52): Xaa can be any naturally occurring amino acid
  misc_feature (54)..(54): Xaa can be any naturally occurring amino acid
  misc_feature (57)..(57): Xaa can be any naturally occurring amino acid
  misc_feature (64)..(64): Xaa can be any naturally occurring amino acid
  misc_feature (67)..(67): Xaa can be any naturally occurring amino acid
ISGTNGEVMPGQWEFQVGPSVGIEXGDHIWCARYLLEXITXQAGVVLSLXPXPXEGXWNGAECXTNXSTKSMR

SEQ ID NO: 7315 - protein, 57 aa, Passiflora exura
  misc_feature (14)..(14): Xaa can be any naturally occurring amino acid
WEYQVGPSVGIDAXDHIWCSRYILERITEQAGVVLTLDPKPIEGDWNGAGCHTHYST

SEQ ID NO: 7316 - protein, 346 aa, Sordaria macrospora; identical to SEQ ID NO: 3471

SEQ ID NO: 7317 - protein, 177 aa, Vitis vinifera
ADDARQVAEYLWNNFLGGQSSSRPLGDAVLDGIDFDIEGGTNQHWDELRPPWRPREFDSVYLSAAPQCPFPDAWMGTAIATGLFDYVWVQFYNNDCQFSGNADKLISAWNQWTTIQAGQVFLGLPAAPEAAGSGYIAPDVLVSQVLPSIKTSPKYGGVMLWSKYYDNGYSAAIKSSV

SEQ ID NO: 7318 - protein, 73 aa, Sinningia tuberosa
ISGTNGEVMPGQWKFQVGPSVGIEAGDHIWCARYLLERITEQAGVVLSLDPKPIEGDWNGAGCHTNYSTKSMR

SEQ ID NO: 7319 - protein, 55 aa, Passiflora foetida
WEYQVGPSVGIDAGDHIWCSRYILERITEQAGVVLTLDPKPIEGDWNGAGCHTNY

SEQ ID NO: 7320 - protein, 309 aa, Desulfococcus oleovorans Hxd3
MAETDYYKILGVEKNATDEEIKKAYRKLAMKYHPDHSKGDKKAAEEKFKKISEAYAVLKDKEKRKQYDTYGANGFHERYSQEDIFRGFDFSDILKEFGFGGGGGFFSGGGRGGGARFSFDGGSPFGGGGPRQTAAVKGEDVVYELPVTIQEVVSGTTKAVSLRHGGGTETVNVKIPKGMVSGKKIRLAGKGQPSRFGGPSGDMYIQAKLVKDPVFEVDGYDLYMTTGVKLTDALKGTRITVAGVDGKDLNLRVPPGTRHKSKLRLAGQGIPHMRGAGRGDLYVEIQVEMPSKLTDQQKQLVEALAETGL

SEQ ID NO: 7321 - protein, 258 aa, Zea mays
  misc_feature (49)..(49): Xaa can be any naturally occurring amino acid
  misc_feature (61)..(61): Xaa can be any naturally occurring amino acid
  misc_feature (75)..(75): Xaa can be any naturally occurring amino acid
  misc_feature (107)..(107): Xaa can be any naturally occurring amino acid
  misc_feature (133)..(133): Xaa can be any naturally occurring amino acid
  misc_feature (172)..(172): Xaa can be any naturally occurring amino acid
  misc_feature (184)..(184): Xaa can be any naturally occurring amino acid
  misc_feature (214)..(214): Xaa can be any naturally occurring amino acid
  misc_feature (219)..(219): Xaa can be any naturally occurring amino acid
MAGAVVAADSKIDLLRDAAALLGEMGEIEKVGFFYLDWRDLSGDVSSIXWNKILTPTDERXACDPLFAPNGHIMXLLRTVMCTFLLMLFSVPTPGMISISAWPFMAXIRSSFGYIYLAWYAVCSEISFSLDVXFLVVSCNTRDEFRMIDCTDCDSTLALFTFHERRYPRVVXTEDVLPLPSMGXMGKDGWDPSDHGDVMPSLNSCGYLHTLLSXGKEYXYQARFYNLGWIGDIQILNPWSPTEKRLDGSPPKNFGPVV

SEQ ID NO: 7322 - protein, 503 aa, Cryptococcus neoformans var. neoformans JEC21
MATLEPKQDPQASARQRGHSAMDFKSATTGVAAKTMRNELNRMVANEQDPAKKKMFEAEMQSFFILFNRFLTERAKGEKLDWDKINPPKPEQVRPYEVLPNVDPSILNKLAVLKLNGGLGTTMGCVGPKSIIEVRDNMTFLDLSVRQIEHLNEKYNVNVPFILMNSFNTDEDTARIIQKYQNHNINILTFNQSRYPRVDKESLLPCPRESSSDKSNWYPPGHGDIFDALTNSGLLDKLIAAGKEYIFISNVDNLGAVVDLNIFQTMIDAQAEYVMEVTDKTKADVKGGTIIDYDGKPRLLEVAQVPKDHLDEFCSTRKFKIFNTNNIWCNLRAIKRIMDEDALNLEIIVNNKVTDDGLAVIQLETAIGAAIKHFDSAIGINVPRSRFLPVKSCSDLLLIKSKLYNLEHGVLTMDRSREFGGTPVVKLGGEFKKVANFEKRFKSIPNITELDHLTVSGDVWFGKSVRLAGTCIIVATEGNKIMIPDGTNLENKLITGNLSIIDH

SEQ ID NO: 7323 - protein, 91 aa, Oxalis picchensis
INISGTNGEVMPGQWEYQVGPSVGIEAGDHIWASRYILERITEQAGVVLTLDPKPIDGDWNGAGCHTNYSTKSMRDEGGFEVIKKAIFNLS

SEQ ID NO: 7324 - protein, 301 aa, Pyrococcus horikoshii OT3
MQTLILMAYIKRLVSEGKHASLREAYYANKHTVPGTRENTFEDQSESDPIIEDLERMLGVLREEMHITADRRGYIYGDIVIKDGEDEFNASKLGTGGWAVPGTVEHIQFPEINVDYVLVVETAAMADRLIEEKYPKRENCLIVATQGQASRGVRRLIHRLHYEEGLPIIVFTDGDPYGWYIYSTIKRGSINLAYLSEKLATPDAKFVGMTMDDIKEYNLENVTEKLKGIPPDKKGGPTGDYKRLIEELNYPWFQDKEWQRQLKLALKWGVRIEQQALANKSLEFVAKEYLPEKIREGKLLP

SEQ ID NO: 7325 - protein, 188 aa, Arabidopsis thaliana
MEREDLYAVLDLNNECTQGDLRLSYKNLVLKWHPDRFLEEIEKDEAKMKFQSIQRAYSVLSDSNKRLLYDVGAYDSDDDETGMADFINEMVTLMAQTQSTGDESLEEFEELFQELLKDDVNQFKTRSSSSSCSQFSGTSTLVHCDDLSNSNDIPNKINGHDNYCCISSSKVVHRRDSKLAIEDLRSRA

SEQ ID NO: 7326 - protein, 292 aa, Cucumis sativus
MAAHKITTTLSIFFLLSSIFRSSDAAGIAIYWGQNGNEGSLASTCATGNYEFVNIAFLSSFGSGQAPVLNLAGHCNPDNNGCAFLSDEINSCKSQNVKVLLSIGGGAGSYSLSSADDAKQVANFIWNSYLGGQSDSRPLGAAVLDGVDFDIESGSGQFWDVLAQELKNFGQVILSAAPQCPIPDAHLDAAIKTGLFDSVWVQFYNNPPCMFADNADNLLSSWNQWTAFPTSKLYMGLPAAREAAPSGGFIPADVLISQVLPTIKASSNYGGVMLWSKAFDNGYSDSIKGSIG

SEQ ID NO: 7327 - protein, 1131 aa, Physcomitrella patens subsp. patens
MSSTKLSYSSGTSVKSKHSVRVQQTTADAKLQAVYEESNDSGDSFDYSKSVGQATKSTVQQVPAQAVTAYLQRMQRGGLTQNFGCMLAVEESTFRVIAYSENAPEMLDLMPQAVPSVGLKEVLGIGTDARLLFTPSSASTLERAAATSDLTMVNPISVHSRNSGKPFYAIVHRIDVGIVIDFEPVRSNDVVISTAGALHSHKLAAKAVSRLQSLPGGDIGLLCDAVVEEVRELTGYDRVMAYKFHDDEHGEVLAEIRRSDLESYLGLHYPSTDIPQASRFLFMKNRVRMIADCCAPPVKVIQDKDLRQPITLAGSTLRAPHGCHAQYMGNMGSVASITLAVIVHDQEEDFGVQQKGRRLWGLVVCHHTSPRTISFPLRSACEFLMQVFGLQLNMEVELQAQMKEKHILRTQTLLCDMLLRDAPVGIVSQSPNIMDLVKCDGAALYYENQFWLLGTTPSEEQIEEIAAWLLEHHKDSTGLSTDSLADAGYPGANLLGDAVCGMAAARISSKDFLLWFRSHSAKEIKWGGAKHDAEDRDDSRKMTPRSSFNAFLEVVKRRSVPWEDIEMDAIHSLQLILRGSFQDVDGSGGKTMIHSRLHDLKLQGMDELSTVANEMVRLIETATAPILAVDSNGFINGWNAKVAELTGLPVGEAMGRSLVKDLILEEYVEVVERLLYLALQGEEEQNIEVSLKTFGAQKAKGAVILVVNACSSRDVQENVVGVCFVGQDVTGQKMVHDKFTRIHGDYKSIVQSPNPLIPPIFGSDELGYCIEWSPSMEKLTGWKREEVLGKMLVGEIFGVHQMCCRLKGQDAVTKFMIVLNNAMDGQDTDKYPFSFHDRQGKLVEALLTANKRTDADGYITGVFCFLHIASPELLQALTVQRATEKVAFAKLKELAYIRQEIKNPLYGIMFTRNLMEDTDLSDEQKQYMDTSAVCERQLRKILDDMDLESIEDGYLELETMEFEMGSMMDAVVSQGMVTSREKGLQLIRETPREIQGMCLFGDQVRLQQVLADFLLNAVRFTPSSEGWVGIKVVPTRKRLGGGFHVVHLEFRVTHPGSGLPEELVHEMFDRGRGMTQEGLGLSMCRKLVKLMNGEVKYIRDTGKSCFLVSLELPLTVSDDAGSVRQSGPLNC

SEQ ID NO: 7328 - protein, 444 aa, Oryza sativa
MARWPWRWRVLLPLLLLHSSPVFAQEGQDNDPSTLFKRASEMMNLRKYDGSLGLLNAVLEVDPNHSEAYRQRASVLRHKCRYKEAEGDYSKYLELKPGSSSVEKELSQLLQAQNALESAYGQFESHDFSKVLEYINKIVLVFSPNCLKAKLLKAKALLALEDYSSVISETGFILKEDEDNLDALLLRGRAYYYLADHDVASRHYQKGLRLDPEHSELKKAYFGLKNLLKKTKSAEDNAAKGKLRVSAEDYKAALAMDPDHTSYNVHLYLGLCKVLVKLGRGKEAISSCTEALNIDGELVDALTQDMGIREALMRAEKQLKLSKRKDWYKILGISKTASAADIKRAYKKLALQWHPDKNVDNREEAENMFREIAAAYEVLGDEDKRVRYDRGEDLDEMNMGGGGGGFNPFGGGGQQYTFHYDGGFYGGGGFPGGGFPGGFQFNFG

SEQ ID NO: 7329 - protein, 339 aa, Cytophaga hutchinsonii ATCC 33406
MAKVKSKLEYIWLDGYKPTQSLRSKTKIEENFSGKLEDLSNWSFDGSSTEQAKGGSSDCLLKPVFVCPDPQRKNGYLVMCEVLNADGTPHPTNGRAQIEDDDNDFWFGFEQEYFLYDLSTNMPLGFPAGGYPKPQGPYYCSVGAQNAYGREIIEEHLDVCLDAGLNVEGINAEVAAGQWEFQIFAKGAKRAGDEIWVARYLLERIGEKYGVYVNYHCKPLGDLDWNGSGMHANFSNTLLRTAGSKEVFDKVCEAFRPVVKEHIEVYGAHNELRLTGKHETASIHDFSYGVSDRGASIRIPVLVPAKGWSGYLEDRRPNSAADPYKVAARIIKTVKPVQR

SEQ ID NO: 7330 - protein, 470 aa, Physcomitrella patens subsp. patens; identical to SEQ ID NO: 3483

SEQ ID NO: 7331 - protein, 454 aa, Triticum aestivum
  misc_feature (186)..(186): Xaa can be any naturally occurring amino acid
  misc_feature (317)..(317): Xaa can be any naturally occurring amino acid
MAAAAVAADSKIDNLRDAVAKLGEISENEKAGFISLVSRYLSGEAEQIEWSKIQTPTDEVVVPYDTLAPPPEDLDAMKALLDKLVVLKLNGGLGTTMGCTGPKSVIEVRNGFTFLDLIVIQIESLNKKYGCSVPLLLMNSFNTHDDTQKIVEKYSNSNIEIHTFNQSQYPRIVTEDFLPLPSKGQXGKDGWYPPGHGDVFPSLNNSGKLDTLLSQGKEYVFVANSDNLGAIVDIKILNHLITNQNEYCMEVTPKTLADVKGGTLISYEGRVQLLEIAQVPDEHVNEFKSIEKFKIFNTNNLWVNLKAIKRLVDAEAXETAAGAAIRFFEKAIGINVPRSRFLPVKATSDLLLVQSDLYTLVDGYVIRNPARVKPSNPSIELGPEFKKVANFLARFKSIPSIVELDSLKVSGDVSFGSGVVLKGNVTIAAKAGVKLEIPDGAVLENKDINGPEDL

SEQ ID NO: 7332 - protein, 376 aa, Nicotiana tabacum
GLGTTMGCTGPKSVIEVRNGLTFLDLIVKQIEALNAKYGCTVPLLLMNSFNTHDDTLKIVEKYANSNIEIHTFNQSQYPRLVTEDFSPLPCKGNSGKDGWYPPGHGDVFPALANSGKLDALLAKGKEYVFVANSDNLGAIVDLKILNHLIQNKNEYCMEVTPKTLADVKGGTLISYQGKVQLLEIAQVPDEHVNEFKSIEKFKIFNTNNLWVNLNAIKRLVEADALKMEIIPNPKEVDGVKVLQLETAAGAAIKFFDRAIGVNVPRSRFLPVKATSDLLLVQSDLYTLTDEGYVIRNPARSNPSNPAIELGPEFKKVANFLGRFKSIPSIIDLDSLKVTGDVWFGSGVTLKGKVTVAAKSGVKLEIPDGAVIANKD

SEQ ID NO: 7333 - protein, 431 aa, Triticum aestivum
  misc_feature (23)..(23): Xaa can be any naturally occurring amino acid
VSSGDGAGGGAGDAVPGGRAGQXAVPARQPAGRVWGVRRTARATSGFEVLALGPETTGVIQRMQQLLDMDTTPFTDKIIAEYIWVGGSGIDLRSKSRTISKPVEDPSELPKWNYDGSSTGQPPGEDSEVILYPQAIFKDPFRGGNNILVICDTYTPQGEPVPTNKRHMAAQIFSDPKVTAQVPWFGIEQEYTLMQRDVNWPLGWPVGGYPGPQGPYYCAVGSDKSFGRDISDAHYKACLYAGIEISGTNGEVMPGQWEYQVGPSVGIDAGDHIWASGYILERITEQAGVVLTLDPKPIQGDWNGAGCHTNYSTLSMREDGGFDVIKKAILNLSLRHDLHIAAYGEGNERRLTGLHETASISDFSWCVANRGCSIRVGRETEAKGKGYLEDRRPPSNMDPYTVTALLAETTILWEPTLEAEALAAKKLALKV

SEQ ID NO: 7334 - protein, 458 aa, Arabidopsis thaliana
MEKKENGLDGKQSGRVINGPTNPMVTPLLNDLYQFTMAYAYWKAGKQSERSVFDLYFRKNPFGGEYTIFAGLEECIKFLANFNLTDEEINFVRDSLPGCEEAFCDYLRGLDCSDIEVYAISEGSVVFPKVPLLRIEGPVAVVQLLETPFLNLINYASLVATNAARHRFVAGKSKLLLEFGARRAQGPDGAISASKYCYLGGFDATSNVAAGKLFGIPLRGTHSHAFVSSFMSLDEIVDKVLRSSDGKSTCKDFICLVQTCLTKIQVMKSGIPNFCAVALALNELGYKAVGIRLDSGDLAYLSTEVRKFFCAIERDLKVPDFGKMIVTASNDLNEETVDALNKQGHEVDAFGIGTNLVTCYAQAALGCVFKLVEINNQPRIKLSEDVTKVSIPCKKRTYRLFGKEGYPLVDIMTGENEPPPKVGERLLCRHPFNESKRAYVVPQRVEELLKCYWRGNAG

SEQ ID NO: 7335 - protein, 377 aa, Bordetella parapertussis 12822
MAKRDYYEVLGVAKNASDEDLKKAYRKLAMKYHPDRNPDSKEAEEKFKEAKEAYEVLGDEQKRAAYDRYGHAGVDPNAAGMGGGMGGGMGGGFADAFGDIFGEIFGAGRRGGGGPQVYRGADLKYALEITLEQAASGFDTEIRVPSWENCDTCHGSGAKAGTSPKTCRTCGGSGAVRMQQGFFSVQQTCPTCHGTGKEITDPCPSCDGVGRTRRNKTLQVKIPAGIDDGMRIRSSGNGEPGINGGPPGDLYVEIHIKQHKIFQRDGDDLHCELTIPFTTAALGGELQVPTLGGKAEISIPEGTQSGKTFRLRAKGIRGVRGSYPGDLYCHVVVETPVRLSDEQKAILRQFEASLNDGGDRHSPQSKSWTDRVKEFFS

SEQ ID NO: 7336 - protein, 131 aa, Triticum aestivum
MLWEWEDGDEAARTGEEVPVDFDFFSFFAKPKDYYKILEVDYDASEETIRSSYIRLALKWHPDKKQDEEKATSRFQDINEAYQVLSNPVKRQEYDKKGVLYVQDQNAADYLNRHKGLILTCNGLGVRYSVW

SEQ ID NO: 7337 - protein, 301 aa, Benincasa hispida
MATSLQISCLVPVLSLLLLAHVSTSYGGSIAIYWGQSGAEGTLREACATGRYKYVMLAFLNKFGNGRTPSINLSGHCNPANGGCKVASRNIKFCQSKGIKILLSIGGGIGSYSLASPADAKRFATYLYNNYLGGRSSARPLGDAVLDGIDFDIELGSTANWQYLARYLKGFSKPNKRVYLSAAPQCPFPDKFLGKALDTGLFDYVWVQFYNNGPCQYEAGNINKLISSWNRWTSSVRGSGKIFLGLPAARGAAGSGYIPPRVLTSQILPKIKRSPRYGGVMLWSRYWDKQTGYSTAIIKSV

SEQ ID NO: 7338 - protein, 1134 aa, Zea mays
  misc_feature (502)..(502): Xaa can be any naturally occurring amino acid
  misc_feature (594)..(594): Xaa can be any naturally occurring amino acid
MSSSRPAHSSSSSSRTRQSSRARILAQTTLDAELNAEYEESGDSFDYSKLVEAQRSTPPEQQGRSGKVIAYLQHIQRGKLIQPFGCLLALDEKSFRVIAFSENAPEMLTTVSHAVPNVDDPPKLGIGTNVRSLFTDPGATALQKALGFADVSLLNPILVQCKTSGKPFYAIVHRATGCLVVDFEPVKPTEFPATAAGALQSYKLAAKAISKIQSLLGGSMEALCNTVVKEVFDLTGYDRVMAYKFHEDEHGEVFAEITKPGIEPYIGLHYPATDIPQAARFLFMKNKVRMICDCRARSVKIIEDEALSIDISLCGSTLRAPHSCHLKYMENMNSIASLVMAVVVNENEEDDEPEPEQPPQQQKKKRLWGLIVCHHESPRYVPFPLRYACEFLAQVFAVHVNKEFELEKQIREKNILRMQTMLSDMLFKESSPLSIVSGSPNIMDLVKCDGAALLYGDKVWRLQTAPTESQIRDIAFWLSEVHGDSTGLSTDSLQDAGYPGAXASLGDMICGMAVAKITSKDILFWFRSHTAAEIKWGGAKHDPSDKDDNRRMHPRLSFKAFLEVVKTKSLPWSDYEMDAIHSLQLILRGTLNDXASKPAQASGLDNQIGDLKLDGLAELQAVTSEMVRLMETATVPILAVDGNGLVNGWNQKVAELSGLRVDEAIGRHILTLVEDSSVSLVQRMLYLALQAGREEKEVRFELKTHGSKRDDGPVILVVNACASRDMHDHVVGVCFVAQDMTVHKLVMDKFTRVEGDYRAIIHNPNPLIPPIFGADQFGWCSEWNAAMTKLTGWHRDEVIDRMLLGEVFDSSNASCLLKSKDAFVRLCIIINSALAGEEAEKASFGFFDRNEKYVECLLSVNRKVNADGVVTGVFCFIHVPSDDLQHALHVQQASEQTALRKLKAFSYMRHAINKPLSGMLYSRETLKSTGLNEEQMRQVRVGDNCHRQLSKILADLDQDNITDKSSCLDLDMAEFVLQDVVVSAVSQVLIGCQAKGIRVACNLPERSMKQRVYGDGIRLQQIVSDFLFVSVKFSPAGGSVDISSKLTKNSIGENLHLIDFELRIKHRGAGVPAEILSQMYEEDNKEQSEEGFSLAVSRNLLRLMNGDIRHLREAGMSTFILTAELAAAPSAVGR

SEQ ID NO: 7339 - protein, 379 aa, Thermobifida fusca YX
MARDYYEILGVRRDATQDEIKKAYRRLARELHPDVNPDPETQERFKEVAQAYEVLSNPEKRRMYDMGVDPFARGGAAGGGATGFGAGFPFDDLMNAFFGGSTGTRAARERMRRGRSIKVRVELDLEETAFGVTKDITFPTAVVCNTCQGEGTAQGTHPETCDMCGGRGEVSQVTRSFLGQVMTTRPCPQCAGQGTIIRNPCPDCAGEGRVRERVTRKVQIPAGVEDGTQIQLAGEGEVGPNGGPRGDIFLEIVERPHPIFERRGDDLHCTVTVPMTAAALGATLTIDTLDGPEEIDLRPGTNSGQVITLQSKGCHHLNAPGRGDLHIHVTVETPTRLDEEQEALLRKLAELRGEDRPPGKFSPGQGNFFSRIRDAFGAR

SEQ ID NO: 7340 - protein, 56 aa, Passiflora foetida
WEYQVGPSVGIDAGDHIWCSRYILERITEQAGVVLTLDPKPIEGDWNGAGCHTNYR

SEQ ID NO: 7341 - protein, 229 aa, Brassica napus
  misc_feature (176)..(177): Xaa can be any naturally occurring amino acid
  misc_feature (192)..(192): Xaa can be any naturally occurring amino acid
  misc_feature (197)..(197): Xaa can be any naturally occurring amino acid
  misc_feature (202)..(203): Xaa can be any naturally occurring amino acid
  misc_feature (209)..(209): Xaa can be any naturally occurring amino acid
  misc_feature (212)..(212): Xaa can be any naturally occurring amino acid
  misc_feature (220)..(220): Xaa can be any naturally occurring amino acid
MKGEGNEMFPKLPQNHSLSSHFHLPATIAVDDSSIEVVRRPRGRPPGSKNKPKPQVYVTRDTEPPMSPYILEVPSGNDVVEAINRFCRRKSIGVCVLSGSGSVANITLRQPSPAAPGSTITFHGKFDLLSVSATFLPPPPRTSLSPPVANFFTVSLAGPQGQIIGGFVAGPLISAXXTVYVIAASFNNPSYXRFTGXREEHXXSISARXREXGDGQSPRXFGRRRAKKG

SEQ ID NO: 7342 - protein, 57 aa, Passiflora foetida var. arizonica
WEYQVGPSVGIDAGDHIWCSRYILERITEQAGVVLTLDPKPIEGDWNGAGCHTNYST

SEQ ID NO: 7343 - protein, 73 aa, Sinningia conspicua
ISGTNGEVMPGQWEFQVGPSVGIEAGDHIWCARYLLERITEQAGVVLSLDPKPIEGDWNGAGCPTNYSTKSMR

SEQ ID NO: 7344 - protein, 75 aa, Passiflora foetida var. hastata
GTNGEVMPGQWEYQVGPSVGIDAGDHIWCSRYILERITEQAGVVLTLDPKPIEGDWNGAGCHTNYSTKSMRDDGG

SEQ ID NO: 7345 - protein, 201 aa, Arabidopsis thaliana
MEREDLYAVLDLNNECTQGDLRLSYKNLVLKWHPDRFLEEIEKDEAKMKFQSIQRAYSVLSDSNKRLLYDVGAYDSDDDETGMADFINEMVTLMAQTQSTGDESLEEFEELFQELLKDDVNQFKTRSSSSSCSQFSGTSTLVHCDDLSNSNDIPNKINGHDNYCCISSSKVFSFILFLLDFFSFSYNFFVVLYMYITKINF

SEQ ID NO: 7346 - protein, 298 aa, Vigna angularis
MKPNMACLKQVSALLLPLLFISFFKPSHAGGISVYWGQNGNEGSLADACNTGNYKYVNIAFLFTFGGGQTPQLNLAGHCNPSINNCNVFSDQIKECQSKDIKVLLSLGGASGSYSLTSADDATQVANYIWNNFLGGQSSSRPLGDAILDGVDFDIESGTGEHWDDLARALKGFNSQLLLTAAPQCPIPDAHLDTAIKTGLFDIVWVQFYNNPPCQYSSGNTNDLISSWNQWTSSQAKQLFLGVPASTAAAGSGFIPADVLTSQVLPTIKGSSKYGGVMLWDRFNDGQSGYSGAIIGSV

SEQ ID NO: 7347 - protein, 188 aa, Arabidopsis thaliana
MEREDLYAVLDLNNECTQGDLRLSYKNLVLKWHPDRFLEEIEKDEAKMKFQSIQRAYSVLSDSNKRLLYDVGAYDSDDDETGMADFINEMVTLMAQTQSTQGDESLEEFEELFQELLKDDVNQFKTRSSSSSCSQFSGTSTLVHCDDLSNSNDIPNKINGHDNYCCISSSKVGGPSTRFQAGNRRSKK

SEQ ID NO: 7348 - protein, 92 aa, Oxalis oblongiformis
  misc_feature (91)..(92): Xaa can be any naturally occurring amino acid
GINISGTNGEVMPGQWEYQVGPSVGIEAGDHIWASRYILERITEQAGVVLTLDPKPIDGDWNGAGCHTNYSTKSMRDEGGFEVIKKAIFNXX

SEQ ID NO: 7349 - protein, 291 aa, Nicotiana tabacum
MIKYSFLLTALVLFLRALKLEAGDIVIYWGQNGNEGSLADTCATNNYAIVNIAFLVVFGNGQNPVLNLAGHCDPNAGACTGLSNDIRACQNQGIKVMLSLGGGAGSYFLSSADDARNVANYLWNNYLGGQSNTRPLGDAVLDGIDFDIEGGTTQHWDELAKTLSQFSQQRKVYLTAAPQCPFPDTWLNGALSTGLFDYVWVQFYNNPPCQYSGGSADNLKNYWNQWNAIQAGKIFLGLPAAQGAAGSGFIPSDVLVSQVLPLINGSPKYGGVMLWSKFYDNGYSSAIKANV

SEQ ID NO: 7350 - protein, 371 aa, Robiginitalea biformata HTCC2501
MKEDYYELLGVSKGATAAEIKKAYRKKAIEFHPDRNPGDATAEENFKKAAEAYEVLSDPNKRARYDQFGHQAFEGGGFGGGGMNMEDIFSQFGDIFGSAFGGSGFGGFGGFGGGQRRVKGSNLRIRVTLDLEEVALGVEKKIKVKRKVQAPGVTYKTCGTCGGNGQVTKITNTILGRMQTAATCTACGGSGQVIDSRPDGADAHGLVMQEETVSIKIPGGVESGMQLKVSGKGNDAPGNGVPGDLLVAIETREHPTLKREGDNLHYDLYISMPDAVLGTSKEIDTIGGKVRIKLEPGIQSGKILRLRNKGIQSINGYGAGDLLVHVNVWTPKELSKEQREFFERMQEDDKFAPKPEKSDKSFFEKVKDMFS

SEQ ID NO: 7351 - protein, 447 aa, Oryza sativa Japonica Group
MAQAVVPAMQCQVGAVRARPAAAAAAAGGRVWGVRRTGRGTSGFRVMAVSTETTGVVTRMEQLLNMDTTPFTDKIIAEYIWVGGTGIDLRSKSRTISKPVEDPSELPKWNYDGSSTGQAPGEDSEVILYPQAIFKDPFRGGNNILVMCDTYTPAGEPIPTNKRNRAAQVFSDPKVVSQVPWFGIEQEYTLLQRDVNWPLGWPVGGYPGPQGPYYCAVGSDKSFGRDISDAHYKACLYAGINISGTNGEVMPGQWEYQVGPSVGIEAGDHIWISRYILERITEQAGVVLTLDPKPIQGDWNGAGCHTNYSTKSMREDGGFEVIKKAILNLSLRHDLHISAYGEGNERRLTGLHETASIDNFSWGVANRGCSIRVGRDTEAKGKGYLEDRRPASNMDPYVVTALLAETTILWEPTLEAEVLAAKKLALKFLENHATFHSPVNILVEHHT

SEQ ID NO: 7352 - protein, 294 aa, Nicotiana tabacum
MNIKVSLLFILPIFLLLLTSKVKAGDIVVYWGQDVGEGKLIDTCNSGLYNIVNIAFLSSFGNFQTPKLNLAGHCEPSSGGCQQLTKSIRHCQSIGIKIMLSIGGGTPTYTLSSVDDARQVADYLWNNFLGGQSSFRPLGDAVLDGIDFDIELGQPHYIALARRLSEHGQQGKKLYLTAAPQCPFPDKLLNGALQTGLFDYVWVQFYNNPECEFMSNSENFKRRWNQWTSIPAKKLYIGLPAAKTAAGNGYIPKQVLMSQVLPFLKGSSKYGGVMLWNRKFDVQCGYSSAIRGAV

SEQ ID NO: 7353 - protein, 163 aa, Oryza sativa Japonica Group
MWWELEEDGKEAAWPGEEVPVDFDFISLLCKPKDYYKILEVGYDASEEAIRSSYIRLALKWHPDKKQGEENATSRFQEINEAYQVLSNPAKRREYDKKGILYVQDHNVVHGHADLPLLGGNDDAEFILCFDKWKVVGRELGKISADLLVTLLLPLNFQCVKTQ

SEQ ID NO: 7354 - protein, 116 aa, Brassica napus
  misc_feature (115)..(115): Xaa can be any naturally occurring amino acid
MEGGFKATSYYEILGVSVNSSAEEIRRAYRKLAMKWHPDRWTKDSFRSGEAKRRFQQIQEAYSVLSDQKKRSMYDVGLYDTQEDEGYYDFVEEMVSLMAQTRREEKQYSLEELQXM

SEQ ID NO: 7355 - protein, 522 aa, Ostreococcus tauri; identical to SEQ ID NO: 3521

SEQ ID NO: 7356 - protein, 875 aa, Oryza sativa Japonica Group
MASKGTEGGHGGVERKEQQQQRGYQLPRDSRGSLEVFNPSSASSFRTAAAAPKSASPFLAIPDREEDNVVAQQRAAEWGLVLQTDHHTGLPQGVSARPSSGSARTSSEDNPQQQQSAAAIPRVSEELRAALSVFQQTFVVSDATHPNHPIMYASAGFFNMTGYTSKEVVGRNCRFLQGSGTDPHEIDKIRQSLANGSNYCGRILNYKKDGTPFWNLLTIAPIKDEDGRLLKFIGMQVEVSKYTEGKKDTVVRPNGLSESLIKYDARQKDHARSSVSELLLALKNPRSLSESSNNTLKRKSQESLSMSMSEVPSKRSSESGSRRNSRSGTRSSLQKINEVPDQVNRTRKSGLRAFMGFLGMGHGSVEKNMLKPRDEDPLIDSDDERPESFEDEFRRKEMRRGIDLATTLERIEKNFVITDPRLPDNPIIFASDSFLQLTEYNREEILGRNCRFLQGPETDRATVRKIRDAIDNQAEVTVQLINYTKSGKKFWNLFHLQPMRDQKGDVQYFIGVQLDGTEHVQDDAAKEGVVLVKKTADNIDEAAKELPDANLRPKDLWANHSKVVLPNPHMKDTASWRAIQKVLESGESIGLKHFRPVKPLGSGDTGSVHLVELLNTGEYFAMKAMDKSIMLNRNKVHRATAERQILDLLDHPFLPTLYASFQTKTHICLITDYCPGGELFVLLDNQPLKVLHEDAVRFYAAEVVVALEYLHCQGIIYRDLKPENILLHRDGHISLTDFDLSCLTSCRPQVFLPEDADEKKGRKNGSYPIFFAEPMRASNSFVGTEEYIAPEIITGAGHTSAVDWWALGILLYEMLYGYTPFRGKTRQRTFANILHKDIRFPASISVSKSSVIFFKLEKLNRFEFSGQPSGEAANV

SEQ ID NO: 7357 - protein, 356 aa, Camellia sinensis
MAQLSDLINMNLSDSTEKIIAEYIWIGGTGLDLRSKARTLSGPVNDPKKLPKWNYDGSSTGQAPGEDSEVIIYPQAIFKDPFRKGNNILVMCDAYTPAGEPIPTNKRYNAEKIFSHTDVVAEEPWYGIEQEYTLLQKDVKWPIGWPKGGYPGPQGPYYCGAGADKAFGRDIVDSHYKACLYAGINISGINGEVMPGQWEFQVGPAVGISAGDELWEARYILERITEIAGVVVSFDPKPIEGDWNGAGAHTNYSTKSMRKDGGYQVIKKAIEKLGLKHKEHIAAYGEGNERRLTGRHETADINTFLWGVANRGASVRVGRDTEKAGKGYFEDRRPASNMDPYVVTSMIAATTILWKP

SEQ ID NO: 7358 - protein, 379 aa, Neorickettsia sennetsu str. Miyayama
MPGKKKDYYEILGVSRSASTEEIRKAYKKLALQYHPDRNKGDKEAAEKFKEIGEAYSVLSNPEKKASYDQYGHSAFNGGGFGGAGGFSADFSGMDFSDIFNDLFGGGRTRRTKADFNEVIKEDGSDLRYDVSITLREAFEGKEVKISYTKLAECEQCGNTGCEGKIKPVQCSTCNGAGSIRSQQGFFTVERSCSTCNGSGMIIENPCKKCGGTGRIRKGVTTCAKIPRGISDGAKVLLRGQGEAGSRGGKPGDLYMIVHIKQDEFFTRKNNDLYCEVPIRMSLAALGGEIEVPSLEGKKFKIKLPEGSQTGDKLKLKGKGMYLLNSEYRGDMYVRLTIETPVKLTKKQREILEEFEKESLGCSPKSEKFFSKIRSMFGL

SEQ ID NO: 7359 - protein, 342 aa, Magnaporthe grisea 70-15
MSLDQKGSIMAEYVWIDSEGGVRSKSRTLKEQKYEPKDLPTWNFDGSSTGQAGGDNSDVFLKPVAVYPDPFRGEPNIIVLAECWDSDGTPNKFNHRHEAAKLMEAHAEHEPWFGLEQEYTLLNLEDRPFGWPKNGFPAPQGPYYCGVGAGKVVQRDIVEAHYKACLYAGVKISGTNAEVMPAQWEFQVGPCEGIEMGDHLSIARFLLHRVAEEFGAKVSFDPKPIPGDWNGAGLHSNFSTKEMRVDGGMKHIEAAIKKLEGRHKEHIAVYGEGNEKRLTGSHETGSIEEFSYGIANRGASIRIPRECAAKGYGYFEDRRPASNADPYQITGIIMETCFGAVN

SEQ ID NO: 7360 - protein, 191 aa, Triticum aestivum
MQPPSQYHQSSYYAVLGVHPGASAAEIRAAYHRLAMRWHPDKIANGRVDPAIAEEAKGRFQKIHEAYQVLSDQKRRELYDAGMYDPLDDSQQEVEGFHDFLQEMLSLMATVGREEPVYSLGELQSMLDGMMQDFSSPQPPPPSSFFTSTGSSTRFSAPSGGAQQQRRPPSRVRPQGFGSSACFSQTAFSGC

SEQ ID NO: 7361 - protein, 391 aa, Chlamydophila abortus S26/3
MDYYDVLGVSKTASPEEIKKSYRKLAVKYHPDKNPGDAEAEKRFKEVSEAYEVLSDPQKRESYDRYGKDGPFAGAGGFGGAGMSNMEDALRTFMGAFGGELGGSGSFFEGLFGGLGEAFGMRGDPAGARQGASKKVHITLTFEEAARGVKKELLVSGYKTCETCSGSGASSKQGIKCCDRCKGSGQVVQSRGFFSMASTCPECGGEGRMITDPCSSCRGQGRIKDKRSVHVQIPAGVDSGMRLKMEGYGDAGQNGAPAGDLYVFIDVEAHPVFERRGDDLILELPIGFVDAALGMKKEVPTLLKEGACRLTVPEGIQSGTILKIKNQGFPNVHGRGRGDLLVRVSVETPQNLSEEQKELLRKFAATEKAENFPKKRSFLDKIKGFFSDLTV

SEQ ID NO: 7362 - protein, 43 aa, Passiflora garckei
WEYQVGPSVGIDAGDHIWCSRYILERITEQAGVVLTLDPKPIE

SEQ ID NO: 7363 - protein, 628 aa, Trifolium pratense
MTIHSVVIQKLLSTNAHIGRQVVTHHFKEYTYGLRNKMAIIDSDKTLICMRSAFNFISCLARQNGRFMFINTNPLFDEIFDLMTKKVGCYSPSSSSLWRTGGFLTNSNSPKKFRSRNKKLCFGPTQPPDCIVIVDTESKSSVIDEAFKLQIPIVALVDSAMPLHTFSRIAYPIPVNPSVQFVYLFCNLITKTLLLEKKNLQLSNPKIDDREEATKIEDNKRKNNLAKVGITVMPYDKLAPLPEDIEDTKKLLDKLVILKVNHDSGRNMDFENPKSTIDICDGQTFLDMIVNQIETLNSKYGCQVPLLIFDKDDTHDSTLKVLEKYSESSVDVRTFKQGEDPELTFGGHRSKEEVHTFDDGDIFRSLMIGGTLDLLLSQGKEYILVMKSDNVATIVDPNIINHLMINAIDYCMEVTPSHSSNLILTPMNFKLQEIARNQDKHLKDKFKLIDTTNMWVSLRAIKRLIDTNRLKPKKPSISKENDYDQTLLQETNAGPVVQFFDNVIGVSTPESRFLPFDATSDLLLLQSDLYTCRAGVLSRNPARSNPLNPVIDLGPEFEKIGDFQSRFKSIPSIIGLDSLTVRGDVWFGANITLKGHVTIAAKAGLKLEIPDGVVIENKEINDPADIQK

SEQ ID NO: 7364 - protein, 386 aa, Shewanella sp. MR-4
MTAGKTPTQHSTQPLNRLLGETSGAFADLGTFLPLVLGLIALNQFSPQGIFLGFGLFAILSALFYRRPIPVQPMKVIAALVIAQGLTPGMLQASAMLMGIILLILAFSGAITWLAKQLSQAVSVGIQLAIGLQLMWMGTKMMSDFWLLGLGAFALLFVSKFLPLRYLAMPLVIAAGMLWQANSQTDIATSLNIPALSTSLHLAWPSLNEWSSAAILLVLPQLALTLTNAVIATSAMAQEKFPEDAAKLTPKNLAISSGLANLLLAPFGASAMCHGAGGLAVQYHFGARTHLAPLIFGSTCVVIALFWDGQIAWLLGLIPVAILGSLLSIGGLQLAWSKRLIDGKPFCIFVILATAVTCLAVNAAAGLAVGILLEQGRRTWAMLAMR

SEQ ID NO: 7365 - protein, 59 aa, Passiflora hahnii
WEYQVGPSVGIDAGDHIWCSRYILERITEQAGVVLTLDPKPIEGDWNGAGCHTNYSTKR

SEQ ID NO: 7366 - protein, 58 aa, Passiflora helleri
WEYQVGPSVGIDAGDHIWGSRYILERITEQVGVVLTLDPKPIEGDWNGAGCHTNYSTK

SEQ ID NO: 7367 - protein, 95 aa, Oxalis peduncularis var. pilosa
  misc_feature (87)..(87): Xaa can be any naturally occurring amino acid
LYAGINISGTNGEVMPGQWEYQVGPSVGIEAGDHIWASRYILERITEQAGVVLTLDPKPIDGDWNGAGCHTNYSTKSMRDEGGFEVXTKAIFNLS

SEQ ID NO: 7368 - protein, 1123 aa, Orobanche minor
MASSQPGRSSTNSAQSRQSARIIAQTSIDAKLDADFEESGSSFDYSTSVRVTNYPAGLSEPRSDKVTTAYLHQIQKGKLIQQFGCLLALDEKTFRVIAYSENAPEMLTMVSHAVPSVGDHPLLGIGSDIRTIFTAPSAAALQKALGFGEVSLLNPILVHCKTSGKPFYAIIHRVTGSLIIDFEPVKPHEVPMTAAGALQSYKLAAKAIACLQALPGGSIERLCDTMVQQVFELTGYDRVMIYKFHEDDHGEVFTEITKPGLEPYVGLHYPATDIPQAARFLFMKNKVRMICDCRANHVKVVQDDNLPFDLTLCGSTLRAPHGCHSQYMENMNSIASLVMSVVVNEGDEDGPDSSSGPYKRKRLWGLVVCHNTCPRFIPFPLRYACEFLVQVFSIHVNKELELENQMLEKNILRTQTLLCDLLLRDVPLGIVSQSPNVMDLVKCDGAILLHKRTKYRLGLTPTDFQIRDIVSWLDEYHQDSTGLSTDSLYDAGFPGALALGNALCGMAAVKITDEDWLFWFRSHTAAEIRWGGAKHELEAKDDGRKMHPRSSFRAFLEVVKTRSLPWKDYEMDGIHSLQLILRNAYKESEEKDLESREIHARLNELQIDGVKEIEAVTSEMVRLIETATVPIFSVGVDGLVNGWNTKISDLTGLSVVEAIGMHFLALVEDSSADTVSKMLGLALQGKEEHDVQFEIKTHGQRSESGPISLIVNACASKDVKENVVGVCFIAQDITTQKSMMDKFTRIEGDYRSIIQNPNPLIPPIFGTDEFGWCSEWNAAMIKLSGWGREAVIDKMLLGEVFGLNKACCRLKNQEAYVNLGVVLNNTVTGQESGKVSFGFFSRSGKYVACLLCVSKKVDSEGSVTGLFCFLQLASPELQQALHIQRISEQTASKRLRVLAYIRREIRSPLSGIIFSRKLMEGTDLNDEQKNIVRTSLHCQSQMNKILEDTDLDHIIEGYLDLEMVEFKLHEVLIASISQVISKSNGKGIKIVDNLAPNLSNETLYGDSLRLQQVLAAFLLIAVDSTPSGGQLGVAATLAKDSIGEFVQLGRLECRITHGGGVPQEILNQMFGDEPTDASEDGISLFISRKLVKLMKGDIQYLREAGRSTFIISVEIAISNKPNL

SEQ ID NO: 7369 - protein, 374 aa, Pseudomonas putida
MSKRDYYEVLGVERGASESDLKKAYRRLAMKYHPDRNPGDKESEDKFKEANEAYEVLSDASKRAAFDQYGHAGVDPSMGGGGAGFGGANFSDIFGDVFSDFFGGGRGGSRGGAQRGSDLRYTLELNLEEAVRGTTVSIRVPTLVNCQPCDGSGAKKGSTPSTCPTCGGIGQVRMQQGFFSVQQTCPRCHGQGKIITDPCTSCHGEGRVEEYKTLSVKVPAGVDTGDRIRLSGEGEAGTHGGPTGDLYVVINVREHEIFQRDGKHLYCEVPISYTDAALGGELEVPTLDGRVKLKIPEGTQTGKQFRLRGKGVAPVRGGGAGDLLCRVAVETPVNLSRRQRELLEELRDSLEGDSSHSPKASGWFDGVKRFFGDL

SEQ ID NO: 7370 - protein, 93 aa, Oxalis petrophila
AGINISGTNGEVMPGQWEYQVGPSVGIEAGDHIWASRYILERITEQAGVVLTLDPKPIDGDWNGAGCHTNYSTKSMRDEGGFEVIKKAILNLS

SEQ ID NO: 7371 - protein, 481 aa, Sordaria macrospora
MYFCPIRNQFLQPRSQPPSQPPSQPPSQLPSQPNSQPGTRTGHGQPNPPLMQGNSVGVGRGRVSRNIVTIPQSHFNDDALAKIETLFETILDAVSVGGPVVIPYRRSTNAQTFNATAFTSNPSDGRHIDSVRFPGRNPQELRRFEALFRIIELSHEALLSGTLITKRNIYYQNMELFRSQSMVDEMVDNLAFTLGVGRGDLNIVATAKGLIAGQVQLMMRGGTSINCAESSDSGVLLPSISAVEKIDFQSVKWLLVIEKEATFRTLSASRYHAVSRAGSGILVTGKGYPDLATRKFLATLHFVQPRLPMFALVDFDTHGISILRTYQYGSQRLDHEERTKVPRLRWLGIRSSDVLSQTMVTQDPSANNQDSQSSQDLSSQESIAYSVDALQDERPTKRPRTRRTKSHPSDSTAPLNEGDREKAVSVLRDICTTARLDSSGREHKLELQRMLLLNVKAEIQAVDDFGDITNWLDERLLSQSR

SEQ ID NO: 7372 - protein, 470 aa, Arabidopsis thaliana
MAATATEKLPQLKSAVDGLTEMSENEKSGFINLVSRYLSGEAQHIEWSKIQTPTDEIVVPYDKMANVSEDASETKYLLDKLVVLKLNGGLGTTMGCTGPKSVIEVRDGLTFLDLIVIQIENLNNKYNCKVPLVLMNSFNTHDDTQKIVEKYTKSNVDIHTFNQSKYPRVVADEFVPWPSKGKTDKDGWYPPGHGDVFPSLMNSGKLDAFLSQGKEYVFIANSDNLGAIVDLKILKHLIQNKNEYCMEVTPKTLADVKGGTLISYEGKVQLLEIAQVPDEHVNEFKSIEKFKIFNTNNLWVNLKAIKKLVEADALKMEIIPNPKEVDGVKVLQLETAAGAAIRFFDNAIGVNVPRSRFLPVKATSDLLLVQSDLYTLVDGFVTRNKARTNPTNPAIELGPEFKKVASFLSRFKSIPSIVELDSLKVSGDVWFGSGVVLKGKVTVKANAGTKLEIPDNAVLENKDINGPEDL

SEQ ID NO: 7373 - protein, 180 aa, Rhizobium etli bv. phaseoli
EFDAFPTLEQLPLWGFDGSSTMQAEGRSSDCVLKPVAIYPDPARTNGVLVMCEVMMPDGVTPHPSNARATILDDEDAWFGFEQEYFFYQNGRPLGFPEQGYPAPQGPYYTGVGYSNVGDVAREIVEEHLDLCLAAGFNHEGINAEVAKGQWEFQIFGKGSKKAADQIWMARYLLQRLTEK

SEQ ID NO: 7374 - protein, 324 aa, Hypocrea jecorina
MPSLTALAGLLALVPSALAGWNPDSKQNIAVYWGQNSANSQSTQQRLSFYCNDDNINVIEIAFLNGINPPMTNFANAGDRCTPFSDNPWLLSCPEIEADIKTCQANGKTILLSLGGDTYSQGGWASPEAAQDAAAQVWAMFGPVQSDSSAPRPFGDAVVDGFDFDFESTTNNLVAFGAQLRTLSDAAATDSNKKFYLAAAPQCFFPDAAVGPLINAVPMDWIQIQFYNNPCGVSAYTPGSEQQNNYNYQTWEDWAKTSPNPNVKLLVGIPAGPNAGHGYVSDAQLKSVFEYSKKFDTFAGAMMWDMSQLYQNSGFEDQVVDALK

SEQ ID NO: 7375 - protein, 92 aa, Oxalis nubigena
  misc_feature (2)..(2): Xaa can be any naturally occurring amino acid
  misc_feature (5)..(5): Xaa can be any naturally occurring amino acid
GXNIXGTNGEVMPGQWEYQVGPSVGIEAGDHIWASRYILERITEQAGVVLTLDPKPIDGDWNGAGCHTNYSTKSMRDEGGFEVIKKAILNLS

SEQ ID NO: 7376 - protein, 394 aa, Magnaporthe grisea 70-15
MLRRASVLPLAMAIFGTAQAGFNPSMQDNIAAYWDVNVDIIPLAFLNIIVNPTNINFANVGDRCSKFPGTDLLKCPEIEADINTCHSLNKTILLSVGGATYSEGGFPNVEAANKAADNLWAMFGPPPAASTNDAATVNRPFGTAYIDGFDLDFETHGIKNLAAFARRLRQVMDTAARPAAVLPSDDKSYPMVPSPSEATKKFYLAAAPQCVFPDAAMDAALSSDVAFDFIMVQFYNNYCGLQNFQPGAAQQNAFNFERWDQWAREKGRSTKVMLGVPGSPNASGSGYTAAGPLDAIIKYCKRFSSFGGVMIWDASQVWSNNGFLDGVVRSLGGAAATETSDAEAPQQAGRPIQQTRAVKVPKFGRCGGRLYTGPRECEQGSKCVYGGALWSVCA

SEQ ID NO: 7377 - protein, 401 aa, Hypocrea jecorina
MFFSKALAAAGLLATAAYAAPTMEKRAAGGKLVVYWGAEDDSTTLANVCADSSYDIVNLAFLSRFFAGGGYPELSLSTLGGPSAAQRAAGATNLQDGTSLIPAIQACQAAGKLVILSMGGAVDFSAVTLSSDAQGQQLADTVWNLFLGGTANPTLRPFGSVKLDGVDLDNETGNPTGYLAMAQRFKSNFAKDTSKKYYLTAAPQCPFPDASEPLNVCQLADYIWVQFYNNGNCNIAQSGFNNAVKNWSKSIGNATLFIGALASGADGDQGYVSASSLLSAYQGVSALNLPNIGGIMLWEAQLAVKNGNFQKTVKAGIASGTTPPPPPPTGGCSWAGHCAGASCSTDNDCSDDLTCNGGVCGTAGSTPAPTCSWEGHCLGASCGNDNDCSDPYSCKNGVCSN

SEQ ID NO: 7378 - protein, 855 aa, Coccidioides posadasii
MGPTNILAAFIAVSSLFIQSLALNPYAKSNLAVYWGQGAGQNRLSYFCEKTSFDIIVVGFINVFPDQGPAGWPGSNFGNQCADSYYYTKNGTKTKLLDGCYQIKEDLPKCKALGKTILLSLGGGAVHDFYEVKSEESALNFADFLWGAFGPLTPDWTGPRPFGEASVDGFDFDIEKGSNFGYSIMVRRLRELFLQDPLNRYYISAAPQCIMPDKYLSHAISNSAFDFIFIQFYNNPSCSAKRWVTNPKSVTYTVDDWVKYIRKSGNPLAKLFIGLPASKSAAAKEDYLTPGEATKIVSTYMAKYPSTFGGMMVWEATASENNKLGGLPYADIMKEVLLRCDPDPPTSTVTSTTSASTSTQTSSQSTTMETKTLSASTTPSSPSTVSPSSTMQTTSTGSTSIETVTTRSQEPPSTTISTRSASTEPVTTRSQEPPSTTISTRSASTETVTTRSQEPPSTTISTWSASTETSTSSQDSPSTTISTKSAPTGTVTTRSQDLPSTTISTRSPETETETATTKSQGSPSITLSTRSSSAETVSTRSQHSSSTTISTKSAPTETGTTSEHSTSMPVSTRSASTETVITRSQNSDSQSMTVSTRSPSTESITTRSQGSPSETFSTKSVPVDTISTELPSQTPTTIITGTPSDPVSAPTTTVPPNPTLTLAPSSSTTEDRTTITTIITTSYVTVCPTGFTTVTITYTTTYCPETASLTPTQPPIPGAPAPPPDGWTTIVTVCPQCAPTPTTVTLTVPTRSAFLPARTETRPVVTVVPVPENPIKNVKPSESGDFVTVTTAAPATVTKTLEYNNPVDSDVNVQPTGGSSPVEFEGSAMTVRSMDVVAKALITAGAAVLGLFLGL

SEQ ID NO: 7379 - protein, 360 aa, Archaeoglobus fulgidus DSM 4304
MKEIERRCLRALIGIVQNIYDQMKAGQVPELHIATRTKYNIEFNEESEVWVYGDRKSVRSAKTVKGAYRILKMTYVIGFLKEQLNLNKSSTLRELYYISEGWGAAKFEEQPESDRLVEDLEILTNFQREHFHIRPEEDGATVIGPLRVREETRRGVREIHCQDDVGEGGYQIPVNVDKIEFVDHDAKFVIAIETGGMRDRLVENGFDEKYDAIIVHLKGQPARSTRRLLRRLNTELNLPVVVFTDGDPWSYRIFASVAYGSIKSAHLSEYLATPAAQFVGIRPTDIVKYDLPADKLTEEDIKALNAILTDPRFDSEFWKKEVNLQLEINKKSEQQALAKYGLDYVTDVYLPERLSELGVI

SEQ ID NO: 7380 - protein, 411 aa, Hypocrea jecorina
MFFTKAVGGLGLLASLASSAPNPIARRQAPGAQNVVYWGQNGGGTVENNDLSAYCTPTSGIDIIVLSFLYQWGQGSSALGGTIGQSCGITTSGEPQNCDALTAAITKCKTAGVKIILSLGGASAFSSFQTADQAAQAGQYLWNAYGGGSGVTRPLGNNVMDGFDLDIESNPGTNENYAALVSALRSNFASDPSRQYVISGAPQCPLPEPNMGVIIQNAQFDYLWVQFYNNNEYPGDPCSLGLPGDAPFNFNNWTTFIQSTPSKDAKVFVGVPAAPLAANGAPSGEVYYATPSQLADIVNDVKSNPAFGGIMMWSAGFSDTNVNDGCNYAQEAKNILLTGSPCSSGPVSVSRPPVSSPTITSSPPGTSPAPPSQTGSVPQWGQCGGNGYTGPTQCVAPFKCVATSEWWSQCE

SEQ ID NO: 7381 - protein, 141 aa, Glycine max
  misc_feature (104)..(104): Xaa can be any naturally occurring amino acid
MDARGEGSSTSYYNVLGVSSDSNVDEIRRAYRKLAMQWHPDKCTRSPSLLGEAKRKFQQIQEAYSVLSDSKKRTMYDAGLYDPQEEEDEGFSDFVEEMLSHMGXVRREGKHYGLEELQGMLMEMAKGFECPSMYCGVKLCD

SEQ ID NO: 7382 - protein, 193 aa, Physcomitrella patens subsp. patens
MPLLAHSFGEEGAKTHYDVLNVSPSSSLEEIRASYRTALLSVHPDKMGSQSLLYPNLEADVRDASRYLRVQEAWNILRDADSRALYDASVKHSREMASKRDLSVVVGEEIVLEEMEECMSETGNLEYWYPCRCSDFFVVSAKELQEAGLVFVATEEESMSLRPSEECRQRQSIVLPCGSCSLHLRVHFWLTCP

SEQ ID NO: 7383 - protein, 401 aa, Hypocrea jecorina
MLSRTLLTALGLTTIAAAAPSQTVKTRQAPGGQNAVYWGATNNENDNLSTYCTASSGIDIVILSFLDIYGATGNFPSGNMGNSCYVGTNGVPQLCDDLASSIATCQAAGIKVIISLGGAASSYSLQSQSQAVAIGQYLWNAYGNSGNTTVQRPFGNVFVNGFDFDIELNAGSQYYQYLISTLRSNFANDPKNTYYITGAPQCPIPEPNMGEIISTSQFDYLWVQFYNNNPVCSLGLPGDAPFNFNDWVSFISTTPSKNAKLFVGAPASTLGANGNAGGAKYYATPEQLAGIVNSVKSSPFFGGIMLWDAGYSDSNVNNGCNYAQEAKNILLTGTACGGESSPPPSTTTTAVPPPASSTPSNPSGGSVPQWGQCGGDGYTGPTQCVAPYKCVATSEWWSSCQ

SEQ ID NO: 7384 - protein, 375 aa, Xanthomonas axonopodis pv. citri str. 306
MSKRDYYEVLGVARGASDEELKKAYRRCAMKHHPDRNPGDAAAEAAFKECKEAYEVLSDGNKRRAYDAHGHAAFEHGMGGGGGPGGPDMGDIFGDIFGNIFGGGAAGPRAARRGADVGYVLELDLEEAVAGIERRIEIPTLIECAPCHGSGSEDGKVETCGTCHGRGQVRIQRGIFAMQQSCPHCDGRGTLIQNPCKTCHGAGRVEEDKVLSIKVPAGVDTGDRIRLAGEGEAGPAGTPPGDLYVEVRVREHAIFQRDGDDLHCEVPIRISQAALGDTVRVATLGGEAEIRIPAETQTGKLFRLRGKGVRSVRSRSEGDLYCRVVVETPVNLTADQRELLQQFEATFTGEDARKHSPKSATFIDGVKGFWDRMTS

SEQ ID NO: 7385 - protein, 145 aa, Triticum aestivum
  misc_feature (37)..(37): Xaa can be any naturally occurring amino acid
  misc_feature (55)..(56): Xaa can be any naturally occurring amino acid
  misc_feature (64)..(64): Xaa can be any naturally occurring amino acid
  misc_feature (78)..(78): Xaa can be any naturally occurring amino acid
  misc_feature (88)..(88): Xaa can be any naturally occurring amino acid
  misc_feature (95)..(96): Xaa can be any naturally occurring amino acid
  misc_feature (100)..(100): Xaa can be any naturally occurring amino acid
  misc_feature (103)..(103): Xaa can be any naturally occurring amino acid
  misc_feature (107)..(107): Xaa can be any naturally occurring amino acid
  misc_feature (109)..(109): Xaa can be any naturally occurring amino acid
  misc_feature (111)..(111): Xaa can be any naturally occurring amino acid
  misc_feature (113)..(113): Xaa can be any naturally occurring amino acid
  misc_feature (118)..(118): Xaa can be any naturally occurring amino acid
  misc_feature (125)..(125): Xaa can be any naturally occurring amino acid
  misc_feature (127)..(127): Xaa can be any naturally occurring amino acid
  misc_feature (129)..(129): Xaa can be any naturally occurring amino acid
  misc_feature (133)..(133): Xaa can be any naturally occurring amino acid
  misc_feature (135)..(135): Xaa can be any naturally occurring amino acid
  misc_feature (138)..(138): Xaa can be any naturally occurring amino acid
  misc_feature (141)..(142): Xaa can be any naturally occurring amino acid
MAATAVSVDEKLDKLRAEVAKLSQISENEKAGFISLXVSRYLSWGRRSKFEWEQXXDPRPDEVXVPLRYPQRRLPEVXPRRRKNLLGXSFVLQLXXGGSXTTXGCTXPXSXIXIPHGXNSLTLMXIXIXPPGXKXGLXPLXXETL

SEQ ID NO: 7386 - protein, 1126 aa, Physcomitrella patens subsp. patens
MSTTKLAYSSGSSVKSKHSVRVAQTTADAKLQAVYEESGDSGDSFDYSKSVHASKSTGENVPALAVTAYLQRMQRGGLVQTFGCMLCVDESSFRVIAYSENAPEMLDLMPQAVPSVGQQEVLGIGTDARTLFTPSSAAALEKCAGAVDVTMLNPISVHCRSSGKPFYAILHRIDVGLVIDFEPVRPNDAVVSSAGALQSHKLAAKAISRLQALPGGDIGLLCDTVVEEVRQLSGYDRVMAYKFHEDEHGEVLAEIRRSDLEPYLGLHYPATDIPQASRFLFMKNRVRMIGDCYAPPVKVVQDKDLRQPISLAGSTLRAPHGCHAQYMGNMNSIASLVMAVIVNDPDEDPNSRGGQQRGRKLWGLVVCHHTSPRTVSFPLRSACEFLMQVFGLQLNMEVELAAQLREKHILRTQTLLCDMLLRDAPIGIVSQSPNIMDLVKCDGAALYYGKRFWLLGITPNEVQIKEIADWLLEHHQDSTGLSTDSLADAGYPGAAQLGDAVCGMAAAKITPRDFLFWFRSHTAKEIKWGGAKHDPDEKDDGRKMHPRSSFKAFLEVVKRRSLPWEDIEMDAIHSLQLILRGSFQDIDDSDTKTMIHARLNDLKLQGMDELSTVANEMVRLIETATAPILAVDSSGFINGWNAKVAELTGLPVGEAMGRSLVKDLILEESIDVVQRLLYLALQGEEEQNIEIQLKTFGPQKEKGAVILIVNACSSRDVQDNVVGVCFVGQDVTGQKQVLDKFTRIQGDYKAIVQNPNPLIPPIFGTDEYGYCSEWNPSMEKLTGWKREEVLGKLLVGEIFGMQLMCCRLKGQDAMTKFMIALNSAMDGQDTDRFPFSFFDRQGKYVDALLTVNKRTDAEGSITGVFCFLHTTSVELLQALTVQRATEKVAFAKLKELAYIRQEIKNPLYGIMFTRNLMEDTDLSEDQRQFVETSAVCERQLRKVLDDMDLESIEDGYLELDTNEFVMGTVMDAVVSQGMITSREKGLQLIRETPREIKNMCLFGDQVRLQQVLADFLLNAVRFTPSSEGWVGIKVVPTKKRLGGGIHVMHLEFRVTHSGMGLPEELVHEMFDRGRGMTQEGLGLSMCRKLVKLMNGNVQYIRETGKSYFLVEVELPLAQRDDAGSVR

SEQ ID NO: 7387 - protein, 89 aa, Glycine max
  misc_feature (36)..(36): Xaa can be any naturally occurring amino acid
  misc_feature (72)..(72): Xaa can be any naturally occurring amino acid
MFGTVEHDEIRRAYRKMDLWYPDRWIKDPKLALEAXKEFQRVQEAYSVLSNKGKRRIYDAGLFGLIGEDDDXGFVDFMQTWSFDDAESE

SEQ ID NO: 7388 - protein, 404 aa, Thermobifida fusca YX
MSQARAWDTRLSHHWAQSTSGEKQTSMSTKDYLEKDYYKVLGVSKTATADEIRSAYRKLARKYHPDANKGDAQAEKKFKEISEAYSVLSDEKRRKEYDEARSLFGGAYRPGGGGIGDFNLGDLFGHTTTGGERLTDLFGGLFGGRGRATQSRRGADLETETTLSFTEAVSGTTKSFTLTTTVSCPTCRGSGAKPGTTPRVCPRCAGTGHESTNLGGFSLSEPCALCKGRGYLADDPCLTCSGTGNVKGTRTVQARIPPGVSDGQRIRLRGKGEPGERGGPAGDLFVTVRVTPHPVFGRSGDNLTLTLPVTFPEAVFGAEVRVPTLSGPPVTVRIPPGTRNGRVFRVRGKGATRRDGTTGDLLVTVEVAVPQNLNSEAREALQRFQAATADHNPRADLEARAKGA

SEQ ID NO: 7389 - protein, 72 aa, Clostridium acetobutylicum
MANKDYYEVLGLEKGASDDEIKKAFRKLAIKYHPDKNRGNKEAEEKFKEINEAYQVLSDPDKKANYDRFGTA

SEQ ID NO: 7390 - protein, 503 aa, Cleome spinosa
MEVAVTKPKKKIKLGIGLVIFPLFLLTLLYLFLGFPFYYSFTSSSSSPSSSSPSSSSSLYNHFLKSSSSSSAAASSSSSSSSSVVSNPPYPPSNSSSISTYNHTNNSSLHHDGINNPNSNQSSLRSHDSIPSSSSNDHHSPHQETSREKHAGRRRRDCDISSGEWVPNHEAPYYTNTTCWAIHEHQNCMKFGRPDSGFMKWRWKPYGCDLPLFDPLEFLEIMRGKSMAFIGDSVSRNHMQSLICLLSRVEYPEDVSLVQDFNFPRWKYKSFNFTIASFWSTHLVRSTETGPTGQYMTNYYNLHLDEPDPIWASQIGGFDYVIVSSGQWFFRPLFFFDKGKLVGCLYCYMPGVRNVGAFFAFRRAFRTTFRAILGAKHFKGEVFLRTFAPSHFENGEWNKGGNCLRTHPDRSNETELKGMNLEAHEIQLEEFRIARREGRRKGVRFRLVDVTKAMLLRGDGHPSRYGHRPEDNVILYNDCVHWCLPGPIDSWNDFLLHTLKNQQ

SEQ ID NO: 7391 - protein, 311 aa, Prochlorococcus marinus str. NATL2A
MELNGFKDYFKILGISRNATDQEIKSAFRKLARQFHPDLHPHDQKAESEFKEINEAYEILSDEAKKKSYEQYLSYWLKKRAGKYRDFSTENNENQFDEYLNFDDFLSDLIGRFSEVSQDIYSNISSNKNAQSLNLDAEFNLQISFLEALNGAKKNLLVNDERIEVTIPQGIETGSKIRIKNKGNIQSGKGKRGDLLIEVSVKSHPIWKVKGLDVYADLPLSLDEFALGANIMVVSPQGDTYLSIPSGSLPEQKLRLQGQGLHNLDTQGDLFFTLKLKLPENWSADELRLLEKLRSVRIDEPRSSWFEKART

SEQ ID NO: 7392 - protein, 105 aa, Bacillus cereus G9241
MSKRDYYEVLGLSKGASKDEIKKAYRRLAKKYHPDVSKEENAIEKFKEVQEAYEVLSDDQKRAQYDQFGHAGANQGFGGFGGGGDFGGGFGFEDIFSSFFGGGGG

SEQ ID NO: 7393 - protein, 766 aa, Physcomitrella patens subsp. patens; identical to SEQ ID NO: 1447

SEQ ID NO: 7394 - protein, 392 aa, Heteropterys sincorensis
DLEPVNPADVPVTAAGALKSYKLASKAISRLQSLPSGNISLLCDVLVKEVRDLTGYDRVMVYKFHEDEHGEVVSECRRSDLESYLGLHYPATDIPQASRFLFMKNKVRMICDCLAPPVKVIQDERLPQPLSLCGSTLRSPHGCHAQYMTNMGTIASLVMSVTINEDDDMMDGDQQQMTRKLWGLVVCHHTSPRFVPFPLRYACEFLIQVFGVQINKEVELAAQVREKHILQIQTMLCDMLLRDAPVAIISQSPNVMDLVKCDGAALYFKNKAWFLGVTPTQEQIRDIAEWLLEYHSGNTGLSTDSLMEAGYPGASVLGDAVCGMAAVSITSRDFLFWFRSHTAKEIKWGGAKHDPDDKDDLRKMHPRSSFKAFLEVVKWRSMPWEDVEMDAI

SEQ ID NO: 7395 - protein, 73 aa, Sinningia micans
ISGTNGEVMPGQWEFQVGPSVGIEAGDHIWCARYLLERITEQAGVVLSLDPKPIEGDWNGARCHTNYSTKSMR

SEQ ID NO: 7396 - protein, 392 aa, Heteropterys steyermarkii
DLEPVNPANVPVTAAGALKSYKLASKAISRLQSLPSGNISLLCDVLVKEVRDLTGYDRVMVYKFHEDEHGEAVSECRRSDLESYLGLHYPATDIPQASRFLFMKNKVRMICDCLAPPVKVIQDEKLPQPLSLCGSTLRSPHGCHAQYMTNMGTIASLVVSVTINEDDDMMDGDQQQLTRKLWGLVVCHHTSPRFVPFPLRYACEFLIQVFGVQINKEVELAAQVREKHILQIQTMLCDMLLRDAPVAIITQSPNVMDLVKCDGAALYFKNKTWLLGVTPTEEQIRDIAEWLLEYHSGNTGLSTDSLMEAGYPGASVLGDAVCGMAAVSITSRDFLFWFRSHTAKEIKWGGAKHDPDDKDDLRKMHPRSSFKVFLEVVKWRSMPWEDVEMDAI

SEQ ID NO: 7397 - protein, 310 aa, Ceratopteris richardii
SEVWFTFSWVLDQLPKMCPVNRATDLPVLKEKFDEAGPDNPEGRSDLPGMDIFVSTADPEKEPPLVTANTILSILAADYPVEKLACYLSDDGGALLTFEAMAEAASFAQVWIPFCRKHAIEPRNPDSYFNMKGDPTKNQMRQDFVRDRRRVKREYDEFKVRINGLPESIRRRSDAYNAHEEIKAKRQQIEAGLEPIEPLNVSKATWMADGTYWPGAWSTPTVDQGRGDHAGIIQVMLAPPSSEPLFGNSGDDNLIDTTEVDIRLPMLVYVSREKRPNYDHNKKAGAMNALVRASAIMSNGPFILNLDCDH

SEQ ID NO: 7398 - protein, 392 aa, Heteropterys ternstroemiifolia
DLEPVNPADVPVTAAGALKSYKLASKAISRLQSLPSGNISLLCDVLVKEVRDLTGYDRVMVYKFHEDDHGEVVSECRRSDLESYLGLHYPATDIPQASRFLFMKNKVRMICDCLAPPVKVIQDERLPQPLSLCGSTLRSPHGCHAQYMTNMGTIASLVMSVTINEDDDMMDGDQQQMTRKLWGLVVCHHTSPRFVPFPLRYACEFLIQVFGVQINKEVELAAQVREKHILQIQTMLCDMLLRDAPVAIITQSPNVMDLVKCDGASLNFKNKTWLLGVTPTEEQIRDIAEWLLEYHSGNTGLSTDSLMEAGYPGASVLGDAVCGMAAVSITSRDSLFWFRSHTAKEIKWGGAKHNPDDKDDLRKMHPRSSFKAFLEVVKWRSMPWEDVEMDAI

SEQ ID NO: 7399 - protein, 311 aa, Arabidopsis thaliana
MEGGYEQGGGASRYFHNLFRPEIHHQQLQPQGGINLIDQHHHQHQQHQQQQQPSDDSRESDHSNKDHHQQGRPDSDPNTSSSAPGKRPRGRPPGSKNKAKPPIIVTRDSPNALRSHVLEVSPGADIVESVSTYARRRGRGVSVLGGNGTVSNVTLRQPVTPGNGGGVSGGGGVVTLHGRFEILSLTGTVLPPPAPPGAGGLSIFLAGGQGQVVGGSVVAPLIASAPVILMAASFSNAVFERLPIEEEEEEGGGGGGGGGGGPPQMQQAPSASPPSGVTGQGQLGGNVGGYGFSGDPHLLGWGAGTPSRPPF

SEQ ID NO: 7400 - protein, 531 aa, Oryza sativa; identical to SEQ ID NO: 3576

SEQ ID NO: 7401 - protein, 392 aa, Heteropterys trichanthera
DLEPVNPADVPVTAAGALKSYKLASKAIARLQSLPSGNISLLCDVLVKEVRDLTGYDRVMVYKFHEDEHGEVVSECRRSDLESYLGLHYPATDIPQASRFLFMKNKVRMICDCLAPPVKVIQDERLPQPLSLCGSTLRSPHGCHAQYMTNMGTIASLVMSVTINEDDDMMDGDQQQMTRKLWGLVVCHHTSPRFVPFPLRYACEFLIQVFGVQINKEVELAAQVREKHILQIQTMLCDMLLRDAPVAIITQSPNVMDLVKCDGAALYFKNKTWLLGVTPTEEQIRDIAEWLLEYHSGNTGLSTDSLMEAGYPGASVLGDAVCGMAAVSITSRDFLFWFRSHTAKEIKWGGAKHHPDDKDDLRKMHPRSSFKAFLEVVKWRSMPWEDVEMDAI

SEQ ID NO: 7402 - protein, 214 aa, Ashbya gossypii ATCC 10895
MIKSTLIFRDDGLPLCSSVDDDTDPSLADQKKKVKVLISRFTPQSANEATLESGAYEMHYVRQQSVVYIVIVERGYPRNLAFAYLANVRHEFEHSYGNEYVKPSVRPYAFVSFDNFLQKTKKIYNDKRVQGNLDQLNSDLLGVKQIMTKNIEDLLYRGDSLDRMSDLSASLRQDSKKYRRSAQKINFDLLLSQYAPVALIGLFFLFLVWWLVFR

SEQ ID NO: 7403 - protein, 392 aa, Jubelina wilburii
DLEPVNPADVPVTAAGALKSYKLAAKAISRLQSLPSGNISLLCDVLVKEVRDLTGYDRVMVYKFHEDEHGEVVSECRRSDLEPYLGLHYPATDIPQASRFLFMKNKVRMICDCLAPPVKVIQDERLPQPLSLCGSTLRSPHGCHAQYMTNMGTIASLVMSVTINEDDDTMDGDQQQMTRKLWGLVVCHHTSPRFVPFPLRYACEFLIQVFGVQINKEVELAAQVREKHILQIQTMLCDMLLRDAPVAIITQSPNVMDLVKCDGAALYFKNKTWLLGVTPTVEQIRDIAEWLLEYHSGNTGLSTDSLMEAGYPGASVLGDAVCGVAAVSITSRDFLFWFRSHTAKEIKWGGAKHDPDDKDDGRKMHPRSSFKAFLEVVKWRSMPWEDIEMDAI

SEQ ID NO: 7404 - protein, 95 aa, Oxalis tuberosa
LYAGINISGTNGEVMPGQWEYQVGPSVGIEAGDHIWASRYILERITEQAGVVLTLDPKPIDGDWNGAGCHTNYSTKSMRDEGGFEVIRKAIFNLS

SEQ ID NO: 7405 - protein, 423 aa, Legionella pneumophila subsp. pneumophila str. Philadelphia 1; identical to SEQ ID NO: 3586

SEQ ID NO: 7406 - protein, 392 aa, Hypocrea jecorina
MPSISSFTSALGLLSLLPAARAGWNQNSNDNIVVYWGQNSGSVGQNRLSYYCQNAPDVDVINISFMVGITNLNLNLANVGNNCTAFPQAPNLLNCPQVAADIIECQQTYGKTIMMSLFGSTYSESGFSSSSAAVAAAQEIWAMYGPVQSGNSTPRPFGDAVVDGFDFDLEDPIENNMEPFAAELRSLIDASTSKKFYLSAAPQCPYPDVSDESFLDGQVPFDWVNVQFYNNGCGVSHYPADFNWATWDNWAKTVSANKNAKVLIGTPANVGGANAGSFPTDSQLSGAISLAKGSSSFGGVMLWDMAQLFTNQGYLAKIVADLGSASSPPPPASTTLQTITRSSTASTGPTNPPSGGSVPQWGQCGGNGYTGPTQCQAPYKCVATSEWWSSCQ

SEQ ID NO: 7407 - protein, 221 aa, Actephila lindleyi
QASRFLFMKNKVRMICDCLAPPVKVIEDKKLGRPLSLCGSTLRSPHGCHAQYMANMGSIASLVMSVTINDANDEMDNDQQGVTKLWGLVVCHHTSPRFVPFPLRYACEFLIQVFGVLVNREVELAAQTREKHILKTQSVLCDMLLRDAPVGIITQSPNVMDLVKCDGAALYYKKKFWLTGVTPTEAQIRDIADWLLEYHGGSTGLSTDSLMEAGFPDAAVL

SEQ ID NO: 7408 - protein, 276 aa, Mesorhizobium sp. ZJ15B7
WGFDGSSTMQAEGRSSDCVLKPVALYPDPARTNGILVMCEVMMPDGVTPHESNSRATILDDEDAWFGFEQEYFFYKDGRPLGFPESGYPAPQGPYYTGVGYKNVGDVARKIVEEHLDQCLAAGINHEGINAEVAKGQWEFQIFGKGSKKAADQIWMARYLLLRLTETYGIDIEFHCKPLGDTDWNGSGMHCNFSTKFMREVGGKAYFEALMAQFDKNLMDHIAVYGPDNDKRLTGKHETAPWNKFSYGVADRGASIRVPHSFVKNDYKGYLEDGRP

SEQ ID NO: 7409 - protein, 1034 aa, Hypocrea jecorina
MVSASAGLAAVGLLNGYWGQYTTTEGLRPHCDSGVDSITLGFVNGAPDASGYPSLNFGPNCWAESYPGNLGLPSKLLSHCMSLQSDIPYCRSKGVKVILSIGGVYNALTSNYFVGDNGTATDFATFLYNAFGPYNASYTGPRPFDDITTGLPTSVDGFDFDIEADFPNGPYIKMIETFRSLDSSMLITGAPQCPTNPQYFVMKDMIQQAAFDKLFIQFYNNPVCDAIPGNTAGDKFNYDDWEAVIAGSAKSKSAKLYIGLPAIQEPNESGYIDPIAMKNLVCQYKDRPHFGGLSLWDLSRGLVNNINGTSFNQWALDALQYGCNPIPTTTTTTSTVSSTTAASSTTASSTTASTTKASSTSKASSTSKASSTSKASSTSKASSTSKASSTSKASSTSKASTTSKASTTSKVSTTSKASSTSKASSSTKASTTSKASSTSKASTTSKASTTSKASTTSKASTTSKASTTSKASSTSKASSSTKASTTSKASSTSKASTTSKASTTSKASTTSKASTTSKASTTSKASSTSKASSSTKASTTSKASSTSKASTTSKASTTSKASTTSKASTTSKASTTSKASTTSKASTTSKASTTSKASTTSKASTTSKASTTSKASTTSKVSTTSKASTTSKASTTSKASSTSKVSTTSKASTTSKVSAKATTSTKASTTVKPSTTSKASTTSKASTTSKASTTSKASTTSKASTTSKASTTSKASTTSKAATTSVKPTSKTSTSSKPNVSASSSNVGRDATSLVEASTSTSAAVLYPTTTSRWSNSTITRSSSLTTPIVSDPASLTTSVVYTTSVHTVTKCPAYVTDCPAGGYVTTETIPLYTTVCPISEATQTAAPTVTTEAPQPWTTSTVYTTRVYTITSCAPGVVDCPANQVTTETIPWYTTVCPVTATATPVGPGSVVFPQNTEVGQPSLVGPVVEAAYPTASSSLQTLVKPATSVGVPQGSPAGSSVAPGSSSKPTAPAGPPSYPTGGSGNASPSGSWSGVPVGPSSVPGIPEANAASVMSASLFGLVIVMAAQVFVL

SEQ ID NO: 7410 - protein, 95 aa, Oxalis tuberosa
LYAGINISGTNGEVMPGQWEYQVGPSVGIEAGDHVWASRYILERITEQAGVVLTLDPKPIEGDWNGAGCHTNYSTKSMRDEGGFEVIKKAILNLS

SEQ ID NO: 7411 - protein, 189 aa, Zea mays; identical to SEQ ID NO: 1454

SEQ ID NO: 7412 - protein, 225 aa, Androstachys johnsonii
TDIPQASRFLFMKNKVRMICDCLAPPVEVVQDGKLSQPLGLCGSTLRSPHGCHSQYMRNMGTIASLVMSVTINENDDEMEGDQQKGRKLWGLVVCHHTSPRFVPFPLRYACEFLIQVFGVQINKEVELAAQMREKHILRTQTLLCDMLLRNAPVAIITQSPNVMDLVKCDGAALYYRKKFWLLGITPTEAQIRDIAEWLLEYHSGTTGLSTDSLMEAGYPGASIL

SEQ ID NO: 7413 - protein, 263 aa, Brassica napus
  misc_feature (201)..(201): Xaa can be any naturally occurring amino acid
  misc_feature (224)..(224): Xaa can be any naturally occurring amino acid
MENDGGCSSERSLYEVLGVGATATQQEIRKAYHKLALRLHPDKNKDDQEAKEKFQQLQKVISILGDEEKRAVYDQTGSVDDADLSGDVVDNLRDFFKAMYKKVTEEDIEEFEANYRGSESEKKDLIELYTKFKGKMSRLFCSMLCSDPKLDSHRFKDIIDEAIAAGEVKSTKAYKKWAKEISEIKPPTSPQKMRQKAKESXDTDLYALISQRRDSRKEKFDTMXSSLASRYGSSADTEPNEEEFEAAKRKVESRVSSKKSRRK

SEQ ID NO: 7414 - protein, 206 aa, Oryza sativa
  misc_feature (154)..(154): Xaa can be any naturally occurring amino acid
FISRCISKMVKLTMIARVTDNLPLVEGLDDGRDLKDADFYKQQAKLLFKNLSKGQHEASRMSIETGPYLFHYIIEGRVCYLTMCDCSYPKKLAFQYLEDLKNEFERVNGNQIETAARPYAFIKFDTFIQKTKKLYLDTRTQRNLAKLNDELYEXVSEMSNRLISDTRIYAEKAKDLNRQALIRKYALVAIVIGIVLMLFWVKNKIW

SEQ ID NO: 7415 - protein, 295 aa, Oryza sativa Japonica Group
MAPRLCCSSQFLLAVSFLAAFAAVSNAGKVAVYWGQGAGNGDGTLAETCATGLYDFVNIAFLNVYGSGLTPVLNLAAHCNPDAGTCKSLSSEISSCQQSGVKVLLSLGGERARTRAPSATPVLDGIDFDIEKDGDHYDELAMALSSKCNGACVLTAAPQCPYPDAHLDAAIKTGLFSHVWVQFYNNRQCQYASGNATALQAAWAQVDERRAGARGRLPGPADGAGRCTERRLHRRGHAAVAGATGGGGRGGELRRSHAVESLERRDRWLWRQVEGESLKQIKLRLRTIHIHRRLK

SEQ ID NO: 7416 - protein, 326 aa, Synechococcus sp. PCC 7002
MAATDFKDYYSILGVSKSASADEIKKKFRKLALQYHPDRNPGNDAAEAKFKEISEAYEVLSDPEKRQKYDQFGQYWQQAARGGGSPYGGAGVNVDFENFSNFDFGNFGSFDEFINDLLGRAAASAGPRSTGNPYSDFGFNTAASGTTQGADREANIQLTLSEAFRGVEKRLSLGTETITVKIPAGVTNGNKIRVKGKGSPSAMGGQRGDLYLIVQLQAHHFFHFEGDNLICTLPITPDEAVLGASVAVPTPDGMVTMKIPPGIKSGQSLRLRGKGWPKPKGNRTDQLVKIEIAVPAAPTEAEKECYEKLRALNSFKPRDRLQNVSL

SEQ ID NO: 7417 - protein, 224 aa, Apodiscus chevalieri
DIPQASRFFFMKNRVRMICDCRASPFKVIQDGRLAQPLSLGGSTLGSPHGCHAQYMENMGSIASLVMSVTIHEDNDEVENDQPKGSKLWGLVVCHHTSPRFGPFPLRYACEFLIQVFGVQIGKEVEMASQKREKHILQTQTILCDMLLRDAPVAIIAESPNVMDLVHCDGAALYYRKKFWLLGVTPTEEQIKDIAEWLLEYHSGSTGLSTDSLMDAGYPGLRSL

SEQ ID NO: 7418 - protein, 557 aa, Oryza sativa
  misc_feature (187)..(187): Xaa can be any naturally occurring amino acid
  misc_feature (219)..(219): Xaa can be any naturally occurring amino acid
MAAAAAAAANGAGGGGGVPRPTNPMVTPLLTDLYQFTMAYAYWKAGKHLDRAVFDLYFRKNPFGGEFTIFGGLEECIRFIANFKLTDTEITFLRSAMPTCEDGFFEYLSSIDCSDVEVYAIPEGSVVFPKVPLMIIEGPVAVIQLLETPFLSLVNYASLVTTNAARHRLVAGKSKNLLEFGLRRAQXNVAAGWLFGIPIRGTHSHAFVSSFMMAIPSHXIFKCPSVRGSQGLDDIIDRTLASSDGSNKCEDFVSLVQNWLARIKDAGSLRGTFRETNLSELAAFTSYALAFPNSFLALVDTYDVMRSGVPNFCAVALALNDMGYKAAGIRLDSGDLAYLSVETRKFFRAIEEEFGFIGFGKMNITASNDLNEETIDALNKQGHEVDAFGIGTYLVTCYAQAALGCVFKLVEINKQPRIKLSEDVTKVSIPCKKRCYRLFGKEGYPLVDIMTGEDEPAPKVGERLLCRHPFNESKRAYVVPQHVEELLKCYWPGTTSEPREELPSINEIRSRCMGYLDRMRPDHMRRLNPTPYKVSVSAKLYDFIHFLWLNEAPDVSR

SEQ ID NO: 7419 - protein, 375 aa, Chromobacterium violaceum ATCC 12472
MSKRDYYDVLGVNRDASDDDIKKAYRKLAMKYHPDRNPDSKEAEDKFKEVKEAYEILSDSQKRGAYDQFGHAGVDPQAGMGGGGQGFGGFGDFADIFSDIFGGGRGGSGGGRSNVYRGADLRYNMEITLEEAARGCEKQIRIPSHESCSTCNGTGAKPGTQPKTCATCGGHGQVRMSQGFFSIQQTCPTCHGTGKQITDPCGSCHGAGQKKTTKTLNVKIPAGVDEGDRIRLGGEGEPGQNGGPAGDLYVVTHIKQHAVFQRDGMDLHCEMPISFSTAALGGEVEIPTLDGMAKVKISPETQSGRVYRLRGKGVKAVRGAEYGDLHCHVVVETPVKLTERQKELLREFEAISQGDVATHNPRSKSFMDKLRDFFE

SEQ ID NO: 7420 - protein, 432 aa, Daucus carota
MAQILAPSVQWQMRFTKNSTEVSSMTSKMWGSLFLKQNKKAPARSSTKYRALAVKSEDGTINRMEDLLNLDVTPYTDKIIAEYIWIGGTGIDVRSKSRTISKPVEHPSELPKWNYDGSSTGQAPGDDSEVILYPQAIFKDPFRGGNNILVICDTYTPQGEPIPTNKRHKAAQIFSDAKVLGEVPWFGIEQEYTLMQQDVNWPLGWNVGGYPGPQGPYYCAAGADKSFGRDISDAHYKACLYAGINISGTNGEVMPGQWEFQVGPSVGIEAGDHIWCARYLLERITEQAGVVLTLDPKPIDGDWNGAGCHTNYSTKSMREEGGFEVIKKAILNLSLRHKEHISAYGEGNERRLTGKHETASIDSFSWGVADRGCSIRVGRDTEKEGKGYLEDRRPASNMDPYVVTGLLAETTLLWEPTLEAEALAAQKLSLNV

SEQ ID NO: 7421 - protein, 384 aa, Idiomarina loihiensis L2TR
MATQDFYQVLGVSKDANERDIKKAYKRMAMKYHPDRTEGDKDMEIKFKEIKQAYEVLSDPQKRQMYDQYGHEAFEQARQGGAGHGAGGFGGGGADFADIFGDVFGDIFGGGRRQQARAQRGADLRYNLDMSLEEAVRGKTVELEIPTLVECRDCNGSGAKKGSKPQTCGHCHGSGQIQMRQGFFAVQQTCPQCRGTGTIIKDPCRTCHGHGRKEETKTLSVKIPAGVDTGDRIRLANEGEAGEHGAPAGDLYVQVHVREHPIFARDGNNLFCEVPVSFTKAALGGDIEVPTLEGKVKLKVPKETQTGKHFRLRGKGVKSVRTGEVGDLICKVMIETPVNLSSKQRDMLEELEDSMGTGDEAAKFRPKEKGFFDGVKQFFDDLRS

SEQ ID NO: 7422 - protein, 376 aa, Shigella flexneri 2a str. 2457T
MAKQDYYEILGVSKTAEEREIRKAYKRLAMKYHPDRNQGDKEAEAKFKEIKEAYEVLTDSQKRAAYDQYGHAAFEQGGMGGGGFGGGADFSDIFGDVFGDIFGGGRGRQRAARGADLRYNMELTLEEAVRGVTKEIRIPTLEECDVCHGSGAKPGTQPQTCPTCHGSGQVQMRQGFFAVQQTCPHCQGRGTLIKDPCNKCHGHGRVERSKTLSVKIPAGVDTGDRIRLAGEGEAGEHGAPAGDLYVQVQVKQHPIFEREGNNLYCEVPINFAMAALGGEIEVPTLDGRVKLKVPGETQTGKLFRMRGKGVKSVRGGAQGDLLCRVVVETPVGLNEKQKQLLQELQESFGGPTGEHNSPRSKSFFDGVKKFFDDLTR

SEQ ID NO: 7423 - protein, 354 aa, Coprinopsis cinerea okayama7#130
MAYQYRNDLLAPFLALPQGDKVQAEYVWVDGDGGLRSKTTTVSKKVTDIGQLRIWDFDGSSTNQAPGNDSDVYLRPAAIFKDPFRGGDNILVLAETYNNDGTPNRTNFRHHAAKVMEQAKDEEPWFGLEQEYTLFDVDGTPFGWPKGGFPGPQGPYYCGAGTGKVFARDLIEAHYRACLYAGINISGINAEVMPSQWEFQVGPCEGISMGDHLWMARYLLVRIAEQWGVKVSFHPKPLQGDWNGAGCHTNFSTKSMREEGGIKAIEAAIERLGKRHDEHIAVYGDDNDMRLTGRHETGHIGVFSSGVANRGASIRIPRHVAAQGHGYLEDRRPASNIDPYRVTSIIVETVCLNN

SEQ ID NO: 7424 - protein, 257 aa, Brassica napus
STHASGGIPNFCAVALALNELGYKAVGIRLDSGDLAYLSTEARKFFCGVERELNVPDFGKMIITASNDLNEETVDALNKQGHEVDAFGIGTNLVTCYSQAALGCVFGLVEINNQPRIKLSEDVTKVSIPCKKRTYRLFGKEGYPLVDIMTGENEPPPKVGERLLCRHPFNESKRAYVVPQRVEELLKCYWRGNADEAREELEPLKEIRNRCIKQLENMRPDHMRRLNPTPYKVSVSAKLYDFIHFLWLNEAPVGELH

SEQ ID NO: 7425 - protein, 513 aa, Candida albicans SC5314
MGNVPAKETRSRSSSSVSDYRNSTSSTTHGSSSSTSSKRRNTTSSLYGIVSSATSSSNHHNRSGSHDLRKLKRQEEKEQAQIQHYMQLIVKFNESVDGGYLAPFGTYKSNLDYDCDIVRNLIINRKLSPFFTPLQDFDESWTDDELCILLGQLTLHALEPGYNNDDDEEEDDIDNHKIHKSANYYKRQEEKAKLKSLINKVKELQKDEEQKYFDEKQKNFNKDCPSRDLLLRLYRNASECPICFLYYPKHLNISRCCLQPICSECFVQIKRLDPHPPHDDQSNQEAGELPHRLISEPANCPYCASPDFGVTYEPPIDIHTGIDGIKPGDYKVSPPIVEESESAIDDDGDNSSNGSTTGKGEITSNSATAAAATATPPPVNSLSPRKNSLKKRRGSLAANAPGVITIDMIRPDWETKLNSARSKLARKAATASAIHASNLLLDDNSNSNSNNGNGNNSGNNRRRNNSSSGRSGSFGGSNNRYATVEQRMIEEAMRLSILDEEERKRNANKENKK

SEQ ID NO: 7426 - protein, 297 aa, Triticum aestivum
MALVRGRPASLLLLAALLCAATFLAVPAAATGKTGQVAVFWGRNKNEGSLREACDTGTYTIAIISFLDVFGRGNYHLDLSGHDVSAVGADIKHCQSKNILVFLSIGGFGNQYSLPTAQSAADVADYIWNAYMLGTRKGVYRPFGDAFVDGIDFFIENGAPANYDELAKRLWNFNKDFRGRTPVQLTATPRCGYPDRHVEWALATGLVGRIFVRFYDDADCAANWQRQWDKWTAAYPSAQIYLGLPASEQKVGYVHPKNLYYSVIQVAQKAANYGGVMVWERYEDKRTNYSSYAIQWA

SEQ ID NO: 7427 - protein, 369 aa, Thermotoga maritima MSB8
MKKEKKDYYEILGVPRDATQEEIKRAYKRLVKEWHPDRHPENRKEAEQRFKEIQEAYEVLSDPQKRAMYDRFGYVGEQPTYQETESGGFFDDIFRDFENIFNRDIFDVFFGERPHQEERREYARRGEDIRYEIEVTLSDLINGAEIPVEYERYETCPRCGGTGVEPNAGYMDCPSCGGTGRIREERRSFFGYFVSERTCERCGGTGKIPREYCHECGGSGRVLRKVRRTVKIPPNVEDGTHLRITGGGNAGYYGGPYGDLIIIVRVKPDPRFKKSGSDLVYDVTIDYLQAILGTTVEVPLPEGGTTMLKIPPGTQPETVFRLKGKGLPNRYGRRGDLIVNVHVEIPKSLSREERKVLEELAKKRGVTIG

SEQ ID NO: 7428 - protein, 441 aa, Zea mays
MAGPKFGSFKAEKGDSAAAAGAAAQRRDPYEVLGVGRNATEQEIKSAFRRMALKYHPDKNSDDPVASEKFQEATFSYNILSDPDKRRQYDASGFEAIEADSQELELDLSSLNTVNTVFAALFSKLGVPIKTTVSATVLEEALNGSVEISQLQLGKSLCRKVEKQSAHFYSVDITDKEAKMGLVCRVHSTSKSKFKLLYFELEDNGGLSLALQEDSAKTGKVTSAGMFFLGFPVYRFEQNNSAAAAKDPDSAFFKRLDGFQPCEVNELKAGSHYFAVYGDNFFKSASYTIEVVSGEPFSAQKEKLRSVEAKIIAKRSELSKFESEYREVLAKFTEMTSRYAQEMQTIDDLLKERNAIHASYTNNPTLQRSSSSSKGKSPSKGSRSEDDQTVKKEKKSKSQPMEGSKSDDEGPENKKEETPKDRIRRKKWFNIHLKVDKRRPC

SEQ ID NO: 7429 - protein, 297 aa, Triticum aestivum
MALVCSRPASLLLIAALLSAATFLAVPAAATGKTGQVAVFWGRNKNEGSLREACDTGTYTIAIISFLDVFGRGNYHLDLSGHDVSAVGADIKHCQSKNILVFLSIGGFGNQYSLPTAQSAADVANYLWNAYMLGTRKGVYRPFGDALVDGIDFFIENGAPANYDELAKRLWNFNKDFRGRTPVQLTATLRCGYPDRHVERALATGLVGRIFVRFYDDADCAANWQRQWDKWTAAYPSAQIYLGLPASEQKVGYVHPKNLYYSVIQVAQKAANYGGVMVWERYEDKRTNYSSYAIQWA

SEQ ID NO: 7430 - protein, 392 aa, Mascagnia rigida
DLEPVNPADVPVTAAGALKSYKLAAKAISRLQSLPSGNISLLCDVLVREVRDLTGYDRVMVYKFHEDEHGEVVSECRRSDLESYLGLHYPATDIPQASRFLFMKNKVRMICDCLAPPVKVIQDERLPQPLSLCGSTLRSPHGCHAQYMTNMGTIASLVMSVTINEDDDMMDGDQPQMARKLWGLVVCHHTSPRFVPFPLRYACEFLIQVFGVQINKEVELAAQVREKHILQIQTMLCDMLLRDAPVAIITQSPNVMDLVKCDGAALYFKNRTWLLGVTPTEEQIRDIAEWLLEYHSGNTGLSTDSLMEAGYPGASALGDAVCGMASVSITSRDFLLWFRSHTAKEIKWGGAKHDPEDKDDGRKMHPRSSFKAFLEVVKWRSKPWEDIEMDAI

SEQ ID NO: 7431 - protein, 392 aa, Philgamia glabrifolia
DLEPVNPADVPVTAAGALKSYKLAAKAISRLQSLPSGNISVLCDVLVKEVRDLTGYDRVMVYKFHEDEHGEVVSECRRSDLESYLGLHYPATDIPQASRFLFMKNKVRMICDCLAPPVKVIQDERLPQPLSLCGSTLRSPHGCHSQYMTNMGTIASLVMSVTINEDDDTMDGDQQQMTRKLWGLVVCHHTSPRFVPFPLRYACEFLIQVFGVQINKEVELAAQVREKHILQIQTMLCDMLLRDAPVAIITQSPNVMDLVESDGTALYFKNKTWLLGVTPTEEQIRDIAEWLLQYHSGNTGLSTDSLMEAGYPGASALGDSVCGMAAVSITSRDFLFWFRSHTAKEIKWGGAKHDPDDKDDLRKMHPRSSFKAFLEVVKWRSMPWEDIEMDAI

SEQ ID NO: 7432 - protein, 523 aa, Triticum aestivum; identical to SEQ ID NO: 3607
  misc_feature (312)..(312): Xaa can be any naturally occurring amino acid

SEQ ID NO: 7433 - protein, 392 aa, Sphedamnocarpus sp. Davis 39-01
DLEPVNPADVPVTAAGALKSYKLAAKAISRLQSLPSGNISVLCDVLVKEVRDLTGYDRVMVYKFHEDEHGEVVSECRRSDLESYLGLHYPATDIPQASRFLFMKNKVRMICDCLAPPVKVIQDERLPQPLSLCGSTLRSPHGCHSQYMTNMGTIASLVMSVTINEDDDTMDGDQQQMARKLWGLVVCHHTSPRFVPFPLRYACEFLIQVFGVQINKEVELAAQVREKHILQIQTMLCDMLLRDAPVAIITQSPNVMDLVKSDGTALYFKNKTWLLGVTPTEEQIRDIAEWLLQYHSGNTGLSTDSLMEAGYPGASALGDSVCGMAAVSITSRDFLFWFRSHTAKEIKWGGAKHDPDDKDDLRKMHPRSSFKAFLEVVKWRSMPWEDIEMDAI

SEQ ID NO: 7434 - protein, 386 aa, Zea mays
  misc_feature (171)..(171): Xaa can be any naturally occurring amino acid
MSSSGKMEGPSAPVVRRDPYEVLSVPRDSSDQEIKSAYRKLALKYHPDKNASNPEASELFKEVAYSYSILSDPEKRRQYDTAGFEELENEGMDMEIDLSNLGTVNTMFAALFSKLGVPIKTTISPTVLEEAMNGTVTVRPLPVGTSATGKVDKQCAHFFGVTISEEQAHSXGMVVRVTSPAQSKFKLLYFEQEVNGGYGLALQEDSQKTGKLAMAKDPEAAFFKRLEGLQPCEVSALKSGTHIFAVYGDNFFKPASYMIEAMCAKSYEDTTERLKEVESKILAKRNDLRQFETEYRKALARFQEVTNRYTQEREAVDDMLRERDNIHCSFTTERTLANPVGVGSSSRYTIEQSIPESPENGSVDGRDKSGKKKWFNLNLNRSDKKA

SEQ ID NO: 7435 - protein, 158 aa, Picea sitchensis
METTFYSILGVNKDSSSAEIRSAYRKLAMKWHPDKWSTDPSSSETVKLRFQQIQEAYSVLSDDTKRALYDAGMYEPSEDMDAFCDFLDELSSLIATVRVQSNKDDELLQLQEMFTKMLEEDWFSTDNFEAFKEISSQHSDDKPENGQDHEPYGSVDDL

SEQ ID NO: 7436 - protein, 276 aa, Mesorhizobium sp. HN14A16
WGFDGSSTQQAEGHSSDCVLKPVAVYPDPARTNGVLVMCEVMMPDGVTPHASNKRATILDDEGAWFGFEQEYFFYKDGRPLGFPESGYPAPQGPYYTGVGYSNVGSVARQIVEEHLDLCLAAGINHEGINAEVAKGQWEFQIFGKGSKKAADQMWMARYLMQRLTEKYGIDIEYHCKPLGDTDWNGSGMHANFSTAYMREVGGKAYFEALMAAFDKNLMDHIAVYGPDNDKRLTGKHETAPWNRFSYGIADRGASIRVPHSFVKNDYKGYLEDRRP

SEQ ID NO: 7437 - protein, 318 aa, Oryza sativa
MTESHHHRIISIHTMASQRRRSSATAVLLSLLLLLQLAAAYPQGKRQNVAVFWGRNKAEGSLRQTCDTGDYNIVIISFLSVFGHGKYWLDLSGHDLRDVGADIRHCQSKGVYMLLSIGGDGYQYSLPSSKSAADVAENLYYSVLGGDRPGAFHPFGDDTIVNGVDFFIDNGPADHYDDLANRINDYNQNIRDPIGIMLTATVRCSYPDPRMKAALDTKLFRRIHVRFYDDPSCSYNHAGLAGVMAQWNKWSATYPDGQIFLGVVAANLTGKNDMVAVGELRDKLLPAVQNTDTYGGVMLWNSYYDSLTHYGRYVKDLA

SEQ ID NO: 7438 - protein, 392 aa, Tristellateia sp. Davis 19-01
DLEPVNPADVPVTAAGALKSYKLAAKAISRLQSLPSGNISLLCDVLVKEVRDLTGYDRVMVYKFHEDEHGEVVSECRRSDLESYLGLHYPATDIPQASRFLFMKNKVRMICDCLAPPVKVIQDGRLPQPLSLCGSTLRSPHGCHAQYMANMGTIASLVMSVTINEDDDTMDGDQQQMARKLWGLVVCHHTSPRFVPFPLRYACEFLIQVFGVQINKEIELAAQVREKHILRIQTMLCDMLLRDAPVGIITQSPNVMDLVKCDGAALFYKNKFWLLGITPTEAQIRDIAEWLLEYHSGNTGLSTDSLMEAGYPGASVLGDAVCGMASVSITSRDFLFWFRSHTAKEIKWGGAKHDPDDKDDGRKMHPRSSFKAFLEVVKWRSLPWEDMEMDAI

SEQ ID NO: 7439 - protein, 853 aa, Oryza sativa Japonica Group
MASKGTEGGHGGVERKEQQQQRGYQLPRDSRGSLEVFNPSSASSFRTAAAAPKSASPFLAIPDREEDNVVAQQRAAEWGLVLQTDHHTGLPQGVSARPSSGSARTSSEDNPQQQQSAAAIPRVSEELRAALSVFQQTFVVSDATHPNHPIMYASAGFFNMTGYTSKEVVGRNCRFLQGSGTDPHEIDKIRQSLANGSNYCGRILNYKKDGTPFWNLLTIAPIKDEDGRLLKFIGMQVEVSKYTEGKKDTVVRPNGLSESLIKYDARQKDHARSSVSELLLALKNPRSLSESSNNTLKRKSQESLSMSMSEVPSKRSSESGSRRNSRSGTRSSLQKINEVPDQVNRTRKSGLRAFMGFLGMGHGSVEKNMLKPRDEDPLIDSDDERPESFEDEFRRKEMRRGIDLATTLERIEKNFVITDPRLPDNPIIFASDSFLQLTEYNREEILGRNCRFLQGPETDRATVRKIRDAIDNQAEVTVQLINYTKSGKKFWNLFHLQPMRDQKGDVQYFIGVQLDGTEHVQDDAAKEGVVLVKKTADNIDEAAKELPDANLRPKDLWANHSKVVLPNPHMKDTASWRAIQKVLESGESIGLKHFRPVKPLGSGDTGSVHLVELLNTGEYFAMKAMDKSIMLNRNKVHRATAERQILDLLDHPFLPTLYASFQTKTHICLITDYCPGGELFVLLDNQPLKVLHEDAVRFYAAEVVVALEYLHCQGIIYRDLKPENILLHRDGHISLTDFDLSCLTSCRPQEIITGAGHTSAVDWWALGILLYEMLYGYTPFRGKTRQRTFANILHKDIRFPASISVSLAARQLMYRLLHRDPANRLGSYEGANEIKGHPFFRGINWPLIRATVT

SEQ ID NO: 7440 - protein, 367 aa, uncultured marine gamma proteobacterium EBAC20E09
MSKRDYYETLEVSRDASASELKKAFKKKAMKFHPDRNPDNPEAAEKFKEAAEAYDVLSDPQKKSAYDQFGHSGVEGMGGGGPNFNDININDIFGDIFGDVFGTRSQSRRQRRGSDLQYNLELSLKDAVLGVQKKIKIPSHRECPDCLGSGAAKGTKPVTCMNCNGTGQVRMQQGFFSIQQTCSVCSGTGQVIKEKCGTCGGVGAIKENKTLSVNIPAGVDNGDKVRLSGEGEWMKGGRSGDLYVAIRVKDNPLFERDGRHLYIEAPIPFDVSILGGSIKIPTLEKTISLKIPSNTQTGKVFRIKGEGASIVRNKRRGDILCRVIVETPSNLDKAQLKALSELTKKLEPSKNYPGTDIFLKAISKNKE

SEQ ID NO: 7441 - protein, 203 aa, Bradyrhizobium yuanmingense
ARQTQIKEFASFPTLEQLPLWGFDGSSTQQAEGHSSDCVLKPVAVFPDGARTNGVLVMCEVMMPDGKTPHPSNKRATILDDSGAWFGFEQEYFFYKDGRPLGFPTAGYPAPQGPYYTGVGYSNVGDVARKIVEEHLDLCLAAGINHEGINAEVAKGQWEFQIFGKGSKTAADQMWMARYLMLRLTEKYGIDIEFHCKPLGDTD

SEQ ID NO: 7442 - protein, 422 aa, Physcomitrella patens subsp. patens; identical to SEQ ID NO: 3610

SEQ ID NO: 7443 - protein, 392 aa, Tristellateia sp. Davis 29-01
DLEPVNPADVPVTAAGALKSYKLAAKAISRLQSLPSGNISLLCDVLVKEVRDLTGYDRVMVYKFHEDEHGEVVSECRRSDLESYLGLHYPATDIPQASRFLFMKNKVRMICDCLSPPVKVIQDERLPQPLSLCGSTLRSPHGCHAQYMANMGTIASLVMSVTINEDDDTMDGDQQQMARKLWGLVVCHHTSPRFIPFPLRYACEFLLQVFGVQINKEIELAAQVREKHILRIQTMLCDMLLRDAPVGIITQSPNVMDLVKCDGAALFYKNKFWLLGITPTEAQIRDIAEWLLEYHSGNTGLSTDSLMEAGYPGASVLGDAVCGMASVSITSRDFLFWFRSHTAKEIKWGGAKHDPDDKDDGRKMHPRSSFKAFLEVVKWRSLPWEDVEMDAQ

SEQ ID NO: 7444 - protein, 199 aa, Bradyrhizobium yuanmingense
QIKEFASFPTLEQLPLWGFDGSSTQQAEGHSSDCVLKPVAVFPDGARTNGVLVMCEVMMPDGKTPHPSNKRATILDDSGAWFGFEQEYFFYKDGRPLGFPTAGYPAPQGPYYTGVGYSNVGDVARKIVEEHLDLCLAAGINHEGINAEVAKGQWEFQIFGKGSKTAADQMWMARYLMLRLTEKYGIDIEFLCKPLGDTD

SEQ ID NO: 7445 - protein, 223 aa, Baccaurea javanica
DIPQASRFLFMKNKVRMICDCMAPPVKVIQDMNLAQPLSLSGSTLRSPHGCHAQYMSNMGSIASLVMSVTINEDDDEMKSDQPKGRRLWGLVVCHHTSPRFVPFPLRYACEFLIQVFGVQINKEVELAAQMREKHILQIQTVLCDMLLRDAPVAIITQSPNVMDLVKCDGAALYYRKKFWLLGVTPTESQIKDIAEWLLEYHSGCTGLSTDSLMEAGYPGASI

SEQ ID NO: 7446 - protein, 203 aa, Bradyrhizobium yuanmingense
ARQTQIKEFASFPTLEQLPLWGFDGSSTQQAEGHSSDCVLKPVAVFPDGARTNGVLVMCEVMMPDGKTPHPSNKRATILDDAGAWFGFEQEYFFYKDGRPLGFPTAGYPAPQGPYYTGVGFSNVGDVARKIVEEHLDLCLAAGINHEGINAEVAKGQWEFQIFGKGSKTAADQMWMARYLMLRLTEKYGIDIEFHCKPLGDTD

SEQ ID NO: 7447 - protein, 367 aa, Blumeria graminis
MGNSHVKPCFSDEVNLSHFRLLRVVGRGAFGKVRIVERRDTGLTFALKYIRKGDVIRTESVRNILRERRMLEQLNYQFICNLRYSFQDIEYMYLVVDLMNGGDLRFHISRKVFTEEAVRFWISELGLAIRYIHSQGIIHRDIKPDNVLLDAEGHVHLADFNVASDFTPGKLLTSKSGTLAYLAPEVYKGKGYSSSVDWWSLGVLFYECIYNKRPFEKISSSDLQEQILKADPKFPVTDPPVSIVCMHAISSALEQDPNKRMGCTKDEGFSSFTDNPFFRAIDFYALERKEIEPVFVPSSGKTNFDATYDLEEMLLEEAPLEARARRQKPREQLREDATEKQIREEEMYQMIEEHFTPFDYTTIAYER

SEQ ID NO: 7448 - protein, 223 aa, Baccaurea lanceolata
  misc_feature (47)..(47): Xaa can be any naturally occurring amino acid
DIPQASRFIFMKNKIRMICDCMAPPVKVIQDKNLAQPLSLSGSTMRXPHGCHAQYMSNMGSIASLVMSVTINEDDDEMKSDNPRGRRLWGLVVCHHTSPRFVPFPLRYACEFLIQVFGVQINKEVESAAQMREKHILQIQTVLCDMLLRDAPVAIITQSPSVMDLVKCDGAALYYRKKFWLLGVTPTESQIKDIAEWLLEYHSGSTGLSTDSLMEAGYPGLQS

SEQ ID NO: 7449 - protein, 432 aa, Juglans nigra
MAHILTPTTRWQMRITKNSANASPMTAKMWGSLLLKQNKKGSSKSSAKFRVFATKSENSTVNRIEKLLNLDLTPYTDKIIAEYIWIGGSGIDLRSKSRTISKPVEHPSELPKWNYDGSSTGQAPGEDSEVILYPQAIFKDPFRGGNNILVICDTYTPAGEPIPTNKRHRAAEIFTNKKVADEVPWYGIEQEYTLLQQNVKWPLGWPVGGYPGPQGPYYCGAGADKSFGRDISDAHYKACLYAGINISGTNGEVMPGQWEYQVGPSVGIEAGDHIWCSRYILERITEQAGVVLSLDPKPIEGDRNGAGCHTNYSTKSMREDGGFEVIKKAILNLSLRHKDHISAYGEGNERRLTGKHETASINTFSWGVANRGCSIRVGRETEKQGKGYLEDRRPASNMDPYIVTSLLAETTILWEPTLEAEALAAQKLALNV

SEQ ID NO: 7450 - protein, 224 aa, Glycine max
MAPRGATLLFLLCALCYSLIAIAGKSYYDILQLSKGASDEQIKRAYRKLALKYHPDKNPGNEEANKKFAEISNAYEVLSDSEKRNIYDRYGEEGLKQHAASGGRGGGMNFQDIFSTFFGGGPMEEEEKIVKGDDLVVDLDATLEDLYMGGTLKVWREKNVLKPAPGKRRCNCRNEVYHKQIGPGMFQQMTEQVCEQCPNVKYVREGYFITVDIEKGMQDGQVTF

SEQ ID NO: 7451 - protein, 873 aa, Ashbya gossypii ATCC 10895
MRTPRLPMKGNIAEVVLYRCSKTIKVNNYSNPRPVALDGRMMETTNTQKPLQWQTTPGEGSLEVHSPEQDRQRSISLSKFIPRSLKRNNSMNGSVESHVDAGDAEVDQEGQRASNGRQLGPGGEKRPEAGQLRGTGALPVILKENNKFASRLRSMFKASRELSQQEPNDVQQVSPEGKAEGTARHTPDGGMRVRSPSTPTFTVSRDPQPPTGQAAGTHEAIDIAPGRLQSPLMPSSHSAGGGITSKARGNRSNTVRGLNPYFAYQGLPPHAEPAHDGSQRSYDNSTFLTTPNTAQTSQTTLSYTNCSSNASAASLNDIEENEEVCSFQHTKKSPDILLQAIGCPVTPLTASESREETPLKSPVLRRVASQPTSLNKQEGQTRNNQQATDAGASLMAHQTLPVPVSCRSSSSSNMCAEASATARLEGGSPEHLELPPKRSQRLRAKSFGNKFREAVVGPQSFEKIRLLGQGDVGKVYLVREKKSDRLYALKIFGKAEMIKRKKIKRILAEQEILATSNHPFIVTLYHSFQTEDYLYLCMEYCMGGEFFRALQTRKTKCISEDDARFYASEVTAALEYLHLMGFIYRDLKPENILLHQSGHVMLSDFDLSVQAKGTRNPQVKGNAQSSLVDTKVCSDGFRTNSFVGTEEYIAPEVIRGNGHTASVDWWTLGILTYEMLFGFTPFKGDNTNQTFSNILKNDVYFPNNNDISRTCKDLIKKLLVKKESKRLGSKFGASEIKKHPFFKTVQWALLRNQEPPLIPVLTEDGYDFAKLSHKKDVKKAEKFGPSGDSTHKFKVAASIDSVEEQERIMFEEKVEHDDAVSDDDPFHDFNSMSLMKQDNNSLIYGDNNSYGKITYAPNQNRSRSNSHRSFFKR

SEQ ID NO: 7452 - protein, 121 aa, Zea mays
MDAGVEKCGDAAAEGGGDLYAVLGLKKECSDADLKVAYRKLAKKWHPDKCSSSSISVKHMVEANEKFPEIQRAYSVLSDANKRLLYDVGVYDDEDDEDSMQGMGDFIGEMTQMMSQVRPMA

SEQ ID NO: 7453 - protein, 297 aa, Oryza sativa Indica Group
MANKSSLIQLLLIAAVASQFVSSQAGSIAIYWGQNNGEGTLADTCATGNYKFVNIAFLAAFGNGQPPVFNLAGHCGPTNGGCASQSSDIKSCQSRGVKVMLSIGGGAGSYYLSSSEDAKNVATYLWNNFLGGQSSSRPLGDAVLDGIDFDIEGGTNQHWDDLARYLKGYSNSGRRVYLTAAPQCPFPDAWIGDALNTGLFDYVWVQFYNNPPCQYSSGSTSNLADAWKQWLSVPAKQIFLGLPASPQAAGSGFIPADDLKSQVLPVIKSSGKYGGIMLWSKYYDDQDDYSSSVKSDV

SEQ ID NO: 7454 - protein, 214 aa, Citrus limon
IDFRPVKPYEVPMTAAGALQSYKLAAKAITRLQSLPSGSMERLCDTMIQEVFELTGYDRVMAYKFHEDDHGEVVSEITKSGLEPYLGLHYPATDIPQAVRFLFMKNKVRMIVDCRARHVKVLQDEKLPFDLTLCGSTLRAPHSCHLQYMENMNSIASLVMAVVVNDEEEEGDNTLPQKRKRLWGLVVCHNTTPRFVPFPLRYACEFLAQVFAIH

SEQ ID NO: 7455 - protein, 392 aa, Verrucularia glaucophylla
DLEPVNPADVPVTAAGALKSYKLAARAISRLQSLPSGNISLLCDVLVKEVRDLTGYDRVMVYKFHEDEHGEVVSECCRPDLDAYLGLHYPATDIPQASRFLFMKNKVRMICDCLAPPVKVIQDQRLPQPLSLCGSTLRSPHGCHAQYMANMGTIASLVMSVTINEDDNIVDDNQLRMERKLWGLVVCHHTGPRFVPFPLRYACEFLIQVFGVQINKEVELAAQVTEKHILRTQTLLCDMLLRDAPVAIITQSPNVMDLVKCDGAALYYRKKFWLLGVTPTEAQIRDIAEWLLEYHSGNTGLSTDSLMEAGYPGASVLGDAVCGMASVKISSRDFLFWFRSHTAKEIKWSGAKHDPGDKDDIRKMHPRSSFKAFLEVVKWRSLPWEDMEMDAI

SEQ ID NO: 7456 - protein, 180 aa, Rhizobium gallicum bv. gallicum
EFDAFPALEQLPLWGFDGSSTMQAEGRSSDCVLKPVAVYPDPARSNGALVMCEVMMPDGVTPHPSNSRATILDDEDAWFGFEQEYFFYENGRPLGFPEQGYPAPQGPYYTGVGYKNVGSVAREIVEEHLDLCLAAGINHEGINAEVAKGQWEFQIFGKGSKRAADQIWMARYLLLRLCEK

SEQ ID NO: 7457 - protein, 73 aa, Nematanthus villosus
ISGTNGEVMPGQWEFQVGPSVGIEAADHTWCARYLLERITEQAGVVLSLDPKPIEGDWNGAGCHTNYSTKSTR

SEQ ID NO: 7458 - protein, 180 aa, Rhizobium etli bv. phaseoli
EFDAFPTLEQLPLWGFDGSSTMQAEGRSSDCVLKPVAIYPDPARTNGVLVMCEVMMPDGVTPHPSNARATILDDEDAWFGFEQEYFFYQNGRPLGFPEQGYPAPQGPYYTGVGYSNVGDVAREIVEEHLDLCLAAGINHEGINAEVAKGQWEFQIFGKGSKKAADQIWMARYLLQRLTEK

SEQ ID NO: 7459 - protein, 160 aa, Chlamydomonas reinhardtii
MEREQASSPQLCEKGCGFFANVGCGGMCSKCHREEARQHANAQATSSQPKPVEVAASRPVHESFPQPAAPSEAVASPVAEASTSSGDASPSATKSANPSRCLCCKKKVGLTGFKCKCGDVFCGTHRYAESHNCPFDYKTVHKEKLASNNPVVQASKVQKI

SEQ ID NO: 7460 - protein, 345 aa, Francisella tularensis subsp. tularensis SCHU S4
MKVITAEYIWVDGSDPVPHLRSKARVLPFKEFETPDEFPEWSFDGSSTNQATGDNSDCILKPVNFVIDPLRDYGYLVLCEVYNPDGQTPHATNNRAKLRALLASADCQDMWAGFEQEYTMFKDGRPLGWPTTGFPGPQGPYYCSAGNSKAFGRDLVEAHMQACLEAGILFYGINAEVMPGQWEFQIGYRGVDGEDAGILNVADHTHLARWLLERLGEEYGIDISFDNKPIKGDWNGAGLHTNFSTSKTRNPQTGREAIKKICAALEKNHKKDILNYGHNLHERLTGKLETSDMNTFSVGDADRGCSIRIPRPVALKGYGYLEDRRPGANADPYVIAMALANAAIN

SEQ ID NO: 7461 - protein, 180 aa, Rhizobium gallicum bv. gallicum
EFDAFPALEQLPLWGFDGSSTMQAEGRSSDCVLKPVAVYPDPARTNGALVMCEVMMPDGVTPHPSNSRATILDDEDAWFGFEQEYFFYENGRPLGFPEQGYPAPQGPYYTGVGYKNVGSVAREIVEEHLDLCLAAGINHEGINAEVAKGQWEFQIFGKGFKRAADQIWMARYLLLRLCEK

SEQ ID NO: 7462 - protein, 428 aa, Brassica napus
MAQILAASPTCQMKLTKPSPIASSKLWSSVMLKQKKQNSSKLRSFKAMALQSDNSTINRVESLLNLDTKPFTDRIIAEYIWIGGSGIDLRSKSRTLEKPVEDPSELPKWNYDGSSTGQAPGEDSEVILYPQAIFRDPFRGGNNILVICDTYTPAGEPIPTNKRARAAEIFSNKKVNEEIPWFGIEQEYTLLQPNVNWPLGWPVGAYPGPQGPYYCGVGAEKSWGRDISDAHYKACLYAGINISGTNGEVMPGQWEFQVGPSVGIEAGDHVWCARYLLERITEQAGVVLTLDPKPIEGDWNGAGCHTNYSTKSMREEGGFDVIKKDILNLSLRHMEHISAYGEGNERRLTGKHETASIDQFSWGVANRGCSIRVGRDTEKKGKGYLEDRRPASNMDPYIVTSLLAETTLLWEPTLEAEALAAQKLSLKV

SEQ ID NO: 7463 - protein, 252 aa, Oryza sativa; identical to SEQ ID NO: 1484

SEQ ID NO: 7464 - protein, 323 aa, Zea mays
MSSFGRNSWCILVLASVLLLSCLADTAVAKRTGELTVFWGRNKEEGTLREACDTGLYNTVIISFYSVFGHGRYALDLSGHPLDGVGADIKHCQSQGIPVFLSIGGGGNHYSIPSSASAEAVADNLWNAFLGGGNSDVPRPFGDAAVNGIDFYIDDHSAPGDHYDELARRLDYFNSMYYHATTKYVRLTATPRCAFPPDDPMARALRTGLFERIHVRFYGDADKCSYKNGDVSGVVDQWSKWTARYPKSQLYVGLAAAESGVPDHAPPPVEVYLKYLYYDLLPKVQKAPNYGGVMVWNRFTDNRTGYSGAVKGWAACSYAGCVN

SEQ ID NO: 7465 - protein, 566 aa, Triticum aestivum
MEATAPSVGAGANGSLAAAARAQVGPPTNPMATALLTDQYQFSMAYAYWKAGKHADHAVFDLYFRKNPFGGEFTVFAGLEECIKFIANFKFTEDEISFLQSVMPMCEDAFFDYLRGIDCSDVEVYSIPEGSVVFPKVPLMRVEGPVAVVQLLETPFVNLINYASLVTTNAARHRHVAGKSKVLMEFGLRRAQGPDGAISASKYCFMGGFDATSNVLAGHLFGIPLRGTHSHAYVSSYMSLDEIPDRTLRNKDGSKICKDFVSLVKEWLCKIQAADSLRNVFGDTNQSELAAFASYALAFPSSFLALVDTYDVMRSGIPNFCAVALALHDLGYKASGIRLDSGDLAYLSIETRKVFHAIEKEFNIPGFGKMIITASNDLNEETIDALNKQGHEVDAFGIGTYLVTCYSQAALGCVFKLVEINSRPRIARAEDVAKVSIPCKKRCFRLYGKEGYPLVDIMIRESEPSPKAGERILCRHPFLESKRAYVVPQHVEELLHCYWPGSSDKPRAELPPLLKIRSRCMQQLEKLRPDHIRRLNPTPYKVSVSAKLYEFIHYLWLNEAPVGELQ

SEQ ID NO: 7466 - protein, 483 aa, Rhodopirellula baltica SH 1
MSAAQSSAQSQPNLSFDELKSRLEPFEQTHLLRFWDSLDSDQQSRLSEQIAQVDFARLKTLIEGKDKSVDFGELAARATMPQAVASDGSGCDWTLEDAQKRGEEALRAGEIATVLVAGGQGTRLGFDQPKGMFPVGPVSERTLFQFFADRLIAAGEKYGVDVPLYLMTSEATHVETRRYFEENNYLGLKPEQVTIFQQGTMPAVDAETGQVLLAEKGSLALSPDGHGGTLRALSRNGCMEEMRKNGRKHLFYFQVDNPLVGLCDPVFIGHHLLASSEMTTQVIRKRYPTEKVGNVVEIDGQTQIIEYSDLPDSAAEMTNADGSLKLWAGNIAVHLFDLDFLERMLDLDTSLPIHRANKKVSHVVADGQLVTPESPNATKFEQFIFDLLPNAKNTIVCEANPAEAFAPVKNANGAATDTPELAQQAICDLHRGWLRSCGVTVDDSVKVEINPRFAMDSNELCEKLRQSGDSDGEQSISSDRYFS

SEQ ID NO: 7467 - protein, 224 aa, Cleistanthus perrieri
DIPQASRFLFMKNKIRMICDCLAPPVKVIQDKSLAQPLSLCGSTLRSPHGCHSQYMANMGSIASLVMSVTINEDDDEMDSDQERGIKLWGLVVCHHTSPRFVPFPLRYACEFLIQVFGVQVSKEVKLAAETREKHILQTQTVLCDMLLRDAPVAIITRSPNVMDLVKCDGAALYYRKKFWLLGVTPTEAQIKDIADWLLEYHGESTGLSTDSLLEAGYPGATVL

SEQ ID NO: 7468 - protein, 365 aa, Borrelia turicatae 91E135
MKRDYYEILGLSKGASKDEIKKAYRKIAIKYHPDKNKDNKEAESIFKEATEAYEVLGDDNKRAQYDRFGHTAFEGGGGFSGFSNGFSGFSDIFEDFGDIFDSFFTGRRGQDKNRQNEKGQDITYQIEISLEDAYLGYKNNINIARNMLCESCLGKKSEKGTSPSICNMCNGSGRVMQGGGFFRVTTTCPKCHGNGKIISNPCKSCKGAGSLKYKETIELKIPAGIDDSQQIKMRGKGSVNPDNQQYGDLYIRVSIKPHRIFKRNGKDLYATLPISFTQAALGKEIKIQTIAEKKIEIKIPKGTENDEQIIIKNEGMPILHTEKFGNLILIIKIKTPKNLSYNAIRLLEDLSKEINDIDKVTLNKI

SEQ ID NO: 7469 - protein, 224 aa, Cleistanthus oblongifolius
DIPQASRFLFMKNKVRMICDCLAPPVKVIQDERLAEPLSLCGSTLRSPYGCHSQYMENMGVIASLVMSVTINENDDEMDSDQERGIKLWGLVVCHHTSPRFVPFPLRYACEFLIQVFGVQVSKEVQLAAQAREKHILQTQTVLCDMLLRDAPVAIITRSPSVMDLVKCDGAALYYRKKFWLLGVTPTEAQIKDIADWLLEYHGESTGLSTDSLMEAGYPGAAVL

SEQ ID NO: 7470 - protein, 204 aa, Drypetes madagascariensis
ADIPQASRFLFKQNRIRMICDCNADPVRLIQSEEIKQPLLLVNSTLRSPHGCHTQYMTNMGSIASLVMAVVINGNNSSKLWGLVVCHHTSPRYVPFPLRYACEFLMQAFGLQLYMELQLAEQLVEKKILRTQTLLCDMLLRDAPFSIVTQSPSIMDLVKCDGAALYYGGKCWLLGVTPTETQVKNIAEWLLTSHGHSTGLSTDS

SEQ ID NO: 7471 - protein, 353 aa, Stevia rebaudiana
MALLNDLINLNLTDSTEKIIAEYIWIGGSGMDLRSKARTLPKPESDPKKLPKWNYDGSSTGQAPGEDSEVILYPQAIFKDPFRGGNNILVICDAYTPAGEPIPTNKRHAAAKIFSHPEVEKEVPWYGIEQEYTLLQKDVNWPLGWPKGGFPGPQGPYYCGIGADKAFGRDVVDAHYKACLYAGLILAALNGEVMPGQWEFQVGPSVGISAGDEIWAARYILERITEIAGIVVSFDPKPIPGDWNGAGAHTNYSTKSMREEGGYEIIKKAIEKLGLKHKEHIAAYGEGNERRLTGHHETANINTFKWGVANRGASIRVGRDTEKEGKGYFEDRRPASNMDPYVVTSMIAETTLL

SEQ ID NO: 7472 - protein, 371 aa, Berberidopsis corallina
AAGALKSYKLAAKAISRLQSLPSGTISLLCDVLVQEVSDLTGYDRVMVYKFHDDEHGEVVAECRRPELEPYLGLHYPATDIPQASRFLFMKNKVRMICDCLAPPVKVIQDKRLAQPLSLCGSTLRSPHACHAQYMANMGSIASLVMSVTINEEDDEMESDQQKGRKLWGLVVCHHTSPRFVPFPLRYACEFLIQVFGVQVNKEVELAAQLREKHILRTQTVLCDMLLRDAPVGIVTQSPNVMDLVKCDGAALYYRNKFWLLGVIPTEAQIRDIAEWLLEYHGGSRGLSTDSLMEAGYPGALVLGDAVCGMAAIRITSKDFLFWFRSHTAKEIKWGGAKHDPDDKDDGRKMHPRSSFKAFLEVVKRRSLPWE

SEQ ID NO: 7473 - protein, 391 aa, Carallia brachiata
DLEPVNPADVPVTAAGALKSYKLAAKAISRLQSLPSRNMSLLCEVLVKEVRDLTGYDRVMVYRFHDDEHGEVVAESCRTDLEPYLGLHFPATDIPQASRFLFMKNKVRMICDCLAPPVKVVQDRRLAQPLSLCGSTLRAPHGCHAQYMANMGSIASLVMSVTINEDDAEMDSGQQNGRKLWGLVVCHHTSPRFVPFPLRYACEFLIQVFGVQINKEVELATQMREKHILQTQTVLCDMLLRDAPVAIVTQSPNVMDLVKCDGAVLYYRKKTWLLGITPTEAQISDIAEWLLECHSGTTGLSTDSLMEAGYPGASDLGDAVCGMAAVKITAKDFLFWFRSHTAKEIKWGGAKHDPHNKDDGKMMHPRSSFKAFLEVVKWRSLPWEDMEMDAI

SEQ ID NO: 7474 - protein, 379 aa, Staphylococcus aureus subsp. aureus Mu50
MAKRDYYEVLGISKDASKDEIKKAYRKLSKKYHPDINKEEGADEKFKEISEAYEVLSDDNKRASYDQFGHDGPQGFGGQGFNGSDFGGFSGFGGGGFEDIFSSFFGGGRQRDPNAPQKGDDLQYTMTLTFEEAVFGTTKEISIRKDVTCETCHGDGAKPGTSKKTCSYCNGAGHVAVEQNTILGRVRTEQVCPKCNGSGQEFEEACPTCHGKGTENKTVKLEVKVPEGVDNEQQIRLAGEGSPGVNGGPAGDLYVVFRVKPSETFKRDGDDIYYKLNVSFPQAALGDEIKIPTLNNEVMLTIPAGTQTGKQFRLKEKGIKNVHGYGYGDLYVDIKVVTPTKLTDRQKELMKEFAQLNGEEINEQPSNFKDRAKRFFKGE

SEQ ID NO: 7475 - protein, 419 aa, Oryza sativa
MARAAASRLAAAATSTSTLEMFSRHLAAASSAWGIASSRAPYPGRERRSASWWCPTRSFHATRGMNARDYYDVLGVNKDASASDIKKAYYLLAKKFHPDTNKEDADAEKKFQEVQHAYEVLKDDDKRETYDQLGAEAYERQASGGGPDDFSGSHPFGDIFGDMFDNPFAMRGGRDVKVPIKLSFMEAVQGCRKTIAYEADVFCDTCNGSGVPPGTVPQTCKACRGAGVIFMQRGIMSIETTCSRCGGSGKIVKNFCKTCKGEQLVKGKKSVKLDIMAGIDDNDTMKVFGKGGADVERNKPGDLYVTIKIREDPVFRREGNHVHVDAIISIAQAVLGGTVTVPTLTGNVSVKVRQGTQPGEKVVLRGKGIKARNSPAYGNQYIHFNVRVPTDVTQRQRELMEEFDKEECNEGERVAAASG

SEQ ID NO: 7476 - protein, 194 aa, Griffithsia japonica
ARGLYPSIMPLQNVNGSASQSLQDFKGVTDKSAVQVVEEKLQNMNKASVDPNCIMSDSELAGFLELYGRYMTERSKKAQINWDLIEQPSENMLQRYDTLIAASDADRTALLSKLAVLKLNGGLGTSMGCKGPKSVIEVRGDTTFLDLIVQQIEGLNKSHPGADVPLLLMNSFNTDTETARIIPKYQHTNVTSPL

SEQ ID NO: 7477 - protein, 647 aa, Oryza sativa Japonica Group
MSGKLCFLASVLLSMSTVVDLAMAASGGVNIAVYWGQNGSEGTLGETCGTGLYAYVNLAFLSTFGAGRAPVLNLADHCDAPSGTCASLAADIASCQAAGVKVLLSIGGGALGYNLSSPSDARDLAAYLWDNFLGGGATGASRPLGDAVLDGVDFDIESPSRFYDDLARNLASLYTRAPRPPRGGKTYLLTAAPQCPYPDASLAAALATGLFDHVWVQFYNNPPCHGFVDADTMASQVLPVVVGAADYGGIMLWSRSYDKDSSFSVKLQAALQNRNKPTGAGASSHTKRRIYIIAGVFAGVLLLFLLLITYFLCHKKHHGQQPPVQELTTPPKAEPSQKKQRAQHLKRYSYSEVERMTKTFAHKIGQGNYGDVYKGNLRDGRQIVVKLLKNCRGNDKEFLNEVASIGTISHVNVIPLLGFCLQGTARALIYEYMPNGSLESYAFSNDDSIEENYSLWIYWEKLYEIAIGVARGLEFLHGSGNANIMHLKIKPRNILLDQELCPKISDFGVANLCLWKESKKSAQNARGRDSYDAPEVVSTKFGAVSSKSDVYSYGVMVLEMIRAKRRINVGADTTTKYFAQWLYDHLDQFCNSISDISDETRESVRRIIIVGLWCIQAAPANRPSMSRVVKMLESSSTKMDLPRKSIE

SEQ ID NO: 7478 - protein, 391 aa, Celastrus scandens
  misc_feature (303)..(303): Xaa can be any naturally occurring amino acid
  misc_feature (389)..(389): Xaa can be any naturally occurring amino acid
DLEPVNPADVPITAAGALKSYKLAAKAISRLQSLPSSNMSLLCDVLVKEVSELTGYDRVMVYKFHDDDHGEVVAECCIPDLEPYLGLHYPATDIPQASRFLFMKNKVRMICDCLAPPVKVLQDKRLAQPLSLCGSTLRSPHGCHAQYMANMGSIASLVMSLTINEDDDETNSDQQKRRKLWGLVVCHHTTPRFVPFPLRYACEFLIQVFGGQINKEVELATQLKEKHILRTQTLLCDMLLRDSPVGILTQSPNVMDLVKCDGAALYYRNKFWLLGVTPTEIQIKDIAEWLLDYHSESTGLSTXSLMEAGYPDASILGEAVCGMAAVKITSKDFLFWFRSHTAKEMKWGGAKHDPADKDDGRRMHPRSSFKAFLEVVKRRSLPWEDVEMXAI

SEQ ID NO: 7479 - protein, 392 aa, Cissus sicyoides
DLEPVNPADVPITAAGALKSYKLAAKAISRLQSLPSGNISLLCDVLVKEVTELTGYDRVMVYKFHEDEHGEVIAECLRADLEPYIGLHYPATDIPQASRFLFMKNKVRMICDCLAPPVKIVQDKRLAQPLSLCGSTLRSPHGCHAQYMSNMGSVASLVMSATVNEEDEDDTESEQQKGRKLWGLVVCHNTSPRFVPFPLRYACEFLIQVFGVQINKEMELAAQMKEKHILQTQTVLCDMLLRDAPVGIVTQSPNVMDLVRCDGAALYYQKKFWLLGVTPTEAQIRDIVDWLLECHSGSTGLSTDSLMEAGYPAAPALGDAVCGIAAIKITSNDFLLWFRSHTAKEIKWSGAKHDPDDKDDGRKMHPRSSFKAFLEVVKRRSLPWQDIEMDAI

SEQ ID NO: 7480 - protein, 342 aa, Solanum lycopersicum
MGVDYYKVLGVDKNATDDDLKKAYRKLAMKWHPDKNPQNKKEAEAKFKQISEAYDVLSDSQKKAVYDQYGEEGLKGGVPPPGAGGPGAGSTYFSTGDGPTSFRFNSRNADDIFAEFFGFSTPYGPGGGRGSRFGNMFTDDIFAASFGEGGGGGGVPMHSSVPRKEAPVQQNLPCNLEDLYKGTTKKMKISREIADSSGKRIVQEILTIEIKPGWKKGTKITFQEKGNEQPGVIPADLVFIIDEKPHKVFSRDGNDLIVTQKIPLAEALTGTTVQLTTLDGRNLTIPINNVIQPNYEHIAPGEGMPLPKDPSKKGNLRIKFDIKFPARPTVAQKSGIKKLLGS

SEQ ID NO: 7481 - protein, 286 aa, Arabidopsis thaliana
MTSLIAFLFTVLVIVSSVHCRMTTASTPGYGIKQEDRLCIQGQEGTKLCSSGTSRDCLNFCLIRGYAEAVADLNFRCLRFRFRFDRLKFFPMVDHYQVLGVTRNATKKEVKDAFRRLAIKYHPDKHAQSPEHVRHNATVRFKLVSEAYEVLNDDLKRASYNAGSDSDCFRRTSGSYSNPYGNRGGRAQGSGYGYGYGYSTRNRQASSFSSGFDSTFRYLTTRAFLLNLALAGGLYFAFTAIDTSGETLWKMRNSGLITDTTFAYYQKSFEEAMESIEKSKSHKDEG

SEQ ID NO: 7482 - protein, 174 aa, Oryza sativa
MPLSSNISTQKTHYEVLSVNEGATYDEVRAGYRAAILNAHPDKSQAKLDSLVSSVEHGEFFSVQKAWEVLRDPKSRTEYDKQLQTSRQNSANIAYEIEIEEMTVESTGDAMELMYPCRCGDHFSILSSDLAEMGILVDDDGEIYFQSSDCVSASVVLSCGSCSLKTRLVINRTS

SEQ ID NO: 7483 - protein, 243 aa, Glycine max
LIDVEILNHLIQNKNEYCMEVTPKTLADVKGGTLISYEGRVQLLEIAQVPDEHVNEFKSIEKFKIFNTNNLWVNLNAVKRLVEADALKMEIIPNPKEVDGIKVLQLETAAGAAIRFFDKAIGINVPRSRFLPVKATSDLLLVQSDLYTLEDGFVIRNKARENPENPSIELGPEFKKVSNFLGRFKSIPSIVELDSLKVAGDVWFGAGVILKGKVSIVSKPGVKLEVPDGVTIVDKEINGPEDL

SEQ ID NO: 7484 - protein, 1130 aa, Monotropastrum globosum
MSSSRPTQSSGSSGRSKHSARIIAQTTVDAKLHADFEESGGSFDYSTSVRFTGTVGGDIQPRSDKVTTAYLHQIQRGKLIQPFGCLLAVDEKTFKVIAYSENAPEMLTMVSHAVPSVGDHPLLGIGTDVRTIFTNPSAAALQKAMGYGEVSLLNPILVHCKTSGKPFYAIVHRVTGSLIIDFEPVKPYEVPMTAAGALQSYKLAAKAITRLQSLPSGNMRILCDAMVQEVFELTGYDRVMVYKFHDDDHGEVFSELTKPGLEPYLGLHYPATDIPQAARFLFMKNKIRMICDCHAKQVKVIQDDKLPIDLTLCGSTLRAPHSCHLQYMENMNSIASLVMSVVVNEGDEEGDGGGSSVSSNQQQKIKRLWGLLVCHNTTPRFVPFPLRYACEFLAQVFTIHVNKELELENQIHEKNILRTQTLLCDMLMRDAPLGIVSQSPNVMDLVKCDGAVLLYKDKTYRMGTTPTDFQLRDIVYWLSEYHTDSTGLSTDSLYDAGYPGALAFGDGVCGMAAVKITSNDMLFWFKAQTAAEIQWGGAKHESGERDDGRKMHPRSSFKAFLEVVKTRSLPWKDYEMDAIHSLQLILRNAFKDTKAMDATTDVIHTRLHDLKIEGMEELEAVTSEMVRLIETATVPILAVDVDGLVNGWNLKIAELTGLPVDKAIGRDLLSLVEDSSTGIVKKMLDLALQGKEEQNIQFELKTDESRRDSGPISLVVNACASRDHHENVVGVCFVAQDITGHKTVMDKFTRIEGDYKAIVQNPNPLIPPILGTDEFGWCSEWNLAMEKISGWNREDVINKMLLGEVFGTHVVCCRLKNQEAFVNLGIVLNNAVTGRESEKISFGFFARNGKYVECILCASKKIDGEGAVTGVFCLLQLASPELQQALHVQRLTEQTALKRFKELAYIRRQTRASLSGIMYSWRLMEGTDLRERQKQLLHTSAQCQHQLTKILDDTDLDCIIDGYLDLEMVEFTLYEVLSASISQVTLKSNGKGIHIANPLQEEKMPATLYGDNLRLQQVIADFLSISVNFTPNGGQIVASASLTKDRLGQSVQLVHVEIRITHMGGGVPEGLLNQMFGGDTDTSEEGISLLVSRKLVKLMNGDVQYLREAGKSTFIISVELAAAANKSTCE

SEQ ID NO: 7485 - protein, 968 aa, Physcomitrella patens subsp. patens
MGNVGGSLGIPCRDRDNGCLCEQCKMAIQAGKAFGNLTGRLAPCRDYGSGCKCTQCETFRKAAIQSSQCLADNKRSGVSLGLLQSTSGSSTFPTPLTLEPAREVSRSIRHVTMSFTDLGSDVISVNQWFFQVPVLSRTEPYAEVNIVHSAVGLISQSDIDLAASCRALIVGFTVGLMGFAIATSARLAGARGVEEGELWAVAEVCIVRGVGGFWRFVRLLEIRARVKVNGPECAGAGGDRVPTADAARGLVQTFGCMVAVEESSFRVIGYSENAPDMLDLVPQGGVPSAGQQDVLGIGTDARTLLTPSSATALEKASSAADVTMLNPVSVHCRSSGKPFYAILHRIDVRVVIDSKPIRPHDAIAEAGSEGVSLYYGKRFWLLGVTPKEAQIKEIADWLLECHRDLTGLSTDSLADAGYPGAAELGDAVCGMAAAKITPKDFLFWFRSHTTKEIKWGGAKHDPDERDDGRRMHPLSSFKAFLEVVKRSLPWDDVEMDAIHSLQLILRGSFQDIDDSDTKTMIHAHLNDLKLQGMDELSLVANEMVRLIETATAPILAVDSSGFINGWNAKVAELTGLPVGEAMGRSLVKDLILEESAEVVERLLYFALEGEEEQNVEIQLKTFGPQKEKGAVILIVNACSSRDVADNVVGFCFVGHDVTGQKLVLDKFTRIQGDYKDIVMNPNPPIPPIFSTDEYGYCSEWNPSMEKLTGWKREEVLGELLVGEIFGMQFMCCRLKGQDAMTKFMIVLNSAMDGQDTDRFPFSFFDRQGKYVDALLTVNKRTDAEGSITGVSCFFHTTSVELLQVGLETLLRLIAIGCSVAETPNSCGFCATVCATRGVTCAALTAGDSAIALTVQRATEKVAFAKLKELAYICQEIKNLLFGIFVDTSAVCERQPRKILDDMDLESIEDGYLELKTSEFVMGTVMDAVVSQGMITSTEKGLQLIRETPREIKRAFVCLGTRFDYNKWR

SEQ ID NO: 7486 - protein, 134 aa, Zea mays
MNSRRQEQQARRTIRALLAKNGALCTGVWRCRSGGADIASRAPTMATAAVSVDEKLDKLRAEVAKLDQISENEKSGFISLVSRYLSGEAEQIEWSKIQTPTDEVVVPYDTVASPPEDLEETKKLLDKLVVLKLN

SEQ ID NO: 7487 - protein, 202 aa, Zea mays
MASKALPSHLRAPASDSASAASFGKHHGKSQSHMAFENASTSVAASQMRNALNALAETVPDAAERKRFEAEMDNFFALFRRFLNDKAKGNEVNWDRIAPPQPSQVVNYNDLGSEASVEFLNKLAVVKLNGGLGTSMGCVGPKSVIEVREGMSFLDLSVRQIEHLNRTFNVNVPFVLMNSFNTDQDTQSIIKKYQGHNVDIIT

SEQ ID NO: 7488 - protein, 161 aa, Oryza sativa Japonica Group
MAGREKRRRVAALDGEERRRRQEEAATLLHRIRGLVRWVVAEVAAGRSPTVALHRYQNYCSSASAAAASPCACSYDVPVGTDVLSLLHRGSHASRLNVLLRVLLVVQQLLQQNKHCSKRDIYYMYPSIFQEQAVVDRAINDICVLFKCSRHNLNVVPVAKG

SEQ ID NO: 7489 - protein, 345 aa, Rhodopseudomonas palustris CGA009
MTKYKLEYIWLDGYKPTPNLRGKTTIKEFEIYPTLEQLPLWGFDGSSTMQAEGHSSDCVLKPVAMYPDAARKNGILVLCEVMMPDGVTPHPTNTRATILDDEGAWFGFEQEYFFYKNGRPLGFPEAGYPAPQGPYYTGVGYKHVGDIARQIVEEHLDLCLAAGINHEGINAEVAKGQWEFQVFGKGSRTAADQMWMARYLMLRLTEKYGIDIEFHCKPLGDTDWNGSGMHCNFSTAYMREVGGKEYFEAMMKAFEANLDDHIAVYGPDNHMRLTGKHETAPWNKFSYGIADRGASIRVPHSFVNNGYKGYLEDRRPNSQGDPYQIASQVLKTISSVPTSKSAAAA

SEQ ID NO: 7490 - protein, 203 aa, Drypetes madagascariensis
QISPQARFLFKQNRVRMICDCHAIPVRVIQSEELRQPLCLVNSTLRSPHDCHTQYMANMGSIASLAMAVVINGNDSTKLWGLVVCHHTSPRYVPFPLRYACEFLMQAFGLQLYMELQLAAQLVEKNILRTQTLLCDMLLRDAPFGIVTQSPSAMDLVKCDGAALYYGGKCWLLGVTPTESQVKDIAEWLLNDHEDSTGLSTDS

SEQ ID NO: 7491 - protein, 473 aa, Zea mays
MATAAVSVDEKLDKLRAEVAKLDQISENEKSGFISLVSRYLSGEAEQIEWSKIQTPTDEVVVPYDTVASPPEDLEETKKLLDKLVVLKLNGGLGTTMGCTGPKSVIEVRNGFTFLDLIVIQIESLNKKYGCNVPLLLMNSFNTHDDTQKIVEKYSNSNIEIHTFNQSQYPRIVTEDFLPLPSKGKSGKDGWYPPGHGDVFPSLNNSGKLDILLAQGKEYVFVANSDNLGAIVDIKILNHLINNQNEYCMEVTPKTLADVKGGTLISYEGRVQLLEIAQVSDEHVNEFKSIEKFKIFNTNNLWVNLKAIKRLVEAEALKMEIIPNPKEVDGVKVLQLETAAGAAIRFFDKAIGINVPRSRFLPVKATSDLLLVQSDLYTLVDGFVIRNPSRANPANPSIELGPEFKKVANFLGRFKSIPSIVELDSLKVSGDVWFGSGITLKGKVTIIAKPGVKLEIPDGDVLENKDVNGPEDL

SEQ ID NO: 7492 - protein, 555 aa, Aspergillus oryzae; identical to SEQ ID NO: 3682

SEQ ID NO: 7493 - protein, 225 aa, Flueggea suffruticosa
DIPQASRFLFMKNKVRMIFDCQAPPVKVVQDKRLAQPLSLCGSTLRSPHGCHAQYMANMGTIASLVMSVTINEDDDDETDIDQQVGRKLWGLLVCHHTSPRFVPFPLRYACEFLMQVFGVQVNREVELAAQTREKHILQIQTVLCDMLLRDAPVAIVIQSPNVMDLVECDGAALYYRKKLWLLGVTPTEAQIKDITEWLMEYHGESTGLSTDSLMEAGYPGAAVL

SEQ ID NO: 7494 - protein, 220 aa, Glochidion puberum
TIRSLFMKNKVRMICDCQAPPVKVVQDKRLAQPLSLGGSTMRSPHGCHAQYMANMGTIASLVMSVTINEEDEETVNDQQMGRKLWGLVVCHHTTPRFVPFPLRYACEFLMQVFGVQVNREVELAAQTTEKHILQTQTVLCDMLLRDAPVAIVTQSPNVMDLVKCDGAALYYRKKFWMLGVTPTETQIKDITEWLLENHGESTGLSTDSLMEAGYPGAAIL

SEQ ID NO: 7495 - protein, 368 aa, Corylopsis glabrescens f. gotoana
ALKSYKLAAKAISRLQSLQSGNISLLCDVLVKEVSDLTGYDRVMVYKFHEDEHGEVVAECRREDLEPYLGLHYPATDIPQASRFLFMKNKVRMICDCLAPAVKVNHDKRLAQPLSLCGSTLRSPHGCHAQYMANMGSIASLVMSVTINEQDDEIESEQQQGRKLWGLVVCHHTSPRFVPFPLRYACEFLIQVFGVQISKEVELAAQLREKHILRTQTMLCDMLLRDAPVGIITQSPNVMDLVKCDGAALYYRKKFWLLGVTPTEMQIRDIVQWLLEYHSGSTGLSTDSLVEAGYPDALILGDAVCGMAAIRITSKDFLFWFRSHTAKEIKWGGAKHDPDDKDDGRKMHPRSSFKAFLEVVKRRSLPWE

SEQ ID NO: 7496 - protein, 465 aa, Vitis vinifera
MEKLSQLRSAVAGLDQISENEKSGFINLVSRYLSGEAQHIEWSKIKTPTDEVVVPYDTLAPTPEDSVETKKLLDKLVVLKLNGGLGTTMGCTGPKSVIEVRNGLTFLDLIVIQIENLNNKYGCKVPLLLMNSFNTHDDTLKIVQKYEKSNIEIHTFNQSQYPRVVVDDFSPLPSKGNTGKDGWYPPGHGDVFPALMNSGKLEKLLSQGKEYVFVANSDNLGAVVDLKILNHLIKNKNEYCMEVTPKTLADVKGGTLISYEGKVQLLEIAQVPDEHVNEFKSIEKFKIFNTNNLWVNLNAIKRLVEADALKMEIIPNPKEVDGIKVLQLETAAGAAIRFFDNAIGINVPRSRFLPVKATSDLLLVQSDLYTLSDGFVVRNKARKNPENPVIELGPEFKKVGNFLSRFKSIPSIIELDSLKVAGDVWFGSGVILKGKVTIEAKAGVKLEIPNGAVVANKVINGPQDI

SEQ ID NO: 7497 - protein, 206 aa, Gonatogyne brasiliensis
DIPQASRFLFMKNKVRMICDCLAPPVKVIQDKGLAQPLSLSGSTLRSPHGCHAQYMANMGSIASLVMSVTINEDDDEMDSDQERGIKLWGLVVCHHTSPRFVPFPLRYACEFLIQVFGVQVSKEVQLAAQTREKHILQTQTVLCDMLLRDAPVAIITRSPNVMDLVKCDGAALYYRKKFWLLGVTPTEAQIKDIAEWLIEYHGGST

SEQ ID NO: 7498 - protein, 380 aa, Oryza sativa; identical to SEQ ID NO: 1250

SEQ ID NO: 7499 - protein, 368 aa, Daphniphyllum macropodum
ALKSYKLAAKAISRLQSLPSGNISLLCDVLVKEVSDLTGYDRIMVYKFHEDEHGEVIAECRRPNLEPYLGLHYPATDIPQASRFLFMKNKVRMICDCLALPVKVKQDKRLPQPLSLCGSTLRSPHGCHAQYMANMGSIASLVISVTINEEDEEMESDQLKGRKLWGLVVCHHTSPRFVPFPLRYACEFLIQVFGVQISKEVELGTQMREKHILQTQTVLCDMLLRDAPVGIVTQSPNVMDLVKCDGAALYYRKKFWLLGVTPTEAQIRDIAQWLFEYHSGSTGLSTDSLVEAGYPSALILGDAVCGMAAIKITSKDFLFWFRSHTAKEIKWGGAKHDPDDKDDGRRMHPRSSFKAFLEVVKRRSLPWE

SEQ ID NO: 7500 - protein, 391 aa, Euonymus alatus
DLEPVNPADVPITAAGALKSYKLAAKAISRLQSLPSSNMSLLCDVLAKEVSELTGYDRVMVYKFHDDDHGEVVSECCRPDLEPYLGLHYPATDIPQASRFLFMKNKVRMICDCLAPPVKVLQDKRLSQPLSLGGSTLRSPHGCHTQYMTNMGSIASLVMSVTINEDDDETNSDQKIGRKLWGLVVCHHTTPRFVPFPLRYACEFLIQVFGVQINKEVELAKQLKEKHILRTQTLLCDMLLRDAPVGILTQSPNVMDLVKCHGAVLYYRNKFWLLGVTPTETQIKDIAEWLLDYHSESTGLSTDSLVEAGFPDASILGEAVCGMAAVKITSKDFLFWFRSHTAKEMKWGGAKHDPGDKDDGKRMHPRSSFKAFLEVVKQRSLPWEDVEMDAI

SEQ ID NO: 7501 - protein, 370 aa, Gunnera monoica
  misc_feature (180)..(180): Xaa can be any naturally occurring amino acid
  misc_feature (366)..(366): Xaa can be any naturally occurring amino acid
ALKSYKLAPKPISRLQSLPSGNISLLCDVLAKEVSDLTGYDRVMVYKFHEDEHGEVVAECRRPDLEPYLGLHYPATDIPQASRFLFMKNKVRMICDCMALPVRVIQDNKLPQPLSLCGSALRSPHGCHMQYMANMGSIASLVMSVTINEDEEEEEEESNRQTRRKLWGLVVCHHTSPRFXPYPLRYACEFLIQVFGVQINKEVELAAQMREKHVLRTQTVLCDMLLRDAPIGIMTQSPNVMDLMKCDGAALYYKNKIWLLGVTPTELQLRDIAQWLLENHNSSTGLSTDSLLEAGYPNATILGDLVCGMAAVKITSKDFLFWFRSHTAKEIKWGGAKHDPGEKDDGRKMNPRSSFKAFLEVVKRRXVPWE

SEQ ID NO: 7502 - protein, 391 aa, Ixonanthes chinensis
DLEPVNPADVPVTAAGALKSYKLAAKAISRLQSLPSRNLSLLCDVLVKEVSDLTGYDRVMVYKFHEDGHGEVVAECCRPDLEPYLGLHYPATDIPQASRFLFMKNKVRMICDCRTSSVKVVQDQKLTQPISLCGSTLRAPHGCHAQYMANMGSIASLVMSVTINEEDDEIESDHQKARKLWGLVVCHHTCPRFLPFPLRYACEFLMQVFGVQVNKEVELAVQMREKHTLRTQTVLCDMLLRDAPVAIVTQSPNVMDLVRCDGAALYYRKKFWLLGVTPTEPQIRDIVEWLLEYHSGSTGLSTDSLMEAGYPGASILGDAVCGMAAIRITSKDFLFWFRSHTAKEIKWGGAKHDPGDKDDGRKMHPRSSFKAFLEVVKRRSLPWEDVEMDAI

SEQ ID NO: 7503 - protein, 278 aa, Arabidopsis thaliana
MERQKRGKKHGNKGPPPREEAAIEAPRSLILLSPIITESDSFYYSNFIFNVTNTSSDFHTPIFLYASLYTEAVADLNFRCLRFRFRFDRLKFFPMVDHYQVLGVTRNATKKEVKDAFRRLAIKYHPDKHAQSPEHVRHNATVRFKLVSEAYEVLNDDLKRASYNAGSDSDCFRRTSGSYSNPYGNRGGRAQGSGYGYGYGYSTRNRQASSFSSGFDSTFRYLTTRAFLLNLALAGGLYFAFTAIDTSGETLWKMRNSGKSFEEAMESIEKSKSHKDEG

SEQ ID NO: 7504 - protein, 229 aa, Zea mays
MAFRRPSCVVAGALLAVSFLAATAAAGDHGLTVFWGRNKDEGSLGEACDTGIYNTVIISFYSVFGHGRYWGDLSGHPLYGIGADIKHCRGKGIVVLLSIGGGGTQYSLPSSQSAADVADNLWNAHLGGGRPGVFRPFGDAVVDGIDFFIDQGAPDHYDELARRLSGYNRYYRGAPGVRLTATPRCVYPDWHVQRALDTGLFERIHVRFYRDDRCSYNHVHKDGLMAQWS

SEQ ID NO: 7505 - protein, 515 aa, Oryza sativa Japonica Group
MAAALIVPANPNPTPNPTSSLRPPSRAASSVLRFPRRDRARTHLTAAFGRGSPAAAAERGGKDYYATLNLRRDATLQEVKTAYRTLARKYHPDMNKDPGAEEKFKEISAAYEILSDEEKRSLYDRFGEAGLTGDYGGGDIGSNGIDPYELFNAFFGGPDKLFRDSMGAGRFHYGTKVTDNRGLDIRYDLLLSFEESIIGGKREVSIFRYETCGTCHGTGAKSSNDITECTQCRGQGRRATGDLYIFVHVNKKEGIHREGLDLFSDVTIDYTDAILGTTVKVETIEGFKDLYIPPGTQPGERLKFAQLGAPDIKNPTIRGDHNFVINVKIPKSIREEKIPLAIYQEFVQGRRWGYEICFNQRTICYSIMDSATRISSSCSVARRIPDDHSALIRDKQNSYNQVDSKAANPNDVKVCSAAQAACGLGKDNEIREKKSACYTDVENGLWGWACKSSATEKENCVLRCLSPECYDLIYGGDPLEEGELDYIRGHEYKYCMHKSSLGESLDGVKGSFSYS

SEQ ID NO: 7506 - protein, 284 aa, Jacobaea maritima
PKSQITPYRVVIIVRLVILGLFFHYRITNPVESSYGLWLTSVICEIWFAISWVLDQFPKWYPINRITFTDELSARFEKEGEPSQLAAVDFFVSTVDPLKEPPLITANTVLSILAVDYPADKVSCYVSDDGAAMLSFESLVETAEFARKWVPFCKKFSIEPRAPEFYFSQKIDYLKDKVQPSFVKERRAMKRDYEEYKVRVNALVAKAQKTPEEGWTMQDGTPWPGNNTRDHPGMIQVFLGNSGAHDIEGNELPRLVYVSREKRPGYQHHKKAGAENALVRVSAV

SEQ ID NO: 7507 - protein, 374 aa, Francisella tularensis subsp. tularensis SCHU S4
MQQKCYYEILNVSKTASGVEIKRAYRKLAMEYHPDRNPGDKEAEIKFKEISEAYEILSDDSKRSRYDQFGHAGVNQQSGFGGTGGFGGFEDIFDTFFGGGTSRGSNRSRASRGSDLEYTLEITLEEAFFGVEKEITIPRMESCDSCDGTGSKSRSKTTCHACHGQGTIRRQQGFFAFEQTCPVCNGTGYSITDPCDACYGNGKVKKQKTLKVKIPEGVDNGDRIRLQGEGDSGSNGAMNGDLYVQIIIKEHKIFERRDINLYCEMPISFTKACLGGDIKVPTLDGEVVLKVVPETQTGKVFRLREKGMKSLRGHRRGDLLCKVVVETPVNLSAEQKELLEKFADSLGEDYQSKHAPKSKTWFDNVKDYAKKFFE

SEQ ID NO: 7508 - protein, 237 aa, Zea mays
  misc_feature (218)..(218): Xaa can be any naturally occurring amino acid
  misc_feature (228)..(228): Xaa can be any naturally occurring amino acid
MAAAAVAADSKIDNLRDAVAKLGEISENEKAGFISLVSRYLSGEAEQIEWSKIQTPTDEVVVPYDTLAPPPEDLDAMKALLDKLVVLKLNGGLGTTMGCTGPKSVIEVRNGFTFLDLIVIQIESLNKKYGCSVPLLLMNSFNTHDDTQKIVEKYSNSNIEIHTFNQSQYPRIVTEDFLPLPSKGQTGKDGWYPPGHGDVFPSLNNRGKLDTLLSQGKXEYVFVANSDXLGAIVDIKI

SEQ ID NO: 7509 - protein, 284 aa, Echinacea angustifolia
PKSQITPYRVVIIIRLVILGLFFHYRITNPVESSYGLWLTSVICEIWFAISWVLDQFPKWYPINRVTFTDELSARFEKEGEPSQLAAVDFFVSTVDPLKEPPLITANTVLSILAVDYPVDKVSCYVSDDGAAMLPFESLVETAEFARRWVPFCKKFSIEPRAPEFYFSQKIDYLKDKVQPSFVKERRAMKRDYEEYKVRVNALVAKALKTPEEGWTMQDGTPWPGNNTRDHPGMIQVFLGSSGAVDIEGNELPRLVYVSREKRPGYQHHKKAGAENALVRVSAV

SEQ ID NO: 7510 - protein, 298 aa, Triticum aestivum
MALVRGRPASLLLLAALLCAATFLAVPAAATGKTGQVAVFWGRNKNEGSLREACDTGTYTIAIISFLDVFGRGNYHLDLSGHDVSAVGADIKHCQSKNILVFLSIGGFGNQYSLPTAQSAADVADYIWNAYMLGTRQGPSTRPFGDAFVDGIDFFIENGAPANYDELAKRLWNFNKDFRGRTPVQLTATPRCGYPDRHVEWALATGLVGRIFVRFYDDADCAANWQRQWDKWTAAYPSAQIYLGLPASEQKVGYVHPKNLYYSVIQVAQKAANYGGVMVWERYEDKRTNYSSYAIQWA

SEQ ID NO: 7511 - protein, 189 aa, Taxodium distichum
DEHGEVVAEIRRSDLEPYLGLHYGATDIPQASRFLFMQNRVRMICDCRPNPVRVIQAEELKQPLCLVGSTLRAPHGCHAQYMANMGSIASLVMAVIVNGNGNDEEGSSGRSAVKLWGLVVCHHTSPRAVPFPPLSACEFLMQTFGLQINMEMQLAAQLTENNIVRTQTLLCDMLLRDAPIGIVTQSPSI

SEQ ID NO: 7512 - protein, 284 aa, Echinacea angustifolia
PKSQITPYRVVIIIRLVILGLFFHYRITNPVESSYGLWLTSVICEIWFAISWVLDQFPKRYPINRVTLTDELSARFEKEGEPSQLAAVDFFVSTVDPLKEPPLITANTVLSILAVDYPVDKVSCYVSDDGAAMLSFESLVETAEFARRWVPFCKKFSIEPRAPEFYFSQKIDYLKDKVQPSFVKERRAMKRDYEEYKVRVYALVAKALKTPEEGWTMQDGTPWPGNNTRDHPGMIQVFLGSSGAVDIEGNELPRLVYVSREKRPGYQHHKKAGAENALVRVSAV

SEQ ID NO: 7513 - protein, 339 aa, Glycine max
MGVDYYKILQVDRSAKDEDLKKAYRRLAMKWHPDKNPNNKKEAEAKFKQISEAYDVLSDPQKRGIYDQYGEEGLNGVPPGAGGFPGGGDGGPTSFRFNPRSADDIFSEFFGFSRPFGGMGDMGGRAGGSGFSRGGPFGEDIFAQFRSAAGESCGHMQRKGAAIERQLPCSLEDLYKGTTKKMKISRDVSDASGRPSTVEEILTIEIKPGWKKGTKITFPEKGNEQRGVIPSDLVFIIDEKPHSLFKRDGNDLVVTQKISLVEALTGYTVQLTTLDGRNLTFPINSTISPTYEEVVKGEGMPIPKEPSKKGNLRIKFNIKFPSRLTSEQKSGIKRLLTSP

SEQ ID NO: 7514 - protein, 223 aa, Heywoodia lucens
DIPQASRFLFMKNKVRMICDCLAPPVKVIQDKKLAQPLSLCESTLRSPHGCHAQYMENMGSIASLVMSVTINEDDDEMDNDQQRGRNLWGLVVCHHTSSRFVPFPLRYACEFLIQVLGVQVNKEVELAAQMREKHILQTQTVLCDMLLRDAPWAIITQSPNVMDLVKCDGAALYYRKKFWLLGVTPTEAQIRDIADWLLEYHGGSTGLSTDSLMEAGYPDAAV

SEQ ID NO: 7515 - protein, 316 aa, Zea mays
  misc_feature (163)..(163): Xaa can be any naturally occurring amino acid
  misc_feature (249)..(249): Xaa can be any naturally occurring amino acid
MSFGRRSWQILALSMVLLSFITATAVSKRTGELTVFWGRNKEEGTLREACNTGLYNTVIISFYNVLGRGSYGVDLSGHPLDGVGTDIKRCQSKGIPVFLSIGSGGGGNGYSLPSSESAAAVADNLWNAYLGGGRSDVPRPFGDTVVDGIDFYIDNHQGAPDDXYDELARRLDGYNSQASVGKRVRLTATPRCALPQGRLETAMQTGLFERIHVRFYGDDECTHSNGAVDKHWDKWAARYPGSQLYVGLXAAESGVPEGAAPPVEVYLKYLYYSLLPKVQSAPNYGGIMVWDRFSDKKTSCSSAVKGWASCSYSGCV

SEQ ID NO: 7516 - protein, 431 aa, Triticum aestivum
  misc_feature (23)..(23): Xaa can be any naturally occurring amino acid
VSSGDGAGGGAGDAVPGGRAGQXAVPARQPAGRVWGVRRTARATSGFKVLALGPETTGVIQRMQQLLDMDTTPFTDKIIAEYIWVGGSGIDLRSKSRTISKPVEDPSELPKWNYDGSSTGQAPGEDSEVILYPQAIFKDPFRGGNNILVICDTYTPQGEPIPTNKRHMAAQIFSDPKVTSQVPWFGIEQEYTLMQRDVNWPLGWPVGGYPGPQGPYYCAVGSDKSFGRGISDAHYKACLYAGIEISGTNGEVMPGQWEYQVGPSVGIDAGDHIWASRYILERITEQAGVVLTLDPKPIQGDWNGAGCHTNYSTLSMREDGGFDVIKKAILNLSLRHDLHIAAYGEGNERRLTGLHETASISDFSWGVANRGCSIRVGRETEAKGKGYLEDRRPASNMDPYTVTALLAETTILWEPTLEAEALAAKKLALKV

SEQ ID NO: 7517 - protein, 339 aa, Bifidobacterium longum NCC2705
MAENEWLSKDFYKVLGVSKDASDDDIKKAYRKLARKYHPDVNKTKEAEEKFKDISEAYDVLSKKEDRQKYDAIRQFGMGGARFAGGSGGFDASGFSDIFGSMFGQGAGGNGSRIRFSTSGGGPNNINDIFSMFGGAAGQGGQPYGGYGQSPYGNAGGYGYEEAPRPENGEDRNSKISLTLRQAVKGATVSLSVDGKKFKAHVPAGVKDGQKIKLAGKGKLGINGGKAGDLYLHVTVKPDATFSMRGHDIVMDLPVTVGQAVAGGKVEAKDIDGNPVTFKVPAGSSSGAEVKLTGLGVQRSNQPGDLIGRVQIMVPAKPGLAVKHAAKEFDEKAGDYLSL

SEQ ID NO: 7518 - protein, 225 aa, Lachnostylis bilocularis
  misc_feature (3)..(3): Xaa can be any naturally occurring amino acid
LIXPQASRFLFMKNKVRMICDCLAPPVKVIQDKRLSQQLSLGGSTLRSPHGCHAQYMANMGSIASLVMSVTINEDDDEMDSDRERGIRLWGLVVCHHTSPRFVPYPLRYACEFLIQVFGVQVSKEVQLAAQMREKHILQTQTVLCDMLLRDAPVAIITQSPNVMDLVKCDGAALYYRKKFWLLGVTPTEAQIKDIAEWLLEYHGGSTGLSTDSLMEAGYPGAAVL

SEQ ID NO: 7519 - protein, 376 aa, Klainedoxa gabonensis
AAGALKSYKLAAKAISRLQSLPSRNMSLLCDVLVKEVSDLMGYDRVMVYKFHEDEHGEVVAECCRPDLEPYLGLHYPATDIPQASRFLFMKNKVRMICNCQAPSVKVIQDNKLPKPVSLCGSTLRAPHGCHAQYMANMGISASLVMSVTINEDDDNMDNDQAKARKLWGLVVCHHTSPRFVPFPLRYACEFLIQVFGVQINKEVELAAQTREKHILQTQTVLCDMLIRDAPEGIITQSPNVMDLVKCDGATLYYRKKFWLLGVTPTEAQIKDITEWLLEYHSGRTGLSTDSLMEAGYPGASVLGEAVCGMAAIRITSKDFLFWFRSHTAKEIKWGGAKHDPDDKDDGRKMQPRSSFKAFLEVVKWRSLPWEDMEMD

SEQ ID NO: 7520 - protein, 349 aa, Populus trichocarpa
MEHQHRRSKLLLLLCVALSYYAIIAIAGKSYYEVLQVPKGASDEQIKKAYRKLALKYHPDKNQGNEEANLRFAEINNAYEVLSDSEKRNIYDRYGEEGLKQHMASGGRGGGGGMNFQDIFSQFFGGGSMEEEEKIARGDDVIVELDATLEDLYMGGSLKVWREKNVIKPAPGKRRCNCRNEVYHKQIGPGMFQQMTEQVCEQCQNVKYEREGYFLTVDIEKGMQDGQEVVFYEDGEPIIDGEPGDLKFRIRTAPHDIFRREGNDLHTTVTITLVQALVSFEKNIEHLDEHLVDISSKGITKPKEVRRFKGEGMPLHFSTKNGDLYVTFEVLFPTSLTEDQKKRIKEVLG

SEQ ID NO: 7521 - protein, 515 aa, Cryptococcus neoformans var. grubii
MFQKVSDKFHRKQQSSTSPGKTQQVPNSPSSVLAKANSQAQQAYSSQDHSPMEGIQSDSTHIQQPMATQKAPIVGPSTSTSLSTVPVQDGTLPLTPGAQGMLAGTTDGHRQVQSPVSRSSSAGEDKMREKARDAQEQAAQAQANLHRVTQQARVAAINAAATQAALETATQLPATARVPTSGTGAEPGQARRKTAGRYALSDFLIERTLGTGSFGRVHLVRSRHNGRFYAVKVLNKEKVIKMKQVEHTNSEREMLVRVRHPFLVNLWGTFQDVNNLYMVMDFVAGGELFSLLRKSQRFPNSVAKFYAAEVALALDYLHSLDIIYRDLKPENLLLGADGHVKVTDFGFAKYVPDITWTLCGTPDYLAPEVVQSKGYNKSVDWYALGVLIFEMLAGYPPFFTEDGNPMKLYEKIIAGKVRYPTYFDVLAKELLKNLLIGDLTKRYGNLRAGSSDIFAHGWFAEVDWDKLYRREIPAPYVPKIDGEGDASQFDRYQEADVSAYGKVGNGPYDHFFVEF

SEQ ID NO: 7522 - protein, 168 aa, Zea mays
MDGGGSGNASGGSGGASTCCYYALLGIRKNASATDIRAAYRRLAMKWHPDRWASDPGAAGEANQRFQRIQEAYSVLSDKGKKAMYDAGLFDPLDDDDQDFSDFMQEMLVMMDSVKNEKPDTLEDLQKMLEDIVKGDGGGGGGAGGRAPTDGARRTRVAPYPQPQRARR

SEQ ID NO: 7523 - protein, 281 aa, Leea guineensis
RFLFMKNKVRMICDCLATPVKVIQDKRLTQPMSLCGSILRSPHGCHTQYMANMGSIASLVMSVTISEEGDETQNEQQKGRKLWGLLVCHNTSPRFVPFPLRYACEFLVQVFGVQINKEVELVTQQRQKHILRTQAVLCNMLLRDAPVGILNQSPNVMDLVKCDGAALYYRKKFWLLGITPTEAQIGDIAEWLNEYHGGSTGLSTDSLIEAGYPGASALGEAVCGMVAVKITSNDFLFWFRSHTAKEIKWGGAIQGPNDTDDLGKMHPRTSFKAFLEAVKLR

SEQ ID NO: 7524 - protein, 391 aa, Liquidambar styraciflua
DLEPVNPADVPVTAAGALKSYKLAAKAISRLQSLPSGNISLLCDVLVKEVSDLTGYDRVMVYKFHEDEHGEVLAECRRPDLEPCLGLHYPATDIPQASRFLFMKNKVRMICDCLAPPVKVNQDKRLTRPLSLCGSTLRSPHGCHAQYMANMGSIASLVMSVTINEDDDEMESDQQKGRKLWGLVVCHHTSPRFVPFPLRYACEFLIQVFGVQINKEVELATQLREKHMLRTQTVLCDMLLRDAPVGIVTQSPNVMDLVKCDGAALYYRKKFWLLGVTPAEAQIRDIAQWLLEDHNGSTGLSTDSLVEAGYPDALILGDAACGMAAIRITSKDFLFWFRSHTAKEIKWGGAKHDPDEKDDGRKMHPRSSFKAFLEVVKRRSLPWEDVEMDAI

SEQ ID NO: 7525 - protein, 215 aa, Sordaria macrospora
SFGKVMQVRKKDTNRIYALKTIRKAHIISRSEVAHTLAERSVLAQINNPFIVPLKFTFQSPEKLYFVLAFVNGGELFHHLQKEQRFDVNRSRFYTAELLCALECLHGFNVIYRDLKPENILLDYQGHIALCDFGLCKLDMKDEDRTNTFCGTPEYLAPELLMGNGYNKTVDWWTLGVLLYEMLTGLPPFYDENTNEMYRKILSEPLHFPGPEVVP

SEQ ID NO: 7526 - protein, 376 aa, Meliosma squamulata
  misc_feature (222)..(222): Xaa can be any naturally occurring amino acid
  misc_feature (306)..(306): Xaa can be any naturally occurring amino acid
TAAGALKSYKLAAKAISRLQSLPSGNITLLCEVLVREVRDLTGYDRVMVYKFHEDEHGEVIAECRRSDLEPYLGLHYPATDIPQASRFLFMKNKIRMICDCSSQPVKIIQDKRLAQPLSLGGSTLRAPHGCHAQYMANMGSIASLVMSVTINDDDDDDDDTSESDKKKGRKLWGFVVCHHTSPRFVPFPLRYACEFLSQVFGIQLNKEVELAAQLKEKHILXTQTMLCDMLLRDAPMGIITQSPNVMDLVKCNGATLYYNNKFWLLGITPTEEQIRDIIGWLFENHDQSTGLSTDSLVEAGYPGAXFLGDAVCGMAAIKITSKDFLFWFRSHTAKEIKWGGAKHDPIDKDDGRKMHPRSSFRAFLEVVKWRSIPWE

SEQ ID NO: 7527 - protein, 370 aa, Paeonia sp. Qiu 95-090
AGALKSYKLAAKSISRLQSLPSGNVPLLCDILVKEVSDLSGYDRVMVYKFHEDEHGEVVAECRRPDLGPYLGLHYPATDIPQASRFLFMKNKVRMICDCSAPSVKVTQDKSLPQPLSLAGSTLRSPHGCHAQYMANMGSIASLVISITINDGDDEMESGQQKGKRLWGLVVCHHTSPRFVPFPLRYACEFLIQVFSVQINKEVELAVQLREKHILRTQTVLCDMLLRDAPVGIITQSPNVMDLVKCDGAALYYRKKFWLLGVTPTEAQIKDIAEWLLEYHSESTGLSTDSLMEAGYPGASILGDVVCGMASIRIASKDFLFWFRSHTAKEIKWGGAKHDPDDKDDVRKMHPRSSFKAFLEVVKRRSLHWE

SEQ ID NO: 7528 - protein, 580 aa, Gibberella zeae PH-1
MSTQPDPYKILGVAKDAQLPEIRSAHRKLVLKCHPDKVQDPTLKAQKQDEFQRVQTAYELLADEKERKRYDDQTRLAELREQMRAKAAASASSRQTAAAASPSSSRPTPTSAYKYEIHTPERSYKSPRQPSPGPRGYASYSRSYEDDHRPADLFEGVRTVRREKSYQDKTSSRREEREREEREREREYARELREREKEKELERQRRKKADDAIRRAEKEAKEATKEARRAEKKTRDKSRKRETESKKSKPYIETFDGESASKSDKKKSSKKHDERRERDRSTHREEVVPPATSSMPPPPIPPQYQSVEYQSKADAAMNYIQASRSKVPAAFARHVQPPAPTPPPVGSPFAAPAEDDDARRSSAKPRRNSAGDKTYSKPEVVDDPLEATPPTARPHMHKSATATGVLGSSPPRRDLPRTSTMPVEGGHSSRYAPGIARAQTFSGAYPELDPRGRGRTRHQAQIPESDSEDEYERQRRERKAHRSSKKHGPEARGEHVMQYRVDGGRTTLQNSYSRSAEPSDAYGYYAEHTARAGERPSMPARDTTYSSGYGGGVQYSKVKTSNYDNVQFSPYTSYREAYAA

SEQ ID NO: 7529 - protein, 467 aa, Physcomitrella patens subsp. patens; identical to SEQ ID NO: 3718

SEQ ID NO: 7530 - protein, 297 aa, Triticum aestivum
MASRALTPFQLTATLFVALLATCHAGSIAVYWGQNDGEASLAETCASGNYEFVILAFLPKFGKGQTPELNLASHCDPSSGGCRAQSKDIKACQRRGVKVLLSIGGGDGSYGLSSPGDARQVAMYLWNNYLDGASSSGPLGNVALDGIDFDIELGSAKFWNNLARDLKDLGKNGGKTVLLSAAPQCPFPDEWDGGAISTGLFDFVWVQFYNNEECQFSAGRKAFMDAWKKWESVPAGKIFLGLPASKDAAGTGFIPASELTSRVLPLIKGSPKYGGVMLWSKFYDDRTGYSSAIKSDV

SEQ ID NO: 7531 - protein, 172 aa, Populus trichocarpa
MDHDETGCQAPPEGPILCTNNCGFFGSAATMNMCSKCHKGMLLKQEQANLAASSIGSIVNGSSSSNVFEPVIADIIDVQNNAVEPKTITVQPSCASGSGERVEAKPKEGPNRCTSCKKRVGLTGFKCRCGSLFCASHRYSDKHDCPFDYRSAAREAIAKANPVVKAEKLDKI

SEQ ID NO: 7532 - protein, 278 aa, Lactuca sativa
  misc_feature (9)..(10): Xaa can be any naturally occurring amino acid
PKSQITPYXXVIIIRLVILGLFFHYRITNPVESSYGLWLTSVICEIWFAISWVLDQFPKWYPINRVTFTDELSARFEKEGEPSQLAAVDFFVSTVDPLKEPPLITANTVLSILAVDYPVDKVSCYVSDDGAAMLSFESLVETAEFARRWVPFCKKFSIEPRAPEFYFSQKIDYLKDKVQPSFVKERRAMKRDYEEYKVRVNALVAKALKTPEEGWTMQDGTPWPGNNTRDHPGMIQVFLGSSGAVDIEGNELPRLVYVSREKRPGYQHHKKAGAENAL

SEQ ID NO: 7533 - protein, 502 aa, Aspergillus fumigatus
MPTLGGLLKKRRTKDSHTLSKELESSSSPAAAQTQTSPNSADHDHHYQHYDQTHHHQHSASSNPSNNSATPSAAQPHRSSNDNPNRSSGTDQKSEGQTASMQFAVTQPHPSTHHNPRLHHLQQQQQQQQQQQQQQQQQQPQQQSHTSRLHNILHPSHHASSQASTEGHAHSQQANQTEARTTKGKYSLDDFTIQRTLGTGSFGRVHLVQSKHNHRFYAIKVLKKAQVVKMKQVEHTNDERRMLNRVRHPFLITLWGTWQDARNLYMVMDFVEGGELFSLLRKSQRFPNPVAKFYAAEVTLALEYLHSQQIIYRDLKPENLLLDRHGHLKITDFGFAKEVPDITWTLCGTPDYLAPEVVSSKGYNKSVDWWSLGILIFEMLCGFTPFWDSGSPVKIYENILRGRVKYPPYLHPDAVDLLSQLITADLTKRLGNLHGGSEDVKNHPWFAEVTWDRLARKDIDAPYVPPIRGGQGDASQYDRYPEETEQYGQQGEDVHGHLFPDF

SEQ ID NO: 7534 - protein, 284 aa, Lactuca sativa
PKSQITPYRVVIIIRLVILGLFFHYRITNPVESSYGLWLTSVICEIWFAISWVLDQFPKWYPINRVTFTDELSARFEKEGEPSQLAAVDFFVSTVDPLKEPLLITANTVLSILAVDYPVDKVSCYVSDDGAAMLSFESLVETAEFARRWVPFCKRFSIEPRAPEFYFSQKIDYLKDKVQPSFVKERRAMKRDYEEYKVRVNALVAKALKTPEEGWTMQDGTPWPGNNTRDHPGMIQVFLGSSGAVDIEGNELPRLVYVSREKRPGYQHHKKAGAENALVRVSAV

SEQ ID NO: 7535 - protein, 1442 aa, Mougeotia scalaris
MDRTIDISDEKWQSRFAAQSSQAAESQYSSDALLNEEYENASIHGSFVSYKELMKSSAEAPKPWEVDQIAYLEKMRRSGLTQRFGTMLVVEPPLRHAQKLHLLAHSENAVDLPGIEPRELEIGGDILPFFTSESGKALFSEAASKGDSVKTAIVTGRDGETKFYAICHRNACGVIIDLEPVVPKGIHTSYEPNLDTSSPPLSMEAALDIVQPAIQRLKAIPAGSVQEICDTVTREVRELLQYDRVIVYKFHPDQHGEVFAESAKEGLDPYVGLHYPSTDLPQAIRVLLLRVGIRMICDATQSMVKIVQPDDVEPVDLSDSTLRAPHGCHAQYMINMGSLSSITFAIVVESDKTVRAGEEPEKERTLWGIIVGHHSIPRFTPYPLRKAVQSLAETFGSLLTREIALAASWHEEKTLNMQKKLCDMLEADIPLGIVIDSPNIQDLVKCDGAALFFSGRFWLLGSTPTERQVADLAEWILKHLSKKGAVCTDSLAEAGYPNADELGSKTCGMVAVKVGKRDFVFWFREHTAKVVRWAGQRQKKEEIDDESKMMPRNSFKAFMEIVRERCLPWEDIELEAINGLRLMLQDALDVSRGADIPVVVGGTTIEGDPFDGAGYHESTSEKPVSAITSEVEAALSAVEACFLITDATQESRPIIYCSHVFSTLTGYSAGELEGGTLEKLEGLETDVAAASKLHLALSGRTQYSGRLLHYKKDGTPFWNLITCGPIKNGQNEVVNFVIVFQELAKYHEISSVPPNLVDGDLSAPEKGFPVSLIRYDGRLKEKSSRIVDEIIRLVKNPATIADSLALLGQMSAMASPAVSQVESVPVVEHRERHSSMHIAKPAATKTSRRRSLVEVLLGKGREIEAPVKEAFDSDVKSDDGKKRRAAKGIDLGTTLERLDYGFLVIDTRLDECPIIFMSDRYILQTQHTREENIGGDILFLDGEESSPAEVDKIRKAVQNNDELSLQLVAYRKNGDKFWALYHLSVAKDKDGNALYIINVVKDLGEAQISDAAFRKEDAEARKEAAEITRALHDLPDTAAYELWTVHSKFVASKPHRAWDSAWTAIKEVREKEGRLCLKHFKPIKPLGNGDSGSVVLVELRGTGHVFAAKIMEKERMIERNKVHRIASEREILNQLDHPFLPSLYASFQTTKHVCFITNFCPGGELYDFLEIQPYHRFEEHVAQFYAAEILTSLEYLHCQGVVYRDLNPENILLAEDGHIVLTDFDLSILSSTFPKLIREANGTSKRKSSRRPSKERAPTFVAEPTMRSNSFVGTEEYISPEIVTGEGHGPSIDWWSFGILIYEMLYGETPFCGSSMNKTFHNILNKEVAFPSPVPVSDMAKDLITSLLIKDSEKRLGSKLGAAEIKVHPFFHGINWPLIRNKKVVPPKVPNKLNSVVGGHEEQDISSNHWRLQDTNNDSNRSFPIMSFDGSIIDATEDRSTW

SEQ ID NO: 7536 - protein, 284 aa, Lactuca sativa
PKSQITPYRVVIIIRLVILGLFFHYRITNPVESSYGLWLTSVICEIWFAISWVLDQFPKWYPINRVTFTDELSARFEKEGEPSQLAAVDFFVSTVDPLKEPPLVTANTVLSILAVDYPVDKVSCYVSDDGAAMLSFESLVETAEFARRWVPFCKKFSIEPRAPEFYFSQKIDYLEDKVQPSFVKERRAMKRDYEEYKVRVNALVAKALKTPEEGWTMQDGTPWPGNNTRDHPGMIQVFLGSSGAVDIEGNELPRLVYVSREKRPGYQHHKKAGAENALVRVSAV

SEQ ID NO: 7537 - protein, 373 aa, Desulfotalea psychrophila LSv54
MTIDYYETLSVERDADQGTIKKAYRKLAMKYHPDRNQGDKEAETLFKECTEAYEVLRDESKRRIYDTYGHEGLKNNGQRDTGGAGDIFSHFGDLFGFGGGGGRSQARRNGPIEGNDLRYDVSISFMESIQGVSKEVKLSRRETCWTCEGTGSRPGYQPQTCPTCNGRGQVLRSQGFFQVSTTCPECEGEGQVIKEPCNDCHGEGLVKKTKTVAIKIPAGVDTGARMRLRGEGEGGRRGGPSGDLFVIVHVSSHEFFERDGDTIYCRLPVSMTTAALGDTVDVPTVHGKKNLKIPAGSQSGERFTLRGEGVPSLRGRGNGDMVVELHVETPTGLCEEQKKMLRDFHSFCEEHGQHEKTKGFFAKLFDEVLGKNK

SEQ ID NO: 7538 - protein, 284 aa, Lactuca sativa
PKSQITPYRVVIIIRLVILGLFFHYRITNPVGSSYGLWLTSVICEIWFAISWVLDQFPKWYPINRVTFTDELSARFEKEGEPSQLAAVDFFVSTVDPLKEPPLITANTVLSILAVDYPVDKVSCYVSDDGAAMLSFESLVETAEFARRWVPFCKKFSIEPRAPEFYFSQKIDYLKDKVQPSFAKERRAMKRDYEEYKVRVNALVAKALKTPEEGWTMQDGTPWPGNNTRDHPGMIQVFLGSSGAVDIEGNELPRLVYVSREKRPGYQHHKKAGAENALVRVSAV

SEQ ID NO: 7539 - protein, 223 aa, Leptopus colchicus
LYLKSRFLFMKNKVRMICDCLAPAVEVIQDKRLGQPLSLCGSTLRSPHGCHAQYMENMGSIASLVMSVTINEDEDEIDNDQQSGRKLWGLVVCHHTSPRFVPFPLRYACEFLIQVFGVQVNKEVELAAQMKEKHILNIQTVLCDMLLRDAPVGIITQSPNVMDLVKCDGAALYYRKKIWLIGVTPTKAQIRDIADWLLEYHGGSTGLSTDSLMEAGYPDAAVL

SEQ ID NO: 7540 - protein, 284 aa, Euryops virgineus
PKSQITPYRVVIIIRLVILGLFFHYRITNPVESSYGLWLTSVICEIWFAISWVLDQFPKWYPINRVTFTDELSARFEKEGEPSQLAAVDFFVSTVDPLKEPPLITANTVLSILAVDYPVDKVSCYVSDDGAAMLSFESLVETAEFARRWVPFCKKFSIEPRAPEFYFSQKIDYLKDKVQPSLVKERRAMKRDYEEYKVRVNALVAKALKTPEEGWTMQDGTPWPGNNTRDHPGMIQVFLGSSGAVDIEGNELPRLVYVSREKRPGYQHHKKAGAENALVRVSAV

SEQ ID NO: 7541 - protein, 208 aa, Margaritaria cyanosperma
DIPQASRFLFMKNKVRMICDCQAPPVKVIQDKRLAQPLSLCGSTLRSPHGCHAQYMANMGTIASLVMSVTINEDDDEMDNDQQIGRKLWGLVVCHHTRPRFVPFPLRYACEFLMQVFGVQVNREVELAAQLREKHILQTQTVLCDMLLRDAPVAIVTQSPNVLDLVKCDGAALYYRKKFWLLGVTPTEAQIKDITEWLLEYHGQSTGL

SEQ ID NO: 7542 - protein, 377 aa, Desulfitobacterium hafniense Y51
MKRDYYEVLGVSKSADEQEIKKAYRKLARQYHPDVNPGDKDAEEKFKEATEAYDVLSDTEKRARYDQMGHSAFDPNQQGFGGFGGDFGGFGDIFDMFFGGGGGGGQRRQGPTRGNDLRYDLTITFEEAAFGTEKEIQVPRQETCTECHGSGSAPGTHPTTCSQCHGTGQVKATQRTPFGAIQTARTCPACNGSGQFISSPCKECSGKGTTRKVKTIKVTVPPGSEDGLNLRFSGNGEAGLRGGPSGDLYVVLNVKAHKFFEREGNDVYCEIPITFVQAALGSELDVPTLDGKVKMKIPEGTQTATVFRLRGHGIPYRRGNGRGDQHVRVVVATPTKLTDRQKELLREFGEVTSDQQQMGKKSFFEKVKENIRDAIDL

SEQ ID NO: 7543 - protein, 359 aa, Coxiella burnetii RSA 493
MFAQVTYIWMDGAQPTQKLRSKVRIVKHPERDITLADFPEWGFDGSSTYQATGKDSDLILQPVHFVKDPILGDGNYLVLCEVMNPDGSPHASNTRARLRQIMANGAAEHEPWIGFEQEYTLFQGVQPLGWPDRGYPAPQGPFYCGIGADEVFGRPLVEEHATACIEAELMIFGTNAEVMPGQWEFQIGYRGADDETPDPLTVSDHLWLARWLLYRIGEDYGITATLQPKPVKGDWNGAGKHTNFSTKLMRDPATGREAIEQAIERLSKRHDAHIAVYGHGLEERLTGKHETAPITQFSSGVGNRGASVRIPSAVASRGCGYLEDRRPGANADPYQVAAILLETICGIQLPKNSGIETTV

SEQ ID NO: 7544 - protein, 224 aa, Petalodiscus fadenii
DIPQASRFLFMKNKVRMICDCQAPPVKVIQEKRLAQPLSLSGSTLRSPHGCHAQYMANMGSIASLVMSVTINEDDDEMDNDQQRGRKLWGLVVCHHTSPRFVPFPLRYACEFLIQVFGVQVNKEVELAVQRREKHILQTQTVLCDMLLRDAPVAIITQSPNVMDLVKCDGAALYYRSKFWLLGVTPTEAQIRDIAEWLLEYHGESTGLSTDSLMEAGYPGAANL

SEQ ID NO: 7545 - protein, 143 aa, Triticum aestivum
  misc_feature (42)..(42): Xaa can be any naturally occurring amino acid
  misc_feature (54)..(54): Xaa can be any naturally occurring amino acid
  misc_feature (74)..(74): Xaa can be any naturally occurring amino acid
  misc_feature (85)..(85): Xaa can be any naturally occurring amino acid
  misc_feature (90)..(90): Xaa can be any naturally occurring amino acid
  misc_feature (105)..(105): Xaa can be any naturally occurring amino acid
MATAAVSVDEKLDKLRAEVAKLDQISENEKSGFISSVSRYLXSGEAEQFEWSKXQDPTDEVVGAYDTVASPPRXLQGDERTAGIXPLCSXLNGGSGTTWGCTGAXLSLEAWILDLWDQIPEQMVNVLDDLNTCDNRRCEINST

SEQ ID NO: 7546 - protein, 368 aa, Ranunculus sp. Qiu 95024
MKSYKLAAKAISKLQAMPSGNIPLSCDMLVQEVRDLTGYDRVMVYKFHEDDHGEVIAEWRVSSLEPYLGLHYPATDIPQASRFLFMKNKIRMICDCSAIPVKVVQDKKLGQPLSLGGSALRAPHGCHAQYMSNMGSVASLVMSVTINEDDEQMETGQQKGRKLWGLVVCHHTSPRFVPFPLRYACEFLIQVFGMQINKEVELANQTREKHILHTQTVLCDMLLRDAPIAIVTQSPNVMDLVMCNGAALYYRDRLCLLGVTPTDDQIRDIAQWLLEYHNESTGLSTDSLMEAGYPSASLLGNAVCGMAAIKITSKDFLFWFRSHTAKEIKWGGAKHNPAEKDDRWKMHPRSSFKAFLEVVKHRSLPWED

SEQ ID NO: 7547 - protein, 371 aa, Reinwardtia indica
GALTSYKIAAKAISRLQSVPSGSINLLSDVLVNELRDLTSYDRVMVYRFHEDEHGEVVAESIAPGLEPYLGLHYPATDIPQASRFLFMKNKVRMICDCLAPSVKVTQDRNLAEPINLSGSTLRAPHGCHAQYMANMGSIASLVMSVTINDNEDGNEMESDQMMGRKLWGLVVCHHTTARFVPFPLRYACEFLIQVFGVQISKEVELEAQRKEKHIIQTQTVLCDMLLRDAPVAIMTQSPNVMDLVKCDGAALLYRKKCWLLGVTPTEEQITDITEWLLEYHNDSTGLTTDSIMEAGYPGASVLASTICGMAAIRITSKDFMFWFRSHTAKEIKWGGAKHDPDDKDGVRKMHPRSSFKAFLEVVKWRGLPWE

SEQ ID NO: 7548 - protein, 283 aa, Triticum aestivum
  misc_feature (61)..(61): Xaa can be any naturally occurring amino acid
  misc_feature (116)..(116): Xaa can be any naturally occurring amino acid
  misc_feature (132)..(132): Xaa can be any naturally occurring amino acid
  misc_feature (147)..(147): Xaa can be any naturally occurring amino acid
  misc_feature (194)..(194): Xaa can be any naturally occurring amino acid
  misc_feature (242)..(242): Xaa can be any naturally occurring amino acid
  misc_feature (248)..(248): Xaa can be any naturally occurring amino acid
  misc_feature (268)..(268): Xaa can be any naturally occurring amino acid
MAAAAVAADSKIDNLRDAVAKLGEISENEKSGFISLVSRYLSGEAEQIEWSKIQTPTDEVXVVPYDTLAPPPEDLDAMKALLDKLVVLKLNGGLGTTMGCTGPKSVIEVRNGFTFXLDLIGIQIESPGQQVXGCRVPLLLMNSFQPXEGHTRRMLKRYSQLPTFEIHTFNQSQYPRIVTEDFLPLPSKGQTGKXDGWYPPGHGDVFPSLNNSGKLDILLAQGKEYVFVANSDNLGAIATSRXLNHLIXNQNEYAWRYSKTLADVKGVXHLYEGKSALEMPLIH

SEQ ID NO: 7549 - protein, 363 aa, Sabia swinhoei
TAAGALKSYKLAAKAISRLQSLPSGNISLLCDVLVREVSDLTGYDRVMVYKFHEDEHGEVIAECRRSDLEPYLGLHYPATDIPQASRFLFMKNKVRMICDCSARPVKVVQDKRLARPLSLCGSTLRAPHGCHAQYMANMGSIASLVMSVTINEDDDDEMESDQKKGRKLWGFVVCHHTSPRFVPFPLRYACEFLIQVFGIQVNKESELAAQLREKHILQTQTMLCDMLLRDAPVGIVSQSPNVMDLVKCSGAALYYKNKFWLLGVTPTEEQIRDIIGWFVENHDQSTGLSTDSLMEAGYPGASVLGDAVCGMAAIKITSKDFLFWFRSHTAKEIKWGGAKHDPVDKDDGRKMHPRSSFKAFLE

SEQ ID NO: 7550 - protein, 1486 aa, Mougeotia scalaris
MSSRPGHVRNDIRPIRGPSRLSAQANLAAERQDAADAFIQSNYEKAAAGKGEFNYKGLLTTMDGRKPWEVDQMAYLAKMRRSGLGQPYGAMIVVEPPLRHAPKLHLLAYSENVAELLGVDPKEVGLGKNAIGFFSDSSGMVLYREASSRNSFQQPLVLHLRNKPVDFYAILHRGPEGILIDLEPVFPEDKSLSVATLRGISGDRDPTAAITMTEAKESVSGAIRRLQNLPSGSVLSMCQAVVEEVRDLLQYDRVMVYKFHPDQHGEVFAESVRDDMEPFLGLHYPSTDLPQAIRMLLMRVGSRMICDASRPMVKIVQPEVEEKSVDLSESTLRAPHGCHVQYMCNMGSMASITTAIMADERKDDLDPHESSKNKRLWGLIVGHHCGARYTPYPMRKAIEHLAQQFGLLLDREISLAANFHEENILNMQKKLCDMLESNIPLGIVKNSPSIMDLVKCDGAALLFADRFWLLGATPTERQVFDIAEWILKAHGKRSALCTDSLAEAGFPGAADLGEKTCGLVAIKIGPQDFVFWFRSHTAKEVRWGGRRQVQGEIDDDNKLMPRNSFQAFLDVVKKRCLPWEDIELEAINGLRLLLNETLENSRSDAVSNLEGGTDVDGNAMTTRVLLTAQRSIPKPVSALTEEVEVVLACFKTSFLVTDATKEDYPVIFCSEAFSLLSGYKAEDLLGGSCRKLEGYETDELEVSRFLEALEAGSQYSGRQLHYKSDGSPFWDLVTSAAVQDEFDNVVNHVIVYQEVAKYAEGQLPQGKPSIAMASPSTEKGFPVSLIRYDGRLKEKSTRKVNEIVQAMKNPSRAKVDGPLTPGRQGGIAEELKIPMPASPDFSRPQVRHGSIDHSKPSVKPARRRSVVDILMGKPKEEAEAARRGAVSTEEPKVSMDGSDSGKKRRAAKGIDFGTTLERIEYSFLVTDPRLDENPIIFMSDEYIRLTAYTREEHIGGELIYLDGDNTSTSDVRKIRSAAQNNKELSMQFLAYKKNGDTFWALYHFSMVKDSDGTVLYIVNVVKDLGKSMVDDAAFKKAVAKAEKEASSVAEALRDLPDAASEERQWTIHSRAVLPKPHKVEDPAWAAIKKVRAEEGRLGLKHFKPIKPLGNGDSGSVMLVELRGTGQLFAVKVMEKESMIERNKVHRVASEREILDNLDHPFLPTLYASFQTAKHVCFVTDFCPGGELYDFLEVQPGHRFEEKVAQFYAAEILLALEYLHCKGVVYRDLKPENILLTNGGHVVLTDFDLSVLSSTFPKVLRDTKGKRGRSRRPSKEPHPTFVAEPVTRSNSFVGTEEYIAPEIVTGAGHNSSIDWWSFGILLYEMLFGHTPFCGSSMRKTFSNILNREVFFPPEVNVSAEAKDLITLLLVKDADQRLGSKSGAAEIKVHKFFANIDWPLIRFKATAVPKVPVRLDNTVAPSTNAEGGASLENWRLQEVPSGVESARSSGSYLRDSIGSPYVMGASDSPMLKNPDEEYGKWYSSSSQV

SEQ ID NO: 7551 - protein, 442 aa, Oryza sativa Japonica Group; identical to SEQ ID NO: 7013

SEQ ID NO: 7552 - protein, 368 aa, Sapria himalayana
ALTSFRLAAKAISRLQAISSGSISKLCNVLVKEVSHLTCYDRVMVYKFHEDEHGEVIAECIRPDLEPYLGLHYPATDIPQAARFLFMKNKVRMICNCMASPVKVLQAEGLDKPLSLCGSTLRSPHRCHEQYVANMNSIASLVLSVTINEEDGEMESTQSRPARLWGLVVCHHTSPKFVSFSLRYACEFLIQVFGIQINKEVELEAQRKEKHILQTQTLLCDMLVRDSPVGIITKSPNVMDLVKCDGAALFYRNKIWLLGLAPSEMQIRDIAEWLLECHGKSTGLSTDSLMESGYPGASLVGSSVCGMAAIRVTSKDFIFWFRSHIAKEFRWGGAKHGRHDKDDGRKMHPRSSFKAFLEVVKWRSLPWE

SEQ ID NO: 7553 - protein, 1442 aa, Mougeotia scalaris
MDRTIDISDEKWQSRFAAQSSQAAESQYSSDALLNEKYEMASTHGSFVSYKELMKSSAEAPKPWEVDQIAYLEKMRRSGLTQRFGTMLVVEPPLRHAQKLHLLAHSENAVDLLGIEPRELEIGGDILPFFTSESGKALFSEAASKGDSVKTAIVTGRDGETKFYAICHRNACGVIIDLEPVVPKGIHTSYEPNLDTSSPPLSMEAALDIVQPAIQRLKAIPAGSVQEICDTVTREVRELLQYDRVIVYKFHPDQHGEVFAESAKEGLDPYVGLHYPSTDLPQAIRVLLLRVGIRMICDATQSMVKIIQPDDVEPVDLSDSTLRAPHGCHAQYMINMGSLSSITFAIVVESDKTVRAGEEPEKERTLWGIIVGHHSIPRFTPYPLRKAVQSLAETFGSLLTREIALAASWHEEKTLNMQKKLCDMLEADIPLGIVIDSPNIQDLVKCDGAALFFSGRFWLLGSTPTERQVADLAEWILKHHSKKGAVCTDSLAEAGYPNADELGSKTCGMVAVKVGKRDFVFWFREHTAKVVRWAGQRQKKEEIDDESKMMPRNSFKAFMEIVRKRCLPWEDIELEAINGLRLMLQDALDVSRGADIPVVVGGTTIEGDPFDGAGYHESTSEKPVSAITSEVEAALSAVEACFLITDATQESRPIIYCSHVFSTLTGYSAGELEGGTLEKLEGLETDVAAASKLHLALSGRTQYSGRLLHYKKDGTPFWNLITCGPIKNGQNEVVNFVIVFQELAKYHEISSVPPNLVDGDLSAPEKGFPVSLIRYDGRLKEKSSRIVDEIIRLVKNPATIADSLALLGQMSAMASPSVSQVESVPVVEHRERHSSMHIAKPAATKTSRRRSLVEVLLGKGKEIEAPVKEAFDSDVKSDDGKKRRAAKGIDLGTTLERLDYGFLVIDTRLDECPIIFMSDRYILQTQHTREENIGGDILFLDGEESSPAEVDKIRKAVQNNDELSLQLVAYRKNGDKFWALYHLSVAKDKDGNALYIINVVKDLGEAQISDAAFRKEDAEARKEAAEITRALHDLPDTAAYELWTVHSKFVASKPHRAWDSAWTAIKEVREKEGRLCLKHFKPIKPLGNGDSGSVVLVELRGTGHVFAAKIMEKERMIERNKVHRIASEREILNQLDHPFLPSLYASFQTTKHVCFITNFCPGGELYDFLEIQPYHRFEEHVAQFYAAEILISLEYLHCQGVVYRDLKPENILLAEDGHIVLTDFDLSILSSTFPKLIREANGTSKRKSSRRPSKERAPTFVAEPTMRSNSFVGTEEYISPEIVTGEGHGPSIDWWSFGILIYEMLYGETPFCGSSMNKTFHNILNKEVAFPSPVPVSDMAKDLITSLLIKDSEKRLGSKLGAAEIKVHPFFHGINWPLIRNKKVVPPKVPNKLNSVVGGHEEQDISSNHWRLQDTNNDSNRSFPNMSFDGSIIDATEDRSTW

SEQ ID NO: 7554 - protein, 369 aa, Methanosarcina barkeri str. Fusaro
MARKISNKKTQRDLLAREKLFELAEKIYNQFENEVVPSISLPSRTKSNLEYSNESDVWVYGGRESERSAKTVKGAFQLLKTTYATEFLINEHLAQSRGSTLRELYYISEGWEAAKFKEQAESDRLIEDLELLTNLQREYFHMRPEEDGATMFGPIEITEQTNRGERNIHCQKDVGEGGYQIPFNVENIEFKAHDASMIIAIETGGMYARLMENGFDEAYNAILVHLKGQPARSTRRIIKRMNEELGIPVAVFTDGDPWSYRIYASVAYGAIKSAHLSEFMATPAAKFLGLQPSDIVEYELSTDKLTEQDINALRSELSDPRFESDYWKEQIQLQLDIGKKAEQQAFAGKGLNFVTEVYLPNRLKEMGML

SEQ ID NO: 7555 - protein, 839 aa, Mougeotia scalaris
MAALVNLPISRYPQPLLGEGVDVIHKSEKVLGEASQGLKDALTAFQQTFVMCDATKPNTPVMFASEGFYRMTGYSAKEVIGKNCRFLQGPETDRSEVEKLKQALLDGQSWCGRLLNYRKDGSSFWNLLTVSPVKDDSGRVVKFIGMQVEVSKFTEGKNDDIKRPNQLPVSLIRYDDRQKDEAEVRVEELLQDMKESESPAEVEAKVQTVQVSVPAQPSKLSKEAPAETKKTRRSSYFGKNAAPKAEEVPPVFEPGVEVSLLMEDELDTMAVEKKHRHGIDLATTLERIQKNFVITDPRLPDNPIIFASDDFLELTEYTREEIIGRNCRFLQGKDTDKETVAKIRHAIDNHQDITVQLLNYTKSGKPFWNLFHLQAVRDTKGRLQYFIGVQLDASTYVEQASKNIPDNLKKMGTEEIHNTANNVDFGLKELPDTNTGNKDDIWTLHSKQVTALPHKSNTENWDAIRKVIASEGQISLKNFRPIKPLGYGDTGSVHLVELRDSGVFFAMKAMDKEVMVNRNKVHRACTEREILELLDHPFLPTLYGSFQTPTHVCLITDFCPGGELFAHLENQKQKRLKENVAKVYAAQILMALEYLHLKGVIYRDLKPENILICEGGHLLLTDFDLSFRTETEVKVAMVPIPEEEGAPVVEKKKKKKGKAPAAAAMAPRFIPQLVAEPSGTSNSFVGTEEYIAPEIISGVGHGSQVDWWAFGIFIYEMLYGKTPFRGKNRKRTFTNVLTKELAYPTVPEVSLDVKLLIKDLLNRDPSQRLGATRGASEIKEHPWFNAIQWPLICKDVPESDVPVKFMQVENERRDSTADDDADWESNDGRNSLSLDLGRQ

SEQ ID NO: 7556 - protein, 148 aa, Brassica napus
  misc_feature (84)..(84): Xaa can be any naturally occurring amino acid
  misc_feature (135)..(135): Xaa can be any naturally occurring amino acid
MASNGNEKGNDDLYAVMGLKKECTTTELRSAYKKLALRWHPDRCSSMGDSEFVDESKKKFQAIQEAYSVLSDSNKRFLYDVGAXYNSDDDDHDQNGMGDFLNEMATMMNQSKPSENNSGDSFEQLQDLFNEMFQXGDATAFSSSSSSC

SEQ ID NO: 7557 - protein, 187 aa, Arabidopsis thaliana
MEREDLYAVLDLNNECTQGDLRLSYKNLVLKWHPDRFLEEIEKDEAKMKFQSIQRAYSVLSDSNKRLLYDVGAYDSDDDETGMADFINEMVTLMAQTQSTGDESLEEFEELFQELLKDDVNQFKTRSSSSSCSQFSGTSTLVHCDDLSNSNDIPNKINGHDNYCCISSSKVGGPSTRFQAGNRRSKK

SEQ ID NO: 7558 - protein, 803 aa, Mougeotia scalaris
MNSPLSPSRAIQTSEGKILEQKSELKDVLTSFHQTFVISDATKPDIPIVFASEGFYEMTGYGPEEVIGYNCRFLQGEGTSRDEVTRLKQCLVEGQPFCGRLLNYRKDGTPFWNLLTVSPVRSATGKVVKFIGMQTEVSKFTEGAADGIKRPNDLPVSLIRYDARQKDEAEVSVTEIVHAVAHPEKAIARLSTAVTESSKKHQQQSVSPEFGAEGLKTPLITINEKEAVDEVEVEEEGRDSFEITGEKKIRRGLDLATTLERIQKNFVITDPRLPENPIIFASDDFLELTEYSREEVIGRNCRFLQGPDTDQDTVQKIRDAIRDCRDVTVQLLNYTKSGKPFWNMFHLQAVKNSKGELQYFIGVQLDASTYIEPKLQPLSESAEKEGTKQVKTTADNVDSSLRELPDPNVSKEDIWGIHSSVAEPKPHQKRGYSSKWDAVLKIKARDGKIGLKHFRPVKPLGCGDTGSVHLVELKDTGKFFAMKAMDKEVMINRNKVHRTCTERQVLGLVDHPFLPTLYASFQTTTHICLITDFCPGGELYMLLDRQPSKRFPEYAARFYAAEILLALEYLHLQGVVYRDLKPENILIGYDGHLMLTDFDLSFVSETVPELVFPPNYNKDKPKSKNKKDREGNLPVLVARPSGTSNSFVGTEEYICPEIISGIGHNSQVDWWSFGIFLYEMLYGKTPFRGRNRQRTFSNALTKQLEFPPTPHISQEAKDLITLLLVKDPSKRLGAIFGANEVKQHPFFRDFDWTLIRCRQPPSLDVPVKFNNHSPQRTSGDEEEMEWDEDENISTSTTVSLDFD

SEQ ID NO: 7559 - protein, 435 aa, Oryza sativa Indica Group
MAGSRFGSFKSEKGDPAATAAQRRDPYEVLGVGRNATDQEIKSAFRRMALKYHPDKNGDDPVASDMFQEVTFSYNILSDPDKRRQYDTSGFEAIEADSQELELDLSSLNTVNTVFAALFSKLGVPIKTTVSATVLEEALNGSVMVSQLQLGNSVHRKVEKQSAHFYSVDITEKEAKMGLVCRVKSTDRSKFKLLYFELEENGGLSLALQEDSVKTGKVTSAGMYFLGFPVYRFEQNNLAAAAKDPDSAFFKRLDSFQPCDINELKPGTHFFAVYGDNFFRSVNYTIEVVCGESFPAEKEKLQSVEAKILTKRAELSKFETEYREVLAKFTEMTSRYTQEMQAIDNLLKERNEIHASYTNNSPLKRSSSRSKAKSPSKFSKGEEDNNQRKEKKVKDQPTGGCRSADEDSNEKKTKERFPRKKWLNIPFKIDRRKPC

SEQ ID NO: 7560 - protein, 1124 aa, Mougeotia scalaris
MSSSKRSQSSGRSSTQTRIQNRVTQASADAKLSTAFEVSSSSGGDSFDYTKSVTASLNPTEPLAAKSVTAYLQRMQRGSIIQSFGCMMAVEPGTFRIIAYSENVSEMLGVTPQSVPTGDQQNAIGIGTDVRSLLSPSSVSVVEKAVAANDVSMMNPITVYSLATQKPFFAILHMNDVGLVIDLEPISSSSDSAMFSAGAVQSHKLAAKAISRLQSLPGGDICGLCDVVVEEVRELTGYDRVMAYKFHDDEHGEVVAEIRRSDLEPYLGLHYPATDIPQASRFLFIKNRIRMICDCTSPQVKVVQDSRIPQEMSLAGSTMRGVHGCHTQYMMNMGSTASLVMSVTINDTNEIAGGPGMKGRKLWGLIVCHHSTPRHIPFPIRSACEFLMQVFGLQLNMEVELAAQHREKHILRTQTLLCDMLLRDAPMGIVSQSPNVMDLVKCDGAALLFGGRCWLLGISPTQEQVKDIATWLISSHTDTTGLSTDSLVDAGYPKARELGVDVCGMAAARITENDFLFWFRGHAQKEVKWAGAKDGGSEEDGSRMHPRSSFKAFLEVVKQRSLPWEDVEMDAIHSLQLILRGSFQDIEDKEDRKIVHARLKEMHLQGMEELSSVASEMVRLIETATAPILAVDTAGCVNGWNFKISELTGLSIPEVMGKSLVKDLTHPSSKDTVEKLLYMALNGEEEQNVEIRLKTWGMQQGKGPVILMVNACASRDVSEKVVGVCFVAQDVTGEKIVQDKFTRIQGDYTTIVRSHNSLIPPIFGSDESGFCVEWNPAMERLSGVKREEAIGKMLTRELFGGILRLKNVDGLTKFMIVLNAAMSSHDTDKFPFTFYDRSGKIVEVLLTTSKRCNSEGVVTGVFCFLHTASSELQQALTVQKAAERVAEVKAKELAYIRQEIQNPLDGIHFARSFMEHTVLSEDQKQLIETSATCEKQLRRILADMDLASIEKGYLELETGEFSMATVMNSVVSQGMIQSTQKNLQLYCDTPPDFKSLSVFGDQVRLQQVLADFLLNAVQFTPPSGWVEIKVEPVVKKLPGGVSVAKLDFRVSHPGEGLPEDLIDQMFDRADARVKSQEGLGLSICRKLVRLMNGEVQYRREGERNFFLLQLELPLAQRDDQASMK

SEQ ID NO: 7561 - protein, 353 aa, Frankia sp. CcI3
MSYQAEYIWIDGTEPEPLMRSKTRIIRDGKEPEIWGFDGSSTNQAPGSNSDCVLRPVFVTPDPLRGGDNLLVLCEVELTDFTPHPTNTRAAARTVAEKYADMTPMFGIEQEYTFFKDGRPYGWPEVGYPAPQGPYYCGVGGSKMPGRQIVERHAQACLDAGLAIEGTNAEVMMGQWEFQIGVLPAPAIGDQIWLGRWLLHRIAEDYGVEVSFAAKPIPGDWNGAGAHTNFSTRQTMEGWDAIVACCEALGTRVLEHVTHYGHGIQDRLTGKHETAPWNKFSWGASDRGASIRIPWAVEKAKKGWLEDRRPNANMDPYLVSALMIDTCCSALAGDKPTLFVPSQTTPTPAEATV

SEQ ID NO: 7562 - protein, 1122 aa, Medicago truncatula
MSFGSKEKLKGVSLSSSAESKMNTNKETEKTLAQYGVDAELLAEFEQSRVYGKSFEYSKTILDPPRLVSEEKMITYLSRIQRGGFIQPFGCLVVIEESTFRIIGYSENCFQLLGDIGSEHFMGLIGVDATTLFTPPSGSSLVKAVASREISRLNPIWVRARTTEKPFYAILHRIDVGVLIDLEPARSSGPALSLSGSFQSQKMAVSAISRLQSCRREDISLLCDTVVEEVQKLTGYERVMIYKFHEDDHGEVVSETRRSDLESYLGLHYPSIDIPQAARFLFKQNRVRLIYDCHAKPVKVIQSRELKKPLCLVNSTLRSPHDCHKQYMANMGSIASLVMAVVINEKDTTRLWGLLVCHHTSPHHVSFPVRHACEFVMHTFGMQLYMEIQLASQMEEKRILKTQTMLCDMLLRDAPFGIVTQSPSIMDLVKCDGAALYYDENCWLLGITPTKLQVKDIAEWLLSNYSDSTGLTTESLVDAGYPGATLLGDAVCGMASARINQRHILFWFRSHTAKEIQWGGAKHHPTDKDDGGKMNPRTSFKAFLEVLKSKSLPWEISEINAIHSLQLIMQDLFQDTDNTCPKTLKDFEKSDALIGGSHEISSIALEMVRLIETAAVPIFGVDSDGLINGWNVKIAELTGLPTSEAMGKSLENEVVHVDSRETLTNILRRALQGQDNKNVELKINRFVLHQEKEVVYLMISSCISRDYTNAIVGVGFVGQDITFEKVIVKKFIKLEGDYKAIMHSLNPLIPPIFASDENACCSEWNVAMERVTGWKKDEVIGKMLLGEIFGSFCRLKGQDALTDFMILLYHGISGQDSEKSPFGFYDRNGKFIETYITTNKRTDASEDIIGCFCFLHVVTEDLNQPFQGHRSKCRQRISKSKELAYILQEMKNPLNGIRFTHKLLENTGISENQKQLLDTSEACERQIMAIIEDIDLGSINEGTWKLNMKEFLLGNILDAVVSQVMMLIKGKDLQMFHEISDKIQTLSLYGDQIRLQMVLSDILHNIVSHTPSPNGWIEMKITPGLKIIQDGNEFIHLKFRMTHSGQGLPSSILHDMFYGENQWTTQEGLGLFMSRKILSRMNGDVHYVREQNKCYFLIDLELRTRKERQRNLKTETSMIRSL

SEQ ID NO: 7563 - protein, 432 aa, Chlamydomonas reinhardtii
MQSAPAGCKATLLPWWSFAAQADVYVSSAQVGRNVLRSRYNPATRRNEAFYDTEWWTVQPQWRYSRRWGVESPEAQVYGGSKYRHDPALDRMRPGEFVRRAVPYGDYLRGKAGGSGGAAGVSGADATSSSPDRLVPFRMGPIQAAEQVKQSIRSAELRNAEEQLRSTYGADQVGKHVFVRLRYGYAVRHVMLGLELGAVSATPVFVPVYVFKTRIRGTVMRTYVAGFTQGLSSGPVLPNPTRVAALTAAAAPVALAAGGLFDWLPLPVALVVGMVMPAMVGYLAASFWPQLYAAFLLLRSRMSSPLPEPSAAEQEAWWRYEWSSSRSRSQQRQQQQSRTSGGSGSGSASSSGGSHPGWDPRGLYGVLGVSRTASKEEVQAAYRAAAMRWHPDRQPEPRLKAEATRRFQAVQEAYSVLRDPQRRAAYDRGGYV

SEQ ID NO: 7564 - protein, 284 aa, Euryops virgineus
PKSQITPYRVVIIIRLVILGLFFHYRITNPVESSYGLWLTSVICEIWSAISWVLDQFPKWYPINRVTFTDELSARFEKEGEPSQLAAVDFFVSTVDPLKEPPLITANTVLSILAVDYPVDKVSCYVSDDGAAMLSFESLVETAEFARRWVPFCKKFSIEPRAPEFYFSLKIDYLKDKVQPSFVKERRAMKRDYEEYKVRVNALVAKALKTPEEGWTMQDGTPWPGNNTRDHPGMIQVFLGSSGAVDIEGNELPRLVYVSREKRPGYQHHKKAGAENALVRVSAV

SEQ ID NO: 7565 - protein, 137 aa, Phaseolus vulgaris
MAQKAQKNDTDFKVPEPITPCATATAAAATSISEPSRFFDAATPATSSRSPKRSLPLEDAANADRTVASEPKRAVNRCSGCRRRVGLTGFRCRCGDLFCAEHRYTDRHDCSYDYKTVGREAIARENPVVKAAKIVKV

SEQ ID NO: 7566 - protein, 195 aa, Torreya nucifera
DEHGEVVAEIRRSDLEPYLGLHYPATDIPQASRFLFMQNRVRMICDCRATPVKVKQAEELKQPLCLVGSTLRAPHGCHAQYMANMGSIASLVMAVIINGNGIDEDGVSGSGSGSGRSSLKLWGLVVCHHTSPRAVPFPLRSACEFLMQTFGLQINMELQLAAQLIENSILRTQTLLCDMLLRDAPIGIVTQSPSI

SEQ ID NO: 7567 - protein, 284 aa, Euryops virgineus
PKSQITPYRVVIIIRLVILGLFFHYRITNPVESSYGLWLTSVICEIWFAISWVLDQFPKWYPINRVTFTDELSARFEKEGEPSQLAAVDFFVSTVDPLKEPPLITANTVLSILAVDYPVDKVSCYVSDDGAAMLSFESLVETAEFARRWVPFCKKFSIEPRAPEFYFSQKIDYLKDKVQPSFVKERRAMKRDYEEYKVRVNALVAKALKTPEEGWTMQDGTPWPGNNTRDHPGMIQVFLGSSGAVDIEGNELPRLVYVSREKRPGYQHHKKAGAENALVRVSAV

SEQ ID NO: 7568 - protein, 459 aa, Zea mays
  misc_feature (155)..(155): Xaa can be any naturally occurring amino acid
MASAAAGAPKRCYYEVLGLSRDCSPTDIKLAFRRLALSLHPDKQPPGSDLALATAAFQELQHAHSVLSDPQERAYYDSHRSQIIFSDPASAGAKSASTVPDLFAFFSSSAFSGFSDTGRGFYKVYGDVFDRVFAQELAYARRMVVPEPAAPPVIXGTLDSPYAQVTAFYSYWLGFGSGMDFGWAAAWDAARGESRRVRRLMEEDNKKAMRKARREYNDAVRGLAAFCKKRDKRVVDMVLKKKLEEEKRKAEEKERRKEEDKRKKERAMAYQEHEWARAEEGLYDEDEEEEMRAKKELSYCAACNKKFKSDKQWKNHEQSKKHRNKIAELRKAFREEESLKKAEEGEGDWNEVDMGFDFKPTQESDDASAFSDAAEELAEEFESNYAGNGHHGKCEVQPEGSVHVNDVDDIMEGPSSFNVNNGAVIMCYNGCSISGVILRAGQPSLEQNCPDLVWKQWEH

SEQ ID NO: 7569 - protein, 284 aa, Euryops virgineus
PKSQITPYRVVIIIRLVILGLFFHYRITNPVESSYGLWLTSVICEIWFAISWVLDQFPKWYPINRVTFTDELSARFEKEGEPSQLAAVDFFVSTVDPLKEPPLITANTVLSILAVDYPVDKVSCYVSDDGAAMLSFESLVETAEFARRWVPFRKKFSIEPRAPEFYFSQKIDYSKDKVQPSFVKERRAMKRDYEEYKVRVNALVAKALKTPEEGWTMQDGTPWPGNNTRDHPGMIQVFLGSGGAVDIEGNELPRLVYVSREKRPGYQHHKKAGAENALVRVSAV

SEQ ID NO: 7570 - protein, 278 aa, Oryza sativa
  misc_feature (124)..(124): Xaa can be any naturally occurring amino acid
MADGGEKCRDAAGEGGGGGDLYAVLGLKKECSDADLKLAYRKLAMRWHPDKCSSSSSAKHMEEAKEKFQEIQGAYSVLSDSNKRFLYDVGVYDDDDNDDDNLQGMGDFIGEMAQMMSQARPTAXKKGTRQESFKELQQLFVDMFQADLDSGFCNGPSKCYHTQAQSQTRTSSTSPSTSPSPPPPVATEAESPSCNGINKRGSSAMDSGKPPRASEVGAGQSQSGFCFGQQKSDAKQAAKTRSGNTASRRRNARKQKVSSKHDVSSEDEMPGSQWHGVA

SEQ ID NO: 7571 - protein, 379 aa, Pectobacterium atrosepticum SCRI1043
MAKQDYYESLGVAKSADDREIKKAYKRLAMKYHPDRNPGDSEAEAKFKEIKEAYEILIDSQKRAAYDQYGHAAFEQGGMGGGGGGGFGGGGADFGDIFGDVFGDIFGGGRRQRASRGSDLRYNMELSLEEAVRGVTKEIRIPALEECDVCHGNGAKPGSSPITCPTCHGNGQVQMRQGFFTVQQACPHCHGRGKIIKDPCIKCHGHGRVEKSKTLSVKIPAGVDTGDRIRLSGEGEAGDHGAPSGDLYVQVQVKAHPIFQREENNLYCEVPINFAMAALGGEIEVPTLDGRVKLKVPAETQTGKLFRMRGKGVKSVRGGAQGDLLCRVVVETPVNLNERQRQLLQELDESFGGPSGERNSPRSKNFFDGVKKFFDDLTR

SEQ ID NO: 7572 - protein, 284 aa, Senecio vulgaris
  misc_feature (8)..(8): Xaa can be any naturally occurring amino acid
PKSQITPXRVVIIIRLVILGLFFHYRITNPVESSYGLWLTSVICEIWFAISWVLDQFPKWYPINRVTFPDELSARYEKEGEPSQLAAVDFSVSTVDPLKEPPLITANTVLSILAVDYPVDKVSCYVSDDGAAMLSFESLVETAEFARKWVPFCKKFSIEPRAPEFYFSQKIDYLKDKVQPSFVKERRAMKRDYEEYKVRVNALVAKALKTPEEGWTMQDGTPWPGNNTRDHPGMIQVFLGNSGAHDMEGNELPRLVYVSREKRPGYQHHKKAGAENALVRVSAV

SEQ ID NO: 7573 - protein, 473 aa, Zea mays
MAATAVSVDEKLDKLRAEVAKLSQISENEKSGFISLVSRYLSGEAEQIEWSKVQTPTDEVVVPYDTVASPPEDLEETKKLLDKLVVLKLNGGLGTTMGCTGPKSVIEVRNGFTFLDLIVIQIESLNKKYGCNVPLLLMNSFNTHDDTQKIVEKYSNSNIEIHTFNQSQYPRIVTEDFLPLPSKGKSGKDGWYPPGHGDVFPSLNNSGKLDILLAQGKEYVFVANSDNLGAIVDIKILNHLINNQNEYCMEVTPKTLADVKGGTLISYEGRVQLLEIAQVSDEHVNEFKSIEKFKIFNTNNLWVNLKAIKRLVEAEALKMEIIPNPKEVDGVKVLQLETAAGAAIRFFDKAIGINVPRSRFLPVKATSDLLLVQSDLYTLVDGFVIRNPSRANPANPSIELGPEFKKVANFLGRFKSIPSIVELDSLKVSGDVWFGSGITLKGKVTIIAKPGVKLEIPDGDVLENKDVNGPEDL

SEQ ID NO: 7574 - protein, 250 aa, Zea mays
  misc_feature (133)..(133): Xaa can be any naturally occurring amino acid
MAANLKWAPVLAPLVVVAAMVGTTSAGNIAVYWGQNGNEGSLADACNSGLYAYVNIAFLTTFGNGQTPVLNLAGHCDPGSGSCTGQSSDIQTCQSLGIKVLLSIGGASGSYGLSSTDDANSVADYLWDNFLGXPQCPYPDASLGPALQTGQFDNVWIQFYNNPGCAYANGDDTNLVNAWNTWTSSITAGSFYLGVPASPQAAGSGYIDPGTLTGTVIPAIRGIGNYGGIMVWDRFNDVQNNYSSQVKGSV

SEQ ID NO: 7575 - protein, 354 aa, Amanita muscaria
MANQYHNDLLAPYLALDQGGKFHAEYVWIDGDGGLRSKTTTVDQKVTDISQLRVWDFDGSSTNQAPSGNSDVYLRPSAIFKDPFRGGENILVLSETYNNDGTPNRTNHRHHTAKVMELAKDEIPWFGIEQEYTLFDADGSPYGWPKGGFPGPQGPYYCGAGTGKVFARDLIEAHYRACLYAGVNISGINAEVMPSQWEFQVGPCEGISMGDHLWMARYLLIRVAEQWGVKVSFHPKPLQGDWNGAGAHTNYSTLAMREPGGMKYIEAAIEKLAKRHDEHIAVYGEDNEMRLTGRHETGHIGTFSSGVANRGASIRVPRHVANKGYGYLEDRRPASNIDPYRVTGIIIETTILDK

SEQ ID NO: 7576 - protein, 298 aa, Casuarina glauca
MAFCTTLPMSFLFLGMLMLATRANAGGIAIYWGQNGNEGTLAETCSTGNYNFVIIAFLPTFGDGQTPMVNLAGHCDPCSNGCISLSSDIKSCQAKGIKVMLSLGGGAGSYYLSSSKDAKQVATYLWNNFLGGQSSSRPFGPVILDGIDFDIEGGTNKHWDELARYLSRYSNQGKKVYLTAAPQCPFPDTWIENALKTGLFDYVWVQFYNNPPCQYSSGELANLEDAWKQWTSDIPTNKIFLGLPASPEAAGSGYIPVADLTSNVLPAIKGSSKYGSVMLWSKYYDDQSGYSTAIKGHV

SEQ ID NO: 7577 - protein, 301 aa, Oryza sativa
MASLWRLALAAAMCGALILSSSSSAAAAGKKTGRITVYWGQTAAEGRLREACGSGLYTTVIVSFLTGFGGGRYKLDLAGHDRGAVGPDVKYCQSRGVLVLLSIGGGIGRYSLASKADAKAVADHLWDFYLGGRSKSRPFGDAVLDGIDFDIELGRPAHYDDLARYLKAYSGRKPGGKKVWLTAAPQCPFPDRMLGEALRTGVFDRVHVQFYNNPACSYRASNAAAFAAAWRKWASSLPRSSVYLGLPAAPGAANSGYVPPAALAGEALPIVQRSRNYGGVMLWSRYWDRRTGYSKKIKHAV

SEQ ID NO: 7578 - protein, 365 aa, Sapria himalayana
TSFRLAAKAISRLQAISSGSISKLCNVLVKEVSHLTCYDRVMVYKFHEDEHGEVIAECIRPDLEPYLGLHYPATDIPQAARFLFMKNKVRMICNCMASPVKVLQAEGLDKPLSLCGSTLRSPHRCHEQYMANMNSIASLVLSVTINEEDGEMESTQSRPARLWGLVVCHHTSPKFVPFSLRYACEFLIQVFGIQINKEVELEAQRKEKHILQTQTLLCDMLVRDSPVGIITKSPNVMDLVKCDGAALFYRNKIWLLGLAPSEMQIRDIAEWLLECHGKSTGLSTDSLMESGYPGASLVGSSVCGMAAIRVTSKDFIFWFRSHIAKEFKWGGAKHGRHDKDDGRKMHPRSSFKAFLEVVKWRSLPW

SEQ ID NO: 7579 - protein, 590 aa, Saccharomyces cerevisiae YJM789
MKTCYYELLGVETHASDLELKKAYRKKALQYHPDKNPDNVEEATQKFAVIRAAYEVLSDPQERAWYDSHKEQILNDTPPSTDDYYDYEVDATVTGVTTDELLLFFNSALYTKIDNSAAGIYQIAGKIFAKLAKDEILSGKRLGKFSEYQDDVFEQDINSIGYLKACDNFINKTDKLLYPLFGYSPTDYEYLKHFYKTWSAFNTLKSFSWKDEYMYSKNYDRRTKREVNRRNEKARQQARNEYNKTVKRFVVFIKKLDKRMKEGAKIAEEQRKLKEQQRKNELNNRRKFGNDNNDEEEFHLQSWQTVKEENWDELEKVYDNFGEFENSKNDKEGEVLIYECFICNKTFKSEKQLKNHINTKLHKKNMEEIRKEMEEENITLGLDNLSDLEKFDSADESVKEKEDIDLQALQAELAEIERKLAESSSEDESEDDNLNIEMDIEVEDVSSDENVHVNTKNKKKRKKKKKAKVDTETEESESFDDTKDKRSNELDDLLASLGDKGLQTDDDEDWSTKAKKKKGKQPKKNSKSTKSTPSLSTLPSSMSPTSAIEVCTTCGESFDSRNKLFNHVKIAGHAAVKNVVKRKKVKTKRK

SEQ ID NO: 7580 - protein, 365 aa, Coffea arabica
MVVFHQSILLFASAIVLFAVQHANSSSVETVHYNVTGYRGRHLGGGCNLFQGKWVVDSSFPPYESSGCPFIDYEFDCQKYGRPDKQYLKYAWKPDSCNLPRFDGLDFLKRWKGKKIMFVGDSLSLNQWQSFLCLIHASVPSANTNLVRKEILSYATFQDYDVTIYLYHSTYLVDIAQENIGRVLKLDSIDRGNDAWKGMDALVFNTWHWWLHRGDSQPWDYVQDGSTVSKDMDRLVAFSKGLSTWAQWVNQNVDSSKTKVFFQGISPSHYDGKEWGSDSKSCYGEREPLQGSTYPAGLPPAVDVVKKTLSSMQKPVVLLDITTLSQLRKDAHPSGYGGSTSGNDCSHWCLPGVPDTWNQLLYALL

SEQ ID NO: 7581 - protein, 52 aa, Datura inoxia
DFVKDRRRVKREYDEFKVRINSLPDSIRRRSDAYNAREEIKAMKLQRRGSWG

SEQ ID NO: 7582 - protein, 276 aa, Mesorhizobium chacoense
WGFDGSSTMQAEGRSSDCVLKPVALYPDPARTNGVLVMCEVMMPDGVTPHASNSRATILDDEGAWFGFEQEYFFYKDGRPLGFPESGYPAPQGPYYTGVGYKNVGDVARKIVEEHLDLCLAAGINHEGINAEVAKGQWEFQIFGKGSKRAADQIWMARYLLLRLTEKYGIDIEFHCKPLGDTDWNGSGMHANFSTAYMRETGGKEYFEALMAAFEKNRADHIAVYGPDNHMRLTGKHETQSIHTFSYGVADRGASIRVPHSFVNNGYKGYLEDRRP

SEQ ID NO: 7583 - protein, 276 aa, Mesorhizobium sp. ICMP 11708
WGFDGSSTMQAEGRSSDCVLKPVALYPDPARTNGILVMCEVMMPDGVTPHESNSRATILDDEDAWFGFEQEYFFYKDGRPLGFPESGYPAPQGPYYTGVGYKNVGDVARKIVEEHLDQCLAAGINHEGINAEVAKGQWEFQIFGKGSKKAADQIWMARYLLLRLTEAYGIDIEFHCKPLGDTDWNGSGMHCNFSTKFMREVGGKAYFEALMAQFDKNLMDHIAVYGPDNDKRLTGKHETAPWNKFSYGVADRGASIRVPHSFVKNDYKGYLEDRRP

SEQ ID NO: 7584 - protein, 276 aa, Mesorhizobium sp. ICMP 12685
WGFDGSSTMQAEGRSSDCVLKPVALYPDPARTNGILVMCEVMMPDGVTPHESNSRATILDDEGAWFGFEQEYFFYKDGRPLGFPESGYPAPQGPYYTGVGYKNVGDVARQIVEEHLDLCLAAGINHEGINAEVAKGQWEFQIFGKGSKRAADQIWMARYLLLRLTEKHGIDIEFHCKPLGDTDWNGSGMHCNFSTKFMREVGGKAYFEALMAQFDKNLMDHIAVYGPDNDKRLTGKHETAPWNRFSYGVADRGASIRVPHSFIKNDYKGYLEDRRP

SEQ ID NO: 7585 - protein, 359 aa, Vitis sp. Qiu 94046
AGALKSYKLAAKAISRLQSLPSGNISLLCDVLVKEASELTGYDRVMVYKFHEDEHGEVIAECRRPDLEPYLGLHYPATDIPQASRFLFMKNKVRMICDCLAPPVKVIQNKRLAQPLSLCGSTLRSPHGCHAQYMANMGSVASLVMSVTINEEDDDTESEQQKGRKLWGLVVCHNTSPRFVPFPLRYACEFLVQVFGVQISKEMELAAQMKEKHILQTQTVLCDMLLRDAPVGIVTQSPNVMDLVRCDGAALYYQKKFWLLGVTPTEAQIRDIVEWLLEYHSGSTGLSTDSLMEAGYPAASLLGDAVCGIAAVKINSNDFLFWFRSHTAKEIKWGGAKHDPDDKDDGRKMHPRSSFKAFL

SEQ ID NO: 7586 - protein, 132 aa, Mesorhizobium plurifarium
KGSRKAADQMWMARYLLLRLTEKYGIDIEFHCKPLGDTDWNGSGMHCNFSTKYMREVGGKTYFEALMAQFEKNLMDHIAVYGPDNDKRLTGKHETAPWNKFSYGVADRGASIRVPHSFVKNDYKGYLEDRRP

SEQ ID NO: 7587 - protein, 975 aa, Chlamydomonas reinhardtii
MSQRDVATQSDDTEYYAILNIPRDASDEDVRRAYRALAQVYHPDKHSDPEQKIRAQEAFGKLQEAYEVLSDPNRRQVYDVYGKEGLLAGFEVGTKLDSVEEMKKKWEEFKRKQDEERAEQLSNHRGTYTCRIDLTDVAAMVASASGGGGGGGRHQHPVPLRPLFRAVAVTNSIDTPVGDNGDVVYIQGQAALRNGAGLGNLIFGYRRVLSQHDTLEGNVATLGWVRQRRETKERQEHCEAIRSSLAKATAELALIEPVARRKARSEAARRPASGLVVLDAVYGATDQYLQGAAAAAAADGLGGGGGGAGGSGATPQRQAIAAASAKLASSAEAAAAAAAAEAAAPAATEAAASAPDPAAAALPPATAAESRPPRDGTPGASASSTAAADEPPPPWLSVTAALQYQVSDSRLTLHPGVPKKNQMGFADPTPGSSTAVRRLYVAYLYGSLVYETTCDDLEGLSLPGSGEVVWDAGRRQGLLALGAAALGCPELMQPPQAGAGAAAGSGAGSVAGTPRVMVLAATVTYSAILAFQLVHQAPATTNVIDWTMGAQPQAFPMKVTCVALSGCMLSNAYGAAAGELALVTAGTAGGLLAGEKCVRLAVNETAVVHLNWSNDPYDGLVVVFDPASTAPPHPAGAGVSVISASRCLYSAGCMEGVMWMSLLVGPGLTLAHYVRTVNSTEPESWAGRRREEWFLSRVAEGGALAAAGGAGARPWCFGNATEPGAVGPGAQQARISLQPFWNQINVEKESFWLALWGTCGGGSIGWGAGTDTRADLKGNVSGPRGAAECGGARAVGTAVVVACSFLAGHFASSPSTAAAGTAAAGHQQQGAAEESPGGGDGGCQTGVATADLGGGAGGGKARGGFVGAVHSAAAGERTAAGKGGGGGGTEAGGADVLGGKDALYRPSSASVLPSSSIATISAIAPSVTGSGRGTEAWGWDDAGSSGSRSPSHLRLLAGMPSSEGATPVGGRDAAQ

SEQ ID NO: 7588 - protein, 306 aa, Oryza sativa Indica Group
MASQRRRSSATAVFLLLSLLLLLQSAAAYPQGKRQNVAVFWGRNKAEGSLSSICDSGDYNIVIISFLSVFGHGKYWLDLSGHDLRDVGADIRHCQSKGVYMLLSIGGDGDQYSLPSSKSAADVAESLYYSVLGGDRPGAFHPFGGDTIVNGVDFFIDNGPADHYDDLANRINDYNQNIHDPIGIMLTATVRCSYPDPRMKAALDTKLFRRIHVRFYDDPSCSYNHAGLAGVMAQWNRWSAAYPDGQIFLGLVAANLTGKNDMVGVGELRDKLLPAVQNTDTYGGVMLWNSYYDSLTHYGRYVKDLA

SEQ ID NO: 7589 - protein, 471 aa, Astragalus membranaceus
MATATATDRLSNLKSSVAGLNQISENEKSGFINLVARYLSGEAQHVEWSKIQTPTDEVVVPYDTLAPTPDGSLEIKNLLDKLVVLKLNGGLGTTMGCTGPKSVIEVRDGLTFLDLIVIQIENLNSKYGSNVPLLLMNSFNTHDDTQTIVEKYQNSNIEIHTFNQSQYPRLVVDDFLPLPSKGRTDKDGWYPPGHGSMFPSLSNSGKLDALISQGKEYVFVANSDNLGAIVDLKILNHLVAHKNEYCMEVTPKTLADVKGGTLISYEGRVQLLEIAQVPDEHVGEFKSIEKFKIFNTNNLWVNLKAIKRLVEADALKMEIIPNPKEVDGVKVLQLETAAGAAIRFFDKAIGINVPRSRFLPVKATSDLLLVQSDLYTVENGSVIRNKARTNPENPSIELGPEFKKVSNFLGRFKSIPSIVELDSLKVVGDVWFGTGVILKGKVSIVAKSGVKVEIPDGAVIANKEINGPKDL

SEQ ID NO: 7590 - protein, 1065 aa, Medicago truncatula
MNLNIQDSYAASLVMSEGESIHDFCWYPYMSASDPVTNVFATTTRDHPIHLWDATSGQLRCTYRAYDAMDEITAAFSVAFNPSGTKARGTSDATKMIVAALAMRGGALRWWLWWSRRHPQSNWDTFTTDLLWRFKPEWRHLLPVLDEETEEACESSKLEVKQPSRVSDCVVDLVLDIPGEHNQDLPPCSKLVEKPSITHDYVDSIAFITGEQDLDSPLKSEVQVVQLEIADSIDGVQQRSVIVMTGDKKFSNPALGPQSPKPLDTALAPPLPPPKPPDGSVAAGIDPLYAPVTLHKYSPPMKLSSGTAENLTNLISIVDLQPPHPTKIIGSVSITTSGVVSYPKDTGFDDDTDISILGKIHHPAALAKCTNLSDFHLTSEATNTHLVGGFAVPPPPPPKPPDNDPSKSNPVLLLAESTKSSIVMFASITDTEPYDPGPSKHPFPATVVTFISTTNLFDKFPKRDCAFHFCSREVITITVARNMFDKLPTRDHAFPREVITTNDSLQHINHALAKVHFLNATITTLFGIKKLLEALIIMFKLGEASAVYKLSQTGLITITDYINVIVLLIVCSTYVSHHKAIELPSQLCHDQPDMLRATIAMISSCISSIAILMCSNDKANQLFLENSSVEGRLLSLLGYVFKEASFVAMITHRFSTFVNVLMHADGFFGICGSVPLYWDDVLHDLNLLLIYAIHCRSEFCYPRLFDSTKGTGEVVDWGINIFCLMVAAPFCSLLSLHNPHHIDDIFSYKTTSNSKQHLSNKVEFDSVVAVMEVMLYKGKFLNILISHPHASSSSYLNLNEIPNKSLRIQDGLYTCAYFVGLLLQWLDKFKLLNSLCGTVFEVNQGEVTTFHSYAIKTLATFLHIVTNVAIRSGISKFCVGPSALSELTYNVVGIRLNFANGYDIALHGIASLFKTHHGFIKHCGLIGGVSSMLLVANIGLCGYVQEVLVRLNSTLDMLLQSDVVKYEFFGLMCDLEGMEIVYSQEVDCSLHFTFEQWDPDGHLDLKFKQWDPGKFSVEAGFYNLEDKVDLEGVGNDRIFRIMSTNVVTPLVLEGSMTHLNLERIF

SEQ ID NO: 7591 - protein, 423 aa, Oryza sativa Japonica Group; identical to SEQ ID NO: 1026

SEQ ID NO: 7592 - protein, 921 aa, Oryza sativa Japonica Group
MASKGTEGGHGGVERKEQQQQRGYQLPRDSRGSLEVFNPSSASSFRTAAAAPKSASPFLAIPDREEDNVVAQQRAAEWGLVLQTDHHTGLPQGVSARPSSGSARTSSEDNPQQQQSAAAIPRVSEELRAALSAFQQTFVVSDATHPNHPIMYASAGFFNMTGYTSKEVVGRNCRFLQGSGTDPHEIDKIRQSLANGSNYCGRILNYKKDGTPFWNLLTIAPIKDEDGRLLKFIGMQVEVSKYTEGKKDTVVRPNGLSESLIKYDARQKDHARSSVSELLLALKNPRSLSESSNNTLKRKSQESLSMSMTEVPSKRSSESGSRRNSRSGTRSSLQKINEVPDQGNRTRKSGLRAFMGFLGMGHGSVEKNMLKPRDEDPLIDSDDERPESFEDEFRRKEMRRGIDLATTLERIEKNFVITDPRLPDNPIIFASDSFLQLTEYNREEILGRNCRFLQGPETDRATVRKIRDAIDNQAEVTVQLINYTKSGKKFWNLFHLQPMRDQKGDVQYFIGVQLDGTEHVQDDAAKEGVVLVKKTADNIDEAAKELPDANLRPEDLWANHSKVVLPNPHMKDTASWRAIQKVLESGESIGLKHFRPVKPLGSGDTGSVHLVELLNTGEYFAMKAMDKSIMLNRNKVHRATAERQILDLLDHPFLPTLYASFQTKTHICLITDYCPGGELFVLLDNQPLKVLHEDAVRFYAAEVVVALEYLHCQGIIYRDLKPENILLHRDGHISLTDFDLSCLTSCRPQVFLPEDADEKKGRKNGSYPIFFAEPMRASNSFVGTEEYIAPEIITGAGHTSAVDWWALGILLYEMLYGYTPFRGKTRQRTFANILHKDIRFPASISVSLAARQLMYRLLHRDPANRLGSYEGANEIKGHPFFRGINWPLIRATAPPKLEIPLFSKDDMEKKGLVTNNRTDMF

SEQ ID NO: 7593 - protein, 289 aa, Oryza sativa Indica Group
MAFRRRSCIPAALAFFVLLLAGQSTAGEDQTAVIWGRHGDEGTLREACDTGHYNTVIIAFLSVFGHGRYSLDLSGHDIRRVGNDIKHCQRKGIVVLLSIGGQGGDYSLPSSRSAADVADNLWNAFLAGRRKGVLRPFGNAVVDGIDFFIDRGSGDHYDELARNLYSYRNNKGKGVMLTATPRCRFPDRRVEKALATGVFARIHVRMFGDDVNCTAAPRESWEKWAAAYPASQVYLGLVASSEQDPGYLSPKPLYYTLVMYIRDRLNYGGKMIWDRYYDKKTDYSIGKLI

SEQ ID NO: 7594 - protein, 284 aa, Oryza sativa Indica Group
MKMKALLPVAAMLLLVSGQLAAPVTADGYVGQLAVFWGRHKEEGSLREACDTGRYNIVVITFYNVFGYQRGRYGLDFSGHPVAAVGADIKHCQSKGVQVLLSIGGQGGEYSLPSSQSASDVADNLWNAYLGGRRAGVPRPFGDAVVDGIDFFIDQGGADHYEQLARQLHGRGVLLTATVRCAYPDSRMEAALATGVFARIHVRIFGDDQCTMFPKDAWEKWAAAYPWCTVFLTVVASPEQDEGYMFQKDLYYGVQQFIDKEPNYGGIAIWDRYYDKKANYSGEG

SEQ ID NO: 7595 - protein, 1067 aa, Bambusa oldhamii
QVCQICGDGVGTTAEGDVFAACDVCGFPVCRPCYEYERKDGTQACPQCKTKYKRHKGSSSPPIRGEGGDDTDADDASDFNYPASGNDDQKQKIADRMRSWRMNAGGGGDVGRPKYDSGEIGLTKFDSGEIPRGYIPSVTNSQISGEIPGASPDHHMMSPTGNIGKRVPFPYVNHSPNPSREFSGSIGNVAWKERVDGWKMKQDKGAIPMTNGTSIAPSEGRGVGDIDASTDYNMDDALLNDETRQPLSRKVPLPSSRINPYRMVIVLRLIVLSIFLHYRITNPVRNAYPLWLLSVICEIWFALSWILDQFPKWFPINRETYLDRLALRYDREGEPSQLAAVDIFVSTVDPMKEPPLVTANTVLSILAVDYPVDKVSCYVSDDGAAMLTFDALAETSEFARKWVPFVKKYNIEPRAPEWYFSQKIDYLKDKVHSSFVKDRRAMKREYEEFKVRINGLVAKAQKVPEEGWIMQDGTPWPGNNTRDHPGMIQVFLGHSGGLDTEGNELPRLVYVSREKRPGFQHHKKAGAMNALVRVSAVLTNGQYMLNLDCDHYINNSKALREAMCFLMDPNLGRSVCYVQFPQRFDGIDRNDRYANRNTVFFDINLRGLDGIQGPVYVGTGCVFNRTALYGYEPPVKQKKKGGFLSSLCGGRKKTSKSKKKSSDKKKSNKHVDSSVPVFNLEDIEEGVEGAGFDDEKSLLMSQMSLEKRFGQSAAFVASTLMEYGGVPQSATPESLLKEAIHVISCGYEDKSEWGTEIGWIYGSVTEDILTGFKMHARGWRSIYCMPKRPAFKGSAPINLSDRLNQVLRWALGSVEILFSRHCPIWYGYGGRLKFLERFSYINTTIYPLTSIPLLIYCVLPAICLLTGKFIIPEISNFASIWFISLFISIFATGILEMRWSGVGIDEWWRNEQFWVIGGISAHLFAVFQGLLKVLAGIDTNFTVTSKATDEEGDFAELYMFKWTTLLIPPTTILIINLVGVVAGISYAINSGYQSWGPLFGKLFFAFWVIVHLYPFLKGLMGRQNRTPTIVVVWAILLASIFSLLWVRIDPFTTRVTGPDTQTCGINC

SEQ ID NO: 7596 - protein, 261 aa, Brassica napus
  misc_feature (176)..(176): Xaa can be any naturally occurring amino acid
  misc_feature (179)..(180): Xaa can be any naturally occurring amino acid
  misc_feature (182)..(182): Xaa can be any naturally occurring amino acid
  misc_feature (236)..(236): Xaa can be any naturally occurring amino acid
MAGGTALTPTSVGSKSLLPLRNHEAAERVNNNNNNNSLKALPKAVQPVSSIDGGMVKRPRGRPAGSKNKPKPPIIVTHDSPNSLRAHAVEISSGNDICEALSDFARRKQRGLCILSANGCVTNVTLRQPASSGAIVTLHGRFEILSLLGSILPPPAPLGITGLTIYLAGHQGQVVXWSXXGXLITSGPVVIMAASFMNAVFDRLPLDDDESASMQNQQYYQNGRSRPLDDIHGLPXNLLTNGNSGSDVFSWGAAQRAMSKP

SEQ ID NO: 7597 - protein, 380 aa, Burkholderia xenovorans LB400
MAKRDYYEVLGVAKNASDDEIKKAYRKLAMKHHPDRNPGNKDAEGHFKEVKEAYEMLSDSQKRAAYDQYGHAGVDPNMGGAGAQGFGGFADAFGDIFGDIFGQAAGGAARGGGGRAGPQVYRGADLRYSMEITLEQAAHGYDTQIRVPSWVSCEVCHGSGAKPGTKPETCPTCSGSGSVRMSQGFFSIQQTCPKCHGTGTYIPDPCGHCHGAGKVKETKTLEVKIPAGIDDGMRIRSAGNGEPGINGGPSGDLYVEIHIKQHSVFERDGDDLHCQMPIPFTTAALGGEIEVPTLAGRASFTVPEGTQSGKTFRLRGKGIKGLRSSIAGDLYVHVQVETPVKLTEPQRDLLKQFEKALVEGGSRHSPQSKSWFDRVKSFFD

SEQ ID NO: 7598 - protein, 385 aa, Picea sitchensis
MEFRMNVIESAQSVDEFTPIRTLGHGDMGTVYLAKHMTSGKPVAMKVMSKELMQKKRSHKRAWMEKEILQKLDHPFLPKLFTKFESKNHSFLLMSYCSGGDLNTLRQRQKDRKFSESAARFYAAEVVLALEYLHQHGILYRDLKPENILLQADGHIMITDFDLSLMINNSQESRAKDSYRDQNGSCKKKTKSFLAKLNPGHVGAKDCMNASAMITTKQDDSAKETSFCHLDGRKESVYEQAHSFVGTEEYVAPEILWGKGHGIAVDWWAFGVLLYEMVYGKTPFKGCNRKETFYNILCKEPPQLSEHSSPLKDLLRRLLVKEPTLRLGFNSGAQEIKNHEFFEGVRWDELEYVSRPPFVPPPFSFEHSRIVMDDSVHTIEMFENF

SEQ ID NO: 7599 - protein, 276 aa, Mesorhizobium mediterraneum
WGFDGSSTMQAEGHSSDCVLKPVAIYPDPARTNGVLVMCEVMMPDGVTPHASNKRATILDDEGAWFGFEQEYFFYKDGRPLGFPESGYPAPQGPYYAGVGYSNVGSVARQIVEEHLDLCLAAGINHEGINAEVAKGQWEFQIFGKGSKKAADQMWMARYLMQRLTEKYGIDIEYHCKPLGDTDWNGSGMHANFSTAHMREVGGKAYFEALMAAFDKNLMDHIAVYGPDNDKRLTGKHETAPWNRFSYGIADRGASIRVPHSFINNGYKGYLEDRRP

SEQ ID NO: 7600 - protein, 284 aa, Senecio vulgaris
  misc_feature (8)..(8): Xaa can be any naturally occurring amino acid
PKSQITPXRVVIIIRLVILGLFFHYRITNPVESSYGLWLTSVICEIWFAIPWVLDQFPKWYPINRVTFPDELSARYEKEGEPSQLAAVDFFVSTVDPLKEPPLITANTVLSILAVDYPVDKVSCYVSDDGAAMLSFESLVETAEFARKWVPFCKKFSIEPRAPEFYFSQKIDYLKDKVHPSFVKERRAMKRDYEEYKVRVNALVAKALKTPEEGWTMQDGTPWPGNNTRDHPGMIQVFLGNSGAHDMEGNELPRLVYVSREKRPGYQHHKKAGAENALVRVSAV

SEQ ID NO: 7601 - protein, 276 aa, Mesorhizobium tianshanense
WGFDGSSTMQAEGHSSDCVLKPVAVYPDPARTNGVLVMCEVMMPDGVTPHASNKRATILDDEGAWFGFEQEYFFYKDGRPLGFPESGYPAPQGLYYTGVGYSNVGSVARQIVEEHLDQCLAAGINHEGINAEVAKGQWEFQIFGKGSKKAADQMWMARYLMQRLTEKYGIDIEYHCKPLGDTDWNGSGMHANFSTAYMREVGGKDYFEALMAAFDKNLMDHIAVYGPDNDKRLTGKHETAPWNRFSYGIADRGASIRVPHSFINNGYKGYLEDRRP

SEQ ID NO: 7602 - protein, 298 aa, Panax ginseng
MASHLSISLAFVFSVVLLLVANSDAGGISIYWGQNGGEGTLAETCATGNYEYVNLAFLTTFGNGQTPMLNLAGHCDPTSNGCTGLSSDIKSCQAQGIKVILSIGGASGSYSLVSAADAREVATYIWNNFLGGNSATRPLGNAVLDGVDFDIEGGTSAHWDDLARYLSAYSKRGKKVYLTAAPQCPYPDAWVGGALQTGLFDYVWVQFYNNPPCQYSSSAIGNLEDAWKQWTSDIPAKKIFLGLPAAPDAAGSGFIPASDLTSQVLPAIKGSSKYGGVMLWSKYYDDQSGYSSSIKSDV

SEQ ID NO: 7603 - protein, 276 aa, Mesorhizobium ciceri
WGFDGSSTQQAEGHSSDCVLKPVAVYPDPARTNGVLVMCEVMMPDGVTPHASNKRATILDDEGAWFGFEQEYFFYKDGRPLGFPESGYPAPQGPYYTGVGYSNVGSVARQIVEEHLDLCLAAGINHEGINAEVAKGQWEFQIFGKGSKKAADQMWMARYLLQRLTEKYGIDIEYHCKPLGDTDWNGSGMHANFSTAYMREVGGKAYFEALMAAFDKNLMDHIAVYGPDNDKRLTGKHETAPWNRFSYGIADRGASIRVPHSFIKSDYKGYLENRRP

SEQ ID NO: 7604 - protein, 284 aa, Senecio vulgaris
PKSQITPYRVVIIIRLVILGLFFHYRITNPVESSYGLWLTSVICEIWFAISWVLDQFPKWYPINRVTFPDELSARYEKEGEPSQLAAVDFFVDTVDPLKEPPLITANTVLSILAVDYPVDKVSCYVSDDGAAMLSFESLVETAEFARKWVPFCKKFSIEPRAPEFYFSQKIDYLKDKVQPSFVKERRAMKRDYEEYKVRVNALVAKALKTPEEGWTMQDGTPWPGDNTRDHPGMIQVFLGNSGAHDMEGNELPRLVYVSREKRPGYQHHKKAGAENALVRVSAV

SEQ ID NO: 7605 - protein, 344 aa, Oryza sativa Japonica Group
MDYYEILHVDRSATDDDIRRAYRRLAMRWHPDKNHTGKKDAEAKFKDITEAYNVLSDAGKRALYDQYGEEGLRAGGAPPQPGGGGGGADDIFAEFFGSTPFTYCNTGAGTTARAKQQAAWDAGGGGAYFGRGGFARDHGGGGAAASPQPLPVESKLACTLEELYVGVTKNMKISRNVVDASGRMKTESEILSIEVKPGWKKGTKITFPGKGNQQWSQLPADLVFVVDEKPHDVYRRDGNDLVAEARVTLADALGGTVVVLATLDGRELLVEVSGGGVAAGDEDDDDEDPVVYPGYELVVPSEGMPIAREPGRHGSLRIRFDVAFPERLTRRQRAQIKRILDAAG

SEQ ID NO: 7606 - protein, 276 aa, Mesorhizobium loti
WGFDGSSTMQAEGHSSDCVLKPVAVYPDPTRTNGVLVMCEVMMPDGVTPHASNKRATILDDEGAWFGFEQEYFFYKDGRPLGFPESGYPAPQGPYYTGVGYKNVGDVARQIVEDHLDLCLAAGINHEGINAEVAKGQWEFQIFGKGSKKAADQMWIARYLLLRLTEKYRIDIEFHCKPLGDTDWNGSGMHANFSTAYMREVGGKAYFESLMAQFDKNLMDHIAVYGPDNDKRLTGKHETAPWNKFSYGIADRGASIRVPHSFVQNDYKGYGEDRRP

SEQ ID NO: 7607 - protein, 209 aa, Schizosaccharomyces pombe
KKTFGIQMDNFFALYRRYLLHTVKGYECDWDSIRPLGPEDMIDYGDLPLCKNAGKYLNRLAVVKLNGGMGNALGVNYPKAMIEVRDNQSFLDLSIRQIEYLNRRYDVSVPFILMNSYDTNDETCKVLRKYAGCKIDISTFEQSRYPRVFVDSQLPVPKAAPSPIEEWYPPGHGDIFDALVHSGTIERLLAQGKDYLFVSNIDNLGASVD

SEQ ID NO: 7608 - protein, 276 aa, Bradyrhizobium japonicum
WGFDGSSTQQAEGHSSDCVLKPVAVFPDAARTNGVLVMCEVMMPDGKTPHASNKRATILDDAGAWFGFEQEYFFYKDGRPLGFPSSGYPAPQGPYYTGVGFSNVGDVARKIVEEHLDLCLAAGINHEGINAEVAKGQWEFQIFGKGSKKAADEMWMARYLMLRLTEKYGIDIEFHCKPLGDTDWNGSGMHANFSTEYMRTVGGKEYFEALMAAFDKNLMDHIAVYGPDNDKRLTGKHETAPWNKFSYGVADRGASIRVPHSFVNNGYKGYLEDRRP

SEQ ID NO: 7609 - protein, 461 aa, Zea mays
  misc_feature (60)..(60): Xaa can be any naturally occurring amino acid
  misc_feature (71)..(71): Xaa can be any naturally occurring amino acid
MASAAADPLLPGEGSGRRLGFLPSSIRLKTSVWSELGGAVGDLGTYIPIVLALSLASHLXDLGTTLIFTAXLYNFATGLLFGIPMPVQPMKSIAAVALSSAHLTVPQIMSAGLAVAAVLLFLGATGLMTCIYRLLPLPVVRGVQLSQGLSFAFTAVKYVRYVQDFSRSSSASTAVARPLLGLDGLVLALAALLFIILATGSGDDEDVSSDGMARRRRSCSRVPAALIVFALGLVLCFVRDPSILQGLRFGPSPLRLVGITWDDFKIGFWEGAVPQLPLSVLNSVIAVCKLSSDLFPERAELSPARVSVSVGLMNFVGCWFGAMPCCHGAGGLAGQYRFGGRSGASVVFLAIGKLALGLVFGNSFVTILGQFPIGILGVMLLFSGIELAMASRDMGTKEESFVMLICAGVSLTGSSAALGFISGIVLYLLLRLRDVDYQALAGRWGSDRRRTGNKVGDDEDA

SEQ ID NO: 7610 - protein, 276 aa, Rhizobium tropici
WGFDGSSTMQAEGRSSDCVLKPVAIYPDPARTNGALVMCEVMMPDGVTPHPSNSRATILDDEDAWFGFEQEYFFYQDGRPLGFPESGYPAPQGPYYTGVGYKNVGDVAREIVEEHLDLCLEAGINHEGINAEVAKGQWEFQIFGKGSKKAADQIWMARYLLLRLCEKYGIDIEFHCKPLGDTDWNGSGMHCNFSTKFMREVGGKAYFEALMAQFDKNLEAHISVYGPDNHLRLTGKHETAPWNKFSYGVADRGASIRVPHSFIKNDYRGYLEDRRP

SEQ ID NO: 7611 - protein, 284 aa, Senecio vulgaris
PKSQITPYRVVIIIRLVILGLFFHYRITNPVESSYGLWLTSVICEIWFAISWVLDQFPKWYPINRVTFPDELSARYEKEGEPSQLAAVDFFVSTVDPLKEPPLITANTLLSILAVDYPVDKVSCYVSDDGAAMLSFESLVETAEFARKWVPFCKKFSIEPRAPEFYFSQKIDYLKDKVQPSFVKERRAMKRDYEEYKVRVNALVAKALKTPEEGWTMQDGTPWPGNNTRDHPGMIQVFLGNSGAHDMEGNELPRLVYVSREKRPGYQHHKKAGAENALVRVSAV

SEQ ID NO: 7612 - protein, 276 aa, Rhizobium tropici
WGFDGSSTMQAEGRSSDCVLKPVAIYPDPARTNGALVMCEVMMPDGVTPHESNSRATILDDEDAWFGFEQEYFFYQDGRPLGFPESGYPAPQGPYYTGVGYKNVGDVAREIVEEHLDLCLEAGINHEGINAEVAKGQWEFQIFGKGSKKAADQIWMARYLLLRLCEKYGIDIEFHCKPLGDTDWNGSGMHCNFSTKFMREVGGKAYFEALMAQFDKNLDAHIAVYGPDNHLRLTGKHETAPWNKFSYGVADRGASIRVPHSFIKNDYKGYLEDRRP

SEQ ID NO: 7613 - protein, 321 aa, Brassica napus
VRLHALRQRQPGKHFSEYAARFYAAEVLLALEYLHMLGVVYRDLKPENVLVRDDGHIMLSDFDLSLRCTVSPTLIKTFDSDPSKRGAFCVQPSCMMEPTTSCFSPRSIFSNKSKKNNKTRSKTQTDVSRSHSGSLPELVAEPNTRSMSFVGTHEYLAPEIIKGEGHGSAVDWWTFGIFVHELLYGKTPFKGSGNRATLFNVVGEQLKFPESPATSYAGRDLVQALLVKDPKNRLGTKRGATEIKQHPFFEGVNWALIRCGTPPEVPRQMEVEPPPKYGPIDPVGFGSNSKRMMGPPPVSAASVGAGGDTKAGGKFLDFEFF

SEQ ID NO: 7614 - protein, 301 aa, Oryza sativa
MAANKLKFSPLLALFLLAGIAVTSRAGDIAVYWGQNGDEGSLADACNSGLYAYVMVAFLSTFGNGQTPVLNLAGHCEPSSGGCTGQSSDIQTCQSLGVKVILSIGGGAGSYGLSSTQDAQDVADYLWNNFLGGSSGSRPLGDAVLDGVDFDIETGNPAHYDELATFLSRYSAQGGGKKVILTAAPQCPYPDASLGPALQTGLFDSVWVQFYNNPPCQYANGDASNLVSAWNTWTGGVSAGSFYVGVPAAEAAAGSGYVAPGDLTSAVLPAVQGNAKYGGIMVWNRFYDVQNNFSNQVKSSV

SEQ ID NO: 7615 - protein, 276 aa, Rhizobium etli
WGFDGSSTMQAEGRSSDCVLKPVAIYPDPARTNGVLVMCEVMMPDGVTPHPSNARATILDDEDAWFGFEQEYFFYQNGRPLGFPEQGYPAPQGPYYTGVGYSNVGDVAREIVEEHLDLCLAAGINHEGINAEVAKGQWEFQIFGKGSKKAADQIWMARYLLQRLTEKYGIDIEYHCKPLGDTDWNGSGMHCNFSTKYMREVGGKAYFEALMAQFEKNLMDHINVYGPDNDKRLTGKHETAPWNKFSYGVADRGASIRVPHSFVKNDYKGYLEDRRP

SEQ ID NO: 7616 - protein, 284 aa, Senecio vulgaris
PKSQITPYRVVIIIRLVILGLFFHYRITNPVESSHGLWLASVICEIWFAISWVLDQFPKWYPINRVTFPDELSARYEKEGEPSQLAAVDFFVSTVDPLKEPPLITANTVLSILAVDYPVDKVSCYVSDDGAAMLSFESLVETAEFARKWVPFCKKFSIEPRAPEFYFSQKIDYLKDKVQPSFVKERRAMKRDYEEYRVRVNALVAKAQKTPEEGWTMQDGTPWPGNNTRDHPGMIQVFLGNSGAHDMEGNELPRLVYVSREKRPGYQHHKKAGAENALVRVSAV

SEQ ID NO: 7617 - protein, 365 aa, Oryza sativa Japonica Group; identical to SEQ ID NO: 864

SEQ ID NO: 7618 - protein, 276 aa, Bradyrhizobium sp. ICMP 14291
WGFDGSSTQQAEGHSSDCVLKPVAVFPDAARTNGVLVMCEVMMPDGKTPHASNKRATILDDAGAWFGFEQEYFFYKDGRPLGFPASGYPAPQGPYYTGVGFSNVGDVARKIVEEHLDLCLAAGINHEGINAEVAKGQWEFQIFGKGSKKAADEMWMARYLMLRLTEKYGIDIEFHCKPLGDTDWNGSGMHANFSTEYMRTVGGKEYFEALMAAFDKNLMDHIAVYGPDNDKRLTGKHETAPWNKFSYGVADRGASIRVPHSFANNGYKGYLEDRRP

SEQ ID NO: 7619 - protein, 132 aa, Bradyrhizobium sp. ICMP 14753
KGSKKAADEMWMARYLMLRLTEKYGIDIEFHCKPLGDTDWNGSGMHANFSTEYMRTVGGKEYFEALMAAFDKNLMDHIAVYGPDNDKRLTGKHETAPWNKFSYGVADRGASIRVPHSFVNNGYKGYLEDRRP

SEQ ID NO: 7620 - protein, 385 aa, Zea mays
PTRPRAAPLEGDEQQLRRRLEEAALLLRRIKGLVRWIVEEVAAGRSPSIVLHRACSYDIPVGTDVLSLLHKDYHTSRLNVLLRVLFVVQQLLQQNKHCSKRDIYYMYPSIFVEVAVVDRAINDICILFKCSRHNLNVVPVVKGLVMGWIRFMEGEKKVYCITSVNAAFSIPVDIEAIKDVVSVAHYILVVEKETVFQRLANDKFCERNRCIVITGRGYPDIPTRRFLRYLVELLHLPAYCLVDSDPYGFDILATYKFGSLQLAHDANLLRVPDIRWLGVFTSDFEEYCLPDCCLLRLSPEDRRKAEGILARCYLHREAPEWRSELEAMLQKGVKFEIEALSANSISFLSHEYIPQKIKQACIYKIGHSCIRPGCVIEYNLFLSDY

SEQ ID NO: 7621 - protein, 279 aa, Oryza sativa Indica Group
MGLLSLLLVVVSCLAAPATADWYGPLAVYWGRHKDYEGSLREACDTGRYNTVIITFYSVFGYVKGRYGLDISGHPVAAVGADIKHCQSKGVQVLLSIGGQGGGYSLPSSQSAADVADNLWNAYLGGRRAGVPRPFGDAAVDGIDFFIDQGGADHYDELARQLHGRGVALTATVRCSYPDSRLQKALATGLLGRIHVRIFGDNQCTMSPLDAWEKWAAAYPRSKVWLALVASWEQDEVGYMFQKDLYYGVLQFILNKPNYGGIAIWDRYYDKKANYSGEG

SEQ ID NO: 7622 - protein, 276 aa, Bradyrhizobium sp. ICMP 14752
WGFDGSSTQQAEGHSSDCVLKPVAVFPDAARTNGVLVMCEVMMPDGKTPHASNKRATILDDAGAWFGFEQEYFFYKDGRPLGFPASGYPAPQGPYYTGVGFSNVGDVARKIVEEHLDLCLAAGINHEGINAEVAKGQWEFQIFGKGSKKAADEMWMARYLMLRLTEKYGIDIEFHCKPLGDTDWNGSGMHANFSTEYMRTVGGKEYFEALMAAFDKNLMDHIAVYGPDNDKRLTGKHETAPWNKFSYGVADRGASIRVPHSFVNNGYKGYLEDRRP

SEQ ID NO: 7623 - protein, 517 aa, Candida glabrata CBS 138
MIQILLPLLFILSTVFAFDINSKTNVAVYWGQNSAGSQKSLASYCQNTEADIFLLSFMNSFPAIGLNFADACTTTFPDGLLQCSQIAEDIKTCQSLGKKVLLSMGGASGAYGFADDAQAEAFATTLWNTFGEGSDISVERPFGQSIVDGFDFDIENNNGKGYAALVSKLRQLFSNGSKQYYISAAPQCPYPDASVGDLLANADVDFAFIQFYNNYCNVEAQFNWDDWKNFAINTSPNKNIKLYLGLPGAPSAAGSGYISNLDNLSKVIKEISSLANFGGISLWDASQATSNVIDGADYLSQMKNILKSAAGSTETPTTSSSYSMPSNLITNTGEQSSSVLVSSVERTTTTLEPTSIISSSSFSDSAPTPTNSHITTTLQPNTNTPPAAAQDSSANVQVSVTPSTTTTTPDSPSNHLNDVSPTPSTPAPSSPANPSPDTPAHTIAKQLNAQYAAGQFNGKSSCQDGELSCSADGKFAMCAHGSWVEMACAAGTTCYAYDSGNSVFTQCNYVDLKASFV

SEQ ID NO: 7624 - protein, 1080 aa, Bambusa oldhamii
MDGGGGDAAKSGKHGGGQVCQICGDSVGTTADGELFTACDVCGFPVCRPCYEYERKDGTQACPQCKTKYKRHKGSPPIRGEESEDVDADDASDFNYPAPGNQDHKHKIAERMLTWRMNSGASDDVGHTKYDSGEIGHPKYDSGEIPRGYIPSLTHSQISGEIPGASPDHLMSPVGNIGKRGHPFPYVNHSPNPSREFSGSLGNVAWKERVDGWKMKQDKGAIPMTNGTSIAPSEGRGIGDIDASTDYNMEDALLNDETRQPLSRKVPIPSSRINPYRMVIVLRLIVLCIFLHYRITNPVRNAYPLWLLSVICEIWFALSWILDQFPKWSPINRETYLDRLALRYDQEGEPSQLAAVDIFVSTVDPMKEPPLVTANTVLSILAVDYPVDKVSCYVSDDGAAMLTFDALAETSEFARKWVPFCKKYSIEPRAPEWYFAQKIDYLKDKVLPSFVKDRRAMKREYEEFKVRVNGLVAKAQKVPEEGWIMQDGTPWPGNNTRDHPGMIQVFLGHSGGLDTEGNELPRLVYVSREKRPGFQHHKKAGAMNALVRVSAVLTNGQYLLNLDCDHYINNSKALREAMCFLMDPNLGRSVCYVQFPQRFDGIDRNDRYANRNTVFFDINLRGLDGIQGPVYVGTGCVFNRTALYGYEPPIKKKKLGFFSWLCGGKKRTTKSKKKSSEKKSHKHVDSSVPVFNLEDIEEGVEGAGFDDEKSLLMSQMSLEKRFGQSSVFVASTLMEYGGVPQSATPESLLKEAIHVISCGYEDKSDWGTEIGWIYGSVTEDILTGFKMHARGWRSIYCMPKRPAFKGSAPINLSDRLNQVLRWALGSVEILFSRHCPIWYGYGGRLKFLERFAYINTTIYPLTSLPLLLYCILPAICLLTGKFIIPEISNFASIWFISLFLSIFATGILEMRWSGVGIDEWWRNEQFWVIGGISAHLFAVFQGLLKVLAGIDTSFTVTSKASDEEGDFTELYMFKWTTLLIPPTTILIINLVGVVAGISYAINSGYQSWGPLFGKLFFAFWVIVHLYPFLKGLMGRQNRTPTIVVVWAILLASIFSLLWVRIDPFTTRVTGPDTQKCGINC

SEQ ID NO: 7625 - protein, 276 aa, Bradyrhizobium sp. ICMP 12835
WGFDGSSTQQAEGHSSDCVLKPVAVFPDGARTNGVLVMCEVMMPDGKTAHSTNKRATILDDAGAWFGFEQEYFFYKDGRPLGFPASGYPAPQGPYYTGVGFSNVGDVARKIVEEHLDLCLAAGINHEGINAEVAKGQWEFQIFGKGSKKAADEMWMARYLMLRLTEKYGIDIEFHCKPLGDTDWNGSGMHANFSTEYMRSIGGKEYFEALMAAFDKNLMDHIAVYGPDNDKRLTGKHETAPWNKFSYGIADRGASIRVPHSFVNNGYKGYLEDRRP

SEQ ID NO: 7626 - protein, 301 aa, Oryza sativa Indica Group
MARHQLCLLTTTMLVTVVVFLPCVASATGKTGQIAVFWGRNKTEGSLKEACDTGIYTTVIISFFNVFGHGRYWTDLSGHDVSRVGADVKHCQSKNIPVLLSVGGDGYQYSLPTPNSAKDVADHLWHAYLGGGRRGVFRPFGDAVLDGVDLYIDHGGPANYDVLVRRLAGYRGKPVLLTTTPRCVYPDANAAAALGTGLVRRIHPRFYGDAACTNKTDGEGRRSLFDWEDWDAWTSRFPASQVYVGLPAEETAADWINPESLYYGVMQRAQTASNYGGAMLWDRGADKAYDNYYGRALKDFV

SEQ ID NO: 7627 - protein, 205 aa, Triticum aestivum
  misc_feature (102)..(102): Xaa can be any naturally occurring amino acid
  misc_feature (111)..(111): Xaa can be any naturally occurring amino acid
  misc_feature (136)..(136): Xaa can be any naturally occurring amino acid
  misc_feature (144)..(144): Xaa can be any naturally occurring amino acid
MEATAPSVGAGANGSLAAAARAHVGPPTNPMATALLTDQYQFSMAYAYWKAGQHADHAVFDLYFRKNPFGGEFTVFAGLEKCIKFIANFKFTEDEISFLQSXVMPMCEDAXYLAFFDYLRGNLICSDVEVYSIPEXGSVVFPKXVPLMRVEGPSCLWFQLLETPFGKTPSNLGPPLGNHQNGWAGTGNRWPGERSKGSLRGNFGF

SEQ ID NO: 7628 - protein, 458 aa, Pyrus pyrifolia
MATGVIDKLKSHVATLSQISENEKNGFINLVARSVSGEAQHVDWSKIETPTDEVVVPHAGLEPAPKDTAEIKALLDKLVVLKLNGGLGTTMGCTGPKSVIEVRDGLTFLDLIVMQIEHLNDKFGSSVPLLLMNSFNTHDDTQKIVEKYSKANVQIHTFNQSQYPRLVVDDFTPLPSKGQTGKDGWYPPGHGDVFPSLKNSGKLDLLLSQGREYVFISNSDNLGAIVDLKILHHLIKNKNEYIMEVTPKTLADVKGGILISYEGKVQLLEIAQVPEEHVDEFKSIEKFKIFNTNNLWVNLNAIKRLVDADALKMEIIPNPKEVNGVKVLQLETAAGAAIKFFDHAIGINVPRARFLPVKATSDLLLVKSDLYNVRDGFVIRNKLRRDPQNPVIQLGPEFKKVDDFLSRFKSIPSLLECDGLRVDGDIWFGSGIKLKGNVHCSVSSEEMLNIPDNITLRE

SEQ ID NO: 7629 - protein, 276 aa, Bradyrhizobium sp. ICMP 14533
WGFDGSSTQQAEGHSSDCVLKPVAVFPDGARTNGVLVMCEVMMPDGKTPHASNKRATILDDSGAWFGFEQEYFFYKDGRPLGFPASGYPAPQGPYYTGVGFSNVGDVARKIVEEHLDLCLAAGINHEGINAEVAKGQWEFQIFGKGSKKAADEMWMARYLMLRLTEKYGIDIEFHCKPLGDTDWNGSGMHANFSTEYMRSIGGKEYFEALMAAFDKNLMDHIAVYGPDNDKRLTGKHETAPWNKFSYGIADRGASIRVPHSFVNNGYKGYLEDRRP

SEQ ID NO: 7630 - protein, 350 aa, Triticum aestivum
  misc_feature (257)..(257): Xaa can be any naturally occurring amino acid
MAAPRRSGARLAAFLALLLHLAAVIEGKSFYDVLQVPKGASEDQIKRSYRKLALKYHPDKNPDNEEATKRFAEINNAYEVLTDQEKRKIYDRYGEEGLKQFQGGRGGGGGGMNMQDIFSSFFGGGGGGMEEEEEQIIKGDDVIVELDASLEDLYMGGSLKVWREKNIIKPAPGKRRCNCRNEVYHRQIGPGMYQQMTEQVCDQCPNVKYVREGDFLTVDIEKGMQDGQEVSFFEEGEPKIDGEPGDLKFRIRTAPHXAFRREGNDLHATVTISLLQALVGFEKNLKHLDNHLVQIGSQGVTKPKEVRKFKGEGMPLHQSNKKGDLYVTFEVLFPKTLTDDQKAKLKEVLA

SEQ ID NO: 7631 - protein, 218 aa, Zea mays
MVKLTMIARVTDGLPLSEGLDDSRDLKDADFYKQQAKLLFKNLSRGQHEASRMSIETGPYLFHYIIEGRVCYLTLCDRSYPKKLAFQYLEDLKNEFEKVNGSQIETAARPYAFIKFDAFIQKTKKLYLDTRTQRNLAKLNDELYEVHQIMTRNVQEVLGVGEKLDQVSEMSSRLTSDTRIYAEKAKDLNRQALIRKYAPVAIVIGIVVMLFWVKNKIW

SEQ ID NO: 7632 - protein, 399 aa, Ustilago maydis 521
MAVPFIKNPACVVNVACLALARQVRSTGLAIVAPLLTASPFVLLCLTSACLKTGLVNPYFELDQRGKVQAEYIWIDGDGEIRGKTTTLDGPVKSLKDLKEWNFDGSSTNQAPGGNSDVYLRPVAYYPDPFRRGDNVIVLAECYNNDGTPNKSNYRYQCNKIMTQIADEKPWFGLEQEYSLFDMDDRPYGWPKGGFPGPQGPYYCGAGAGKVFARDLVEAHYRACLYSGVNISGINAEVMPAQWEFQVGPCEGIEMGDHLTLARYLLIRVAEEWGVKVSFHPKAVPGDWNGAGCHTNYSTASMRKEGGMKAIEAAIEKLSKRHNEHIAVYGADNDKRLTGKHETGHIGDFSSGVANRGASIRIPRHVAAQGYGYLEDRRPASNCDPYLVTGIVAETTLLL

SEQ ID NO: 7633 - protein, 218 aa, Brassica napus
MVKMTLIARVTDGLPLAEGLDDGRDLPDSDMYKQQVKSLFKNLSRGHNEASRMSVETGPYVFHYIIEGRVCYLTMCDRSYPKKLAFQYLEDLKNEFERVNGPNIETAARPYAFIKFDTFIQKTKKLYQDTRTQRNIAKLNDELYEVHQIMTRNVQEVLGVGEKLDQVSEMSSRLTSESRIYADKAKDLNRQALIRKWAPVAIVLGVVFLLFWVKNKLW

SEQ ID NO: 7634 - protein, 467 aa, Musa acuminata
MADAKIAKLQSAVAELNQISENEKSGFISLVSRYLSGEAEQIEWSKIQTPTDEVVVPYDTLSPPPEDLEATKKLLDKLAVLKLNGGLGTTMGCTGPKSVIEVRNGFTFLDLIVIQIESLNKKYGCNVPLLLMNSFNTHDDTQKIVEKYANSNIEIHTFNQSQYPRLVMEDFQPLPSKGHAGKDGWYPPGHGDVFPSLMNSGKLDALLSQGKEYVFIANSDNLGAIVDIKILNHLINNQNEYCMEVTPKTLADVKGGTLISYEGRVQLLEIAQVPDAHVNEFKSIEKFKIFNTNNLWVNLKAIKRLVEADALKMEIIPNPKEVDGVKVLQLETAAGAAIRFFDHAIGINVPRSRFLPVKATSDLLLVQSDLYMLVDGFVIRNKARTNPSNPSIELGPEFKKVANFLSRFKSIPSIVELDSLKVSGDVWFGEGVVLKGNVSIAAKSGVKLEISDGAVLENKVINGPEDI

SEQ ID NO: 7635 - protein, 276 aa, Rhizobium leguminosarum bv. viciae
WGFDGSSTQQAEGRSSDCVLKPVAIYPDPARTNGALVMCEVMMPDGVTPHASNARATILDDEDAWFGFEQEYFFYQNGRPLGFPEQGYPAPQGPYYTGVGYSNVGDVAREIVEEHLDLCLAAGINHEGINAEVAKGQWEFQIFGKGSKKAADQIWMARYLLQRLTEKYGIDIEYHCKPLGDTDWNGSGMHCNFSTKYMREIGGKAYFEALMAQFEKNLMDHINVYGPDNDKRLTGKHETAPWNKFSYGVADRGASIRVPHSFVKNDYKGYLEDRRP

SEQ ID NO: 7636 - protein, 276 aa, Rhizobium galegae
WGFDGSSTMQAEGRSSDCVLKPVALYPDPARTNGALVMCEVMMPDGVTPHATNARATILDDEDAWFGFEQEYFFYQNGRPLGFPEQGYPAPQGPYYTGVGYSNVGDVAREIVEEHLDLCLEAGINHEGINAEVAKGQWEFQVFGKGSKKAADQIWMARYLLQRLTEKYGIDIEYHCKPLGDTDWNGSGMHCNFSTKYMREVGGKDYFEALMAAFDKNLMDHIAVYGPDNDKRLTGKHETAPWNKFSYGVADRGASIRVPHSFVKNDYKGYLEDRRP

SEQ ID NO: 7637 - protein, 284 aa, Euryops virgineus
PKSQITPYRVVIIIRLVILGLFFHYRITNPVESSYGLWLTSVICEIWFATSWVLDQFPKWYPINRVTFPDELSARYEKEGEPSQLAAVDFFVSTVDPLKEPPLITANTVLSILAVDYPVDKVSCYVSDDGAAMLSFESLVETAEFARKWVPVCKKFSIEPRAPEFYFSQKIDYLKDKVQPSFVKERRAMKRDYEEYKVRVNALVAKALKTPEEGWTMQDGTPWPGNNTRDHPGMIQVFLGNSGAHDMEGNELPRLVYVSREKRPGYQHHKKAGAESALVRVSAV

SEQ ID NO: 7638 - protein, 276 aa, Borrelia garinii PBi
MAKDYYNILEIQKNASNEEIKKAYKKLAIKYHPDKNKGNKIAEEKFKEINEAYEILSSPDKKRNYDALGSTNFNGNNDHFEREFNGSRFSNFEDLDFFSKIFTGSSRKTADKEITLNISLYDAYMGSKKTILINNKKVEVIIPKGTLETTKIKINNKGPINPISGTKEILIVKFNISSYKKFKLNGKTLETTIEVYPWEIALGCEKLFETIEGKKIKLKIPSDAQNGEILNLKELGMPIIGSNSKRDLKVTLIVKIPKIINNEVKAIYERLKEIYD

SEQ ID NO: 7639 - protein, 276 aa, Mesorhizobium huakuii
WGFDGSSTMQAEGRSSDCVLKPVALYPDPARTNGILVMCEVMMPDGVTPHESNSRATILDDEDAWFGFEQEYFFYKDGRPLGFPESGYPAPQGPYYTGVGYKNVGDVARKIVEEHLDQCLAAGINHEGINAEVAKGQWEFQIFGKGSKKAADQIWMARYLLLRLTETYGIDIEFHCKPLGDTDWNGSGMHCNFSTKFMREVGGKAYFEALMAQFDKNLMDHIAVYGPDNDKRLTGKHETAPWNKFSYGVADRGASIRVPHSFVKNDYKGYLEDRRP

SEQ ID NO: 7640 - protein, 526 aa, Schizosaccharomyces pombe
MARETEFNDKSPSSTDDGMSQSHFSDKLKNLFHFRRNRAATVSTSVRNDQRDNDSDDSTFDINVNQLNELDLNDSSDQLDSRPSLRRVSSAPDSHKGVEAPPPRPLINMSNIRKAQVKILKNPGNYIFGRTEYGKRTYSGNSTKISRVEVTPHSFEKIRLLGQGDVGKVYLVRQKSNHRLFAMKILNKREMIKRHKVNRVLAEQEILTKSKHPFIVTLYHSFQSRDYLYLCMEYCAGGEFFRALHSLPKHILPEKDACFYAAEVTAALEYLHLMGFIYRDLKPENILLHQSGHIMLSDFDLSKPISIVTHPTVVLPKHSTFSQEKPALDTNSYFSNFRTNSFVGTEEYIAPEVIRSCGHTVAVDWWTLGIFIYEILYGTTPFKGKNRHATFSNILYSDVSFPEYHGAPNVSSTCKSLIRRLLVKDESKRCGSVAGASDIKQHPFFRHIQWALLRSMKPPIIPKIEDGMEAVEPSDNDNEEEDFLNSQYLISANLPAVDMHSSTPVNEQSNPFDSFSSVTLHHAGDE

SEQ ID NO: 7641 - protein, 484 aa, Oryza sativa Japonica Group
MAVTADVKLEGLRAATDKLDQISENEKSGFISLVSRYLSGEAEQIEWSKIQTPTDEVVVPYDTLSAAPEDLNETKKLLDKLVVLKLNGGLGTTMGCTGPKSVIEVRNGFTFLDLIVIQIESLNKKYGCNVPLLLMNSFNTHDDTQKIVEKYSNSNIEIHTFNQSQYPRIVTEDFLPLPSKGKTGKDGWYPPGHGDVFPSLNNSGKLDTLLAQGKEYVFVANSDNLGAIVDIKFESLTITEILNHLIHNQNEYCMEVTPKTLADVKGGTLISYEGRVQLLEIAQVPDEHVNEFKSIEKFKIFNTNNLWVNLKAIKRLVEAEALKMEIIPNPKEVDGVKVLQLETAAGAAIRFFEKAIGINVPRSRFLPVKATSDLLLVQSDLYTLVDGFVIRNPARTNPSNPSIELGPEFKKVANFLARFKSIPSIVELDTLKVSGDVWFGSGVTLKGKVTITAKSGKLEIPDGAVLENKLGARSLLVILFRVYY

SEQ ID NO: 7642 - protein, 276 aa, Sinorhizobium saheli
WGFDGSSTNQAEGRSSDCVLKPVAVYPDPVRTNGVLVMCEVMMPDGKTPHPSNSRATILDDEGAWFGFEQEYFFYKDGRPLGFPEQGYPAPQGPYYTGVGYKNVGNIARQIVEEHLDICLAAGINHEGINAEVAKGQWEFQVFGKGSKKAADEVWMARYLLQRLTEKYGIDIEWHCKPLGDTDWNGSGMHCNFSTAYMREVGGKDYFEALMAAFDKNLHEHIAVYGPDNHLRLTGKHETAPWNKFSYGVADRGASIRVPHSFVNNGYRGYLEDRRP

SEQ ID NO: 7643 - protein, 284 aa, Petasites fragrans
PKSQITPYRVVIIIRLVILGLFFHYRITNPVESSYGLWLTSVICEIWFAISWVLDQFPKWYPINRVTFTDELSARYEKEGEPSQLAAVDFFVSAVDPLKEPPLITANTVLSILAVDYPVDKVFCYVSDDGAAMLSFESLVETAEFARKWVPFCKKFSIEPRAPEFYFSQKIDYLKDKVQPSFVKERRAMKRDYEEYKVRVNALVAKAQKTPEEGWTMQDGTPWPGNNTRDHPGMIQVFLGNSGAHDMEGNELPRLVYVSREKRPGYQHHKKAGAENALVRVSAV

SEQ ID NO: 7644 - protein, 276 aa, Sinorhizobium terangae
WGFDGSSTMQAEGRSSDCVLKPVAVYPDPVRTNGVLVMCEVMMPDGKTPHPSNSRATILDDEGAWFGFEQEYFFYKNGRPLGFPEQGYPAPQGPYYTGVGYKNVGDIARQIVEDHLDICLAAGINHEGINAEVAKGQWEFQIFGKGSKKAADEVWLARYLLQRLTEKYGIDIEWHCKPLGDTDWNGSGMHCNFSTAYMREVGGKEYFEALMAAFEKNLHEHIAVYGPDNHMRLTGKHETAPWNKFSYGVADRGASIRVPHSFVNNGYRGYLEDRRP

SEQ ID NO: 7645 - protein, 276 aa, Sinorhizobium fredii
WGFDGSSTNQAEGRSSDCVLKPVAVYPDPVRTNGVLVMCEVMMPDGKTPHPSNSRATILDDEGAWFGFEQEYFFYKNGRPLGFPEQGYPAPQGPYYTGVGYSNVGDVARKIVEEHLDICLAAGINHEGINAEVAKGQWEFQVFGKGSKKAADEVWMARYLLQRLTEKYGIDVEYHCKPLGDTDWNGSGMHCNFSTAYMREVGGKDYFEALMAAFDKNLQEHIDVYGPDNHLRLTGKHETAPWNKFSYGVADRGASIRVPHSFVNNGYKGYLEDRRP

SEQ ID NO: 7646 - protein, 284 aa, Senecio vulgaris
PKSQITPYRVVIIIRLVILGLFFHYRITNPVESSYGLWLTSVICEIWFAISWVLDQFPKWYPINRVTFTDELSARYEKEGEPSQLAAVDFFVSTVDPLKEPPLITANTVLSILAVDYPVDKVSCYVSDDGAAMLSFESLVETAEFARKWVPFCKKFSIEPRAPEFYFSQKIDYLKDKVQPSFVKERRAMKRDYEEYKVRVNALVAKAQKTPEEGWTMQDGTPWPGNNTRDHPGMIQVFLGNSGAHDMEGNELPRLVYVSREKRPGYQHHKKAGAENALVRVSAV

SEQ ID NO: 7647 - protein, 373 aa, Bordetella bronchiseptica RB50
MAKRDYYEVLGVAKNASDEDLKKAYRKLAMKYHPDRNPDSKEAEEKFKEAKEAYEVLGDEQKRAAYDRYGHAGVDPNAAGMGGGMGGGFADAFGDIFGEIFGAGRRGGGGPQVYRGADLKYALEITLEQAASGFDTEIRVPSWENCDTCHGSGAKAGTSPKTCRTCGGSGAVRMQQGFFSVQQTCPTCHGTGKEITDPCPSCDGVGRTRRNKTLQVKIPAGIDDGMRIRSSGNGEPGINGGPPGDLYVEIHIKQHKIFQRDGDDLHCELTIPFTTAALGGELQVPTLGGKAEISIPEGTQSGKTFRLRAKGIRGVRGSYPGDLYCHVVVETPVRLSDEQKAILRQFEASLNDGGDRHSPQSKSWTDRVKEFFS

SEQ ID NO: 7648 - protein, 276 aa, Sinorhizobium medicae
WGFDGSSTLQAEGRSSDCVLKPVAVYPDPVRTNGALVMCEVMMPDGKTPHASNTRATVLDDEGAWFGFEQEYFFYKNGRPLGFPEQGYPAPQGPYYTGVGYKNVGDVARQIVEEHLDICLAAGINHEGINAEVAKGQWEFQIFGKGSKKAADEVWLARYLLLRLTEKYGIDVEFHCKPLGDTDWNGSGMHANFSTAYLREVGGQDYFEALMAAFEKNLHDHINVYGPDNHLRLTGKHETAPWDKFSYGVADRGASIRVPHSFINNGYQGYLEDRRP

SEQ ID NO: 7649 - protein, 276 aa, Sinorhizobium meliloti
WGFDGSSTQQAEGRSSDCVLKPVAVYPDPVRTNGALVMCEVMMPDGKTPHPSNTRATVLDDESAWFGFEQEYFFYKNGRPLGFPEQGYPAPQGPYYTGVGYKNVGDIARQIVEEHLDICLAAGINHEGINAEVAKGQWEFQVFGKGSKKAADEVWLARYLLLRLTEKYGIDVEFHCKPLGDTDWNGSGMHANFSTAYLREVGGKDYFEALMAAFEKNLHDHINVYGPDNHLRLTGKHETAPWDKFSYGVADRGASIRVPHSFVNNGYRGYLEDRRP

SEQ ID NO: 7650 - protein, 357 aa, Coccidioides immitis RS
MAPKTHISNAENLKKYMELDQRGKIMAEYIWIDACGGVRSKTKTVNKVVKSADELPEWNFDGSSTGQAPGDNSDVYLRPVAIFPDPFRRGENILVLCETWDSDGSPNKYNYRHEAARLMRANAHEHFWFGLEQEYTLLGPDGWPYGWPKGGFPGAQGPYYCGVGTGKVHCRDIVEAHYKACLYAGINISGINAEVMPAQWEYQVGPCEGIDLGDQLWMSRFLLNRVAEEFGAIISFAPKPIPGDWNGAGLHTNVSTEAMRNEGGMKVIEAAMKKLETRHFEHIAVYGEGNEDRLTGRHETGSIDKFSWGVADRGGSIRIPRQVAKDGKGYFEDRRPASNADPYQITGIIVETLCGAS

SEQ ID NO: 7651 - protein, 305 aa, Zea mays; identical to SEQ ID NO: 1594

SEQ ID NO: 7652 - protein, 284 aa, Senecio vulgaris
PKSQITPYRVVIIIRLVILGLFFHYRITNPVESSYGLWLTSVICEIWFAISWVLDQFPKWYPINRVTFTDELSARYEKEGEPSQLAAVDFFVSTVDPLKEPPLITANTVLSILAVDYPVDKVSCYVSDDGAAMLSFESLVETAEFARKWVPFCKKFSIEPRAPEFYFSQKIDYLKDKVQPSFVKERRAMKRDYEEYKVRVNALVAKAQKTPEEGWTMQDGTPWPGNNTRDHPGMIQAFLGNSGAHDMEGNELPRLVYVSREKRPGYRHHKKAGAENALVRVSAV

SEQ ID NO: 7653 - protein, 432 aa, Glycine max
MAQILAPSTQWQMRISKSSPNASPITSNMWSSLLWKQNKKVSPTSSAKFRVMAIKSDNSIINRLEGLLNLDITPFTDKIIAEYIWIGGTGIDVRSKSRTISKPVEHPSELPKWNYDGSSTGQAPGDDSEVILYPQAIFKDPFRGGNNILVICDSYTPQGEPIPTNKRHRAAEIFSNPKVQAEVPWYGIEQEYTLLQTNVKWPLGWPVGGYPGPQGPYYCSAGADKSFGRDISDAHYKACLYAGINISGTIGEVMPGQWEYQVGPSVGIEAGDHIWASRYILERITEQAGVVLSLDPKPIEGDWNGAGCHTNYSTKSMREDGGFEVIKKAILNLSLRHKDHISAYGEGNERRLTGKHETASINTFSWGVANRGCSIRVGRDTEKNGKGYLEDRRPTSNMDPYVATSLLAETTLLWEPTLEAEALAAQKLALKV

SEQ ID NO: 7654 - protein, 311 aa, Triticum aestivum
  misc_feature (108)..(108): Xaa can be any naturally occurring amino acid
  misc_feature (246)..(246): Xaa can be any naturally occurring amino acid
MAFRRPLALHHECMLVIAFVLVSCLAGAATAKQTGQLTVFWGRNAGEGTLREACDTGLYSTVVISFYSVFGHGRYWGDLSGHPLAGVGADIKHCQSRNILVLLSIGGXGNGYSLPSSASAAAVADNLWNAHLGGRRNGVYRPFGDAAVDGIDFYIDQGAPDHYDELASRLDGYNRFYRGRKGVRLTATPRCGLPDRRLGAALRTGLFERIHVRFYGNDTCSLGKGGTYGVVEQWEKWTAAFPRTQXVYLGLAPAESGVPEGAQGTVAVYLKYLYYDLLPKVQKANNYGGVMVWDRFTDKKTRWSSVVSGWA

SEQ ID NO: 7655 - protein, 284 aa, Senecio vulgaris
PKSQITPYRVVIIIRLVILGLFFHYRITNPVESSYGLWLTSVICEIWFAISWVLDQFPKWYPINRVTLTDELSARYEKEGEPSQLAAVDFFVSTVDPLKEPPLITANTVLSILAVDYPVDKVSCYVSDDGAAMLSFESLVETAEFARKWVPFCKKFSIEPRAPEFYFSQKIDYLKDKVQPSFVKERRAMKRDYEEYKVRVNALVAKAQKTPEEGWTMQDGTPWPGNNTRDHPGMIQVFLGNSGAHDMEGNELPRLVYVSREKRPGYQHHKKAGAENALVRVSAV

SEQ ID NO: 7656 - protein, 363 aa, Physcomitrella patens subsp. patens
RKKNGGRACVFMAADYYKTLGVSKTATKSEIKSAYRKLARKYHPDVNKEEAAEEKFKEISNAYEVLSDDEKRPLYDQYGEAAFKGGASSGGAGAYGGNPFDLFESFFGGGMGGMGGMGGMGGMGGMGFNTGQRSRSMQGDDIRYDMTLEFKEAIFGTERTFDATHLETCSSCSGSGAKSGSSRKSCQTCGGIGQVIQSSQTPFGSFSQVSTCPTCNGEGEVISEYCRKCGGDGRLRVKKNIKVKIPVGVNNGSTLRVRGEGDAGQRGGPPGDLYVFLSVNEMPGIVREGTNLFSNITIDYTDAILGTVAQVQTVEGEKELEVPAGTQPDETLVLPKLGAPKLNKPTSRGDHYFTVKVKIPTQL

SEQ ID NO: 7657 - protein, 259 aa, Zea mays
NADNLGAVVDLRILQHMVDTQAEYIMELTDKTKADVKGGTIIDYEGKARLLEIAQVPKEHVNEFKSIKKFKYFNTNNIWMSLRAIKRVVEENELEMEIIANEKSIPADKKGEADQAIYQLETAVGAAIRHFKNGHGVNVPRRRFLPVKTCSDLMLVKSDLYRLEHGQLVMDPNRFGGVPVIKLGSDFKKVSDFQKHIPSIPRIVELDHLTITGAVNLGRNVQLKGTVIIVATEGSTIDIPPGSVLENCVVQGSLRILEH

SEQ ID NO: 7658 - protein, 444 aa, Physcomitrella patens subsp. patens; identical to SEQ ID NO: 3824

SEQ ID NO: 7659 - protein, 170 aa, Oryza sativa
MAGKNGSLYAVLGVASDCSDADLRTAYRKLAMKWHPDKCGAAGSSAGGGAEAAKVRFQKIQGAYAVLSDPNKRILYDVGAYDSDGDDDGAGEILGDILEAMNKTGPTENGKNESFEDLQRQFEELFLRPPAPAPPTSSSFRSACSRRPSFVLIIKLIDQEENDSDNDMTH

SEQ ID NO: 7660 - protein, 225 aa, Helianthus annuus
NIHGRGWRSAITSTDPLAFLGCSATTYPSSLTQQKRWFTGLFEILFTDKNPLLLTIKGNIWFRQALAYFYCCLWAVRSVPELCYASLPVYCIIKDSHFLPKVNERAILIFMGIFVIYNLYAYWECKRIGISLRMWWNLQRMERVNTMTGRLFAFVSVILKLIGLSNTVFEVTQKEHMSNDDDDNDNVSVGRFTYDNSPMIMPGVVILLINIMALVNGMLRLYKVD

SEQ ID NO: 7661 - protein, 224 aa, Helianthus annuus
NIHGRGWRSAITSPDPLAFLGCSATTYPSSLTQQKRWFTGLFEILFTDKNPLLLTIKGNIWFRQALAYFYCCLWAVRSVPELCYASLPAYCIIKDSHFLPKVNERAILIFMGIFVIYTLYAYWECKRIGISLRMWWNLQRMERVNTLTARLFAFVSVMLKLIGLSNTVFEVTQKEHTSNDDDNDNVSVGRFTYDNSPMIMPGVVILLINIMALVNGMLRLYKVD

SEQ ID NO: 7662 - protein, 276 aa, Bradyrhizobium sp. ICMP 14754
WGFDGSSTQQAEGHSSDCVLKPVAVFPDGARTNGVLVMCEVMMPDGKTPHASNKRATILDDSGAWFGFEQEYFFYKDGRPLGFPASGYPAPQGPYYTGVGFSNVGDVARKIVEEHLDLCLAAGINHEGINAEVAKGQWEFQIFGKGSKKAADEMWMARYLMLRLTEKYGIDIEFHCKPLGDTDWNGSGMHANFSTEYMRTIGGKEYFEALMAAFDKNLMDHIAVYGPDNDKRLTGKHETAPWNKFSYGIADRGASIRVPHSFVNNGYKGYLEDRRP

SEQ ID NO: 7663 - protein, 411 aa, Glycine max
MPGHRSKSEKHDGGGGEKQLRRDPYEVLGVSRNSTDQEIKTAYRKMALKYHPDKNANDPKAADMFKEVTFSYNILSDPDKRRQYDSAGFEAVESDNQELELDLSSLGAVNTMFAALFSKLGVPIKTTVSATVLEEALNGLVTIRPLPLGHNIAKRVEKQCAHFYSVTITEEEAQAGFVCRVQSPDKSKFKLLYFDQEDNSGLSLALQEDSAKTGKVTSAGMYFLGFPVYRLDQTMNSIAAAKDPDTSFFRKLDAFQPCELTELKAGTHVFAVYGDNFFKSANYTIEALCAAPFSEEKENLRNIEAQILSKRAEISKFEAEYREVLAQFSDMTNRYAHEMQAIDELLKNRNEIQASYTSAPLKRTTSRSRSKNSSKEAKEDGQAKEKRSTRERPKKKKWYNLHLRVDKRKAC

SEQ ID NO: 7664 - protein, 276 aa, Bradyrhizobium sp. ICMP 14755
WGFDGSSTQQAEGHSSDCVLKPVAVFPDGARTNGVLVMCEVMMPDGKTPHASNKRATILDDSGAWFGFEQEYFFYKDGRPLGFPTSGYPAPQGPYYTGVGFSNVGDVARKIVEEHLDLCLAAGINHEGINAEVAKGQWEFQIFGKGSKKAADEMWMARYLMLRLTEKYGIDIEFHCKPLGDTDWNGSGMHANFSTEYMRTVGGKEYFEALMAAFDKNLMDHIAVYGPDNDKRLTGKHETAPWNKFSYGVADRGASIRVPHSFVNNGYKGYLEDRRP

SEQ ID NO: 7665 - protein, 860 aa, Zygosaccharomyces rouxii
MDEDLYVRPGPVMDKERTKSFVKRFPRSLRRKDGAGSVSNGSTSSIGTNQNTEIGGISDNSNPSDRANTPISDNGGNDESSHTSDPSQSSQAKQQQNQTAPSSKLTKLKHIFQTNSNNGNGTSAAASGGSETNNSTASLTPPSSSTAPASNSNSPRRRSPSTPGNSNSNVNSSHSHGPGLNDKVKSKTDPNKQSTTDHNPFNGDDSSSSQPGKNDKDAPTLPDTQSSQELDNSFNSQWTKFTEYPAVPSSSSTAGSGVSTSKDHRSLSNQSLNEIKENEEVHEFYTKDGIRASSPSKAASSPPESFHSPTNLTPQDTFLPFPAIVVGVDNEYEDESSSRITRSPDRSTHRAHRGSSPPIPLQQDKLSSQQKEQREQSDNILQTKPILRRASSVPNVLKSKRLVSENGDGNNATVQASIGSSSPSKASPQVSSDYEEPKRSSRLRTKSFSNKFHDIKVGPGSFEKVRILGQGDVGKVFLVREKVSNKLYALKIFSKAEMIKRKKIKRILAEQEILASSNHPFIVTLYHSFQSEDYLYLCMEYCMGGEFFRALQTRRSKCISEDDARFYASEVIAALEYLHLMGFIYRDLKPENILLHKSGHIMLSDFDLSIQAKDAKDPVAKGTAQSTIVDTKICSDGFRTNSFVGTEEYIAPEVIRGNGHTAAVDWWTLGILIYEMLFGCTPFKSSNTNETFCNILKNEVNFPNSNDIGRSCKDLIKKLLIKNELKRLGSKMGAADIKRHPFFKKVQWSFLRNQEPPLIPVLTDDGYDLTKLYANKNKGNGPSNGMSSFEKLERNMFEETVEYDDQVSDTDPFHDFNSMSLMKQDNNSLIYGDSNSYGKISYTPNSNRSRSNSHKGFFKR

SEQ ID NO: 7666 - protein, 753 aa, Oryza sativa Japonica Group
MERTKKNATVPPPPRLAARLLASSTSGPSGAGGGAAGRSGGGRSGAGKERRRPEWGGKERARHPDEEAKEQEVRGHGVGGSRRGAARHDEACPRDLPDGPHHLQLPRHLPVARLDGVENGRVPVVDPPEAAPCRRVAERDNGLLRTAASGATVPSVAATLSEMVARKLSVDSDEDKDSFMHLVSRYLIREEKEMIDWNKVERPTPEMVVPYDSLVQAPRDIPEIRNLLNKLAVLKLNGGLGTTMECVAPKCTIEVRSGLTFLDLAIMQTEIVEKYTNIEIHTFNQNKYPRIITEKFLPLSSEGSTGSHCWYPPGHGDVFFSLCKSGILDTMLSQGKEYVFIASSENLGATVDIEIESLTSTEILNHLIHNKNEYCMELLEIFQVPYENVAFGYRRVNLKAIKRLVKAEALKMEIIPNLKEVDGVKVLQLEKEAGSAIQCFEKAIGVTVPRSRFLAVKNTSDLFLILSDLYIVMDGTVTRNPARDNSTNPLIDLGPEFRKVDSFLDRFKSIPSIVALDSLKISGDVWFGSRITLKGEVTIAAQLGLKLDILDGSVFDNKHSTHSSGAIKYTMKLDEGADCASIDSALNRLNPGSTLILKKDDFYRYIDPIQARNRAMFHSESNCIITATLKDNWFAKLVQGKLWLIILVFHQFKLLSRRRLRWGERRRRTLRSIHQDIQSYLDNYSDSDMWHLIVHSVARVISNVLEDVNRKYMKNHYLGFLAIHSTVFAIEVIGSYAVELNYDIEHYAEPPEL

SEQ ID NO: 7667 - protein, 276 aa, Bradyrhizobium liaoningense
WGFDGSSTQQAEGHSSDCVLKPVAVFPDAARTNGVLVMCEVMMPDGKTPHPSNKRATILDDAGAWFGFEQEYFFYKDGRPLGFPASGYPAPQGPYYTGVGYSNVGDVARKIVEEHLDLCLAAGINHEGINAEVAKGQWEFQIFGKGSKKAADEMWMARYLMLRLTEKYGIDIEFHCKPLGDTDWNGSGMHANFSTEYMRTVGGKEYFEALMAAFDKNLMDHIAVYGPDNDKRLTGKHETAPWNKFSYGVADRGASIRVPHSFVNNGYKGYLEDRRP

SEQ ID NO: 7668 - protein, 74 aa, Glycine max
  misc_feature (55)..(55): Xaa can be any naturally occurring amino acid
DFCDFMQEMISMMNNVKDEGDSLEDLQRMFVDMVGGDHGHGIGVDLNQDRTAGKXRGRVYGSKGNAPKRSNSRS

SEQ ID NO: 7669 - protein, 276 aa, Bradyrhizobium elkanii
WGFDGSSTQQAEGHSSDCVLKPVACYPDAARENGVLVMCEVMMPDGKTPHPSNKRATILDDDGAWFGFEQEYFFYKDGRPLGFPEEGYPAPQGPYYTGVGYKNVGSVARKIVEEHLNLCLAAGINHEGINAEVAKGQWEFQIFGKGSKTAADQMWMARYLMLRLTESYGIDIEFHCKPLGDTDWNGSGMHANFSTKYMREVGGKEYFEKVMGAFEKNLMDHIAVYGPDNDKRLTGKHETAPWNKFSYGVADRGASIRVPHSFVNNGYKGYLEDRRP

SEQ ID NO: 7670 - protein, 276 aa, Mesorhizobium sp. ICMP 11719
WGFDGSSTQQAEGHSSDCVLKPVAVYPDPARSNGVLVMCEVMMPDGVTPHASNKRATILDDEGAWFGFEQEYFFYKDGRPLGFPESGYPAPQGPYYTGVGYSNVGSVARQIVEEHLDLCLAAGINHEGINAEVAKGQWEFQIFGKGSKKAADQMWMARYLMQRLTEKYGIDIEYHCKPLGDTDWNGSGMHANFSTAYMREVGGKAYFEALMAAFDKNLMDHIAVYGPDNDKRLTGKHETAPWNRFSYGIADRGASIRVPHSFIKNDYKGYLEDRRP

SEQ ID NO: 7671 - protein, 1131 aa, Sorghum bicolor
MSSSRPAHSSSSSSRTRQSSQARILAQTTLDAELNAEYEESGDSFDYSKLVEAQRSTPSEQQGRSGKVIAYLQHIQRGKLIQPFGCLLALDEKSFRVIAFSENAPEMLTTVSHAVPNVDDPPKLGIGTNVRSLFTDPGATALQKALGFADVSLLNPILVQCKTSGKPFYAIVHRATGCLVVDFEPVKPTEFPATAAGALQSYKLAAKAISKIQSLPGGSMEALCNTVVKEVFELTGYDRVMAYKFHEDEHGEVFAEITKPGIEPYLGLHYPATDIPQAARFLFMKNKVRMICDCRAKSVKIIEDEALSIDISLCGSTLRAPHSCHLQYMENMNSIASLVMAVVVNENEEDDEPGPEQPPQQQKKKRLWGLIVCHHESPRYVPFPLRYACEFLAQVFAVHVNKEFELEKQIREKSILRMQTMLSDMLFKEASPLSIVSGSPNIMDLVKCDGAALLYGDKVWRLQTAPTESQIRDIAFWLSEVHGDSTGLSTDSLQDAGYPGAASLGDMICGMAVAKITSKDILFWFRSHTAAEIKWGGAKHDPSDKDDNRRMHPRLSFKAFLEVVKMKSLPWSDYEMDAIHSLQLILRGTLNDALKPVQASGLDNQIGDLKLDGLAELQAVTSEMVRLMETATVPILAVDGNGLVNGWNQKVAELSGLRVDEAIGRHILTLVEDSSVSIVQRMLYLALQGKEEKEVRFELKTHGSKRDDGPVILVVNACASRDLHDHVVGVCFVAQDMTVHKLVMDKFTRVEGDYKAIIHNPNPLIPPIFGADQFGWCSEWNVAMTKLTGWHRDEVIDKMLLGEVFDSSNASCLLKSKDDFVRLCIIINSALAGEEAEKAPFGLFDRNGKYIECLLSVNRKVNADGVVTGVFCFIHVPSDDLQHALHVQQASEQTAQRRLKAFSYMRHAINKPLSGMLYSRETLKSTGLNEEQMRQVHVADSCHRQLNKILADLDQDNITDKSSCLDLDMAEFVLEDVVVSAVSQVLIGCQGKGIRVACNLPERFMKQKVYGDGIRLQQILSDFLFVSVKFSPVGGSVDISSKLTKNSIGENLHLIDFELRIKHQGAGVPAEILSQMYEEDNKEPSEEGLSLLVSRNLLRLMNGNIRHIREAGMSTFILTAELAAAPSAVGQ

SEQ ID NO: 7672 - protein, 121 aa, Zea mays
MDGASKEPLRKDYYKVLEVDYDASDDTIKLSYRRLALMWHPDKHKGNSNATTKFQEINDAYKVLSDPTKRLEYDVSGCYEIDQYTLREYLTKFKGMILTCNGLGIDHSSKWARHLRELKPH

SEQ ID NO: 7673 - protein, 372 aa, Candida glabrata CBS 138
MHEHSVEKTQILQKYLELPQNGKVIAEYVWVDGTGNLRSKARTLNKVITSIEQLPEWNFDGSSTNQAPGYDSDIYLKPVAFYPDPFRRGDNITVLAECFNSDGTPNKFNHRHEANKLFQAHKDEEIWFGIEQEYTLFDMYDNVYAWPKGGYPAPQGPYYCGVGAGKVYARDVIEAHYRACLYAGINISGINAEVMPSQWEFQVGPCEGISMGDQLWMARYFLHRVAEEFGVKISFHPKPLKGDWNGAGCHTNVSTKDMRVPGGMKYIEQAIEKLSKRHNEHIKLYGADNEQRLTGRHETASMTSFSSGVANRGASIRIPRPVAKEGFGYFEDRRPASNIDPYLVTGIMCETVCGAIENANMSKEYERETNEQ

SEQ ID NO: 7674 - protein, 356 aa, Securigera parviflora
MSLLSDLINLNLSETTDKIIAEYIWIGGSGLDLRSKARTLPGPVSDPSELPKWNYDGSSTGRAPGEDSEVILYPQAIFKDPFRRGSNILVICDAYTPAGEPIPTNKRHAAAKVFSHPDVVAEVPWYGIEQEYTLLQKEVNWPLGWPLGGFPGPQGPYYCGTGADKALGRDIVDAHYKACLYAGVSISGINGEVMPGQWEFQVGPSVGISAGDEVWVARYVLERITEIAGVVLSFDPKPIKGDWNGAGAHTNYSTKTMREDGGYEIIKKAIEKLGLRHKEHIAAYGEGNERRLTGRHETADINTFLWGVANRGASIRVGRDTEKAGKGYFEDRRPASNMDPYVVTSMIADTTILWKP

SEQ ID NO: 7675 - protein, 350 aa, Thermus thermophilus HB8
MKDYYAILGVSREASQEEIKKAYRRLALKYHPDRNPGDKEAEERFKEINEAYAVLSDPKKRAAYDRGHLEAPEYRPEDLFDLFFQEVFGVRGHRRPPRGEDLEAEVEVELQDLLHGAEKEVRYTRLVPCEACGGEGGRRTPCPTCRGQGVVESYRQSFFGTVVTRTACPHCKGRGYLLAETCPACRGRGRVPREERVRVQVPPGMDEGHLLRVPGYGNLGPGGPGDLYLRIRVRPHPHLERQGPDLVYRLRLGLAQAALGARVEVPGLEGPIPLDIPPGTGHGEVFALEGGGLPLPGGRGRGTLRVVVELAVPKKLSPKAQKLLRAYAEEVGEEVAPEGFWERLKGFFRK

SEQ ID NO: 7676 - protein, 243 aa, Zea mays
RAAPLEGDEQQLRRRLEEAALLLRRIKGLVRWIVEEVAAGRSPSIVLHRYRNYCSSADSASPSPCACSYDIPVGTDVLSLLHKDYHTSRLNVLLRVLFVVQQLLQQNKHCSKRDIYYMYPSIFVEVAVVDRAINDICILFKCSRHNLNVVPVVKGLVMGWIRFMEGEKKVYCITSVNAAFSIPVDIEAIKDVVSVAHYILVVEKETVFQRLANDKFCERNRCIVITGRGYPDIPTRRHVLFIH

SEQ ID NO: 7677 - protein, 307 aa, Triticum turgidum subsp. durum
MAFRRPLALHPLVIAFVLVSCLAGAATAKQTGQLTVFWGRNAGEGTLREACDTGLYSTVVISFYSVFGHGRYWGDLSGHPLAGVGADIKHCQSRNILVLLSIGGPRNGYSLPSSASATAVADNLWNAHLGGRRNGVYRPFGDAAVDGIDFYIDQGAPDHYDELASRLDGHNRFYRGRKGVRLTATPRCGLPDPRLGAALRTGLFERIHVRFYGNDSCSLGKGDTYGVVEQWEKWTAAFPRTQVYLGLAPAESGVPEWAQGTVAVYLKYLYYDLLPKVQKANNYGGVMVWDRFTDKKTRWSSVVSGWA

SEQ ID NO: 7678 - protein, 284 aa, Senecio vulgaris
PKSQITPYRVVTIIRLVILGLFFHYRITNPVESSYGLWLTSVICEIWFAISWVLDQFPKWYPINRVTFTDELSARYEKEGEPSQLAAVDFFVSTVDPLKEPPLITANTVLSILAVDYPVDKVSCYVSDDGAAMLSFESLVETAEFARKWVPFCKKFSIEPRAPEFYFSQKIDYLKDKVQPSFVKERRAMKRDYEEYKVRVSALVAKAQKTPEEGWTMQDGTPWPGNNTRDHPGVIQVFLGNSGAHDMEGNELPRLVYVSREKRPGYQHHKKAGAENALVRVSAV

SEQ ID NO: 7679 - protein, 297 aa, Vitis vinifera
MARTPQSTPLLISLSVLAFLQTTYAGGIAIYWGQNGNEGTLTQTCNTGKYSYVNIAFLNKFGNGQTPEINLAGHCDSASNGCTSVSTDISNCQSQGVKVMLSIGGAIGSYSLSSSDDAQNVANYLWNNFLGGRSSSRPLGDAVLDGIDFVILLGSTQYWDDLARALSGFSQRGRKVYLTAAPQCPFPDKFMGTALNTGRFDNVWAQFYNNPPCQYTSGNTTNLLNSWNRWTSSINSRIFLGLPAASAAAGSGFIPPNVLTSQILPVIKTSPKYGGVMLWSKYYDDQSGYSSTIKSSV

SEQ ID NO: 7680 - protein, 1130 aa, Triticum aestivum
MSSSRAASSSSSRNRQSTQERVLAQTTLDAELNAEFEESSDSFDYSKLVEAQRDTPTVLQEGRSEKVIAYLQHIQRGKMIQSFGCLLALDEKSFNVIAFSENAPEMLTTVSHAVPSVDDPPRLDIGTNVRSLFTDQGAAALHKALGFADVSLLNPILVQCKTSGKPFYAIVHRATGCLVVDFEPVNPTEFPATAAGALQSYKLAAKAISKIQALPGGSMELLCNTVVKEVFDLTGYDRVMAYKFHEDNHGEVFAEITKPGLEPYLGLHYPATDIPQAARFLFMKNKVRLICDVRARPIKVIEDEALPFDISLCGSALRAAHSCHLQYMENMNSIASLVMAVVVNENEEDDEVGSEQPAQQQKKKILWGLIVCHHESPRYVPFPLRYACEFLAQVFAVHVNKEFEVQKQLREKSILRMQTILSDMLFKEASPLTIVSGAPNIMDLIKCDGAALLYGGKVWRLGTAPTESQIRDLALWLSEVHMDSTGLSTESLHDAGYPGASALGDTVCGMAVAKINSSDILFWFRSPTAKEIRWGGAKNDPSDMDDSRRMHPRLSFKAFLEVVKMKSLAWTDSEMDAIHSLQLILRGAVDGVVKPTGKASLDEQIGDLKLDGLAELQAVTSEMVRLMETATVPILAVDGNGLVNGWNQKAAELTGLRVDDAIGRHILTLVEESSVSVVQRMLYLALQGKEEKEVRFEVKTHGPKRDDGPVILVVNACASRDLHDDVVGVCFVAQDMTVHKLVMDKFTRVEGDYMAIIHNPNPLIPPIFGADESGWCCEWNAAMTKLTGWHREEVLDKMLLGEVFDSRNASCLLKNKDAFVSLCVVINSALAGEETEKAPFGFFDRSGKYTECLLSVNRRQNEGGLITGVFCFIHIPSHELQQALQVQQASEQKSLKRLKAFSYMRHAINNPLSGMLYSRKALKNTDLNEEQMRQIHVADNCHHQLNKILADLDQHNIMEKSSCLDLEMAEFVLQDVVVAAVSQVLIACQGKGIRVSCNLPERFMKQLVYGDGVRLQQILSDFLSISVKFSPVGSSVEISAKATKNSIGENLHLIDLELRIKHQGLGVPAELMAQMFEEDEPQQSEEGLGLLVSRNLLRLMNGDVRHLREAGVSIFILTAELACAPTAMEH

SEQ ID NO: 7681 - protein, 79 aa, Brassica napus
  misc_feature (76)..(76): Xaa can be any naturally occurring amino acid
MSSKKVEGSSAPANRRDPYEVLCVARDASDQEIKSAYRKLALKYHPDKNANNPEASDLFKEVAFSYSILSDPEKRXQYD

SEQ ID NO: 7682 - protein, 807 aa, Triticum aestivum
FGCLLALDEKSFNVIAFSENAPEMLTTVSHAVPSVNDPPRLDIGTNVRSLFTDQGATALHKALGFADVSLLNPILVQCKTSGKPFYAIVHRATGCLVVDFEPVNPTEFPASAAGALQSYKLAAKAISKIQALPGGSIELLCNTVVKEVFELTGYDRVMAYKFHEDNHGEVFAEITKPGLEPYLGLHYPATDIPQAARFLFMKNKVRMICDVRSRSIKVIEDEALPFDISLCGSALRAAHSCHLQYMENMNSIASLVMAVVVNENEEDDEVGSEQPAQQQQKKILWGLVVCHHESPRYVPFPLRYACEFLAQVFAVHVNKEFEVQKQLREKSILRTQTILSDMLFKEASPLTIVSGAPNIMDLIKCDGAALLYGDKVWRLGNAPTESQIRDLALWLSEVHMDSTGLSTESLHDAGYPGASALGDSVCGMAVAKINSSDILFWFRSHTAQEIRWGGAKNDPSDQDDSRRMHPRLSFKAFLEVVKMKSLAWTDSEMDAIHSLQLILRGTVDGVVKPTGKASLDEQIGDLKLDGLAELQAVTSEMVRLMETATVPILAVDGNGLVNGWNQKAAELTGLRVDDAIGRHILTLVEESSVSVVQRMLYLALQGKEEKEVRFEVKTHGPKRDDGPVILVVNACASRDLHDDVVGVCFVAQDVTVHKLVMDKFTRVEGDYMAIIHNPNPLIPPIFGADEFGWCCEWNAAMTKLTGWHREEVLNKMLLGEVFDSSNASCLLKNKDAFVSLCVVINSALAGEETEKAPFGFFDRSGKYTDCLLSVNRRENEGGLITGVFCFIHIPSHELQQALQVQQA

SEQ ID NO: 7683 - protein, 354 aa, Hebeloma cylindrosporum
MAYRYHNDLLAPYLALPQGDKIQAEYVWVDGDGGLRSKTTTVSKKVTDIGSLRIWDFDGSSTNQAPGHDSDVYLRPAAIFKDPFRGGDNILVLAETYNSDGTPNRTNFRHHAAKVMEQAKEDVPWFGLEQEYTLFDADGSPYGWPKGGFPGPQGPYYCGAGTGKVFARDLIEAHYRACLYSGINISGINAEVMPSQWEFQVGPCEGISMGDHLWMARYLLVRIAEQWAVKVSFHPKPLQGDWNGAGCHTNYSTKAMREPGGMKVIEEAIEKLSKRHDEHIAVYGEDNDLRLTGRHETGHIGAFSSGVANRGASIRVPRHVAAQGYGYLEDRRPASNIDPYRVTSIIVETTLLNA

SEQ ID NO: 7684 - protein, 345 aa, Emericella nidulans
MKYMSLDQRGSVMAEYIWIDAHGGTRSKTKTLSKAPSSVDELPEWNFDGSSTAQAPGDNSDVYLRPVAMYPDPFRRGDNILVLCETWDSDGSPNKFNYRHDCARLMETHAKEEFWFGLEQEYTLLGPDGWPYGWPKGGFPGAQGPYYCGVGTGKVYCRDIVEAHYRACLYAGVKISGINAEVMPSQWEYQVGPCHGIEMGDHLWISRFLLHRVAEEFGVKISNDPKPIKGDWNGAGLHTNVSTTSTRAEGGIKAIESYMKKLEARHVEHIAVYGEGNEERLTGRHETGNIDKFSYGVADRGGSIRIPRQVAKDGKGYFEDRRPASNADPYQITGIIAETVSFSNR

SEQ ID NO: 7685 - protein, 224 aa, Helianthus annuus
NIHGKGWRSAITSPDPLAFLGCSATTYPSSLTQQKRWFTGLFEILFTDNNPLLLTIRGNIWFRQALAYFYCCLWAVRSVPELCYASLPAYCIIKDSHFLPKVNERAFLIFMGIFVIYTLYAYWECKRIGISLRMWWNLQRMERVNTLTARLFAFVSVMLKLIGFSDTVFEVTQKEHMSNDDDNDNVSVGRFTYDNSPMIMPGVIILLINIMALVNGMLRLYKVD

SEQ ID NO: 7686 - protein, 224 aa, Helianthus annuus
NIHGRGWRSAITSTDPLAFLGCSATTYPSSLTQQKRWFTGLFEILFTDKNPLLLTIKGNIWFRQALAYFYCCLWAVRSVPELCYASLPVYCIIKDSHFLPKVNERAILIFMGIFVIYNLYAYWECKRIGISLRMWWNLQRMERVNTMTGRLFAFVSVMLKLIGLSNTVFEVTQKEHMSNDDDNDNVSVGRFTYDNSPMIMPGVVILLINIMALVNGMLRLYKVD

SEQ ID NO: 7687 - protein, 921 aa, Oryza sativa
MASKGTEGGHGGVERKEQQQQRGYQLPRDSRGSLEVFNPSSASSFRTAAAAPKSASPFLAIPDREEDNVVAQQRAAEWGLVLQTDHHTGLPQGVSARPSSGSARTSSEDNPQQQQSAAAIPRVSEELRAALSVFQQTFVVSDATHPNHPIMYASAGFFNMTGYTSKEVVGRNCRFLQGSGTDPHEIDKIRQSLANGSNYCGRILNYKKDGTPFWNLLTIAPIKDEDGRLLKFIGMQVEVSKYTEGKKDTVVRPNGLSESLIKYDARQKDHARSSVSELLLALKNPRSLSESSNNTLKRKSQESLSMSMTEVPSKRSSESGSRRNSRSGTRSSLQKINEVPDQGNRTRKSGLRAFMGFLGMGHGSVEKNMLKPRDEDPLIDSDDERPESFEDEFRRKEMRRGIDLATTLERIEKNFVITDPRLPDNPIIFASDSFLQLTEYNREEILGRNCRFLQGPETDRATVRKIRDAIDNQAEVTVQLINYTKSGKKFWNLFHLQPMRDQKGDVQYFIGVQLDGTEHVQDDAAKEGVVLVKKTADNIDEAAKELPDANLRPEDLWANHSKVVLPNPHMKDTASWRAIQKVLESGESIGLKHFRPVKPLGSGDTGSVHLVELLNTGEYFAMKAMDKSIMLNRNKVHRATAERQILDLLDHPFLPTLYASFQTKTHICLITDYCPGGELFVLLDNQPLKVLHEDAVRFYAAEVVVALEYLHCQGIIYRDLKPENILLHRDGHISLTDFDLSCLTSCRPQVFLPEDADEKKGRKNGSYPIFFAEPMRASNSFVGTEEYIAPEIITGAGHTSAVDWWALGILLYEMLYGYTPFRGKTRQRTFANILHKDIRFPASISVSLAARQLMYRLLHRDPANRLGSYEGANEIKGHPFFRGINWPLIRATAPPKLEIPLFSKDDMEKKGLVTNTRTDMF

SEQ ID NO: 7688 - protein, 432 aa, Avicennia marina
MAQILAPSAQWQMRIAKNSIDASPLSTKTWSSLILKQNKKEAVKSPGKFRVLAVKSENSTVNRLEQMLNLDVTPYTDKIIAEYIWIGGSGIDLRSKSRTIPKPVEHPSELPKWNYDGSSTGQAPGEDSEVILYPQAIFKDPFRGGNNILVTCDTYTPQGEPIPTNKRYRAAQIFSDPKVAADIPWFGIEQEYTLLQPNVQWPLGWPAGGYPGPQGPYYCGVGADKSFGRDISDAHYKACLYSGINISGTNGEVMPGQWEFQVGPSVGIEAGDHIWCSRYLLERITEQAGVVLSLDPKPIEGDWNGAGCHTNYSTKSMREEGGLEVIKKAILNLSLRHKEHISAYGEGNERRLTGKHETANIDTFSWGVANRGCSIRVGRDTEKKGKGYLEDRRPASNMDPYVVTSLLAETTILWEPTLEAEALAAQKLALKV

SEQ ID NO: 7689 - protein, 153 aa, Glycine max
GKFSVPSKLGDKLVGGGYPSTSKKGTTGSNVPRKGFLARQRPGPDLMLSKSDLYTLQHGQVSDRPPPAWGPAPLIKLGSDFKKVSSFQSRIPSIPKIVELDHLTIIGPVNLGRGVTLKGTVIIVATEGSTIDIPPGSILENVVVQGSLRLLEH

SEQ ID NO: 7690 - protein, 351 aa, Glycine max
MGMDYYNILKVNRNASDDDLKKAYKRLARIWHPDKNPVNNTEAEAKFKRISEAYDVLSDPQKRQIYDLYGEEALKSGQFPPPHSSSSSSSSRAFHHRQNNNNNNNNNNNKNNSNPPPAASSFRFNPRDADDIYAEFFGPEDIGAGGPDAFFRTSNGGGVAFSASAAAGRKAAAVENALPCSLEDLYKGVKKKMKISRNVYDAFGKCGDVEEILTIEIKPGWKKGTKITFPEKGNREPGVIPADLIFVIDEKPHALYRRDGNDLVINQEITLLEALTGKTLDLTTLDGRSLMIPLTDIVRPGAEVVVPNEGMPISKEPGRKGNLRIKLDVKYPSRLTPEQKSDLRRVLGGIS

SEQ ID NO: 7691 - protein, 184 aa, Mesorhizobium amorphae
WGFDGSSTMQAEGRSSDCVLKPVALYPDPARTNGILVMCEVMMPDGVTPHESNSRATILDDEDAWFGFEQEYFFYKDGRPLGFPESGYPAPQGPYYTGVGYKNVGDVARKIVEEHLDQCLAAGINHEGINAEVAKGQWEFQIFGKGSKKAADQIWMARYLLLRLTETYGIDIEFHCKPLGDTDW

SEQ ID NO: 7692 - protein, 1131 aa, Sorghum bicolor
MSSSRPAHSSSSSSRTRQSSQARILAQTTLDAELNAEYEESGDSFDYSKLVEAQRSTPSEQQGRSGKVIAYLQHIQRGKLIQPFGCLLALDEKSFRVIAFSENAPEMLTTVSHAVPNVDDPPKLGIGTNVRSLFTDPGATALQKALGFADVSLLNPILVQCKTSGKPFYAIVHRATGCLVVDFEPVKPTEFPATAAGALQSYKLAAKAISKIQSLPGGSMEALCNTVVKEVFELTGYDRVMAYKFHEDEHGEVFAEITKPGIEPYLGLHYPATDIPQAARFLFMKNKVRMICDCRAKSVKIIEDEALSIDISLCGSTLRAPHSCHLQYMENMNSIASLVMAVVVNENEEDDEPGPEQPPQQQKKKRLWGLIVCHHESPRYVPFPLRYACEFLAQVFAVHVNKEFELEKQIREKSILRMQTMLSDMLFKEASPLSIVSGSPNIMDLVKCDGAALLYGDKVWRLQTAPTESQIRDIAFWLSEVHGDSTGLSTDSLQDAGYPGAASLGDMICGMAVAKITSKDILFWFRSHTAAEIKWGGAKHDPSDKDDNRRMHPRLSFKAFLEVVKMKSLPWSDYEMDAIHSLQLILRGTLNDALKPVQASGLDNQIGDLKLDGLAELQAVTSEMVRLMETATVPILAVDGNGLVNGWNQKVAELSGLRVDEAIGRHILTLVEDSSVSIVQRMLYLALQGKEEKEVRFELKTHGSKRDDGPVILVVNACASRDLHDHVVGVCFVAQDMTVHKLVMDKFTRVEGDYKAIIHNPNPLIPPIFGADQFGWCSEWNVAMTKLTGWHRDEVIDKMLLGEVFDSSNASCLLKSKDDFVRLCIIINSALAGEEAENAPFGLFDRNGKYIECLLSVNRKVNADGVVTGVFCFIHVPSDDLQHALHVQQASEQTAQRRLKAFSYMRHAINKPLSGMLYSRETLKSTGLNEEQMRQVHVADSCHRQLNKILADLDQDNITDKSSCLDLDMAEFVLEDVVVSAVSQVLIGCQGKGIRVACNLPERFMKQKVYGDGIRLQQILSDFLFVSVKFSPVGGSVDISSKLTKNSIGENLHLIDFELRIKHQGAGVPAEILSQMYEEDNKEPSEEGLSLLVSRNLLRLMNGNIRHLREAGMSTFILTAELAAAPSAVGQ

SEQ ID NO: 7693 - protein, 184 aa, Mesorhizobium sp. ICMP 13190
WGFDGSSTMQAEGHSSDCVLKPVAVYPDPTRTNGVLVMCEVMMPDGVTPHASNKRATVLDDEGAWFGFEQEYFFYKDGRPLGFPETGYPAPQGPYYTGVGYKNVGDVARQIVEEHLDLCLAAGINHEGINAEVAKGQWEFQIFGKGSKKAADQMWMARYLLLRLTEKYCIDIEFHCKPLGDTDW

SEQ ID NO: 7694 - protein, 155 aa, Glycine max
MSSLDLFAPSAETRRLSVKLTNDQLEKIGMTKQEAADFQRLRNRFLDKPLMEWERVKPLPDDFCKSAEDLPEPSPEKAKELLNKLVFVQLNGGLGTAMGLKSTKSGLQILKQGGSAYTILDCKILQLEALNNQYGVDIPLVLMNSPKTNEETLKL

SEQ ID NO: 7695 - protein, 276 aa, Mesorhizobium sp. ICMP 11541
WGFDGSSTMQAEGHSSDCVLKPVAVYPDPTRTNGVLVMCEVMMPDGVTPHASNNRATILDDEGAWFGFEQEYFFYKDGRPLGFPETGYPAPQGPYYTGVGYKNVGDVARQIVEEHLDLCLAAGINHEGINAEVAKGQWEFQIFGKGSKKAADQMWMARYLLLRLTEKYRIDIEFHCKPLGDTDWNGSGMHANFSTSYMREVGGKAYFESLMAQFDKNLMDHIAVYGPDNDKRLTGKHETAPWNKFSYGIADRGASIRVPHSFIKNDYKGYLEDRRP

SEQ ID NO: 7696 - protein, 922 aa, Neurospora crassa
MNGDFSLSQALGGLRIANLDDDDSVHSTENDQTTPDAPANQSSASRQDATTNNAPQTTPPQPAQPAQPPSQRTPLDLERQVTPQDPPQRPPHTYETAAAILKNAQDNLSARGYPPTSQQLPAGNGNWPPNSRPTPGGALQSMEGDPQRGAYHPHGHGTAYGDLRNELRNEIQTDTSRTSLYGVPTISRSESRRAPPGAPTREPSRSYRQGRPGPGPPMGVDPNGALPPRRSSRGVQGGYSQIPGIPVAAPGTYTSEARLGEVPPMLSTSSEEWKDRGAAVGVRREVDADGRVTMKPVKKGVRDFTFGRILGEGSYSTVYLATDRQTLREYAVKVLEKKHIIKEKKIKYVNIEKNTLNRLTEHPGIVRLYYTFQDETSLYYVLDLCTGGELLGVLKKTGTFDVECTRFYGAQILDAIDYMHSRGIIHRDLKPENVLLDEQMHVKITDFGTAKLLRDPRDPRPPEETPGQSGEDDERAASFVGTAEYVSPELLTEKSASTASDIWAFGCIIYQLLAGRPPFKAGTEYLTFQKIVKLEYEFPPGFPSAARDLVERCLVLDPAQRFTVEHIKKHEFFAGQMFGKELWRMKAPRLRPYVPGSQEQQPQMMHLGGGGSNSNHSHHSMPMGNPSSTRGNTTTQGGPANNNVNRPARIITELPPPTQLDLDWSPVLTKNNERILKLGDLMVVSSPIPHSPHGKEGGEGHKKLARFFGGSTTKKRQRLVMITSSGRIVFAPAGGEEKKAKQEISLLASDCTWKAQIDAKGQPVWTPQIQGGVHYTFEEPKSSEKQHKDKSDKSSDGGAGRDGANNSSSSKSTVDEWIESLERAKDLALSQNLVGSNDNFGDMSMSSSPAGSMVNIGGGGGHHHNGRGHGNFSGGEGGYSISDRSGRNQLTKSQASLDDSSSVTKRNRFSRRQSKNGLGAAF

SEQ ID NO: 7697 - protein, 369 aa, Ashbya gossypii ATCC 10895
MSELVEKTSTLLKYLDLDQRGAVIAEYIWVDSAGHLRSKGRTLQRRVESVDELPEWNFDGSSTGQAPGHDSDVYLKPVAFYPDPFRRGDNIIVLAECWNNDGTPNKYNHRHEAAKLFEAHRAADIWFGLEQEYTLFDHNDNVYGWPKGGFPAPQGPYYCGVGAGKVYARDVVEAHYRACLYAGLRISGINAEVMPSQWEFQVGPCTGITMGDELWVGRYLLHRVAEEFGVKVSFHPKPLKGDWNGAGCHTNVSTREMRQPGGMRYIEEAIDKLSKRHKEHIKLYGSDNELRLTGRHETASMATFSSGVANRGASIRIPRSVSKEGFGYFEDRRPASNIDPYLVTGIICETICGAIENADMSKEFERESS

SEQ ID NO: 7698 - protein, 1131 aa, Sorghum bicolor
MSSSRPAHSSSSSSRTRQSSRARILAQTTLDAELNAEYEESGDSFDYSKLVEAQRSTPSEQQGRSGKVIAYLQHIQRGKLIQPFGCLLALDEKSFRVIAFSENAPEMLTTVSHAVPNVDDPPKLGIGTNVRSLFTDPGATALQKALGFADVSLLNPILVQCKTSGKPFYAIVHRATGCLVVDFEPVKPTEFPATAAGALQSYKLAAKAISKIQSLPGGSMEALCNTVVKEVFELTGYDRVMAYKFHEDEHGEVFAEITKPGIEPYLGLHYPATDIPQAARFLFMKNKVRMICDCRAKSVKIIEDEALSIDISLCGSTLRAPHSCHLQYMENMNSIASLVMAVVVNENEEDDEPGPEQPPQQQKKKRLWGLIVCHHESPRYVPFPLRYACEFLAQVFAVHVNKEFELEKQIREKSILRMQTMLSDMLFKEASPLSIVSGSPNIMDLVKCDGAALLYGDKVWRLQTAPTESQIRDIAFWLSEVHGDSTGLSTDSLQDAGYPGAASLGDMICGMAVAKITSKDILFWFRSHTAAEIKWGGAKHDPSDKDDNRRMHPRLSFKAFLEVVKMKSLPWSDYEMDAIHSLQLILRGTLNDALKPVQASGLDNQIGDLKLDGLAELQAVTSEMVRLMETATVPILAVDGNGLVNGWNQKVAELSGLRVDEAIGRHILTLVEDSSVSIVQRMLYLALQGKEEKEVRFELKTHGSKRDDGPVILVVNACASRDLHDHVVGVCFVAQDMTVHKLVMDKFTRVEGDYKAIIHNPNPLIPPIFGADQFGWCSEWNVAMTKLTGWHRDEVIDKMLLGEVFDSSNASCLLKSKDDFVRLCIIINSALAGEEAEKAPFGLFDRNGKYIECLLSVNRKVNADGVVTGVFCFIHVPSDDLQHALHVQQASEQTAQRRLKAFSYMRHAINKPLSGMLYSRETLKSTGLNEEQMRQVHVADSCHRQLNKILADLDQDNITDKSSCLDLDMAEFVLEDVVVSAVSQVLIGCQGKGIRVACNLPERFMKQKVYGDGIRLQQILSDFLFVSVKFSPVGGSVDISSKLTKNSIGENLHLIDFELRIKHQGAGVPAEILSQMYEEDNKEPSEEGLSLLVSRNLLRLMNGNIRHLREAGMSTFILTAELAAAPSAVGQ

SEQ ID NO: 7699 - protein, 276 aa, Mesorhizobium sp. ICMP 11722
WGFDGSSTMQAEGHSSDCVLKPVAVYPDPTRTNGVLVMCEVMMPDGVTPHASNKRATILDDEGAWFGFEQEYFFYKDGRPLGFPESGYPAPQGPYYTGVGYKNVGDVARQIVEDHLDLCLAAGINHEGINAEVAKGQWEFQIFGKGSKKAADQMWIARYLLLRLTEKYRIDIEFHCKPLGDTDWNGSGMHANFSTAYMREVGGKAYFESLMAQFDKNLMDHIAVYGPDNDKRLTGKHETAPWNKFSYGIADRGASIRVPHSFIENDYKGYLEDRRP

SEQ ID NO: 7700 - protein, 1131 aa, Sorghum bicolor
MSSSRPAHSSSSSSRTRQSSRARILAQTTLDAELNAEYEESGDSFDYSKLVEAQRSTPSEQQGRSGKVIAYLQHIQRGKLIQPFGCLLALDEKSFRVIAFSENAPEMLTTVSHAVPNVDDPPKLGIGTNVRSLFTDPGATALQKALGFADVSLLNPILVQCKTSGKPFYAIVHRATGCLVVDFEPVKPTEFPATAAGALQSYKLAAKAISKIQSLPGGSMEALCNTVVKEVFELTGYDRVMAYKFHEDEHGEVFAEITKPGIEPYLGLHYPATDIPQAARFLFMKNKVRMICDCRAKSVKIIEDEALSIDISLCGSTLRAPHSCHLQYMENMNSIASLVMAVVVNENEEDDEPGPEQPPQQQKKKRLWGLIVCHHESPRYVPFPLRYACEFLAQVFAVHVNKEFELEKQIREKSILRMQTMLSDMLFKEASPLSIVSGSPNIMDLVKCDGAALLYGDKVWRLQTAPTESQIRDIAFWLSEVHGDSTGLSTDSLQDAGYPGAASLGDMICGMAVAKITSKDILFWFRSHTAAEIKWGGAKHDPSDKDDNRRMHPRLSFKAFLEVVKMKSLPWSDYEMDAIHSLQLILRGTLNDALKPVQASGLDNQIGDLKLDGLAELQAVTSEMVRLMETATVPILAVDGNGLVNGWNQKVAELSGLRVDEAIGRHILTLVEDSSVSIVQRMLYLALQGKEEKEVRFELKTHGSKRDDGPVILVVNACASRDLHDHVVGVCFVAQDMTVHKLVMDKFTRVEGDYKAIIHNPNPLIPPIFGADQFGWCSEWNVAMTKLTGWHRDEVIDKMLLGEVFDSSNASCLLKSKDDFVRLCIIINSALAGEEAEKAPFGLFDRNGKYIECLLSVNRKVNADGVVTGVFCFIHVPSDDLQHALHVQQASEQTAQRRLKAFSYMRHAINKPLSGMLYSRETLKSTGLNEEQMRQVHVADSCHRQLNKILADLDQDNITDKSSCLDLDMAEFVLEDVVVSAVSQVLIGCQGKGIRVACNLPERFMKQKVYGDGIRLQQILSDFLFVSVKFSPVGGSVDISSKLTKNSIGENLHLIDFELRIKHQGAGVPAEILSQMYEEDNKEQSEEGLSLLVSRNLLRLMNGNIRHLREAGMSTFILTAELAAAPSAVGQ

SEQ ID NO: 7701 - protein, 284 aa, Securigera parviflora
GQATGEDSVVILHPQAVFKDPFRRGNNILVICDSYTPSGVPIPTNKRHDDAKIFSHPDVVAEEPWYGIEQEYTLLQKDTLWPYGWPVGGYPDSQGPYYCGNGADKAFGRDIVNAHYKACLYAGINISGINAEVMPGQWEFQVGPAVGISAGDEIWVARYILERITEMAGVVLSFDPKPIKGDWNGAGAHANYSTKSMRNDGGYEVIKSAIAKLEKRHKEHIAAYGEGNERRLTGKHETADINTFLWGVANRGASVRVGRETEKAGKGYFEDRRPASNMDPYVVT

SEQ ID NO: 7702 - protein, 1131 aa, Sorghum bicolor
MSSSRPAHSSSSSSRTRQSSQARILAQTTLDAELNAEYEESGDSFDYSKLVEAQRSTPSEQQGRSGKVIAYLQHIQRGKLIQPFGCLLALDEKSFRVIAFSENAPEMLTTVSHAVPNVDDPPKLGIGTNVRSLFTDPGATALQKALGFADVSLLNPILVQCKTSGKPFYAIVHRATGCLVVDFEPVKPTEFPATAAGALQSYKLAAKAISKIQSLPGGSMEALCNTVVKEVFELTGYDRVMAYKFHEDEHGEVFAEITKPGIEPYLGLHYPATDIPQAARFLFMKNKVRMICDCRAKSVKIIEDEALSIDISLCGSTLRAPHSCHLQYMENMNSIASLVMAVVVNENEEDDEPGPEQPPQQQKKKRLWGLIVCHHESPRYVPFPLRYACEFLAQVFAVHVNKEFELEKQIREKSILRMQTMLSDMLFKEASPLSIVSGSPNIMDLVKCDGAALLYGDKVWRLQTAPTESQIRDIAFWLSEVHGDSTGLSTDSLQDAGYPGAASLGDMICGMAVAKITSKDILFWFRSHTAAEIKWGGAKHDPSDKDDNRRMHPRLSFKAFLEVVKMKSLPWSDYEMDAIHSLQLILRGTLNDALKPVQASGLDNQIGDLKLDGLAELQAVTSEMVRLMETATVPILAVDGNGLVNGWNQKVAELSGLRVDEAIGRHILTLVEDSSVSIVQRMLYLALQGKEEKEVRFELKTHGSKRDDGPVILVVNACASRDLHDHVVGVCFVAQDMTVHKLVMDKFTRVEGDYKAIIHNPNPLIPPIFGADQFGWCSEWNVAMTKLTGWHRDEVIDKMLLGEVFDSSNASCLLKSKDDFVRLCIIINSALAGEEAEKAPFGLFDRNGKYIECLLSVNRKVNADGVVTGVFCFIHVPSDDLQHALHVQQASEQTAQRRLKAFSYMRHAINKPLSGMLYSRETLKSTGLNEEQMRQVHVADSCHRQLNKILADLDQDNITDKSSCLDLDMAEFVLEDVVVSAVSQVLIGCQGKGIRVACNLPERFMKQKVYGDGIRLQQILSDFLFVSVKFSPVGGSVDISSKLTKNSIGENLHLIDFELRIKHQGAGVPAEILSQMYEEDNKEQSEEGLSLLVSRNLLRLMNGNIRHLREAGMSTFILTAELAAAPSAVGQ

SEQ ID NO: 7703 - protein, 477 aa, Solanum tuberosum
MVTATTLSPADAEKLNNLKSAVAGLNQISENEKSGFINLVGRYLSGEAQHIDWSKIQTPTDEVVVPYDKLAPLSEDPAETKKLLDKLVVLKLNGGLGTTMGCTGPKSVIEVRNGLTFLDLIVKQIEALNAKFGCSVPLLLMNSFNTHDDTLKIVEKYANSNIDIHTFNQSQYPRLVTEDFAPLPCKGNSGKDGWYPPGHGDVFPSLMNSGKLDALLAKGKEYVFVANSDNLGAIVDLKILNHLILNKNEYCMEVTPKTLADVKGGTLISYEGKVQLLEIAQVPDEHVNEFKSIEKFKIFNTNNLWVNLSAIKRLVEADALKMEIIPNPKEVDGVKVLQLETAAGAAIKFFDRAIGANVPRSRFLPVKATSDLLLVQSDLYTLTDEGYVIRNPARSNPSNPSIELGPEFKKVANFLGRFKSIPSIIDLDSLKVTGDVWFGSGVTLKGKVTVAAKSGVKLEIPDGAVIANKDINGPEDI

SEQ ID NO: 7704 - protein, 380 aa, Zea mays
MAQAVVPAMQCRVGVKAAAGRVWSAGRTRTGRGGASPGFKVMAVSTGSTGVVPRLEQLLNMDTTPYTDKVIAEYIWVGGSGIDIRSKSRTISKPVEDPSELPKWNYDGSSTGQAPGEDSEVILYPQAIFKDPFRGGNNVLVICDTYTPQGEPLPTNKRHRAAQIFSDPKVAEQVPWFGIEQEYTLLQKDVNWPLGWPVGGFPGPQGPYYCAVGADKSFGRDISDAHYKACLYAGINISGTNGEVMPGQWEYQVGPSVGIEAGDHIWISRYILERITEQAGVVLTLDPKPIQGDWNGAGCHTNYSTKTMREDGGFEEIKRAILNLSLRHDLHISAYGEGNERRLTGKHETASIGTFSWGVANRGCSIRVGRDTEAKGKGRQ

SEQ ID NO: 7705 - protein, 356 aa, Securigera parviflora
MSLLTDLVNLNLSESTEKIIAEYIWVGGSGLDIRSKARTLPGPVSDPAKLPKWNYDGSSTDQAPGEDSEVILYPQAIFRDPFRRGSNILVICDVYTPAGEPLPSSYRYNAAKIFSHPEVAAEEPWYGIEQEYTLLQKDINWPLGWPVGGFPGQQGPYYCGIGADKAYGRDIVDAHYKACLYAGINISGINGEVMPGQWEFQVGPSVGISAGDEIWAARYILERITEIAGAVVSFDPKPIPGDWNGAGAHTNYSTKSMREDGGFEIIKKAIEKLGLKHKEHIAAYGKGNERRLTGKHETADINTFSWGVANRGASVRVGRETEKEGKGYFEDRRPASNMDPYIVTSMIAETTILWKP

SEQ ID NO: 7706 - protein, 294 aa, Populus x canadensis
GSSQTLHAKDELMPPTRQSATSKKCRVCGDEIGVKEDGEVFVACHVCGFPVCRPCYEYERSEGNQSCPQCNTRYKRHKGCPRVPGDNDDEDANFDDFDDEFQIKHHDHDESNQKNVFSHTEIEHYNEQEMHPIRPAFSSAGSVAGKDLEGDNEGYSNAEWQERVEKWKVRQEKRGLVSKDEGGNDQGEEDEYLMAEARQPLWRKIPIPSSRIHPYRFVIVLRLIILCFFFRFRILTPASDAYALWLISVICEVWFGLSWILDRFPKWNPIERETYLDRLSMRFEREGEPIGGVS

SEQ ID NO: 7707 - protein, 51 aa, Arabidopsis thaliana
  misc_feature (36)..(36): Xaa can be any naturally occurring amino acid
MEKKENGLYGKQLGRLINGPTNPMDTPLLNDLYQFXMAYAYRKDGQKSERS

SEQ ID NO: 7708 - protein, 499 aa, Saccharomyces cerevisiae
MSTKKHTKTHSTYAFESNTNSVAASQMRNALNKLADSSKLDDAARAKFENELDSFFTLFRRYLVEKSSRTTLEWDKIKSPNPDEVVKYEIISQQPENVSNLSKLAVLKLNGGLGTSMGCVGPKSVIEVREGNTFLDLSVRQIEYLNRQYDSDVPLLLMNSFNTDKDTEHLIKKYSANRIRIRSFNQSRFPRVYKDSLLPVPTEYDSPLDAWYPPGHGDLFESLHVSGELDALIAQGREILFVSNGDNLGATVDLKILNHMIETGAEYIMELTDKTRADVKGGTLISYDGQVRLLEVAQVPKEHIDEFKNIRKFTNFNTNNLWINLKAVKRLIESSNLEMEIIPNQKTITRDGHEINVLQLETACGAAIRHFDGAHGVVVPRSRFLPVKTCSDLLLVKSDLFRLEHGSLKLDPSRFGPNPLIKLGSHFKKVSGFNARIPHIPKIVELDHLTITGNVFLGKDVTLRGTVIIVCSDGHKIDIPNGSILENVVVTGNLQILEH

SEQ ID NO: 7709 - protein, 175 aa, Zea mays
  misc_feature (106)..(106): Xaa can be any naturally occurring amino acid
MEHKEAGCQAPEGPILCINNCGFFGSAATMNMCSKCHKEMITKQDQAKLAASSIDSIVNGSDAVMEPVVAGSNTVVAVAQVELQTMNVQQPADVAGPSEGVAAISXKGGKVGPNRCSACRKRVGLTGFNCRCGNLYCALHRYSDKHDCKFDYRTAARDAIAKANPVVKADKLDKI

SEQ ID NO: 7710 - protein, 341 aa, Arabidopsis thaliana; identical to SEQ ID NO: 1065

SEQ ID NO: 7711 - protein, 224 aa, Helianthus annuus
NIHGRGWRSAITSPDPLAFLGCSATTYPSSLTQQKRWFTGLFEILFTDKNPLLLTIKGNIWFRQALAYFYCCLWAVRSVPELCYASLPAYCIIKGSHFLPKVNERAILIFMGIFVIYTLYAYWECKRIGISLRMWWNLQRMERVNTLTARLFAFVSVMLKLIGLSNTVFEVTQKEHTSNDDDNDNVSVGRFTYDNSPMIMPGVVILLINIMALVNGMLRLYKVD

SEQ ID NO: 7712 - protein, 227 aa, Helianthus annuus
NIHGRGWRSAITSPDPLAFLGCSATTYPSSLTQQKRWFTGLLEILFTDKNPLLLTIKGNIWFRQALAYFYCCLWAVRSVPELCYASLPAYCIIKDSHFLPKVNERAILIFMGIFVIYNLYAYWECKCIGISLRMWWNLQRMERVNTLTARLFAFVSVMLKLIGLSNTVFEVTQKEHMSNDDDDDDNDNVSVGRFTYDNSPMIMPGVVILLINIMALVNGMLRLYKVD

SEQ ID NO: 7713 - protein, 393 aa, Fusobacterium nucleatum subsp. vincentii ATCC 49256
MAKRDYYEVLGIDKNASEDDIKKAFKKAAMKYHPDRFANASDAEKKDAEEKFKEINEAYQVLSDAQKKQQYDQFGHAAFEQGGAGFGGGFNAGGFDFGDIFGDIFGGGGSFGGFEGFSGFGGSSRRSYVEPGNDLRYNLEITLEEAAKGVEKTIKYKRTGKCEYCHGTGGEDDKMKTCPTCNGQGTIKTQQRTILGVMQSQSVCPDCHGTGKVPEKKCKHCRGTGTAKETVEKKINVPAGIDDGQKLKYAGLGEASQSGGPNGDLYIVIRIKPHDIFIRQGDNLYCEVPISYSTAVLGGEVEVPTLNGKKTVKVPEGTESGKLLKVSGEGIKSLRGYGKGDIIVKLTIETPKKLTDKQKELLQKFEESLNDKNYEQKSSFMKKVKKFFKDIID

SEQ ID NO: 7714 - protein, 276 aa, Mesorhizobium sp. ICMP 12635
WGFDGSSTMQAEGHSSDCILKPVAVYPDPTRTNGVLVMCEVMMPDGVTPHASNKRATILDDEGAWFGFEQEYFFYKDGRPLGFPETGYPAPQGPYYTGVGYKNVGDVARQIVEEHLDLCLAAGINHEGINAEVAKGQWEFQIFGKGSKKAADQMWIARYLLLRLTEKYRIDIEFHCKPLGDTDWNGSGMHANFSTAYMREVGGKAYFESLMAQFDKNLMDHIAVYGPDNDKRLTGKHETAPWNKFSYGIADRGASIRVPHSFIKNDYKGYLEDRRP

SEQ ID NO: 7715 - protein, 276 aa, Mesorhizobium sp. ICMP 14319
WGFDGSSTMQAEGHSSDCVLKPVAVYPDPTRTNGVLVMCEVMMPDGVTPHASNKRATILDDEGAWFGFEQEYFFYKDGRPLGFPESGYPAPQGPYYTGVGYKNVGDVARQIVEDHLDLCLAAGINHEGINAEVAKGQWEFQIFGKGSKKAADQMWIARYLLLRLTEKYRIDIEFHCKPLGDTDWNGSGMHANFSTAYMREVGGKAYFESLMAQFDKNLMDHIAVYGPDNDKRLTGKHETAPWNKFSYGIADRGASIRVPHSFIKNDYKGYLEDRRP

SEQ ID NO: 7716 - protein, 426 aa, Hordeum vulgare subsp. vulgare
AQAVVQAMQCQVGVRGRTAVPARQPAGRVWGVRRAARATSGFKVLALGPETTGVIQRMQQLLDMDTTPFTDKIIAEYIWVGGSGIDLRSKSRTISKPVEDPSELPKWNYDGSSTGQAPGEDSEVILYPQAIFKDPFRGGNNILVICDTYTPQGEPIPTNKRHMAAQIFSDPKVTSQVPWFGIEQEYTLMQRDVNWPLGWPVGGYPGPQGPYYCAVGSDKSFGRDISDAHYKACLYAGIEISGTNGEVMPGQWEYQVGPSVGIDAGDHIWASRYILERITEQAGVVLTLDPKPIQGDWNGAGCHTNYSTLSMREDGGFDVIKKAILNLSLRHDLHIAAYGEGNERRLTGLHETASISDFSWGVANRGCSIRVGRDTEAKGKGYLEDRRPASNMDPYTVTALLAETTILWEPTLEAEALAAKKLALKV

SEQ ID NO: 7717 - protein, 1131 aa, Sorghum arundinaceum
MSSSRPAHSSSSSSRTRQSSRARILAQTTLDAELNAEYEESGDSFDYSKLVEAQRSTPSEQQGRSGKVIAYLQHIQRGKLIQPFGCLLALDEKSFRVIAFSENAPEMLTTVSHAVPNVDDPPKLGIGTNVRSLFTDPGATALQKALGFADVSLLNPILVQCKTSGKPFYAIVHRATGCLVVDFEPVKPTEFPATAAGALQSYKLAAKAISKIQSLPGGSMEALCNTVVKEVFELTGYDRVMAYKFHEDEHGEVFAEITKPGIEPYLGLHYPATDIPQAARFLFMKNKVRMICDCRAKSVKIIEDEALSIDISLCGSTLRAPHSCHLQYMENMNSIASLVMAVVVNENEEDDEPGPEQPPQQQKKKRLWGLIVCHHESPRYVPFPLRYACEFLAQVFAVHVNKEFELEKQIREKSILRMQTMLSDMLFKEASPLSIVSGSPNIMDLVKCDGAALLYGDKVWRLQTAPTESQIRDIAFWLSEVHGDSTGLSTDSLQDAGYPGAASLGDMICGMAVAKITSKDILFWFRSHTAAEIKWGGAKHDPSDKDDNRRMHPRLSFKAFLEVVKMKSLPWSDYEMDAIHSLQLILRGTLNDALKPVQASGLDNQIGDLKLDGLAELQAVTSEMVRLMETATVPILAVDGNGLVNGWNQKVAELSGLRVDEAIGRHILTLVEDSSVSIVQRMLYLALQGKEEKEVRFELKTHGSKRDDGPVILVVNACASRDLHDHVVGVCFVAQDMTVHKLVMDKFTRVEGDYKAIIHNPNPLIPPIFGADQFGWCSEWNVAMTKLTGWHRDEVIDKMLLGEVFDSSNASCLLKSKDDFVRLCIIINSALAGEEAEKAPFGLFDRNGKYIECLLSVNRKVNADGVVTGVFCFIHVPSDDLQHALHVQQASEQTAQRRLKAFSYMRHAINKPLSGMLYSRETLKSTGLNEEQMRQVHVADSCHRQLNKILADLDQDNITDKSSCLDLDMAEFVLEDVVVSAVSQVLIGCQGKGIRVACNLPERFMKQKVYGDGIRLQQILSDFLFVSVKFSPVGGSVDISSKLTKNSIGENLHLIDFELRIKHQGAGVPAEILSQMYEEDNKEQSEEGLSLLVSRNLLRLMNGNIRHIREAGMSTFILTAELAAAPSAVGQ

SEQ ID NO: 7718 - protein, 284 aa, Arabidopsis thaliana
MGRKKKSRASTTEEDEIEMDNAGPSSETSLYEVLGVERRATSQEIRKAYHKLALKLHPDKNQDDKEAKDKFQQLQKVISILGDEEKRAVYDQTGSIDDADIPGDAFENLRDFFRDMYKKVNEADIEEFEANYRGSESEKKDLLELFNKFKGKMNRLFCSMLCSDPKLDSHRFKDMLDEAIAAGEVKSSKAYEKWANKISETKPPTSPLRKRKKKKSAAKDSETDLCLMIAKRQEERKGKVDSMFSSLISRYGGDAEAEPTEEEFEAAQRRIESKRKPSKKSRGK

SEQ ID NO: 7719 - protein, 425 aa, Vitis vinifera
MAIVPCGTTWPAQWGIRPQFMLRSSITNKLPRSNYGVSSKINYLASACSSLFSQGSLHAFIYAGSSQTSHNRRGARFTVRADSDFYSVLGVSKNASKSEIKSAYRKLARSYHPDVNKEPNAEQKFKEISNAYEVLSDDEKRSLYDRYGEAGLKGAGMGMGDFSNPFDLFDSRSRVVDGEDEYYNLVLKFNEAVFGVEKEIEITRLETCGTCNGSGAKPGTTPTTCSTCGGQGQVVSSARTPLGVFQQVMTCSSCGGTGELSTPCTACSGDSRVRRTKRISLKVPAGVDSGSRLRVRSEGNAGRRGGAPGDLFVMIEVIPDPILKRDDNNILYSCKVSYIDAILGTTLKVPTVDGMVDLKIPAGTQPNTTLVMAKKGVPLLNKSNMRGDQLVRVQVEIPKRLSSEEKKLIEELANLSKGKAATSRR

SEQ ID NO: 7720 - protein, 1131 aa, Sorghum arundinaceum
MSSSRPAHSSSSSSRTRQSSQARILAQTTLDAELNAEYEESGDSFDYSKLVEAQRSTPSEQQGRSGKVIAYLQHIQRGKLIQPFGCLLALDEKSFRVIAFSENAPEMLTTVSHAVPNVDDPPKLGIGTNVRSLFTDPGATALQKALGFADVSLLNPILVQCKTSGKPFYAIVHRATGCLVVDFEPVKPTEFPATAAGALQSYKLAAKAISKIQSLPGGSMEALCNTVVKEVFELTGYDRVMAYKFHEDEHGEVFAEITKPGIEPYLGLHYPATDIPQAARFLFMKNKVRMICDCRAKSVKIIEDEALSIDISLCGSTLRAPHSCHLQYMENMNSIASLVMAVVVNENEEDDEPGPEQPPQQQKKKRLWGLIVCHHESPRYVPFPLRYACEFLAQVFAVHVNKEFELEKQIREKSILRMQTMLSDMLFKEASPLSIVSGSPNIMDLVKCDGAALLYGDKVWRLQTAPTESQIRDIAFWLSEVHGDSTGLSTDSLQDAGYPGAASLGDMICGMAVAKITSKDILFWFRSHTAAEIKWGGAKHDPSDKDDNRRMHPRLSFKAFLEVVKMKSLPWSDYEMDAIHSLQLILRGTLNDALKPVQASGLDNQIGDLKLDGLAELQAVTSEMVRLMETATVPILAVDGNGLVNGWNQKVAELSGLRVDEAIGRHILTLVEDSSVSIVQRMLYLALQGKEEKEVRFELKTHGSKRDDGPVILVVNACASRDLHDHVVGVCFVAQDMTVHKLVMDKFTRVEGDYKAIIHNPNPLIPPIFGADQFGWCSEWNVAMTKLTGWHRDEVIDKMLLGEVFDSSNASCLLKSKDDFVRLCIIINSALAGEEAEKAPFGLFDRNGKYIECLLSVNRKVNADGVVTGVFCFIHVPSDDLQHALHVQQASEQTAQRRLKAFSYMRHAINKPLSGMLYSRETLKSTGLNEEQMRQVHVADSCHRQLNKILADLDQDNITDKSSCLDLDMAEFVLEDVVVSAVSQVLIGCQGKGIRVACNLPERFMKQKVYGDGIRLQQILSDFLFVSVKFSPVGGSVDISSKLTKNSIGENLHLIDFELRIKHQGAGVPAEILSQMYEEDNKEQSEEGLSLLVSRNLLRLMNGNIRHIREAGMSTFILTAELAAAPSAVGQ

SEQ ID NO: 7721 - protein, 403 aa, Oryza sativa
MASSGKMEGPSAPAMRRDPYEVLSVPRDSSDQEIKSAYRKLALKFHPDKNASNPEASELFKEVAYSYSILSDPEKRRQYDTAGFEALENEGMDMEIDLSNLGTVNTMFAALFSKLGVPIKTTVSPNVLEEAMSGTVTVRPLPVGSSATGKVDKQSAHFYGVTISEEQAQSGIVVRVTSAAQSKFKLLFFEQEINGGYGLALQEDSQKTGKVTSAGMYFLHFQVYRMDSTVNALAMAKDPEAAFFKRLEGLQPCEVSALKSGTHIFAVYGDNFFKPASYTIEAMCAKSYEDTTQRLKEIESKILEKRNDLRQFETEYRKALARFQEVTNRYTQEKEAVDDMLRERDDIHSSFTTERTMVNSVGAGSSSSRYPTESPENGNIDGKDKSSKKKWFNLNLNRSDKKA

SEQ ID NO: 7722 - protein, 1131 aa, Sorghum arundinaceum
MSSSRPAHSSSSSSRTRQSSRARILAQTTLDAELNAEYEESGDSFDYSKLVEAQRSTPSEQQGRSGKVIAYLQHIQRGKLIQPFGCLLALDEKSFRVIAFSENAPEMLTTVSHAVPNVDDPPKLGIGTNVRSLFTDPGATALQKALGFADVSLLNPILVQCKTSGKPFYAIVHRATGCLVVDFEPVKPTEFPATAAGALQSYKLAAKAISKIQSLPGGSMEALCNTVVKEVFELTGYDRVMAYKFHEDEHGEVFAEITKPGIEPYLGLHYPATDIPQAARFLFMKNKVRMICDCRAKSVKIIEDEALSIDISLCGSTLRAPHSCHLQYMENMNSIASLVMAVVVNENEEDDEPGPEQPPQQQKKKRLWGLIVCHHESPRYVPFPLRYACEFLAQVFAVHVNKEFELEKQIREKSILRMQTMLSDMLFKEASPLSIVSGSPNIMDLVKCDGAALLYGDKVWRLQTAPTESQIRDIAFWLSEVHGDSTGLSTDSLQDAGYPGAASLGDMICGMAVAKITSKDILFWFRSHTAAEIKWGGAKHDPSDKDDNRRMHPRLSFKAFLEVVKMKSLPWSDYEMDAIHSLQLILRGTLNDALKPVQASGLDNQIGDLKLDGLAELQAVTSEMVRLMETATVPILAVDGNGLVNGWNQKVAELSGLRVDEAIGRHILTLVEDSSVSIVQRMLYLALQGKEEKEVRFELKTHGSKRDDGPVILVVNACASRDLHDHVVGVCFVAQDMTVHKLVMDKFTRVEGDYKAIIHNPNPLIPPIFGADQFGWCSEWNVAMTKLTGWHRDEVIDKMLLGEVFDSSNASCLLKSKDDFVRLCIIINSALAGEEAEKAPFGLFDRNGKYIECLLSVNRKVNADGVVTGVFCFIHVPSDDLQHALHVQQASEQTAQRRLKAFSYMRHAINKPLSGMLYSRETLKSTGLNEEQMRQVHVADSCHRQLNKILADLDQDNITDKSSCLDLDMAEFVLEDVVVSAVSQVLIGCQGKGIRVACNLPERFMKQKVYGDGIRLQQILSDFLFVSVKFSPVGGSVDISSKLTKNSIGENLHLIDFELRIKHQGAGVPAEILSQMYEEDNKEQSEEGLSLLVSRNLLRLMNGDIRHLREAGMSTFILTAELAAAPSAVGQ

SEQ ID NO: 7723 - protein, 376 aa, Triticum aestivum
AYLGDTIEQVCTKKQAGTGPEFPGYRRPTRPGSGIDLRSKSRTISKPVEDPSELPKWNYDGSSTGQAPGEDSEVILYPQAIFKDPFRGGNNILVICDTYTPQGEPIPTNKRHMAAQIFSDPKVTAQVPWFGIEQEYTLMQRDVNWPLGWPVGGYPGPQGPYYCAVGSDKSFGRDISDAHYKACLYAGIEISGTNGEVMPGQWEYQVGPSVGIDAGDHIWASRYILERITEQAGVVLTLDPKPIQGDWNGAGCHTNYSTLSMREDGGFDVIKKAILNLSLRHDLHIAAYGEGNERRLTGLHETASISDFSWGVANRGCSIRVGRETEAKGKGYLEDRRPASNMDPYTVTALLAETTILWEPTLEAEALAAKKLALKV

SEQ ID NO: 7724 - protein, 503 aa, Triticum aestivum
  misc_feature (220)..(220): Xaa can be any naturally occurring amino acid
  misc_feature (419)..(419): Xaa can be any naturally occurring amino acid
PLPSSHLTSAPVLSSSLPPEAAASLLSARIAMAAAADSKIDNLRDAVAKLGEISENEKSGFISLVSRYLSGEAEQIEWSKIQTPTDEVVVPYDTLAPPPEDLDAMKALLDKLVVLKLNGGLGTTMGCTGPKSVIEVRNGFTFLDLIVIQIESLNKKYGCSVPLLLMNSFNTHDDTQKIVEKYSNSNIEIHTFNQSQYPRIVTEDFLPLPSKGQTGKDGWXYPPGHGDVFPSLNNSGKLDTLLSQGKEYVFVANSDNLGAIVDIKILNHLITNQNEYCMEVTPKTLADVKGGTLISYEGRVQLLEIAQVPDEHVNEFKSIEKFKIFNTNNLWVNLKAIKRLVDAEALKMEIIPNPKEVDGVKVLQLETAAGAAIRFFEKAIGINVPRSRFLPVKATSDLLLVQSDLYTLVDGYVIRNPAXRVKPSNPSIELGPEFKKVANFLARFKSIPSIVELDSLKVSGDVSFGSGVVLKGNVTIAAKAGVKLEIPDGAVLENKDINGPEDL

SEQ ID NO: 7725 - protein, 327 aa, Brassica napus
  misc_feature (292)..(292): Xaa can be any naturally occurring amino acid
MGVDYYKVLQVDRSAKDDDLKKAYRKLAMKWHPDKNPNTKKEAEAKFKQISEAYDVLSDPQKRAIYDQYGEEGLNSQAPPPGPGGFPGGSDGGASFRFNGRSADDIFSEFFGFARPFGDTRGAGPSGGGFRFAEDVFSSYRSAKGEASNAAPPRKAAPIERQLPCSLEDLYKGTTKKMKISRDVIDSFGRPSTVEEILTIEIKPGWKKGTKITFPEKGNEQRGIIPSDLVFIVDEKPHAVFKRDGNDLVITQKIPLVEALTGYTAQVTTLDGRTLTVPVNNVISPTYEEVVXGEGMPIPKDPSRKGNLRIQGFNVKFPRFEGLNRLE

SEQ ID NO: 7726 - protein, 354 aa, Coccidioides immitis RS
MPALSGDPKDDANGRPHQERVKQFIESTLASVLDELSKPDGRPSVTLKRRSKRANNCSLNEETGALQVDTNGREWSVTYSWPGKTVTDAWKFGVIMRILGHISEAIEGKFISSKRDIYYLDPAYFGSQRLVDGYIDDIAYTVGVDRAALHVGILIPRAHEIVGFDLSGVRWILIIEKEAVFHRLATSNYHATSAAGGGILITGKGYPDLSTRAFLRSISEWRNSPARFIPIYVLVDCDPDGMAIMSTYKYGSISQSHENANLNVPGVEWLGLRASDTAIPGNADVDRPLIPMTLRDRTRAQAMLSHSVIFSDEREQEWRLELQRMLMVNAKAEIEVLYEKAGGIEGWLDRKLKR

SEQ ID NO: 7727 - protein, 284 aa, Jacobaea maritima
PKSQITPYRVVIIVRLVILGLFFHYRITNPVESSYGLWLTSVICEIWFAISWVLDQFPKWYPINRVTFTDELSARYEKDGEPSQLAAVDFFVSTVDPLKEPPLITANTVLSILAVDYPVDKVSCYVSDDGAAMLSFESLVETAEFARKWVPFCKKFSIEPRAPEFYFSQKIDYLKDKVQPSFVKERRAMKRDYEEYKVRVNALVAKAQKTPEEGWTMQDGTPWPGNNPRDHPGMIQVFLGNSGAHDIEGNELPRLVYVSREKRPGYRHHKKAGAENALVRVSAV

SEQ ID NO: 7728 - protein, 168 aa, Vitis vinifera
MECSQGSPSYYSVLGIRTDSSIEEIRRAYRKLAMKWHPDKWTRTPSVLGEAKRKFQQIQEAYSVLSDQRKRTVYDAGLYNPDEEEDEGFSDFLQEMISLMANVKREGKIYTREELQSMLMEMVRDFESPQLFCGASIFDNSRSMKRGRWETNSMVDRGSRLHVYGTSS

SEQ ID NO: 7729 - protein, 284 aa, Jacobaea maritima
PKSQITPYRVVIIVRLVILGLSFHYRITNLVESSYGLWLTSVICEIWFAISWVLDQFPKWYPINRVTFTDELSARYEKDGEPSQLAAVDFFVSTVDPLKEPPLITANTVLSILAVDYPVDKVSCYVSDDGAAMLSFESLVETAEFARKWVPFCKKFSIEPRAPEFYFSQKIDYLKDKVQPSFVKERRAMKRDYEEYKVRVNALVAKAQKTPEEGWTMQDGTPWPGNNPRDHPGMIQVFLGNSGAHDIEGNELPRLVYVSREKRPGYQHHKKAGAENALVRVSAV

SEQ ID NO: 7730 - protein, 284 aa, Jacobaea maritima
PKSQITPYRVVIIVRLVILGLFFHYRITNPVESSYGLWLTSVICEIWFAISWVLDQFPKWYPINRVTFTDELSARYEKDGEPSQLAAVDFFVSTVDPLKEPPLITANTVLSILAVDYPVDKVSCYVSDDGAAMLSFESLVETAEFARKWVPFCKKFSIEPRAPEFYFSQKIDYLKDKVQPSFVKERRAMKRDYEEYKVRVNALVAKAQKTPEEGWTMQDGTPWPGNNPRDHPGMIQVFLGNSGAHDIEGNELPRLVYVSREKRPGYQHHKKAGAENALVRVSAV

SEQ ID NO: 7731 - protein, 574 aa, Arabidopsis thaliana
MEPKENGSELGQKIIDGPTNPMVTPLLNDLYQFTMAYAYWKAGKHNERSVFDLYFRKNPFGGEYTVFAGLEECVKFLANFKLTDEEIDFVQECLPGSEEAFCDYLRGLDCSDVEVYAIPEGSVVFPKVPLMRVEGPVGVVQLLETPFLNLVNFASLVATNAARHRFVAGKSKSLLEFGARRAQGPDGAISASKYCYLGGFDATSNVAAGKLFGIPLRGTHSHAYVSSFMSTDEIVDKVLRSADGKTTCEDFVSHVQTWLKKIQYSPSLSGIFSETNQSELAAFTSYALAFPKTFLALVDTYDVMKSGIPNFCAVALALNDFGCDHMEFEMQLMFIVLRRYKALGIRLDSGDLAYLSREARNFFCTVERELKVPGFGKMVVTASNDLNEETIDALNKQGHEVDAFGIGTYLVTCYSQAALGCVFKLVEINNQPRIKLSEDVTKVSIPCKKRSYRLYGKEGYPLVDIMTGENEPPPKVGERLLCRHPFNESKRAYVVPQRVEELLKCYWRGSADEAREVLPPLKEIRDRCIKQLENMRPDHMRRLNPTPYKVSVSAKLYDFIHFLWLNEAPVGELQ

SEQ ID NO: 7732 - protein, 430 aa, Lotus japonicus
MAQILAPSTQWQTRITKTSPNASPITSNMWSSLLWKQNKKVARASKFRVLAIKSDGSTINRLEGLLNLDVTPYTDKFIAEYIWIRGTGVDVRSKSRTISKPVSHPSELPKWNYDGSSTGQAPGDDSEVILYPQAIFRDPFRGGNNILVICDAYTPQGEPIPTNKRHRAAEIFSNPKVQAEIPWYGIEQEYTLLQTDVKWPLGWPVGGYPGPQGPYYCAAGADKSFGRDISDAHYKACLYAGINISGTNGEVMPGQWEYQVGPSVGIEAGDHIWASRYLLERITEQAGVVLTLDPKPIEGDWNGAGAHTNYSTKSMREEGGFEVIKKAILNLSLRHQDHIRAYGEGNERRLTGKHETADINTFSWGVANRGCSIRVGRDTEKEGKGYLEDRRPASNMDPYVVTALLAETTLLWEPTLEAEALAAQKIQLKV

SEQ ID NO: 7733 - protein, 557 aa, Medicago truncatula
MEAAKNNNNERTSNGSIHGPTNPMVTPLLNDLYQFTMAYAYWKANKHQERAVFDLYFRKNPFGGEYTVFSGLEECIRFIANFKLSEDEIDFVRQSLSPSCEDAFFDYLRGLDCSDVEVYAIPEGTVVFPKIPLLRVEGPVAAVQLLETPFVNLINFASLVSTNAARHRKVAGKSKTLLEFGLRRAQGPDGGISASKYCYIGGFDATSNVAAGKLFGIPLRGTHSHAFVSSYMSLDEITDRSLRRKDGSSTCEDFVSLVQTWLSKIQLLNGVFGETNQSELAAFISYAFAFPDNFLALVDTYDVMRSGIPNFCAVALALGDLGYKAGGIRLDSGDLAYLSCQARKFFCSIEKEFGVPGFGKLIITASNDLNEETLDALNKQGHEVDAFGIGTYLVTCYAQAALGVVFKLVDINNQPRIKLSEDVSKVSIPCKKRSYRLYGKEGYPLVDIMTGEDEPPPKVGERILCRHPFQESKRAYVVPQRVEELLRCYWPGNLDKKLEPLPPLKEIRERCINQLEQMRPDHMRKLNPTPYKVSVSAKLYEFIHFLWLNEAPVGELQ

SEQ ID NO: 7734 - protein, 339 aa, Vitis vinifera
MGVDYYNVLKVGKNATDEDLKKSYRRLAMKWHPDKNPNNKKEAEAKFKQISEAYEVLSDPQKKVVYDQHGEEGLKDMPPPGSGGGFPFGSGDANGFFPRNAEDIFAEFFGSNPFGFGSAAHGRSMRFQSEGGGTFGGFGGGESAFRSYTEGTGGSVRLRKPPPVENKLPCTLAELYTGSTRKMKISRTVVDANGRLVPETEILIIEVKPGWKKGTKVTFQDKGNEQLNQLAADLVFVIDEKPDNVFKRDGNDLVMNYKVSLAEALAGTAVTLTTLDGRNLTIPVTDIVSPGYELVVAKEGMPIVKEPGNRGDLRIKFEVKFPTRLTPEQRAGLRRALGG

SEQ ID NO: 7735 - protein, 535 aa, Oryza sativa
MAAAAAAAANGAGGGGGVPRPTNPMVTPLLTDLYQFTMAYAYWKAGKHLDRAVFDLYFRKNPFGGEFTIFGGLEECIRFIANFKLTDTEITFLRSAMPTCEDGFFEYLSSIDCSDVEVYAIPEGSVVFPKVPLMIIEGPVAVIQLLETPFLSLVNYASLVTTNAARHRLVAGKSKNLLEFGLRRAQGPDGGISASRYCYMGGFDATSNVAAGWLFGIPIRGTHSHAFVSSFMGLDDIIDRTLASSDGSNKCEDFVSLVQNWLARIKDAGSLRGTFRETNLSELAAFTSYALAFPNSFLALVDTYDAAGIRLDSGDLAYLSVETRKFFRAIEEEFGFIGFGKMNITASNDLNEETIDALNKQGHEVDAFGIGTYLVTCYAQAALGCVFKLVEINKQPRIKLSEDVSIPCKKRCYRLFGKEGYPLVDIMTGEDEPAPKVGERLLCRHPFNESKRAYVVPQHVEELLKCYWPGTTSEPREELPSINEIRSRCMGYLDRMRPDHMRRLNPTPYKVSVSAKLYDFIHFLWLNEAPVGELQ

SEQ ID NO: 7736 - protein, 190 aa, Rhizobium leguminosarum
LWGFDGSSTMQAEGRNSDCVLKPVAIYPDPARTNGVLVMCEVMMPDGVTPHASNARATILDDEDAWFGFEQEYFFYENGRPLGFPESGYPAPQGPYYTGVGYSNVGSVAREIVEKHLDLCLAAGINHEGINAEVAKGQWEFQIFGKGSKKAADQIWMARYLLQRLTEKYGIDIEYHCKPLGDTDWNGSGH

SEQ ID NO: 7737 - protein, 430 aa, Lotus japonicus
MAQILAPSTQWQTRITKTSPNASPITSNMWSSLLWKQNKKVARASKFRVLAIKSDGSTINRLEGLLNLDVTPYTDKFIAEYIWIGGTGVDVRSKSRTISKPVSHPSELPKWNYDGSSTGQAPGDDSEVILYPQAIFRDPFRGGNNILVICDAYTPQGEPIPTNKRHRAAEIFSNPKVQAEIPWYGIEQEYTLLQTDVKWPLGWPVGGYPGPQGPYYCAAGADKSFGRDISDAHYKACLYAGINISGTNGEVMPGQWEYQVGPSVGIEAGDHIWASRYHLERITEQAGVVLTLDPKPIEGDWNGAGAHTNYSTKSMREEGGFEVIKKAILNLSLRHQDHIRAYGEGNERRLTGKHETADINTFSWGVANRGCSIRVGRDTEKEGKGYLEDRRPASNMDPYVVTALLAETTLLWEPTLEAEALAAQKIQLKV

SEQ ID NO: 7738 - protein, 174 aa, Zea mays
MGLSSSISVQKTLYEVLSVSEDATYDEIRAAYRSAALNTHPDKARTPLESCVLSGEQQEFSSVQKAWEILRHPTSRADYDKQLQSSRQNIEIIASEVQVGDMIIESTADADTVELSYPCRCGDYFSITSCELSGMGISVSGDGDGEVELQASDSPSASVVLGCGSCSLKIRLVL

SEQ ID NO: 7739 - protein, 38 aa, Macaranga conifera
GTNGEVMPGQWEFQVGPSVGIEAGDHIWCARYILERIT

SEQ ID NO: 7740 - protein, 1131 aa, Sorghum arundinaceum
MSSSRPAHSSSSSSRTRQSSRARILAQTTLDAELNAEYEESGDSFDYSKLVEAQRSTPSEQQGRSGKVIAYLQHIQRGKLIQPFGCLLALDEKSFRVIAFSENAPEMLTTVSHAVPNVDDPPKLGIGTNVRSLFTDPGATALQKALGFADVSLLNPILVQCKTSGKPFYAIVHRATGCLVVDFEPVKPTEFPATAAGALQSYKLAAKAISKIQSLPGGSMEALCNTVVKEVFELTGYDRVMAYKFHEDEHGEVFAEITKPGIEPYLGLHYPATDIPQAARFLFMKNKVRMICDCRAKSVKIIEDEALSIDISLCGSTLRAPHSCHLQYMENMNSIASLVMAVVVNENEEDDEPGPEQPPQQQKKKRLWGLIVCHHESPRYVPFPLRYACEFLAQVFAVHVNKEFELEKQIREKSILRMQTMLSDMLFKEASPLSIVSGSPNIMDLVKCDGAALLYGDKVWRLQTAPTESQIRDIAFWLSEVHGDSTGLSTDSLQDAGYPGAASLGDMICGMAVAKITSKDILFWFRSHTAAEIKWGGAKHDPSDKDDNRRMHPRLSFKAFLEVVKMKSLPWSDYEMDAIHSLQLILRGTLNDALKPVQASGLDNQIGDLKLDGLAELQAVTSEMVRLMETATVPILAVDGNGLVNGWNQKVAELSGLRVDEAIGRHILTLVEDSSVSIVQRMLYLALQGKEEKEVRFELKTHGSKRDDGPVILVVNACASRDLHDHVVGVCFVAQDMTVHKLVMDKFTRVEGDYKAIIHNPNPLIPPIFGADQFGWCSEWNVAMTKLTGWHRDEVIDKMLLGEVFDSSNASCLLKSKDDFVRLCIIINSALAGEEAEKAPFGLFDRNGKYIECLLSVNRKVNADGVVTGVFCFIHVPSDDLQHALHVQQASEQTAQRRLKAFSYMRHAINKPLSGMLYSRETLKSTGLNEEQMRQVHVADSCHRQLNKILADLDQDNITDKSSCLDLDMAEFVLEDVVVSAVSQVLIGCQGKGIRVACNLPERFMKQKVYGDGIRLQQILSDFLFVSVKFSPVGGSVDISSKLTKNSIGENLHLIDFELRIKHQGAGVPAEILSQMYEEDNKEQSEEGLSLLVSRNLLRLMNGDIRHIREAGMSTFILTAELAAAPSAVGQ

SEQ ID NO: 7741 - protein, 353 aa, Gibberella fujikuroi
MATPITSRTETLQKYLKLDQKGMIMAEYVWVDADGGTRSKSRTLPEKEYKPEDLPVWNFDGSSTNQAPGDNSDVYLRPCAVYPDPFRGSPNIIVLAECWNADGTPNKYNFRHDCVKVMDTYADDEPLFGLEQEYTLLGSDNRPYGWPAGGFPAPQGEYYCGVGTGKVVQRDIVEAHYKACLYAGIQISGTNAEVMPAQWEYQVGPCTGIAMGDQLWISRFFLHRVAEEFGAKVSLHPKPIAGDWNGGLHSNFSTKAMREEGGMKVIEEALKKLEPHHVECIAEYGEDNELRLTGRHETGSIDSFSWGVANRGTSIRVPRETAAKGYGYFEDRRPASNADPYRVTKVLLQFSMA

SEQ ID NO: 7742 - protein, 113 aa, Triticum aestivum
MGLDYYSVLKVNRSATEDDLKKSYRRLAMKWHPDKNPGDNKAEAEAKFKKISEAYEVLSDPQKRTVYDQYGEEGLKTSADAGSSSSSMNGSTNHRFNPRNAEDVFAEFFGSSK

SEQ ID NO: 7743 - protein, 1131 aa, Sorghum propinquum
MSSSRPAHSSSSSSRTRQSSRARILAQTTLDAELNAEYEESGDSFDYSKLVEAQRSTPSEQQGRSGKVIAYLQHIQRGKLIQPFGCLLAFDEKSFRVIAFSENAPEMLTTVSHAVPNVDDPPKLGIGTNVRSLFTDPGATALQKALGFADVSLLNPILVQCKTSGKPFYAIVHRATGCLVVDFEPVKPTEFPATAAGALQSYKLAAKAISKIQSLPGGSMEALCNTVVKEVFELTGYDRVMAYKFHEDEHGEVFAEITKPGIEPYLGLHYPATDIPQAARFLFMKNKVRMICDCRAKSVKIIEDEALSIDISLCGSTLRAPHSCHLQYMENMNSIASLVMAVVVNENEEDDEPGPEQPPQQQKKKRLWGLIVCHHESPRYVPFPLRYACEFLAQVFAVHVNKEFELEKQIREKSILRMQTMLSDMLFKEASPLSIVSGSPNIMDLVKCDGAALLYGDKVWRLQTAPTESQIRDIAFWLSEVHGDSTGLSTDSLQDARYPGAASLGDMICGMAVAKITSKDILFWFRSHTAAEIKWGGAKHDPSDKDDNRRMHPRLSFKAFLEVVKMKSLPWSDYEMDAIHSLQLILRGTLNDALKPVQASGLDNQIGDLKLDGLAELQAVTSEMVRLMETATVPILAVDGNGLVNGWNQKVAELSGLRVDEAIGRHILTLVEDSSVSIVQRMLYLALQGREEKEVRFELKTHGSKRDDGPVILVVNACASRDLHDHVVGVCFVAQDMTVHKLVMDKFTRVEGDYKAIIHNPNPLIPPIFGADQFGWCSEWNVAMTKLTGWHRDEVIDKMLLGEVFDSSNASCLLKSKDDFVRLCIIINSALAGEEAEKAQFGLFDRNGKYIECLLSVNRKVNADGVVTGVFCFIHVPSDDLQHALHVQQASEQTAQRRLKAFSYMRHAINKPLSGMLYSRETLKSTGLNEEQMRQVHVADSCHRQLNKILADLDQDNITDKSSCLDLDMAEFVLEDVVVSAVSQVLIGCQGKGIRVACNLPERFMKQKVYGDGIRLQQILSDFLFVSVKFSPVGGSVDISSKLTKNSIGENLHLIDFELRIKHQGAGVPAEILSQMYEEDNKEQSEEGLSLLVSRNLLRLMNGDIRHLREAGMSTFILTAELAAAPSAVGQ

SEQ ID NO: 7744 - protein, 294 aa, Geobacter sulfurreducens PCA
MAQHDYYETLGLKKGATEEEIKKAYRKLAITYHPDKNPGDAAAEEKFKEINEAYAVLSDPQKRAQYDQFGSNGFHQRFSQEDIFRGFDVGDMFKDMGVGTDDIFSRIFGGGFRQGGFSFTGTRQRGGDFTMELPVTFREAYAGCEKRVAYRRDGMREEISVKVPAGVETGARLRVAGKGGVGSGGTGDLYLVVKVGGDPQFHREGDDIVVEREIKFTDAALGASLDVPTLEGTKRVKVPAGIQSGTKIRLKGLGFPHMGKTAKGDLYVHINVSVPRSLSADQKAILEKLREAGL

SEQ ID NO: 7745 - protein, 294 aa, Sphenostylis stenocarpa
MITPSLVPSSDPLVTAASVLEFALAVYWGENGGEGTLADTCNTQNFQFVNIAFLSTFGNGQTPQLNLAGHCDPLNNGCTGLSSDITTCQNGGVKVLLSLGGSAGSYSLNSASEATQLATYLWNNFLGVQSDSRPLGDAILDGIDFDIESGGGEHWDELVKALNDLSSQRKVYLSAAPQCIIPDQHLNSAIQTGLFDYVWVQFYNNPSCQYSSGNTNDLINSWNQWITVPATQVFMGLPASEAAAPSGGFIPLDVLISQVLPQIKQSSKYGGIMLWDRFNDIQNSYSNAIVGSVN

SEQ ID NO: 7746 - protein, 284 aa, Jacobaea maritima
PKSQITPYRVVIIVRLVILGLFFHYRITNPVESSYGLWLTSVICEVWFAISWVLDQFPKWYPINRVTFTDELSARYEKDGEPSQLAAVDFFVSTVDPLKEPPLITANTVLSILAVDYPVDKVSCYVSDDGAAMLSFESLVETAEFARKWVPFCKKFSIEPRAPEFYFSQKIDYLRDKVQPSFVKERRAMKRDYEEYKVRVNALVAKAQKTPEEGWTMQDGTPWPGNNPRDHPGMIQVFLGNSGAHDIEGNELPRLVYVSREKRPGYQHHKKAGAENALVRVSAV

SEQ ID NO: 7747 - protein, 398 aa, Coprinopsis cinerea okayama7#130
MGVDYYKLLGVGRDASEEEIKKAYKKMALKWHPDRNKNSEEATKKFKEISEAFEVLSDKQKRTIYDQFGEEGLKGGRGPSPGAGGPGSGGFSGFSGFPGGGGTTFTFTSSGPGGGFSSFNPSDPNKIFADIFGSTGLFGMGGMGGMGGMGGMGGSRPGSGRRSTNVYDSDDDMDGPTFSFGGMPGGIPRRPGPTRTSSDFGRTHQQQPDKPPEITKPLKVSLKDLYNGTTKHLKVGRKLLNGTTEEKVLAIEIHPGWKSGTKIRFPKAGNEVPPTGEAQDLVFVVEEKPDDVFTREGDDLVAKVKLPLVEALTGPPSTVTKHTKTLDMLDGRKLQVAVPMGVVKPNQRSVVTGEGMPVRKDGQVRRKGDLIVQWDVEFPDRLTPSQKEGIRRILTGSS

SEQ ID NO: 7748 - protein, 284 aa, Petasites fragrans
PKSQITPYRVVIIIRLVILGLFFHYRITNPVESSYGLWLTSVICEIWFAISWVLDQFPKWYPINRITFTDELSARYERKGEPSQLAAVDFFVSTVDPLKEPPLITANTVLSILAVDYPVDKVSCYVSDDGAAMLSFESLAETAEFGRKWVPFCKKFSIEPRAPEFYFSQKIDYLKDKVQPSFVKERRAMKRDYEEYKVRVNALVAKAQKTPEEGWTMQDGTPWPGNNTRDHPGMIQVFLGNSGAHDIEGNELPRLVYVSREMRPGYQHHKKAGAENALVRVSAV

SEQ ID NO: 7749 - protein, 284 aa, Petasites fragrans
PKSQITPYRVVIIIRLVILGLFFHYRITNPVESSYGLWLTSVICEIWFAISWVLDQFPKWYPINRITFTDELSARYERKGEPSQLAAVDFFVSTVDPLKEPPLITANTVLSILAVDYPVDKVSCYVSDDGAAMLSFESLAETAEFGRKWVPFCKKFSIEPRAPEFYFSQKIDYLKDKVQPSFVKERRAMKRDYEEYKVRVNALVAKAQKTPEEGWTMQDGTPWPGNNTRDHPGMIQVFLGNSGAHDIEGNELPRLVYVSREKSPGYQHHKKAGAENALVRVSAV

SEQ ID NO: 7750 - protein, 350 aa, Zea mays
MATPGKGGAARFAAALFVLLNLAVAIAGKSYYDVLQVPKGASEDQIKRSYRKLALKYHPDKNPDNEEANKRFAEINNAYEVLTDQEKKKIYDRYGEEGLKQFQGGRGSGGGMNIQDIFSSFFGGGGGGMEEEEQQILKGDEVIVELDASLEDLYMGGSLKVWREKNVIKPAPGKRRCNCRNEVYHRQIGPGMYQQMTEQVCDQCPNVKFVREGEFLTVDIEKGMKDGQEVLFFEEGEPKIDGEPGDLKFRIRTALHSHFKREGNDLHATVTISLLQALVGFEKTIKHLDNHLVEIGTKGITKPKEIRKFKGEGMPLYQSNKKGDLYVTFEVLFPKTLTADQKAKLKDVLV

SEQ ID NO: 7751 - protein, 284 aa, Petasites fragrans
PKSQITPYRVVIIIRLVILGLFFHYRITNPVESPYGLWLTSVICEIWFAISWVLDQFPKWYPINRITFTDELSARYERKGEPSQLAAVDFFVSTVDPLKESPLITANTVLSILAVDYPVDKVSCYVSDDGAAMLSFESLAETAEFGRKWVPFCKKFSIEPRAPEFYFSQKIDYLKDKVQPSFVKERRAMKRDYEEYKVRVNALVAKAQKTPEEGWTMQDGTPWPGNNTRDHPGTIQVFLGNSGAHDIEGNELPRLVYVSREKRPGYQHHKKAGVENALVRVSAV

SEQ ID NO: 7752 - protein, 190 aa, Rhizobium leguminosarum
LWGFDGSSTMQAEGRNSDCVLKPVAIYPDPARTNGVLVMCEVMMPDGVTPHASNARATILDDEDAWFGFEQEYFFYQNGRPLGFPESGYPAPQGPYYTGVGYSNVGSVAREIVEKHLDLCLAAGINHEGINAEVAKGQWEFQIFGKGSKKAADQIWMARYLLQRLTEKYGIDIEYHCKPLGDTDWNGSGH

SEQ ID NO: 7753 - protein, 764 aa, Arabidopsis thaliana; identical to SEQ ID NO: 1662

SEQ ID NO: 7754 - protein, 316 aa, Chlamydomonas reinhardtii
MGKDYYAILGVQKGADENELKKAYRKLAMKWHPDKNPDNKEEAAAKFKEISEAYEVLTDPDKREVYDKFGEEGLKGGMGGGPGGGPGGPGGFHFRRPEDIFAELFGGRSPFGMDDDDMYAGGSFGGGGGGFPFGALVPDLCASTPGSSLPLHGQELYAGTTKKMKINRKVKGRPQEEILEIAVRPGWKKGTKITFQEKGDEDQGIIPADIVFVIDEKPHPRFRREGNDLYFTAVVSLADALCGTTLQIPHLDGTTIDLPIRDVIRPGESKVLRGKGMPVTKEPGAFGNMVLKFDVKFPRELSDATKQQLRAILPSH

SEQ ID NO: 7755 - protein, 155 aa, Physcomitrella patens subsp. patens; identical to SEQ ID NO: 244

SEQ ID NO: 7756 - protein, 213 aa, Platylophus trifoliatus
DIPQASRFLFMKNKVRMICDCFAPPVKVIQDKKLAQPLSLCGSALRSPHGCHAQYMANMGSIASLVMSVTINEDDEEMDSDQQKGRKLWGLVVCHHTTPRFVPFPLRYACEFLIQVFGVQINKEVELAAQRREKHILRIQTMLCDMLLRDAPVGIITQSPSVMDLVKCDGAALYYRKKFWLLGVTPTEAQIKDIAEWLLEYHSASTGLSTDSL

SEQ ID NO: 7757 - protein, 374 aa, Dichelobacter nodosus VCS1703A
MADKDLYAILGVCRTANQDEIKKAYRKLSMKWHPDRNPNNKEEAEEKFKEINKAYEILSDSQKRASYDRFGFDAANQGAAGGGFSGGNFSDIFGDVFGDIFGNVRQTNGARQTRGHDLAYKIELSLEEAIHGVEKQIRIATQVRCGECHGSGMNAKSKKKTCPTCNGAGQVRMQQGFFSIAQPCPTCHGRGEIIENPCNKCQGTGRVKDTRVLTVNIPAGVDNGDRIRLSGEGEAGELGAPAGDLYIEIFVRAHPIFERQGNDLYCKMPISFTTACLGGDLEVPTLNGRVKLSIPEETQTGKTFRLKGKGVQSVRSNSVGDLYCTVTIETPINLSKAQKELLMNFEQALNEGGKTHTPQAKGFFDNIKQFFDNL

SEQ ID NO: 7758 - protein, 1124 aa, Vitis vinifera
MSSSRPTQSSSTSGRSKHSARIIAQTTVDAKLHADFEESGSSFDYSSSVRFTPAGGDQQPRSDKVTTAYLHHIQKGKLIQPFGSLLALDEKTFKVIAYSENAPEMLTMVSHAVPSVGEHPVLGIGTDVRTIFSGPSASALHKALGFGEVSLLNPILVHCKTSGKPFYAIIHRVTGSLIIDFEPVKPYEVPMTAAGALQSYKLAAKAITRLQSLPSGSLERLCDTMVQEVFELTGYDRVMAYKFHDDDHGEVVSEITKPGLEPYLGLHYPATDIPQAARFLFMKNKVRMICDCRAKHIQVLQDEKLPFDLTLCGSTLRAPHSCHVQYMENMNSIASLVMAVVVNDGDEEGESSNSGQPQKRKRLWGLVVCHHTTPRFVPFPLRYACEFLAQVFAIHVNKELELESQILEKNILRTQTLLCDMLMRDAPLGIVSQSPNVMDLVKCDGAALLYKNKVWRLGITPSDFQLHDICSWLSEYHMDSTGLSTDSLYDAGYPGALALGDAVCGMAAVKITSKDTLFWFRSHTAAEVRWGGAKHEPGEKDDGRKMHPRSSFKAFLEVVKTRSLPWKDYEMDAIHSLQLILRNAFKDSEAMDVNTNAIHTKLNDLKIEGMQELEAVTSEMVRLIETASVPILAVDVDGLVNGWNTKISELTSLPVDKAIGMHLLTLVEDSSADTVKKMLHLALQGQEEQNVQFEIKTHGSKRDSGPISLVVNACASRDLHENVVGVCFVAQDITSQKTVMDKFTRIEGDYKAIVQNPNPLIPPIFGTDEFGWCSEWNPAMVKLSGWNREEVMDKMLLGEVFGTHMACCRLKNREAFVGLGIVLNSVMTGRESEKVSFGFFSKSGKYVECLLSVSKKLDREGAVTGVFCFLQLASQELQQALHIQRLSEQTALKRLKALAYIKRQIKNPLSGIIFSRKMMEDTDLGEEQQQILHTSAQCQRQLSKILDDHDLDSIIEGYLDLEMVEFTLREVLVASISQVMIKSNGKGIQIVNDAEEGIMTETLYGDGLRLQQVLADFLLISVNFTPGGGQLSVAASLIKDRLGESVHLVHLELRITHAGNGVPEQLLNQMFGNNGDASEEGISLLISRKLVKLMNGDVQYLREAGKSTFIISIELAAARKKPQA

SEQ ID NO: 7759 - protein, 296 aa, Rhizobium sp. WSM870
  misc_feature (106)..(106): Xaa can be any naturally occurring amino acid
  misc_feature (281)..(281): Xaa can be any naturally occurring amino acid
RGKTQIKEFDAFPTLEQLPLWGFDGSSTQQAEGRSSDCVLKPVAVYPDPVRTNGALVMCEVMMPDGKTPHPSNTRATVLDDESAWFGFEQEYFFYKNGRPLGFPEXGYPAPQGPYYTGVGYKNVGDIARQIVEEHLDICLAAGINHEGINAEVAKGQWEFQVFGKGSKKAADEVWLARYLLLRLTEKYGIDVEFHCKPLGDTDWNGSGMHANFSTAYLREVGGKDYFEALMAAFEKNLHDHINVYGPDNHLRLTGKHETAPWDKFSYGVADRGASIRVPHXFVNNGYRGYLEDRRP

SEQ ID NO: 7760 - protein, 194 aa, Agrobacterium tumefaciens
EQLPLWGFDGSSTQQAEGHSSDCVLKPVAIYPDPARSNGALVMCEVMMPDGVTPHPSNSRATILDDEDAWFGFEQEYFFYQDGRPLGFPEQGYPAPQGPYYTGVGFKNVGSVAREIVEEHLDLCLEAGINHEGINAEVAKGQWEFQVFGKGSKRAADQIWIARYLLLRLCEQYGIDVEFHCKPLGDTDWNGSGI

SEQ ID NO: 7761 - protein, 1178 aa, Sorghum bicolor
MASGSRATPTRSPSSARPEAPRHAHHHHHHHSQSSGGSTSRAGGGGGGGGGGGGTAATATATATESVSKAVAQYTLDARLHAVFEQSGASGRSFDYSQSLRAPPTPSSEQQIAAYLSRIQRGGHIQPFGCTLAVADDSSFRLLAFSENAADLLDLSPHHSVPSLDSAAPPPVSLGADARLLFSPSSAVLLERAFAAREISLLNPLWIHSRVSSKPFYAILHRIDVGVVIDLEPARTEDPALSIAGAVQSQKLAVRAISRLQALPGGDIKLLCDTVVEHVRELTGYDRVMVYRFHEDEHGEVVAESRRDNLEPYLGLHYPATDIPQASRFLFRQNRVRMIADCHATPVRVIQDPGMSQPLCLVGSTLRAPHGCHAQYMANMGSIASLVMAVIISSGGDDEQTGRGGISSAMKLWGLVVCHHTSPRCIPFPLRYACEFLMQAFGLQLNMELQLAHQLSEKHILRTQTLLCDMLLRDSPTGIVTQSPSIMDLVKCDGAALYYHGKYYPLGVTPTESQIKDIIEWLTVCHGDSTGLSTDSLADAGYLGAAALGDAVCGMAVAYITPSDYLFWFRSHTAKEIKWGGAKHHPEDKDDGQRMHPRSSFKAFLEVVKSRSLPWENAEMDAIHSLQLILRDSFRDAAEGTSNSKAIVNGQVQLGELELRGINELSSVAREMVRLIETATVPIFAVDTDGCINGWNAKIAELTGLSVEEAMGKSLVNDLIFKESEEIVEKLLSRALRGEEDKNVEIKLKTFGSEQSNGAIFVIVNACSSRDYTQNIVGVCFVGQDVTGQKVVMDKFINIQGDYKAIVHNPNPLIPPIFASDENTSCSEWNTAMEKLTGWSRGEVVGKFLIGEVFGSFCRLKGPDALTKFMVVIHNAIGGQDYEKFPFSFFDKNGKYVQALLTANTRSKMDGKSIGAFCFLQIASAEIQQAFEIQRQQEKKCYARMKELAYICQEIKNPLSGIRFTNSLLQMTDLNDDQRQFLETCSACEKQMSKIVKDATLQSIEDGSLVLEKSEFSFGDVMNAVVSQAMLLLRERDLQLIRDIPDEIKDASAYGDQFRIQQVLADFLLSMVRSAPSENGWVEIQVRPNVKQNSDGTDTELFIFRFACPGEGLPADIVQDMFSNSQWSTQEGVGLSTCRKILKLMGGEVQYIRESERSFFLIVLELPQPRPAADREIS

SEQ ID NO: 7762 - protein, 1178 aa, Sorghum bicolor
MASGSRATPTRSPSSARPEAPRHAHHHHHHHSQSSGGSTSRAGGGGGGGGGGGGTAATATATATESVSKAVAQYTLDARLHAVFEQSGASGRSFDYSQSLRAPPTPSSEQQIAAYLSRIQRGGHIQPFGCTLAVADDSSFRLLAFSENAADLLDLSPHHSVPSLDSAAPPPVSLGADARLLFSPSSAVLLERAFAAREISLLNPLWIHSRVSSKPFYAILHRIDVGVVIDLEPARTEDPALSIAGAVQSQKLAVRAISRLQALPGGDIKLLCDTVVEHVRELTGYDRVMVYRFHEDEHGEVVAESRRDNLEPYLGLHYPATDIPQASRFLFRQNRVRMIADCHATPVRVIQDPGMSQPLCLVGSTLRAPHGCHAQYMANMGSIASLVMAVIISSGGDDEQTGRGGISSAMKLWGLVVCHHTSPRCIPFPLRYACEFLMQAFGLQLNMELQLAHQLSEKHILRTQTLLCDMLLRDSPTGIVTQSPSIMDLVKCDGAALYYHGKYYPLGVTPTESQIKDIIEWLTVCHGDSTGLSTDSLADAGYLGAAALGDAVCGMAVAYITPSDYLFWFRSHTAKEIKWGGAKHHPEDKDDGQRMHPRSSFKAFLEVVKSRSLPWENAEMDAIHSLQLILRDSFRDAAEGTSNSKAIVNGQVQLGELELRGINELSSVAREMVRLIETATVPIFAVDTDGCINGWNAKIAELTGLSVEEAMGKSLVNDLIFKESEEIVEKLLSRALRGEEDKNVEIKLKTFGSEQSNGAIFVIVNACSSRDYTQNIVGVCFVGQDVTGQKVVMDKFINIQGDYKAIVHNPNPLIPPIFASDENTSCSEWNTAMEKLTGWSRGEVVGKFLIGEVFGSFCRLKGPDALTKFMVVIHNAIGGQDYEKFPFSFFDKNGKYVQALLTANTRSKMDGKSIGAFCFLQIASAEIQQAFEIQRQQEKKCYARMKELAYICQEIKNPLSGIRFTNSLLQMTDLNDDQRQFLETCSACEKQMSKIVKDTTLQSIEDGSLVLEKSEFSFGDVMNAVVSQAMLLLRERDLQLIRDIPDEIKDASAYGDQFRIQQVLADFLLSMVRSAPSENGWVEIQVRPNVKQNSDGTDTELFIFRFACPGEGLPADIVQDMFSNSQWSTQEGVGLSTCRKILKLMGGEVQYIRESERSFFLIVLELPQPRPAADREIS

SEQ ID NO: 7763 - protein, 205 aa, Ephedra foeminea
DEHGEVVSEIRRSDLVPYLGLHYPATDIPQASRFLFMQNRVRMICDCRALPVKVIQSGELKQPLCLVGSTLRAPYGCHAHYMANMGSIASLVMAVIVRNEDDGGNNNTGSGGGGSGGEGSGSHIGRNTMKLWGLVVCHHTSPRTVPFPLRYACEFLMQAFGLQLNMELQLAAQLTEKHILKTQTLLCDMLLRDTPMGIVTQSPSI

SEQ ID NO: 7764 - protein, 311 aa, Glycine max
  misc_feature (295)..(295): Xaa can be any naturally occurring amino acid
IVEKYQNSNIEIHTFNQSQYPRLVAEDFLPLPSKGHTDKDGWYPPGHGDVFPSLLNSGKLDALLSQGKEYVFVANSDNLGAIADLKILNHLIQNKNEYCMEVTPKTLADVKGGTLISYEGRVQLLEIAQVPDEHVNEFKSIEKFKIFNTNNLWVNLNAVKRLVEADALKMEIIPNPKEVDGIKVLQLETAAGAAIRFFDKAIGINVPRSRFLPVKATSDLLLVQSDLYTLEDGFVIRNKARANPENPSIELGPEFKKVSNFLGRFKSIPSIVELDSLKVAGNVWFGAGVILKGKXSIVANPGVKLGVPDGA

SEQ ID NO: 7765 - protein, 652 aa, Trichophyton equinum; identical to SEQ ID NO: 3974

SEQ ID NO: 7766 - protein, 284 aa, Petasites fragrans
PKSQITPYRVAIIIRLVILGLFFHYRITNPVESSYGLWLTSVICEIWFAISWVLDQFPKWYPINRITFTDELSARYERKGGPSQLAAVDFFVSTVDPLKEPPLITANTVLSILAVDYPVDKVSCYVSDDGAAMLSFESLAETAEFGRKWVPFCKKFSIEPRAPEFYFSQKIDYLKDKVQPSFVKERRAMKRDYEEYKVRVNALVAKAQKTPEEGWTMQDGTPWPGNNTRDHPGMIQVFLGNSGAHDIEGNELPRPVYVSREKRPGYQHHKKAGAENALVRVSAV

SEQ ID NO: 7767 - protein, 286 aa, Oryza sativa
MCGTGNRPRSEEDETAVGSRNFRAPATPPAAISSSSSSPALPGDDQLPPSCSFGILVQFAVVSGLLDKMVKLTMVARVTDGLPLAEGLDDGRDQKDADFYKQQAKLLFKNLSKGQHEASRMSIETGPYFFHYIIEGRVCYLTMCDRSYPKKLAFQYLEDLKNEFERVNGSQIETAARPYAFIKFDTFIQKTKKLYLDTRTQRNLAKLNDELYEVHQIMTRNVQEVLGVGEKLDQVTEMSTRLTSDTRMYADKAKDLNRQALIRKYAPVAIVIGVVLMLFWLKNKIW

SEQ ID NO: 7768 - protein, 1178 aa, Gemmata obscuriglobus UQM 2246
MQHFWLSLFDTSDFPARWRCGNWDAPLGWLHILSDLGVWSAYLAIPIALVLFARRRKDVPFRNLFWLFSAFILLCGTTHLIEAIIFWWPAYRLAGLVKLATAVVSWATVLSLLPVIPKAFAMRSPEELEREVAERRRVEAELRASEERFRAAMNGSLDAMFFLTAVRDPDGLITDFTFDDVNPAGEHLVARTRAETVGQRLCEMLPVNRTGGFCDRYARVVVTREPLEEEFPFQTPEGVSCWLQHQVVPLGDGVVITSRDITARKQAELELRASEERLRSVVESATDAIITTDRHGLVVGWNRGAERVFGCPAEAATGSDITRIIPARYRAAHAGRLAEYRPGRPSSVVGQVVAVDAQRRDGTEFPAELTVTAWEAGGETFFTSIVRDVTDSRRAAEAVARSERYYRTLFEHAHDPVLVFDPDGERVLDVNPAACRAYGLPREEFVGRSLADLSADPAGGLVHVAAATDGRDVYQFETVQFRRDGARMELEVNASVVEFDGRPAVLSVNRDVTERNRAEARRAERERAAAMRAGVAAAVARGGDKPEALRACCAAVVDELGAALVRVWVLPEGGTVLELRASAGLTASTDGLYARIPVGRLLVGRIAEERKPYWTDAVADDPLTGEPERVRSAGLVGFAGYPLLVEGRLVGVLATFARTALGAPAREALGGAADLIAQFVERRRAEEQMRLRDRALAAFPQGVAIADATRPDHPLVYVNPGFERMTGYPAAEALGRNCRFLQGKGTDPSAVAAVRAALRDGRAALVELLNYRKDGKPFWNALTVAPVRDGAGALTHFVAIQTDVSPLKQLEAQLLQSQKMEAVGRLAGGVAHDFNNLLTVILGFGGMLGDRLTGRERTLVGEIVKAGERAAGLTRQLLAFSRQEVIQPRPLSLNVVVAEAERLLRRLIGEDIELTTVADPELAQVVADPGQAEQVLMNLVVNARDAMPTGGRLTVETSNVERDGARYVLLSVTDTGCGMSDEVKARLFEPFFTTKGAGRGTGLGLAVVHGVVEQAGGHIEVDSVIGHGTTFQVYFPAAGAGPGSSGVATPLPAVPDGTETVLLVEDDTEVRALAREVLRERGYTVLEAPGAGEALQTAAAHRGPLPLLITDVVMPGMGGRQLAEALQWSRPGLRVLYVSGYTDDAVVRHGVRSAEVAFLQKPFTAEALARKVRAVLDG

SEQ ID NO: 7769 - protein, 280 aa, Petasites fragrans
ITPYRVVIIIRLVILGLFFHYRITNPVESSYGLWLTSVICEIWFAISWVLDQFPKWYPINRITFTDELSARYERKGEPSQLAAVDFFVSTVDPLKEPPLITANTVPSILAVDYPVDKVSCYVSDDGAAMLSFESLAETAEFGRKWVPFCKKFSIEPRAPEFYFSQKIDHLKDKVQPSFVKERRAMKRDYEEYKVRVNALVAKAQKTPEEGWTMQDGTPWPGNNTRDHPGMIQVFLGNSGAHDIEGNELPRLVYVSREKRPGYQHHKKAGAENALVRVSAV

SEQ ID NO: 7770 - protein, 284 aa, Pericallis appendiculata
PKSQITPYRVVIIIRLVILGLFFHYRITNPVESSYGLWLTSVICEIWFAFSWVLDQFPKWYPINRVTFTDELSARYEKEGEPSQLAAVDFFVSTVDPLKEPPLITANTVLSILAVDYPVEKVSCYVSDDGAAMLSFESLVETAEFARKWVPFCKKFSIEPRAPEFYFSQKIDYLKDKVQPSFVKERRSMKRDYEEYKVRVNALVAKAQKTPEEGWTMQDGTPWPGNNPRDHPGMIQVFLGNSGAHGIEGNEIPRLVYVSREKRPGYQHHKKAGAENALVRVSAV

SEQ ID NO: 7771 - protein, 362 aa, Oryza sativa Indica Group
MGMDYYKILGVDKAASDDDLKKAYRKLAMKWHPDKNPNNKKEAENKFKQISEAYEVLSDPQKRAVYDQYGEEGLKGQVPPPGAGGTGPGGATFFSTGGDGPNVFRFNPRNAEDIFAEFFGSSSPFGGMGGGMGGGMGGGPGMRTGGTRFSSSIFGDDIFGSAFGGGADGHHGMHGGGAGRALKAPAIERKLPCSLEELYKGTTKKMKISREIADASGKTIPVEEILTIDVKPGWKKGTKITFPEKGNEQPNVIPADLVFIIDEKPHPVFTRDGNDLVVTQKIPLAEALTGHTVHLTTLDGRSLTIPITSVINPGYEEVVRGEGMPIPKDPSKKGNLRVKFDIKFPARLTADQKSGVKRLLGQ

SEQ ID NO: 7772 - protein, 93 aa, Zea mays
  misc_feature (46)..(46): Xaa can be any naturally occurring amino acid
  misc_feature (48)..(48): Xaa can be any naturally occurring amino acid
  misc_feature (80)..(80): Xaa can be any naturally occurring amino acid
IEKFKIFISYILWVNLKAIDRLEEAEALKMEIIPNPKEVDGVKVLXTXTASGASIRFFDKAIGINVFCSRFFPLNATFDXLLRWQSDLYTIDY

SEQ ID NO: 7773 - protein, 427 aa, Vitis vinifera
MYQSPSMEPQPCQTMDNPKPLSGFAATTLQKVRNNLAFRSKWLEVNGAMGDLGTYIPIVLALTLAKDLNLGTTLIFTAIYNILTGALYGLPMPVQPMKSIAAVAISNGSSFGIPEVMAAGICTSGALFLLGVTGLMETVYRLIPLPVVRGVQLSQGLSFAMTAVKYIRKEQDFSKSKSGGERHWRPGARRRRRLRRIISSLPSAFIVFLLGVVLAIVRRPHVLKEMKIGPSPIKVVKISKHAWKEGFIKGAIPQLPLSLLNSVIAVCKLSSDLFPEKNCSVTSVSVTVGLMNLVGCWFGAMPCCHGAGGLAGQYKFGGRSGGCVALLGAAKLVLGLVLGSSLAKLLNQFPVGVLGVLLLFAGIELAMASRDMASKEESFVMLLCAAVSLVGSSAAIGFVCGIIVHLLLRLRNMTKDQSCSTTFGNQA

SEQ ID NO: 7774 - protein, 394 aa, Desulfovibrio desulfuricans subsp. desulfuricans str. G20
MQLGRYRFDRMELAGSLGDLGTLLPLAVGMIMVNGLDPMGLFFAVGLYYIIAGHYYGVPVAVQPMKSIGGYAVATGVGTGSVSAACLIMGLGMLAVGRWNLAEALRRHIPQAVIRGVQASTGVLLATQGVRFMLGTHSLQQQLSEPFLGLGGLGPVPWSLILGLAFLTCALLLLNNPRFPAALVVVGSGLLLGLVFSDATFSFGLHLPRLLPLGLPSLADFAYALPVLVMPQLPMTLGNAVIANADLSHTYFPESSSRVTPRSLCYSMGAACTGAFLLGGMPMCHGAGGLAAHYRFGARTCGSNLIIGAVFVLFSVMLGAGMLDAVRLLPLAVLGTLLLLAGLELCLTVRDVLDRSGLFVVFCMLTLTLTTNLAVSFVAGTALALLMARGRITL

SEQ ID NO: 7775 - protein, 365 aa, Thermoplasma acidophilum DSM 1728
MAKDYYKILGVDRNATDEEIKKAFRELAKKWHPDLHPENKQEAEEKFKEISEAYEVLSDPQKRRMYDQTGTVDFGAGGQNFNWDNFTHYSDLNDIFNDIFGGNFASDFFSGFGRGQREEQYDLDLYTNLDITLEDAYYGTEKRIKYRRNAMCPDCNGTGAKNGKLITCPTCNGTGQQRIVRGQGFFRMVTVTTCQTCGGRGRIPEEKCPRCNGTGTVVVNEDISVKIPKGATDNLRLRVQGKGQSYNGRTGDLYVVLRVRNDRNVQRINDDLMIDQKINFAQAALGDTIEVNLFREKYSLKIPEGTQPGEVLRIKGAGMPHLNGHGSGDLLVRVNVEVPKRLTQKQKDLIREIFDIKENHRSWFH

SEQ ID NO: 7776 - protein, 195 aa, Agrobacterium tumefaciens
LEQLPLWGFDGSSTQQAEGHSSDCVLKPVAIYPDPARTNGVLVMCEVMMPDGVTPHASNSRATILDDEDAWFGFEQEYFFYQDGRPLGFPEQGYPAPQGPYYTGVGFKNVGSVAREIVEEHLDLCLEAGINHEGINAEVAKGQWEFQVFGKGSKRAADQIWIARYLLLRLCEQYGIDVEFHCKPLGDTDWNGSGI

SEQ ID NO: 7777 - protein, 255 aa, Oryza sativa Indica Group; identical to SEQ ID NO: 1674

SEQ ID NO: 7778 - protein, 193 aa, Sinorhizobium fredii
EQLPLWGFDGSSTNQAEGRSSDCVLKPVAVYPDPVRTNGVLVMCEVMMPDGKTPHPSNSRATILDDEGAWFGFEQEYFFYKNGRPLGFPEQGYPAPQGPYYTGVGYSNVGDVARKIVEEHLDICLAAGINHEGINAEVAKGQWEFQVFGKGSKKAADEVWMARYLLQRLTEKYGIDVEYHCKPLGDTDWNGSR

SEQ ID NO: 7779 - protein, 376 aa, Oryza sativa Indica Group; identical to SEQ ID NO: 1676

SEQ ID NO: 7780 - protein, 380 aa, Oryza sativa Indica Group; identical to SEQ ID NO: 1681

SEQ ID NO: 7781 - protein, 736 aa, Pinus sylvestris
VPSMEKPQQDVLTIGTDVRTLFTAASAHSLEKAAVAQEISLMNPIWVHCKNSRKPFYAIVHRIDVGMVIDLEPLRTGDAFMSAAGAVQSQKLAVRAISRLQSLPCGDVGLLCDTVVENVRELTGYDRVMVYKFHEDEHGEVVAEIRRSDLEPYLGLHYPATDIPQASRFLFMQNRVRMICDCMATPVKVIQSEELMQPLCLVGSTLRAPHGCHAQYMANMGSIASLVMAVIINGNDDEGGGSGRNSMKLWGLVVCHHTSPRAVPFPLRYACEFLMQALGLQLNMELQLAAQLTEKHILRTQTLLCDMLLRDAPMGIVTQSPSIMDLVKCDGAALYYGGMCWLLGVTPTEAQIKDIADWLLEHHGDSTGLSTDSLADAGYPGAASLGDAVCGMASARITSKDFLFWFRSHTAKEMKWGGAKHHPDDKDDARRMHPRSSFKAFLEVVKRRSLPWDNVEIDAIHSLQLILRGSFQDIDDSGTKTMVHSRLNDLRLQGIDELSSVASEMVRLIETATAPILAVDYNGLVNGWNAKVAELTGLPVGEAMGMSLVQDLVFEQSVERVEKMLHNALRGEEEKNVEMMLKTFGPQKEKEAVILVVNACSSRDFTDNIVGVCFVGQDVTSQKVVMDKFIRIQGDYRSIVQSPNPLIPPIFASDEYACCSEWNAAMEKVTGWTHDEVIGKMLVGEIFGGCCRLKGQDAVTKFTIVLHSAIDGQEIEKFPFAFFDKQGKYVEALLTA

SEQ ID NO: 7782 - protein, 347 aa, Candidatus Phytoplasma australiense
MTKKDYYQVLGLNKEATPKEIKKAYLRLAKKYHPDVSQEANAEANFKEIQEAYSVLSDANKKANYDRFGHDSQTQQQGFSGFEGFEENIFNSFSDFFGTNKRSRKVNYDKKVEMTISFMDAVLGALKNIDIMVDADCQVCQGKGALSSSDIVKCRHCNGLGQVITEQRTFLGNIRSQQTCPYCRGEGEQIKNKCYSCHGSKRQKKKQSVSFQIPAGIEEGMSFQIHGKGNFPPLSNQAGDLYINFKIRPHESFVRKNQDIVLEIFINVPEAVLGTNKLIPTIYGEVNLKIPSGIQSGNKLRMKNQGIAYLNSSYRKGDQYVVVHVKIPSSPTLEEKRLYLKLLQLSN

SEQ ID NO: 7783 - protein, 383 aa, Alkalilimnicola ehrlichei MLHE-1
MSKSDYYEALGVARNASDSEIKKAYRRMAMKYHPDRNPGDKEAEARFKEAKEAYEILSDPQKRAAYDQFGHAGVDPSAGMGGAGGPGGPGGPDFADIFSDVFGDIFGGGGRRGGGGRRVFRGADLRYNLELSLEDAVRGTEVQIRVPTQEVCDACDGKGTKEGSQPETCPTCKGHGDVRIQQGFFSVQQTCPRCGGSGSVITDPCRKCGGRGRVQSQKTLSVRVPAGVDTGDRIRLSGEGEPGENGGPPGDLYVQIMVREHEFFQRDGANLRCEVPISITKAALGGEVEVPTLDGRVNLRIPAGAQSGKVFRVRGKGVKPVRGGPQGDLLCRVHVETPVNLTKKQKELLEEFGRTMDDTGDKHTPRTSSWLDKARKFFEDWKL

SEQ ID NO: 7784 - protein, 312 aa, Prochlorococcus marinus str. MIT 9211
MTKGGFRDYFNLLGIERNAKTSEIKAAFRNLARKYHPDVNPGDKNAEAKFKEINEAYAVLSDAKKRKLYEEYLQNWKKSSDMSSKGSGFHADFEWHGNFDDFINDLLERLGGFQASNGFPRRSPLYRTGANTPVNLDAEINMQITFLEAFRGTDRRLKVNDERVQIRIPRGVCTGTKLRVKGKGNFQPGMGRRGDLIITLKVAQHPIWKLEHNQLVADLPLALDELLLGGTVIVMTPDGQAQIFIPPGTLPGKTLKLKGKGWPVKNDRGDLLLTIKMELPEQWSPKELELFNELKEQRTTNPRKDWLRLARL

SEQ ID NO: 7785 - protein, 1122 aa, Arabidopsis thaliana
MSGSRPTQSSEGSRRSRHSARIIAQTTVDAKLHADFEESGSSFDYSTSVRVTGPVVENQPPRSDKVTTTYLHHIQKGKLIQPFGCLLALDEKTFKVIAYSENASELLTMASHAVPSVGEHPVLGIGTDIRSLFTAPSASALQKALGFGDVSLLNPILVHCRTSAKPFYAIIHRVTGSIIIDFEPVKPYEVPMTAAGALQSYKLAAKAITRLQSLPSGSMERLCDTMVQEVFELTGYDRVMAYKFHEDDHGEVVSEVTKPGLEPYLGLHYPATDIPQAARFLFMKNKVRMIVDCNAKHARVLQDEKLSFDLTLCGSTLRAPHSCHLQYMANMDSIASLVMAVVVNEEDGEGDAPDATTQPQKRKRLWGLVVCHNTTPRFVPFPLRYACEFLAQVFAIHVNKEVELDNQMVEKNILRTQTLLCDMLMRDAPLGIVSQSPNIMDLVKCDGAALLYKDKIWKLGTTPSEFHLQEIASWLCEYHMDSTGLSTDSLHDAGFPRALSLGDSVCGMAAVRISSKDMIFWFRSHTAGEVRWGGAKHDPDDRDDARRMHPRSSFKAFLEVVKTRSLPWKDYEMDAIHSLQLILRNAFKDSETTDVNTKVIYSKLNDLKIDGIQELEAVTSEMVRLIETATVPILAVDSDGLVNGWNTKIAELTGLSVDEAIGKHFLTLVEDSSVEIVKRMLENALEGTEEQNVQFEIKTHLSRADAGPISLVVNACASRDLHENVVGVCFVAHDLTGQKTVMDKFTRIEGDYKAIIQNPNPLIPPIFGTDEFGWCTEWNPAMSKLTGLKREEVIDKMLLGEVFGTQKSCCRLKNQEAFVNLGIVLNNAVTSQDPDKVSFAFFTRGGKYVECLLCVSKKLDRKGVVTGVFCFLQLASHELQQALHVQRLAERTAVKRLKALAYIKRQIRNPLSGIMFTRKMIEGTELGPEQRRILQTSALCQKQLSKILDDSDLESIIEGCLDLEMKEFTLNEVLTASTSQVMMKSNGKSVRITNETGEEVMSDTLYGDSIRLQQVLADFMLMAVNFTPSGGQLTVSASLRKDQLGRSVHLANLEIRLTHTGAGIPEFLLNQMFGTEEDVSEEGLSLMVSRKLVKLMNGDVQYLRQAGKSSFIITAELAAANK

SEQ ID NO: 7786 - protein, 1178 aa, Sorghum bicolor
MASGSRATPTRSPSSARPEAPRHAHHHHHHHSQSSGGSTSRAGGGGGGGGGGGGTAATATATATESVSKAVAQYTLDARLHAVFEQSGASGRSFDYSQSLRAPPTPSSEQQIAAYLSRIQRGGHIQPFGCTLAVADDSSFRLLAFSENAADLLDLSPHHSVPSLDSAAPPPVSLGADARLLFSPSSAVLLERAFAAREISLLNPLWIHSRVSSKPFYAILHRIDVGVVIDLEPARTEDPALSIAGAVQSQKLAVRAISRLQALPGGDIKLLCDTVVEHVRELTGYDRVMVYRFHEDEHGEVVAESRRDNLEPYLGLHYPATDIPQASRFLFRQNRVRMIADCHATPVRVIQDPGMSQPLCLVGSTLRAPHGCHAQYMANMGSIASLVMAVIISSGGDDEQTGRGGISSAMKLWGLVVCHHTSPRCIPFPLRYACEFLMQAFGLQLNMELQLAHQLSEKHILRTQTLLCDMLLRDSPTGIVTQSPSIMDLVKCDGAALYYHGKYYPLGVTPTESQIKDIIEWLTVCHGDSTGLSTDSLADAGYLGAAALGDAVCGMAVAYITPSDYLFWFRSHTAKEIKWGGAKHHPEDKDDGQRMHPRSSFKAFLEVVKSRSLPWENAEMDAIHSLQLILRDSFRDAAEGTSNSKAIVNGQAQLGELELRGINELSSVPREMVRLIETATVPIFAVDTDGCINGWNAKIAELTGLSVEEAMGKSLVNDLIFKESEEIVEKLLSRALRGEEDKNVEIKLKTFGSEQSNGAIFVIVNACSSRDYTQNIVGVCFVGQDVTGQKVVMDKFINIQGDYKAIVHNPNPLIPPIFASDENTSCSEWNTAMEKLTGWSRGEVVGKFLIGEVFGSFCRLKGPDALTKFMVVIHNAIGGQDYEKFPFSFFDKNGKYVQALLTANTRSKMDGKSIGAFCFLQIASAEIQQAFEIQRQQEKKCYARMKELAYICQEIKNPLSGIRFTNSLLQMTDLNDDQRQFLETCSACEKQMSKIVKDATLQSIEDGSLVLEKSEFSFGDVMNAVVSQAMLLLRERDLQLIRDIPDEIKDASAYGDQFRIQQVLADFLLSMVRSAPSENGWVEIQVRPNVKQNSDGTDTELFIFRFACPGEGLPADIVQDMFSNSQWSTQEGVGLSTCRKILKLMGGEVQYIRESERSFFLIVLELPQPRPAADREIS

SEQ ID NO: 7787 - protein, 381 aa, Vibrio campbellii AND4
MSKRDFYEVLGVSRDASERDIKKAYKRLAMKYHPDRNQSDDSAAEKFKEVKVAYEILTDAQKRAAYDQYGHAAFEQGGMGGGGGFGGGGADFGDIFGDVFGDIFGGGRRGGGGHRAQRGADLRYNMELSLEEAVRGVSREIEVPTLVECDTCDGSGAEKGSSAETCGTCHGHGQVQMRQGFFAVQQTCPTCHGKGKIIKNPCKSCHGQGRKQKTKTLNVKIPAGVDTGDRIRLSGEGEAGEHGAPAGDLYVQVHVKEHHIFEREGNNLYCEVPVSFAMAALGGEVEVPTLDGRVNLKVPTETQTGRMFRMRGKGVKGVRGGGVGDLIVKLVVETPVKLSSRQKDLLKEFEESCGGEAATKHKPKSEGFFNGVKKFFDDLTS

SEQ ID NO: 7788 - protein, 1064 aa, Vitis vinifera
MGSRFFNPNNPSGSVNSGEHIELNSSSCTYDLDSEAGSREYATYTVHLPPTPDNRPSGLDIQLDGRVSQRVEEHYTANSIFTGGHNSVTRAHLMDKVAESEASHPQMAGSKGSTCAIPGCDAKIMTDERGEDILPCECDFKICRDCYVDAVRTGDGICPGCKEPYKGEFAAVDNGRVLTLSSTVGVFKEERRLSLLKSSSPRSTLMKSQTAEFDHNGWLFETKGTYGYGNAIWPEEGGNANGENENAGESIKLLSKPWRPLTRKLSIRAAVLSPYRLLVLVRMAFLGLFLTWRIRNPNEDAMWLWGMSVVCEIWFAFSWLLDQLPKLCPINRSADLNVLKEKFETPNPRNPTGKSDLPGIDMFVSTADPEKEPPLVTANTILSILAADYPVEKLSCYVSDDGGALLTFEAMAEAASFANLWVPFCRKHDIEPRNPESYFTLKRDPYKNKVRPDFVRERRRVKREYDEYKVRINGLPDSIRRRSDAYNAREEIKALKLQRQNKNDDETLENVKVPKATWMADGTHWPGTWVVPGPEHSKGDHAGIIQVMLKPPSDEPLNGSSIDANPIDLTEVDIRLPMLVYVSREKRPGYDHNKKAGAMNALVRASAIMSNGPFILNLDCDHYIYYSEALREGMCYMMDRGGDRLCYVQFPQRFEGIDPSDRYANRNTVFFDVNMRALDGLQGPMYVGTGCLFRRTALYGFDPPRFGNSSFLIDSIPVAEFQGRPLADHPSVKNGRQPGALTISREPLGAATVAEAISVISCWYEDKTEWGQRVGWIYGSVTEDVVTGYRMHNRGWRSIYCVTKRDAFRGTAPINLTDRLHQVLRWATGSVEIFFSRNNALLASHRMKFLQKIAYMNVGIYPFTSIFLVVYCFLPALSLFSGEFIVQSLSVAFLTYLLGITITLCLLAVLEIKWSGITLEEWWRNEQFWLIGGTSAHLAAVIQGLLKVVAGIEISFTLTSKSAGDDADEDFADLHLIKWTSLMIPPVTIIITNLIGIAVGVVRTIYSELPQWSRLLGGVFFSFWVLVHLYPFAKGLMGRRGRTPTIVFVWAGLIAITISLLWVA

SEQ ID NO: 7789 - protein, 196 aa, Rhizobium tropici
PVPNLRGKTQIKEFADFPKLEELPLWGFDGSSTMQAEGRSSDCVLKPVAIYPDPARTNGALVMCEVMMPDGVTPHPSNSRATILDDEDAWFGFEQEYFFYKDGRPLGFPESGYPAPQGPYYTGVGYKNVGDVAREIVEEHLDLCLEAGINHEGINAEVAKGQWEFQIFGKGSKRAADQIWMARYLLLRLCEKYGID

SEQ ID NO: 7790 - protein, 244 aa, Arabidopsis thaliana
MTGSGSPCGACKFLRRRCVKGCVFAPYFCHEQGASHFAAIHQVFGASNASKLLSHLPMEDRREAATTIYYEAQARRQDPIYGCVSHIFSLQQQVVNLQTQLEILKQQATQSMMAIDSPSIENPNYYQDTKPQYLQESHDLHHHHLTTSNCQTEQNSDLKNIMTSCYHQMEIETTPFTGAGGDTMAGSYYYNSSSGCSEELKSVSTNGEFSKYSELDQHLTNTFNQYRHGGNNLISESLGYITYS

SEQ ID NO: 7791 - protein, 296 aa, Legionella pneumophila str. Lens
MDKDYYKIMGVSQDASEKDIKMAYRKLARKYHPDISKEPDAEERFKEMAEAYEVLKDPKKRSEYDQYLKYKEFNPQSDGFTGRRTQEQPFQEFHFDSDFFETLFGHSRYQQQPMTGQNYHGKITISLEEAYHGAVKNLQVPVEQGTETKIQTLKVKIPAGVKSGQQIRLAGQGGSGSGGGARGDLYLTVEVIKHPIFDVMENDIYLTLPITPWEAALGATVVIPTLAGKIDLKIPPGSQGGQKLRIKNRGLPGSPPGNQYVLLKIITPPAQTEEAKALYKKMAEVMPYNPRKTMGV

SEQ ID NO: 7792 - protein, 190 aa, Gleditsia triacanthos
KFHEDDHGEVVSEIRRSDLEPYLGLHYPATDIPQASRFLFKQNRVRLICDCHANPVRVIQSEELRQPLCLVISTLRSPHGCHTQYMANMGSIASLVMAVIVNGTDTTKLWGLLVCHHTSPRHVPFPLRYACEFLMQAFGLQLYSDMQLASQMAEKRILRTQTLLCDMLLRDSPFGIVTQSPNIMDLVKCD

SEQ ID NO: 7793 - protein, 373 aa, Geobacter sulfurreducens PCA
MAADKRDYYEVLGVHKNASDTEIKKAFRKLAIQYHPDKNPDDKEAEEKFKEITEAYEVLSDPQKRAQYDQFGHAGVGAGGFSGGGFGGFGAGTPFGDIFGDIFGDIFGGRPRGSRGRRGDDLQYNMELSFEEAAFGAEKEIQVPYGKRCGDCGGSGAKPGTEPKVCPTCRGAGQVRFQQGFFSVSKTCNHCNGEGRVVENPCTSCRGSGMIRDTKTLSVKVPAGVETGTRLKLSGEGGQGIKGGGNGDLYVAIAVREHPIFTREDNDVLCEIPVSFVQAALGCEIEVPTLDGKVSMKIPEGTQSGRIFRLRGKGVPQLQGYGRGDQLVIIKVETPSNLNKRQRELLEEFARISGEDVHPMKKSFFDKVMDFIS

SEQ ID NO: 7794 - protein, 388 aa, Salinibacter ruber DSM 13855
MPRDYYDILGVDEDASDKEIKKAYRKKAMEYHPDRNPDDPEAEQKFKEASEAYEVLSDPEKRQRYDQFGHDGVDSGAGGGRRGRGRGFHDIEDIFDAFSDIFGGAPGGGRGRGRSERGRGRPGSDLRVSLSLTLEEIAEGTEKNLRLQKYLECESCDGTGAEGGMGGQNFSMCPKCDGTGEIRQVSRSVFGQVVNVQPCPRCEGEGRIIDNLCDDCGGEGRVQGEESISINVPPGVMEGNYLTLGDAGNAGLRGGPSGDLRIEIEEEPHEHFERDGLDIYYDLHLSFPEAALGTEVDVPTLEGEARLEVDPGVQAGKILRMRDRGLPDLEGSGQGDQMIRVHVWTPQELTAEEEELLDQLRAHDNFQPRPPEEDTQKSFFRRVSDVFS

SEQ ID NO: 7795 - protein, 186 aa, Gymnocladus dioica
MAYKFHEDDHGEVIAEITKPGLEPYLGLHYPATDIPQAARFLFMKNKVRMIVDCHARHVKVLQDEKLPFELTLCGSTLRAPHTCHLQYMENMNSIASLVMAVVVNDNDEDVDSSDSIQPQKRKRLWGLVVCHNTTPRFVPFPLRYACEFLAQVFAIHVNKELELENQIVEKKILRTQTLLCDMLMR

SEQ ID NO: 7796 - protein, 104 aa, Physcomitrella patens subsp. patens
MLVQDHYKVLGVDYDASIDSIRTSYLRLALKWHPDKHNGATAATLKFQEINEAYRVLSNPCMRHEYDMHGNYGLQDYNYTDYLKRFKSLILTCNGLGIGSRIHL

SEQ ID NO: 7797 - protein, 128 aa, Zea mays
KGKGRGLLTAAPQCPYPDASLGPALQTGQFDNVWIQFYNNPGCAYANGDDTNLVNAWNTWTSSITAGSFYLGVPASPQAAGSGYIDPGTLTGTVIPAIRGIGNYGGIMVWDRFNDVQNNYSSQVKGSV

SEQ ID NO: 7798 - protein, 296 aa, Rhizobium sp. USDA 1953
  misc_feature (16)..(16): Xaa can be any naturally occurring amino acid
  misc_feature (169)..(169): Xaa can be any naturally occurring amino acid
RGKTQIKEFDAFPTLXQLPLWGFDGSSTQQAEGRSSDCVLKPVAVYPDPVRTNGALVMCEVMMPDGKTPHPSNTRATVLDDESAWFGFEQEYFFYKNGRPLGFPEQGYPAPQGPYYTGVGYKNVGDIARQIVEEHLDICLAAGINHEGINAEVAKGQWEFQVFGKGSKXAADEVWLARYLLLRLTEKYGIDVEFHCKPLGDTDWNGSGMHANFSTAYLREVGGKDYFEALMAAFEKNLHDHINVYGPDNHLRLTGKHETAPWDKFRYGVADRGASIRVPHSFVNNGYRGYLEDRRP

SEQ ID NO: 7799 - protein, 297 aa, Rhizobium sp. USDA 1955
  misc_feature (131)..(131): Xaa can be any naturally occurring amino acid
RGKTQIKEFDAFPTLEQLPLWGFDGSSTLQAEGRSSDCVLKPVAVYPDPVRTNGALVMCEVMMPDGKTPHASNTRATVLDDESAWFGFEQEYFFYKNGRPLGFPEQGYPAPQGPYYTGVGYKNVGDFARQXVEEHLDICLAAGINHEGINAEVAKGQWEFQIFGKGSKKAADEVWLARYLLLRLTEKYGIDVEFHCKPLGDTDWNGSGMHANFSTAYLREVGGQDYFEALMAAFEKNLHDHINVYGPDNHLRLTGKHETAPWDKFSYGVADRGASIRVPHSFVNNGYRGYLEDRRPN

SEQ ID NO: 7800 - protein, 384 aa, Zea mays
MASAAAGAPKRCYYEVLGLSRDCSPTDIKLAFRRLALSLHPDKQPPGSDLALATAAFQELQHAHSVLSDPQERAYYDSHRSQIIFSHPASAGAKSASTVPDLFAFFSSSAFSGFSDTGRGFYKVYGDVFDRVFAQELAYARRMGVPEPAAPPVIGNLDSPYAQGPCCLSARRGIKRVVDMVLKKKLEEEKRKAEEKERRKEEDKRKKERAMAYQEHEWARAEEGLYDEDEEEEMRAKKELSYCAACNKKFKSDKQWKNHEQSKKHRNKIAELRKAFREEESLKKAEEGEGDWNEVDMGFDFKPTQESDDASAFSDAAEELAEEFESNYAGNGHHGKCEVQPEGSVHVNDVDDIMEGPSSFNVNNGAVIMRLIEDIEQVILLASD

SEQ ID NO: 7801 - protein, 297 aa, Rhizobium sp. USDA 1970
RGKTQIKEFDAFPTLEQLPLWGFDGSSTQQAEGRSSDCVLKPVAVYPDPVRTNGALVMCEVMMPDGKTPHPSNTRATVLDDESAWFGFEQEYFFYKNGRPLGFPEQGYPAPQGPYYTGVGYKNVGDIARQIVEEHLDICLAAGINHEGINAEVAKGQWEFQVFGKGSKNAADEVWLARYLLLRLTEKYGIDVEFHCKPLGDTDWNGSGMHANFSTAYLREVGGKDYFEALMAAFEKNLHDHINVYGPDNHLRLTGKHETAPWDKFSYGVADRGASIRVPHSFVNNGYRGYLEDRRPN

SEQ ID NO: 7802 - protein, 295 aa, Rhizobium sp. CC2129
RGKTQIKEFDAFPTLEQLPLWGFDGSSTQQAEGRSSDCVLKPVAVYPDPVRTNGALVMCEVMMPDGKTPHPSNTRATVLDDEGAWFGFEQEYFFYKNGRPLGFPEQGYPAPQGPYYTGVGYKNVGDIARRIVEEHLDICLAAGINHEGINAEVAKGQWEFQVFGKGSKKAADEVWLARYLLLRLTEKYGIDVEFHCKPLGDTDWNGSGMHANFSTAYMREVGGKDYFEALMAAFEKNLHDHINVYGPDNHLRLTGKHETAPWDKFSYGVADRGASIRVPHSFVNNGYRGYLEDRR

SEQ ID NO: 7803 - protein, 498 aa, Oryza sativa
MAVTADVKLEGLRAATDKLDQISENEKSGFISLVSRYLSGEAEQIEWSKIQTPTDEVVVPYDTLSAAPEDLNETKKLLDKLVVLKLNGGLGTTMGCTGPKSVIEVRNGFTFLDLIVIQIESLNKKYGCNVPLLLMNSFNTHDDTQKIVEKYSNSNIEIHTFNQSQYPRIVTEDFLPLPSKGKTGKDGWYPPGHGDVFPSLNNSGKLDTLLAQGKEYVFVANSDNLGAIVDIKFESLTITEILNHLIHNQNEYCMEVTPKTLADVKGGTLISYEGRVQLLEIAQVPDEHVNEFKSIEKFKIFNTNNLWVNLKAIKRLVEAEALKMEIIPNPKEVDGVKVLQLETAAGAAIRFFEKAIGINVPRSRFLPVKATSDLLLVQSDLYTLVDGFVIRNPARTNPSNPSIELGPEFKKVANFLARFKSIPSIVELDTLKVSGDVWFGSGVTLKGKVTITAKSGKLEIPDGAVLENKSLLLIATSSAWQSMCDESHITTRPIARLS

SEQ ID NO: 7804 - protein, 226 aa, Pinus pinaster
TATAPILAVDYNGLVNGWNAKVAELTGLPVGEAMGMSLVQDLVFEESVERVEKMLHNALRGEEEKNVEMMLKTFGPQKEKEAVILVVNACSSRDFTDNIVGVCFVGQDVTSQKVVMDKFIRIQGDYRSIVQSPNPLIPPIFASDEYACCSEWNAAMEKLTGWSHDEVIGKMLVGEIFGGCCRLKGQDAVTKFTIVLHSAIDGQEIEKFPFAFFDKQGKYVEALLTA

SEQ ID NO: 7805 - protein, 292 aa, Rhizobium sp. CC2155
RGKTQIKEFDAFPTLEQLPLWGFDGSSTQQAEGRSSDCVLKPVAVYPDPVRTNGALVMCEVMMPDGKTPHPSNTRATVLDDEGAWFGFEQEYFFYKNGRPLGFPEQGYPAPQGPYYTGVGYKNVGDIARRIVEEHLDICLAAGINHEGINAEVAKGQWEFQVFGKGSKKAADEVWLARYLLLRLTEKYGIDVEFHCKPLGDTDWNGSGMHANFSTAYMREVGGKDYFEALMAAFEKNLHDHINVYGPDNHLRLTGKHETAPWDKFSYGVADRGASIRVPHSFVNNGYRRYVE

SEQ ID NO: 7806 - protein, 312 aa, Deinococcus radiodurans R1
MAYKDYYDVLGVSRSASDADIKSAYRKLAKQYHPDKNQGDEKAADKFKEIGEAYAVLNDPEKRKLYDQYGHTGQVPPGYGDAGMGGGFQGGDFGGFDPGQFSDFFQQMFGGRGGMGGMGGRGGFAGGQVNLDDLFGGASGGLGGAGAGRRFVQNVEGELQVTLREALEGSDEVINVDGKRLSLRVPAGTRDGARLRLAGQGPGGGDVLLTIRVLEDARFELDGDDLTTTVDVPAPVAALGGEVKVQLLSGKSGNLNVPAGSSGGRKMRLRGQGWPKKSGGNGDLYVRLNVTVPKDLSDEEKELYTKLRDLQK

SEQ ID NO: 7807 - protein, 196 aa, Rhizobium etli
PVPNLRGKTQIKEFDAFPTLEQLPLWGFDGSSTMQAEGRSSDCVLKPVAIYPDPARTNGVLVMCEVMMPDGVTPHPSNARATILDDEDAWFGFEQEYFFYQNGRPLGFPEQGYPAPQGPYYTGVGYSNVGDVAREIVEEHLDLCLAAGINHEGINAEVAKGQWEFQIFGKGSKKAADQIWMARYLLQRLTEKYGID

SEQ ID NO: 7808 - protein, 196 aa, Rhizobium tropici
PVPNLRGKTQIKEFDAFPTLEQLPLWGFDGSSTMQAEGRSSDCVLKPVAIYPDPARTNGALVMCEVMMPDGVTPHPSNSRATILDDEDAWFGFEQEYFFYQDGRPLGFPESGYPAPQGPYYTGVGYKNVGDVAREIVEEHLDLCLEAGINHEGINAEVAKGQWEFQIFGKGSKKAADQIWMARYLLLRLCEKYGID

SEQ ID NO: 7809 - protein, 335 aa, Arabidopsis thaliana
MGVDFYKVLEVDRSANDDELKKAYRKLAMKWHPDKNPNNKKEAEAKFKQISEAYDVLSDPQKRAIYEQYGEEGLNQAPPPGAGGGYPGGSDAGASFRFNPRSADDIFSEFFGFTRPSFGTGSDSRAGPSGFRYGDDIFASFRAATTGGEASIPSRKSAPIERQLPCSLEDLYKGVSKKMKISRDVLDSSGRPTPVEEILTIEIKPGWKKGTKITFLEKGNEHRGVIPSDLVFIVDEKPHPVFKRDGNDLVVMQKISLVDALTGYTAQVTTLDGRTLTVPVNNVISPSYEEVVKGEGMPIPKDPSRKGNLRIRFIIKFPSKLTTEQKSGIKRMLSP

SEQ ID NO: 7810 - protein, 196 aa, Rhizobium giardinii
PVPNLRGKTQIKEFETFPTLEQLPLWGFDGSSTQQAEGRSSDCVLKPVAIYPDPARTNGALVMCEVMMPDGVTPHPSNSRATILDDEDAWFGFEQEYFFYENGRPLGFPESGYPAPQGPYYTGVGYSNVGSVAREIVEEHLDLCLAAGINHEGINAEVAKGQWEFQIFGKGSKKAADQIWMARYLLLRLCEKYGID

SEQ ID NO: 7811 - protein, 380 aa, Ralstonia solanacearum GMI1000
MAKRDYYEVLGVGKNASDDEIKKAYRKLAMKYHPDRNPDSKEAEEKFKEAKEAYEMLSDADKKAAYDQYGHAGVDPNMAGGFGAGAQGFGGFAEAFGDIFGDIFGQAQQGGRRGAGPQMYRGADLRYSMEITLEQAAHGYDTQIRVPHWDECDHCHGKGAEPGSSVETCPTCHGAGQVRVSQGFFTMQQTCPKCHGNGKYIPKPCSKCHGQGKVKSQKTLEVKIPAGIDEGMRIRSSGNGEPGINGGPPGDLYVEIHIKAHSVFERDGDDLHCQMPISFAVAAMGGDIEVPTLGGRVTFNVPEGTQAGKTFRLRGKGIKGVRSGYAGDLYVHVVIETPVRLTEHQRELLRQFDKSVHEGGSRHSPQEQSWLDKVKNFFSS

SEQ ID NO: 7812 - protein, 270 aa, Sorghum bicolor; identical to SEQ ID NO: 4038

SEQ ID NO: 7813 - protein, 297 aa, Vitis vinifera
MARTPQSTPLLISLSVLALLQTSYAGGIAIYWGQNGNEGTLTQTCNTGKYSYVNIAFLNKFGNGQTPEINLAGHCNPASNGCTSVSTGIRNCQNRGIKVMLSIGGGAGSYSLSSSNDAQNVANYLWNNFLGGQSSSRPLGDAVLDGIDFDIELGSTLHWDDLARALSGFSKRGRKVYLTAAPQCPFPDKFLGTALNTGLFDYVWVQFYNNPPCQYSSGNTNNLLNSWNRWTSSINSRIFMGLPASSAAAGSGFIPANVLTSQILPVIKRSPKYGGVMLWSKYYDDQSGYSSSIKSSV

SEQ ID NO: 7814 - protein, 472 aa, Blumeria graminis f. sp. hordei
MPTFGFLKKRKKVSLGHRDLDSPASTLSQPASPITPSTSRGLGEPIDTTSSKITSPGQKLGSNITKDHRGTRTTVEDLPSMTDVSHLQQAYRNLSQGSTASKSNLLTIHNLINPPQHDGAGQSKVMPEKHMNNKTERPVQGKAAVAQVRQTKGKYSLSDFEILRTLGTGSFGRVHLVQSKHNQRFYAVKVLKKQQVVKMKQVEHTNDERSMLQEVKHPFLITLWGTFQDSKNLYMVMDFVEGGELFSLLRKSQRFPNPVAKFYAAEVTLALEYLHKKDIIYRDLKPENLLLDRHGHLKITDFGFAKKVTDITWTLCGTPDYLAPEVVSSKGYNKSVDWRWSLGILIFEMLCGYTPFWDNGSPMKIYENILKGRVKYPPYIHPDAQDLIQRLITADLTKRLGNLHGGAEGIKSHQWFAEVTWERLAKKDIDAPYVPPVKAGSGDASQFDKYPEETERYGQTGPDEHGSLFENF

SEQ ID NO: 7815 - protein, 208 aa, Enterolobium cyclocarpum
RVMAYKFHEDEHGEVVSEVKKPGLESYMGLHYPATDVPQATRFLFMKNKVRMIVDCRAKHVKVLQDENLPYDLTFCGSTLRAPHSCHVQYMQNMDLVASLVMAVVINDRDEDGDSSDSVQPQKRKRLWGLVVCHNYTPRFVPFPLRYACEFLAQVFAIHVNKEIELEYQIIEKNIMRTQSLLCDMLMRDEPLGIISQSPNIMDLVKCD

SEQ ID NO: 7816 - protein, 354 aa, Gibberella zeae PH-1
MAAPITSRTETLQKYLKLDQKGMIMAEYVWVDAEGGTRSKSRTLPEKDYKPEDLPVWNFDGSSTKQAPGENSDVYLRPCAVYPDPFRGSPNIIVLAECYDSDGTPNKYNFRHDCVKVMKTYADEEPWFGLEQEYTLLGSDDRPYGWPAGGFPAPQGEYYCGVGTGKVVQRDIVEAHYKACLYAGIQISGTNAEVMPAQWEYQVGPCTGIEMGDQLWVSRFFLHRVAEEFGAKVSLHPKPIAGDWNGAGLHSNFSTKAMREEGGMKVIEEALKKLEPHHVECIAEYGEDNDLRLTGRHETGSIDSFSWGVANRGTSIRVPRETAAKGYGYFEDRRPASNADPYRVTKVLLQFSME

SEQ ID NO: 7817 - protein, 1178 aa, Sorghum arundinaceum
MASGSRATPTRSPSSARPEAPRHAHHHHHNHSQSSGGSTSRAGGGGGGGGGGGGTAATATATATESVSKAVAQYTLDARLHAVFEQSGASGRSFDYSQSLRAPPTPSSEQQIAAYLSRIQRGGHIQPFGCTLAVADDSSFRLLAFSENAADLLDLSPHHSVPSLDSAAPPPVSLGADARLLFSPSSAVLLERAFAAREISLLNPLWIHSRVSSKPFYAILHRIDVGVVIDLEPARTEDPALSIAGAVQSQKLAVRAISRLQALPGGDIKLLCDTVVEHVRELTGYDRVMVYRFHEDEHGEVVAESRRDNLEPYLGLHYPATDIPQASRFLFRQNRVRMIADCHATPVRVIQDPGMSQPLCLVGSTLRAPHGCHAQYMANMGSIASLVMAVIISSGGDDEQTGRGGISSAMKLWGLVVCHHTSPRCIPFPLRYACEFLMQAFGLQLNMELQLAHQLSEKHILRTQTLLCDMLLRDSPTGIVTQSPSIMDLVKCDGAALYYHGKYYPLGVTPTESQIKDIIEWLTVCHGDSTGLSTDSLADAGYLGAAALGDAVCGMAVAYITPSDYLFWFRSHTAKEIKWGGAKHHPEDKDDGQRMHPRSSFKAFLEVVKSRSLPWENAEMDAIHSLQLILRDSFRDAAEGTSNSKAIVNGQVQLGELELRGINELSSVAREMVRLIETATVPIFAVDTDGCINGWNAKIAELTGLSVEEAMGKSLVNDLIFKESEEIVEKLLSRALRGEEDKNVEIKLKTFGSEQSNGAIFVIVNACSSRDYTQNIVGVCFVGQDVTGQKVVMDKFINIQGDYKAIVHNPNPLIPPIFASDENTSCSEWNTAMEKLTGWSRGEVVGKFLIGEVFGSFCRLKGPDALTKFMVVIHNAIGGQDYEKFPFSFFDKNGKYVQALLTANTRSKMDGKSIGAFCFLQIASAEIQQAFEIQRQQEKKCYARMKELAYICQEIKNPLSGIRFTNSLLQMTDLNDDQRQFLETCSACEKQMSKIVKDATLQSIEDGSLVLEKSEFSFGDVMNAVVSQAMLLLRERDLQLIRDIPDEIKDASAYGDQFRIQQVLADFLLSMVRSAPSENGWVEIQVRPNVKQNSDGTDTELFIFRFACPGEGLPADIVQDMFSNSQWSTQEGVGLSTCRKILKLMGGEVQYIRESERSFFLIVLELPQPRPAADREIS

SEQ ID NO: 7818 - protein, 371 aa, Methylovorus sp. SS1
MAKKDYYEVLGVNRDASDEEIKKSYRKLAMKYHPDRNPDNPKAEESFKEAKEAYEVLSDEQKRAAYDQYGHAGVDPSAGPGPRQGFGNFADAFGDIFGDIFGGGGGNRRSNVYRGADLRYNMEISLEDAARRTETKIRIPVMSECETCHGSGARPGTQPVTCTTCGGHGQVRMQQGFFSVQQTCPKCHGSGKMVKEPCPSCQGAGRVKKHKTLSVKIPAGVDEGDRIRLSGEGERVNGGPPRDLYVVVHLKQHDIFQRDGGNLHCEMPISFTTAALGGEIEIPTLDGHAKMKIPPETQTGATFRLRGKGIKPLRTNDPGDLMCHVVVETPIKLTERQKELLREMEEINLQDSDKHSPRAKGWMDKVKDFFQ

SEQ ID NO: 7819 - protein, 207 aa, Cyclolobium nutans
VMAYKFHEDDHGEVIAEITKPGLEPYLGLHYPATDIPQAARFLFMKNKVRMIVDCHAKHVKVLQDEKLPFDLTLCGSTLRAPHSCHLQYMANMDSIASLVMAVVVNDSDEDGNSSDAVQPQKRKRLWGLVVCHNTTPRFVPFPLRYACEFLAQVFAIHVNKEIELEYQIIEKNILRTQTLLCDMLMRNAPLGIVSQSPNIMDLVKCD

SEQ ID NO: 7820 - protein, 206 aa, Cyclolobium nutans
MAYKFHEDDHGEVIAEVTKPGLEPYLGLHYPATDIPQATRFLLMKNKVRLIVDCCAKHVKVLQDKKIPFELTLCGSTLRAPHSCHIQYMLNMNSIASLVMAVVVNDSDEDGDSSDAVQPQKRKRLWGLVVCHNTTPRFVPFPLRYACEFLAQVFAIHVNKEIELEYQIIEKNILRTQTLLCDMLMRNAPLGIVSQSPNIMDLVKCD

SEQ ID NO: 7821 - protein, 430 aa, Lotus japonicus
MAQILAPSTQWQTRITKTSPNASPITSNMWSSLLWKQNKKVARASKFRVLAIKSDGSTINRLEGLLNLDVTPYTDKFIAEYIWIGGTGVDVRSKSRTISKPVSHPSELPKWNYDGSSTGQAPGDDSEVILYPQAIFRDPFRGGNNILVICDAYTPQGEPIPTNKRHRAAEIFSNPKVQAEIPWYGIEQEYTLLQTDVKWPLGWPVGGYPGPQGPYYCAAGADKSFGRDISDAHYKACLYAGINISGTNGEVMPGQWEYQVGPSVGIEAGDHIWASRYLLERITEQAGVVLTLDPKPIEGDWNGAGAHTNYSTKSMREEGGFEVIKKAILNLSLRHQDHIRAYGEGNERRLTGKHETADINTFSWGVANRGCSIRVGRDTEKEGKGYLEDRRPASNMDPYVVTALLAETTLLWEPTLEAEALAAQKIQLKV

SEQ ID NO: 7822 - protein, 296 aa, Rhizobium sp. CC2160
RGKTQIKEFDAFPTLEQLPLWGFDGSSTQQAEGRSSDCVLKPVAVYPDPVRTNGALVMCEVMMPDGKTPHPSNTRATVLDDESAWFGFEQEYFFYKNGRPLGFPEQGYPAPQGPYYTGVGYKNVGDIARRIVEEHLDICLAAGINHEGINAEVAKGQWEFQVFGKGSKKAADEVWLARYLLLRLTEKYGIDVEFHCKPLGDTDWNGSGMHANFSTAYMREVGGKDYFEALMAAFEKNLHDHINVYGPDNHLRLTGKHETAPWDKFSYGVADRGASIRVPHSFVNNGYRGYLEDRRP

SEQ ID NO: 7823 - protein, 218 aa, Arabidopsis thaliana
MTSSSSSSGSPCGACKFLRRKCAKGCVFAPYFCHEQGASHFAAIHKVFGASNASKLLSHLPISDRCEAAITISYEAQARLQDPIYGCVSHIFALQQQVVNLQAELEILKQQAAQSMIFADSPTSENPNSYYGDTTKAPYHHDHQNIYHHHDQTHLVYQTGSSGTVQHGDATESSYHNETSSGMGEFSIYSDLEQHLNTFNQDHLKELQSANFGYISFS

SEQ ID NO: 7824 - protein, 291 aa, Rhizobium sp. USDA 1079
  misc_feature (266)..(266): Xaa can be any naturally occurring amino acid
RGKTQIKEFDAFPTLEQLPLWGFDGSSTQQAEGRSSDCVLKPVAVYPDPVRTNGALVMCEVMMPDGKTPHPSNTRATVLDDESAWFGFEQEYFFYKNGRPLGFPEQGYPAPQGPYYTGVGYKNVGDIARQIVEEHLDICLAAGINHEGINAEVAKGQWEFQVFGKGSKKAADEVWLARYLLLRLTEKYGIDVEFHCKPLGDTDWNGSGMHANFSTAYLREVGGKDYFEALMAAFEKNLHDHINVYGPDNHLRLTGKHETAPWDKFXYGVADRGASIRVPHSFVNNGYRGYL

SEQ ID NO: 7825 - protein, 214 aa, Glycine max
  misc_feature (25)..(25): Xaa can be any naturally occurring amino acid
HFGLCKVLVKLGRGKDALDSCSEAXLKIDEELVEALVQRGEAKLLTEDWEGAVEDLRSAAQKLPQDMNIREAVMRAEKALKISKRKDYYKILGISKTASAADIKRAYKKLALQWHPDKNVDKREEAEAQFREIAAAYEVLSDEDKRVRYDRGEDLEEAGMGGGGGGFNPFGGGGYTYTFEGGFPGGGFGGGFPGGGFGGGFPGGGGGGGFEFHF

SEQ ID NO: 7826 - protein, 287 aa, Rhizobium sp. USDA 1083
  misc_feature (5)..(5): Xaa can be any naturally occurring amino acid
  misc_feature (24)..(24): Xaa can be any naturally occurring amino acid
  misc_feature (180)..(180): Xaa can be any naturally occurring amino acid
  misc_feature (194)..(194): Xaa can be any naturally occurring amino acid
  misc_feature (282)..(282): Xaa can be any naturally occurring amino acid
  misc_feature (285)..(285): Xaa can be any naturally occurring amino acid
RGKTXIKEFDSFPTLEQLPLWGFXGSSTHQAEGRSSDCVLKPVAVYPDPVRTNGALVMCEVMMPDGKTPHPSNTRATVLDDESTWFGFEHEYFFYKNGRPLGFPEQGYPAPQGPYYTGVGYKNVGDIARQIVEEHLDICLAAGINHEGINAEVAKGQWEFQVFGKGSKKAADEVWLARYXLLRLTEKYGIDVEXHCKPLGDTDWNGSGMHANFSTAYLREVGGKDYFEALMAAFEKNLHDHINVYGPDNHLRLTGKHETAPWDKFSYGVADRGASIRVPHSXVNXRY

SEQ ID NO: 7827 - protein, 146 aa, Theobroma cacao
TEDVVTGYRMHNRGWKSVYCVTKRDAFRGTAPINLTDRLHQVLRWATGSVEIFFSRNNAFLASPRMKSLQRIAYLNVGIYPFTSIFLIVYCFLPALSLFSGQFIVQTLNVTFLTYLLTITVTLCLLAVLEIKWSGIELEEWWRNEQ

SEQ ID NO: 7828 - protein, 296 aa, Rhizobium sp. USDA 1088
  misc_feature (266)..(266): Xaa can be any naturally occurring amino acid
RGKTQIKEFDAFPTLEQLPLWGFDGSSTQQAEGRSSDCVLKPVAVYPDPVRTNGALVMCEVMMPDGKTPHPSNTRATVLDDESAWFGFEQEYFFYKNGRPLGFPEQGYPAPQGPYYTGVGYKNVGDIARQIVEEHLDICLAAGINHEGINAEVAKGQWEFQVFGKGSKKAADEVWLARYLLLRLTEKYGIDVEFHCKPFGDTDWNGSGMHANFSTAYLREVGGKDYFEALMAAFEKNLHDHINVYGPDNHLRLTGKHETAPWDKFXYGVADRGASIRVPHSFVNNGYRGYLEDRRP

SEQ ID NO: 7829 - protein, 371 aa, Oxyrrhis marina
MAALKALEANLAKDTQANYVMAEYVWIDGFGGLRSKTKVITGVTLPATIESLKARLPVWNFDGSSTGQAPGEDSEVILKPQAVFRDPFRGGSNIMVMADCYTPAGEPIPTNTRAGASALFAKKPEEEPWFGIEQEYTLFKDGTKLGWPRSGARSMGPCVQLGFPGPQGPYYCSAGADVCFGRPISDDHMHACLYAGINISGTNAEVMPGQWEYQVGPCVGIDSGDHMWMSRYIMLRICEAHGVTVSWDPKPIPGDWNGAGCHTNYSTKAMREQDNSYETIMKPMLANMEKKHMEHIAVYGEGNDKRLTGAHETAPIDKFSYGVANRGASVRIPNDTAKHGKGYFEDRRPASNIDPYLVTGKIFQTTVLDLA

SEQ ID NO: 7830 - protein, 392 aa, Barnebya dispar
DLEPVNPADVPVTAAGALKSYKFAAKAISRLQSLPSGNIFLLCDVLVKEVRDLTGYDRVMVYKFHEDEHGEVVSECRRSDLESYLGLHYPATDIPQASRFLFMKNKLRMICDCLAPPVKVIQDENLPQPLSLCGSTLRSPHGCHAQYMTNMGTIASLVMSVTINEDDDMKDCEQPQMPRKLWGLVVCHHTSPRFIPFPLRYACEFLIQVFGVQINKEVELAAQVREKHILRIQTLLCDMLLRDAPVAIITQSPNVMDLVRCDGAALYYKNKFWLLGVTPTEAQIRDIAEWLLECHSGNTGLSTDSLMEAGYPGASVLGDAVCGMAAISITSRDFLFWFRSHTAKEIKWGGAKHDPDDKDDGRKMHPRSSFKAFLEVVKWRSLPWEDVEMDAI

SEQ ID NO: 7831 - protein, 1177 aa, Sorghum x drummondii
MASGSRATPTRSPSSARPEAPRHAHHHHHHSQSSGGSTSRAGGGGGGGGGGGGTAATATATATESVSKAVAQYTLDARLHAVFEQSGASGRSFDYSQSLRAPPTPSSEQQIAAYLSRIQRGGHIQPFGCTLAVADDSSFRLLAFSENAADLLDLSPHHSVPSLDSAAPPPVSLGADARLLFSPSSAVLLERAFAAREISLLNPLWIHSRVSSKPFYAILHRIDVGVVIDLEPARTEDPALSIAGAVQSQKLAVRAISRLQALPGGDIKLLCDTVVEHVRELTGYDRVMVYRFHEDEHGEVVAESRRDNLEPYLGLHYPATDIPQASRFLFRQNRVRMIADCHATPVRVIQDPGMSQPLCLVGSTLRAPHGCHAQYMANMGSIASLVMAVIISSGGDDEQTGRGGISSAMKLWGLVVCHHTSPRCIPFPLRYACEFLMQAFGLQLNMELQLAHQLSEKHILRTQTLLCDMLLRDSPTGIVTQSPSIMDLVKCDGAALYYHGKYYPLGVTPTESQIKDIIEWLTVCHGDSTGLSTDSLADAGYLGAAALGDAVCGMAVAYITPSDYLFWFRSHTAKEIKWGGAKHHPEDKDDGQRMHPRSSFKAFLEVVKSRSLPWENAEMDAIHSLQLILRDSFRDAAEGTSNSKAIVNGQVQLGELELRGINELSSVAREMVRLIETATVPIFAVDTDGCINGWNAKIAELTGLSVEEAMGKSLVNDLIFKESEEIVEKLLSRALRGEEDKNVEIKLKTFGSEQSNGAIFVIVNACSSRDYTQNIVGVCFVGQDVTGQKVVMDKFINIQGDYKAIVHNPNPLIPPIFASDENTSCSEWNTAMEKLTGWSRGEVVGKFLIGEVFGSFCRLKGPDALTKFMVVIHNAIGGQDYEKFPFSFFDKNGKYVQALLTANTRSKMDGKSIGAFCFLQIASAEIQQAFEIQRQQEKKCYARMKELAYICQEIKNPLSGIRFTNSLLQMTDLNDDQRQFLETCSACEKQMSKIVKDATLQSIEDGSLVLEKSEFSFGDVMNAVVSQAMLLLRERDLQLIRDIPDEIKDASAYGDQFRIQQVLADFLLSMVRSAPSENGWVEIQVRPNVKQNSDGTDTELFIFRFACPGEGLPADIVQDMFSNSQWSTQEGVGLSTCRKILKLMGGEVQYIRESERSFFLIVLELPQPRPAADREIS

SEQ ID NO: 7832 - protein, 196 aa, Rhizobium leguminosarum
PVPNLRGKTQIKEFDAFPTLEQLPLWGFDGSSTQQAEGRSSDCVLKPVAIYPDPARTNGALVMCEVMMPDGVTPHASNARATILDDEDAWFGFEQEYFFYQNGRPLGFPEQGYPAPQGPYYTGVGYSNVGDVAREIVEEHLDLCLAAGINHEGINAEVAKGQWEFQIFGKGSKKAADQIWMARYLLQRLTEKYGID

SEQ ID NO: 7833 - protein, 392 aa, Blepharandra heteropetala
DLEPVNPADVPVTAAGALKSYKLAARAISRLQSLPSGNISLLCDVLVKEVRDLTGYDRVMVYKFHEDEHGEVISECRRPDLEAYLGLHYPATDIPQASRFLFMKNKVRMICDCLAPAVKVIQDERLPQALSLCGSTLRSPHGCHAQYMANMGTIASLVMSVIINEDNDMMDGDQQHIARKLWGLVVCHHTSPRFVPFPLRYACEFLIQVFGVQINKEVELAAQVREKHILRTQTLLCDMLLRDAPVAIITQSPNVMDLVKCDGAALYYRKKFWLLGVTPTEVQIRDIAEWLLEYHGGNAGLSTDSLMEAGYPGASDLGNAVCGMAAVRITSRDFLFWFRSHTAKEIKWGGAKHHPNDKDDVRKMHPRSSFKAFLEVVKWRSLPWEDIEMDAI

SEQ ID NO: 7834 - protein, 1177 aa, Sorghum propinquum
MASGSRATPTRSPSSARPEAPRHAHHHHHHSQSSGGSTSRAGGGGGGGGGGGGTAATATATATESVSKAVAQYTLDARLHAVFEQSGASGRSFDYSQSLRAPPTPSSEQQIAAYLSRIQRGGHIQPFGCTLAVADDSSFRLLAFSENAADLLDLSPHHSVPSLDSAAPPHVSLGADARLLFSPSSAVLLERAFAAREISLLNPLWIHSRVSSNPFYAILHRIDVGVVIDLEPARTEDPALSIAGAVQSQKLAVRAISRLQALPGGDIKLLCDTVVEHVRELTGYDRVMVYRFHEDEHGEVVAESRRDNLEPYLGLHYPATDIPQASRFLFRQNRVRMIADCHATPVRVIQDPGMSQPLCLVGSTLRAPHGCHAQYMANMGSIASLVMAVIISSGGDDEQTGRGGISSAMKLWGLVVCHHTSPRCIPFPLRYACEFLMQAFGLQLNMELQLAHQLSEKHILRTQTLLCDMLLRDSPTGIVTQSPSIMDLVKCDGAALYYHGKYYPLGVTPTESQIKDIIEWLTVCHGDSTGLSTDSLADAGYLGAAALGDAVCGMAVAYITPSDYLFWFRSHTAKEIKWGGAKHHPEDKDDGQRMHPRSSFKAFLEVVKSRSLPWENAEMDAIHSLQLILRDSFRDAAEGTSNSKAIVNGQVQLGELELRGINELSSVAREMVRLIETATVPIFAVDTDGCINGWNAKIAELTGLSVEEAMGKSLVNDLIFKESEEIVEKLLSRALRGEEDKNVEIKLKTFGSEQSNGAIFVIVNACSSRDYTQNIVGVCFVGQDVTGQKVVMDKFINIQGDYKAIVHNPNPLIPPIFASDENTSCSEWNTAMEKLTGWSRGEVVGKFLIGEVFGSFCRLKGPDALTKFMVVIHNAIGGQDYEKFPFSFFDKNGKYVQALLTANTRSKMDGKSIGAFCFLQIASAEIQQAFEIQRQQEKKCYARMKELAYICQEIKNPLSGIRFTNSLLQMTDLNDDQRQFLETCSACEKQMSKIVKDATLQSIEDGSLVLEKSEFSFGDVMNAVVSQAMLLLRERDLQLIRDIPDEIKDASAYGDQFRIQQVLADFLLSMVRSAPSENGWVEIQVRPNVKQNSDGTDTELFIFRFACPGEGLPADIVQDMFSNSQWSTQEGVGLSTCRKILKLMGGEVQYIRESERSFFLIVLELPQPRPAADREIS

SEQ ID NO: 7835 - protein, 196 aa, Rhizobium gallicum
PTPNLRGKTQIKEFDAFPALEQLPLWGFDGSSTMQAEGRSSDCVLKPVAVYPDPARTNGALVMCEVMMPDGVTPHPSNSRATILDDEDAWFGFEQEYFFYENGRPLGFPEQGYPAPQGPYYTGVGYKNVGSVAREIVEEHLDLCLAAGINHEGINAEVAKGQWEFQIFGKGSKRAADQIWMARYLLLRLCEKYGID

SEQ ID NO: 7836 - protein, 392 aa, Blepharandra heteropetala
DLEPVNPADVPVTAAGALKSYKLAARAISRLQSLPSGNISLLCDVLVKEVRDLTGYDRVMVYKFHEDEHGEVISECCRPDLEAYLGLHYPATDIPQASRFLFMKNKVRMICDCLAPAVKVIQDERLPQALSLCGSTLRSPHGCHAQYMANMGTIASLVMSVIINEDNDMMDGDQQHIARKLWGLVVCHHTSPRFVPFPLRYACEFLIQVFGVQINKEVELAAQVREKHILRTQTLLCDMLLRDAPVAIITQSPNVMDLVKCDGAALYYRKKFWLLGVTPTEVQIRDIAEWLLEYHGGNAGLSTDSLMEAGYPGASDLGNAVCGMAAVRITSRDFLFWFRSHTAKEIKWGGAKHHPNDKDDVRKMHPRSSFKAFLEEVKWRSLPWEDIEMDAI

SEQ ID NO: 7837 - protein, 373 aa, Candida albicans SC5314
MTTSLTEQTAILAKYLELSQNGKILAEYVWIDAEGSTRSKCRTLSKKPTSVDDLPEWNYDGSSTGQAPGHDSDVYLRPVAFYPDPFRKGDNIIVLNECWNNDGTPNKFNHRHECAKLMKAHASEEVWFGLEQEYTLFDQYDYPYGWPKGGFPAPQGPFYCGVGTGKVVARDVIEAHYRACLYAGINISGINAEVMPSQWEFQVGPCEGIEMGDQLWIARYLLQRVAEEFAVKISFHPKPLKGDWNGAGCHTNVSTKSMRVPGGMKVIESALSKLAKRHKEHMLLYGADNDQRLTGRHETGHMDTFSSGVANRGASIRIPRQVAKEGYGYFEDRRPASNIDPYLVTGIMVETICGSIPDADMAKEFLRESSDDN

SEQ ID NO: 7838 - protein, 392 aa, Blepharandra heteropetala
DLEPVNPADVPVTAAGALKSYKLAARAISRLQSLPSGNISLLCDVLVKEVRDLTGYDRVMVYKFHEDEHGEVISECCRPDLEAYLGLHYPATDIPQASRFLFMKNKVRMICDCLAPAVKVIQDERLPQALSLCGPTLRSPHGCHAQYMANMGTIASLVMSVIINEDNDMMDGDQQHIARKLWGLVVCHHTSPRFVPFPLRYACEFLIQVFGVQINKEVELAAQVREKHILRTQTLLCDMLLSDAPVAIITQSPNVMDLVKCDGAALYYRKKFWLLGVTPTEVQIRDIAEWLLEYHGGNAGLSTDSLMEAGYPGASDLGNAVCGMAAVRITSRDFLFWFRSHTAKEIKWGGAKHHPNDKDDVRKMHPRSSFKAFLEVVKWRSLPWKDVEMDAI

SEQ ID NO: 7839 - protein, 502 aa, Arabidopsis thaliana; identical to SEQ ID NO: 4069

SEQ ID NO: 7840 - protein, 200 aa, Myrospermum sousanum
RVMAYKFHEDEHGEVVAESKRPDLEPYIGLHYPATDIPQASRFLFKQNRVRMIVDCHASPVGVIQDEGLMQPLCLVGSTLRAPHGCHAQYMANMGSIASLVMAVIINGNDEDTVCSRSSMRLWGLVVCHHTSARCIPFPLRYACEFLMQAFGLQLNMELQLASQSLEKRVLKTQTLLCDMLLRDSPIGIVTQSPNIMDLV

SEQ ID NO: 7841 - protein, 392 aa, Caucanthus auriculatus
DLEPVNPADVPVTAAGALKSYKLAAKAISRLQSLPSGNISLLCDVLVKEVRDLTGYDRVMVYKFHEDEHGEVVSECHRSDLESYLGLHYPATDIPQASRFLFMKNKVRMICDCVAPPVKVIQEERLPQPLSPCGSTLRSPHGCHAQYMTNMGIIASLVMSVTVNEEDDMVDGDQPQMARKLWGLVVCHHTSTRFVPFPLRYACEFLIQVFGVQINKEVELAAQVREKHILQIQTMLCDMLLRDAPVAIITQSPNVMDLVKCDGAALYFKNKTWLLGVTPTEEQIRDIAEWLPEYHSGNTGLSTDSLMEAGYPGASALGDAVCGMAAVSITSRDFLLWFRSHTAKEIKWGGAKHDPDDKDDGRKMHPRSSFKAFLEVVKWRSMPWEDVEMDAI

SEQ ID NO: 7842 - protein, 386 aa, Clostridium thermocellum ATCC 27405
MAGKRDYYEILGVDRGASDAEIKKAYRKLAKQYHPDMNPGDKAAEAKFKEINEAYEVLSDPQKRARYDQFGHSAFDPNGFGGGGFGGGFTGGFGDFDFGGFGDIFEAFFGSGFGTRTSSARRGPQKGADLKYSMEVSFEEAAFGTEKEVTVSRLEICPTCSGSGTKPGHQPVTCRQCNGTGQVQYKQRTPFGQIVNVRTCDVCHGEGKIITNPCETCGGKGRVRKHTKLKVRIPAGIDNGETISLRGEGEHGIKGGPSGDLFITIKVKPHPIFKRHGNDVNCEIPITFTQAALGAEIEVPTLDGKEKIVIPEGTQTGTVFKLKGKGIPFLRSSGRGDQYVKVNIEVPRKLNEKQKEVLRQFAELVGDEVHEQRKGFFNKMKDALGM

SEQ ID NO: 7843 - protein, 156 aa, Arabidopsis thaliana
MACEGGGSNVRSSYYTILGIRKDASVSDIRTAYRKLAMKWHPDRYARNPGVAGEAKRRFQQIQEAYSVLNDENKRSMYDVGLYDPHEDDDDDFCDFMQEMISMMNNVKDAGESLEDLQRMFTDMVGGDGVSYDCNNNPKGNKRPRVNISRSSAAMR

SEQ ID NO: 7844 - protein, 218 aa, Vitis vinifera
MVKLTLIARVTDGLPLAEGLDDGRDLKDAEFYKQQVKALFKNLSKGQNEPSRMSIETGPYIFHYIIEGRVCYLTMCDRAYPKKLAFQYLEDLKNEFERVNGNQIETAARPYAFIKFDTFIQKTKKLYQDTRTQRNIAKLNDELYEVHQIMTRNVQEVLGVGEKLDQVSQMSSRLTSESRIYADKARDLNRQALIRKWAPVAIVLGVVFLLFWIRKKIW

SEQ ID NO: 7845 - protein, 361 aa, Haloarcula marismortui ATCC 43049
MSFTFRDQTTVSLSWNELTGAIGDSATVLPVVVAVAVLTKLSLPVMLVWFGVFQVVWGLYYGVPISVEPMKAFAALVIAGTISTGELVVAGLLLAGILLVLGTTQSLEVVNQYVDDTVVRGVQLGVALVLLETGIGLGLNDPRLVTVAVGIVAVLALLGHSGQSAFAVFVLGAAIALAETGVPTPAVPAVDAMFMLPTMTLSLQTGEAVLAQIAVTVGNAALATSVLLADYFDRDVSADQLSNSMGLMNLVAVPFGAFPMCHGSGGVAGKYAFGARTPGANLLLGAGYVLTAFLAVGVISAYPTALLGVILVLIAFQLGWTGVSSTDDLAVVAAIGVVGVLVNLGLALVLGVLVQQLRARL

SEQ ID NO: 7846 - protein, 469 aa, Arabidopsis thaliana
MAATTENLPQLKSAVDGLTEMSESEKSGFISLVSRYLSGEAQHIEWSKIQTPTDEIVVPYEKMTPVSQDVAETKNLLDKLVVLKLNGGLGTTMGCTGPKSVIEVRDGLTFLDLIVIQIENLNNKYGCKVPLVLMNSFNTHDDTHKIVEKYTNSNVDIHTFNQSKYPRVVADEFVPWPSKGKTDKEGWYPPGHGDVFPALMNSGKLDTFLSQGKEYVFVANSDNLGAIVDLTILKHLIQNKNEYCMEVTPKTLADVKGGTLISYEGKVQLLEIAQVPDEHVNEFKSIEKFKIFNTNNLWVNLKAIKKLVEADALKMEIIPNPKEVDGVKVLQLETAAGAAIRFFDNAIGVNVPRSRFLPVKASSDLLLVQSDLYTLVDGFVTRNKARTNPSNPSIELGPEFKKVATFLSRFKSIPSIVELDSLKVSGDVWFGSSIVLKGKVTVAAKSGVKLEIPDRAVVENKNINGPEDL

SEQ ID NO: 7847 - protein, 296 aa, Rhizobium sp. USDA 1114
RGKTQIKEFDAFPTLEQLPLWGFDGSSTQQAEGRSSDCVLKPVAVYPDPVRTNGALVMCEVMMPDGKTPHPSNTRATVLDDESAWFGFEQEYFFYKNGRPLGFPEQGYPAPQGPYYTGVGYKNVGDIARQIVEEHLDICLAAGINHEGINAEVAKGQWEFQVFGKGSKKAADEVWLARYLLLRLTEKYGIDVEFHCKPLGDTDWNGSGMHANFSTAYLREVGGKDYFEALMAAFEKNLHDHINVYGPDNHLRLTGKHETAPWDKFSYGVADRGASIRVPHSFVNNGYRGYLEDRRP

SEQ ID NO: 7848 - protein, 1131 aa, Glycine max
MSTSRPSQSSSNSRRSRHSARMAQATVDAKIHATFEESGSSFDYSSSVRVSGTADGVNQPRSDKVTTAYLRGKMIQPFGCLLAIDEKNHMQTCKVIAYSENEPEMLTMVSHAVPSVGDHPALGIGTDIKTLFTAPSVSGLQKALGCADVSLLNPILVHCKTSGKPFYAIVHRVTGSLIVDFEPVKPYEVPMTAAGALQSYKLAAKAITRLQSLPSGNMERLCDTMVQEVFELTGYDRVMAYKFHEDDHGEVIREITKPCLEPYLGLHYPATDIPQASRFLFRKNKVRMIVDCHAKHVRVLQDEKLQFDLILCGSTLRAPHSCHAQYMANMDSIASLVLAVVVNDNEEDGDTDAVQPQKTERLWGLVVCHNTTPRFVPFPLRYAREFLPQVFADHVHKEIELEYQIIEKNILHHPGHLLCMLMRDAPLGIASESPNIMDLVKCDGAALIYRNKVWRLGVTPSEPQIREIALWLSEYHMDSTSFSTDSLFDAGFPSALSLGDVVCGMASVRVTAKDMVFWFRSHTAAEIRWGGAKHEAGEKDDSRRMHPRSSFKAFLEVVKARSLPWKEYEMDAIHSLQIILRNAFKEDTESLDLNAKAINTRLRDLKIEGINDLKIERMQELEAVTSEIVRLDYTATVPILAVDVDGLVNGWNIKIAELTGLPIGEATGKHLLTLVEDSSTDRVKKMLNLALLGEEEKNVQFEIKTLGSKMDSGPISLVVNRCASRDLRDNVVGVCFVAHDITAQKNVMDKFIRIEGDYKAIVQNRNPLIPPIFGTDEFGWCCEWNPAMMKLTGWKREEVMDKMLLGEIFGTQMAACRLKNQEAFVNLGVVLNKAMTGSETEKVPFGFFARNGKYVECLLSVSKKLDVEGLVTGVFCFLQLASPELQQALHIQRLSEQTASKRLNALSYMKRQIRNPLCGIVFSRKMLEGTDLGTEQKQLLRTSAQCQQQLSKILDDSDLDTIIDGYLDLEMAEFTLHEVLVTSLSQVMEKSNGKSIRIVNDVAGHIMMETLYGDSLRLQQVLADFLLISINFTPNGGQVVVAGSLTKEQLGKSVHLVKLELSITHGGSGVPEVLLNQMFGNNGLESEEGISLLIRAKLLKLMNGDVRYLREAGKSAFILSAELAAAHNLKA

SEQ ID NO: 7849 - protein, 1156 aa, Glycine max
MLQQAERRIPPFRRRKSTPHEQRLSHHSSNNNNNIDSMSKAIAQYTEDGVHAVFEQSGESGRSFNYSESIRIASESVPEQQITAYLVKIQRGGFIQPFGSMIAVDEPSFRILGYSDNARDMLGITPQSVPSLDDKNDAAFALGPQSVPSLDDKNDAAFALGTDVRALFTHSSALLLEKAFSAREISLMNPIWIHSRTSGKPFYGILHRIDVGIVIDLEPARTEDPALSIAGAVQSQEALVRAISQLQSLPSADVKLLCDTVVESVRELTGYDRVMVYKFHEDEHGEVVSESKRPDLEPYIGLHYPATDIPQASRFLFKQNRVRMIVDCHASAVRVVQDEALVQPLCLVGSTLGAPHGCHAQYMANMGSIASLVMAVIINGNDEEGVGGRSSMRLWGLVVCHHTSARCIPFPLRYACEFLMQAFGLQLNMELQLAAQSLEKRVLRTQTLLCDMLLRDSPTGIVTQSPSIMDLVKCDGAALYFQGNYYPLGVTPTEAQIRDIIEWLLAFHGDSTGLSTDSLGDAGYPGLPRLGMQFVGWQVAYITEKDFLFWFRSHTAKEIKWGGAKLILRTRMMGQRMHPLSSFKAFLEVVKSRSLPWENAEMDAIHSLQLILRDSFKDAEHRNSKAVVDPHVSEQELQGVDELSSVAREMVRLIETATAPIFAVDVDGHVNGWNAKVSELTGLPVEEAMGKSLVHDLVFKESEETVNKLLSREEDKNVETKMRTFGKEHQNKAAFLVVNACSSKHFTNNVVGVCFVGQNVTGQKIVMHKFINIQGDYKAIVHSPNPLIPPIFASDDNTCCLEWNTAMEKLDPSNENVTVGGVDVIGKMLVGEVFGSCCQLKGSDSITKFMIVLHNALGGQDTDKFPFSFLDRHGKYVQTFLTANKRVNMEGQIIGAFCFLQIMSPELQQALKAQRQQEKEFLGRMKELAYICQGVKKPLSGIRFTNSLLEATSLTNEQKQFLETSVACEKQMLKIIRDVDLESIEDGSLELEKGEFLLGNVINAVVSQVILLLRERNLQLIRDIPEEIKTLAVYGDQLRIQQVLSDFLLNIVRYAPSPDGWVEIHVRPRIKQISDGLTLLHAEFRMVCPGEGLPPELIQDMFNNSRWGTQEGLGLSMSRKILKLMNGEVQYIREAERCYFYVLLELPVTRRSSKKC

SEQ ID NO: 7850 - protein, 296 aa, Rhizobium sp. USDA 1115
  misc_feature (162)..(162): Xaa can be any naturally occurring amino acid
RGKTQIKEFDAFPTLEQLPLWGFDGSSTQQAEGRSSDCVLKPVAVYPDPVRTNGALVMCEVMMPDGKTPHPSNTRATVLDDESAWFGFEQEYFFYKNGRPLGFPEQGYPAPQGPYYTGVGYKNVGDIARQIVEEHLDICLAAGINHEGINAEVAKGQWEFQXFGKGSKKAADEVWLARYLLLRLTEKIRIDVEFHCKPLGDTDWNGSGMHANFSTAYLREVGGKDYFEALMAAFEKNLHDHINVYGPDNHLRLTGKHETAPWDKFSYGVADRGASIRVPHSFVNNGYRGYLEDRRP

SEQ ID NO: 7851 - protein, 834 aa, Debaryomyces hansenii CBS767
MVNLSSSKFHITEPADEDIQLTLVNGNQKGHEDSCNRSSTPKFGSISRFFFNKEQSVSSDVSNADSTVSSNTDSLNHNHGSKSGVTNSEAREDEHDDAKQQPGLSKLKSFLRLSSNSLLLSNNGPNDNGEQNGPKGTDVITPNAESVTPVRSNEEKTKLKHESDRNEEGHNGNKDGSNVSTKQEASAGMMKKFMLGRKRSVSSPTSPATGNRKPQQSNLLINTESPKDIPEIITENTESPVISSNLYFAHQGLPPHMNNHNKNNHTLAASAANEDDISVALRHNDSVFSLNDGGPLKPPNVYQSKLSASDESGSEHEPIPEHTTESGLKTPEESTLQNKNKLEVPPHTLPHPGQASPFQKTLRRVASAPLVHRLLNDSNTRLPQTRAYVSNDDDFDITEHIGELKSGRPRTLSRGRMYSSASTKIMDAQVNQNSFKKIRLLGKGDVGKVYLVKENLSNRLYAMKILSKKEMIERNKIKRALAEQDILATSNHPFIVTLYHSFQSNDYLYLCMEYCMGGEFFRALQTRETKTISETDAKFYAAEVTAALEYLHLMGFIYRDLKPENILLHQSGHIMLSDFDLSKQSESTKNPEIFFSKTSHGLSSSNNHNGPTLDTKACIDGFRTNSFVGTEEYIAPEVIRGKGHTSAVDWWTLGIFIYEMLFGTTPFKGRDRKKTFGNVLKKEVKFLETRSISSSCKSLIKKLLIKDEAKRLGSKTGASDIKNHAFFKNTQWALLRHQKPPMIPVLSKNKRADKVERYDSEEDQITDSTTDVSENKDILNDPFANFSSVTLHYNELDSGDDQMVYNEADNTVYTSVAYTMTNDSSPKPKHFLKR

SEQ ID NO: 7852 - protein, 432 aa, Populus trichocarpa
MAQILAPSSQWQMRIAKNSAPASPMTAKMWSSLVLKQNKKGTAKSSAKFRVFAVKSENGTINRMEDLLNLDLTPYTNNFIAEYIWIGGSGIDLRSKSRTISKPIEHPSELPKWNYDGSSTGQAPGEDSEVILYPQAIFKDPFRGGNNILVMCDTYTPQGEPIPTNKRHRAAEIFSNKKVVDEVPWFGIEQEYTLLQTNVKWPLGWPVGGYPGPQGPYYCGAGADKSFGRDISDAHYKACLYAGINVSGTNGEVMPGQWEYQVGPSVGIDAGDHIWISRYILERITEQAGVVLSLDPKPIEGDWNGAGCHTNYSTKTMREEGGYEAIKKAILNLSLRHKEHISAYGEGNERRLTGKHETASIDTFSWGVANRGCSIRVGRETEKQGKGYLEDRRPASNMDPYVVTALLAETTILYEPTLEAEALAAQKLSMNV

SEQ ID NO: 7853 - protein, 293 aa, Rhizobium sp. USDA 1177
RGKTQIKEFDAFPTLEQLPLWGFDGSSTQQAEGRSSDCVLKPVAVYPDPVRTNGALVMCEVMMPDGKTPHPSNTRATVLDDESAWFGFEQEYFFYKNGRPLGFPEQGYPAPQGPYYTGVGYKNVGDIARQIVEEHLDICLAAGINHEGINAEVAKGQWEFQVFGKGSKKAADEVWLARYLLLRLTEKYGIDVEFHCKPLGDTDWNGSGMHANFSTAYLREVGGKDYFEALMAAFEKNLHDHINVYGPDNHLRLTGKHETAPWDKFSYGVADRGASIRVPHSFVTRCSASTSST

SEQ ID NO: 7854 - protein, 712 aa, Ralstonia eutropha JMP134
MKIEQPKPYISSLVAIYVVCGLAYMVWRIGTINHAAPWLSIPLYAAEIYGYLSGLLFVLMTFRLSVREPVPPQEGLKVDVFVPTYNESVDLLRRTLLAAKWMDYPHETWLLDDGRRESMRKLAAELGCRYLSREDNLHAKAGNMNNALKFTDGDFIAIFDADHAPRKDFLLKTLGFFHDEKVAFVQTPQDFFNIDSFGHRLGKKRVWDEQALFFKIIQRGKDVLNAAFFCGSCAVVRRAALDEIGGFATETVTEDVHTAIKLHKRGFRSVYYGESLAFGLAPHSIDTYLKQRMRWGMGSMQVFRRENILFGHGLTLGQRLNYLASALFFFEGWQKLIFFLTPPAVFLFGEVPIVAPLTTFLLLFCPYYLLSILVHLELGRGYNSLFLSEQYAMARFFAFMSTSMGLFRRDIPFAVTDKQLSDTGKVWLWLSPLLMLAGIEAISMPMGVHRIYMGSIPIGAGIVTMIWTLVTLATAVSVAVFAHRHAANRRGEYRFPLRLPVTLEVNGETYLGLTSDLSPNGALYIGQRVPGLARGSTVDVLIHLPNLIVQDVAVATFVGNRTSDLGGAASVGLRFRWDARGNTGALETFLYGSRLQLDMGNLTETETPPLTRLAELLGRQGSGPLFAQSWAAALLMQPLRSGKLPVAIATIEGAAPLLFSSIELDLRASTTLRQGAAGKVTEHTVNLTPTGRLSTPTGDFHLYNIAPRASVV

SEQ ID NO: 7855 - protein, 297 aa, Rhizobium sp. USDA 1944
  misc_feature (282)..(282): Xaa can be any naturally occurring amino acid
RGKTQIKEFDAFPTLEQLPLWGFDGSSTQQAEGRSSDCVLKPVAVYPDPVRTNGALVMCEVMMPDGKTPHPSNTRATVLDDESAWFGFEQEYFFYKNGRPLGFPEQGYPAPQGPYYTGVGYKNVGDIARQIVEEHLDICLAAGINHEGINAEVAKGQWEFQVFGKGSKKAADEVWLARYLLLRLTEKYGIDVEFHCKPLGDTDWNGSGMHANFSTAYLREVGGKDYFEALMAAFEKNLHDHINVYGPDNHLRLTGKHETAPWDKFSYGVADRGASIRVPHSXVNNGYRGYLEDRRPN

SEQ ID NO: 7856 - protein, 474 aa, Neurospora crassa
MYFCPIRNQYLHPPSQPTATNSHERPSRPLEQLSPVRASSARVPHNIVIVPQSHSSDNALTKIEALFETIVDAISVGSPITIPYRRSTNAQVFDPTASASNPRDGRHMDSVRFPGRNPQELRRFEALFRIIEISHEALLSGTLVTKRNIYYQNMELFRSQSVVDDMVDNLAFTLGVGRNDLNIVATAKGLVAGQVELIMRGGSKIDCAESSDSATFRTLSASRYYTVSRAGSGILVTVRLCDLFCSNNADNYTQGKGYPDLATRKFLAAIHSVRPRLLMFALVDFDPHGISVLRTYQYGSQRLDHEERTKVFGLRWLGIRSSDVLLNTVMTQDCSANSQGSQSSQDLSSQESIAYSVDGECIVRQVHDFADFSNHTAFEDERPAKRPRSRRTKSHPSDYTASLSERDREKAVSVLRDICGTARLDATEREHKLELQRMLMLNIKAEIQAVDDFGDITNWLDERLLKHSMDVNSH

SEQ ID NO: 7857 - protein, 375 aa, Moritella sp. PE36
MSKRDYYEVLGVSRDASEKDVKKAYKRMAMKYHPDRTKGDKAMEEQFKEVKEAYEVLNDAQKKAAYDQYGHAGLNQQGGHGGQGDFGDIFGDVFGDIFGGGGGRGRQQRAARGSDLRYNMELTLEEAVRGVSKTIRIPSQCHCEVCNGSGAKSGTKATTCSTCHGQGQVQMRQGFFAVNQACPTCHGKGKIIKDPCRKCHGEGRYERSKDLKVTIPAGVDTGDRIRLTGEGEAGDMGAGSGDLYVQVSVRQHAIFERDGSNLYCEVPISFAHAAIGGEIEVPTLDGRVKLKVPAETQTGRMFRLRGKGVKSVRGGATGDLLCKVTLETPVKLSAEQKELLQQFEASLNNASAKKHKPKSEGFFDGVKSFFDDFTK

SEQ ID NO: 7858 - protein, 294 aa, Rhizobium sp. USDA 3394
RGKTQIKEFDTFPTLEQLPLWGFDGSSTMQAEGRSSDCVLKPVALYPDPARTNGALVMCEVMMPDGVTPHASNARATILDDEDAWFGFEQEYFFYQNGRPLGFPEQGYPAPQGPYYTGVGYSNVGDVAREIVEEHLDLCLAAGINHEGINAEVAKGQWEFQIFGKGSKKAADQIWMARYLLQRLTEKYGIDIEYHCKPLGDTDWNGSGMHCNFSTKYMREVGGKDYFEALMAAFDKNMMDHIAVYGPDNDKRLTGKHETAPWNKFSYGVADRGASIRVPHSFIKNDYKGYVEDR

SEQ ID NO: 7859 - protein, 71 aa, Zea mays
SNTNNRGENENAIKRRGEADARKMERIPKPKEGEGVKRLKLETGAGAAIRVLDHAMDINGPRGRCLPRKAT

SEQ ID NO: 7860 - protein, 499 aa, Ashbya gossypii ATCC 10895
MLSVGRKHNKTHSTYAFESNTNNVAASQMRNVLNKLADSVKDEKTRCRFENELDSFFTLFRRYLVEKSSDTTLEWEKIKSPSAEEVTAYSDIGASENLASLEKLAVLKLNGGLGTSMGCVGPKSVIEVRDGNTFLDLSVRQIEYLNRQYDSDVPLLLMNSFNTDADTEHLIKKYSANRIRIRSFNQSRFPRVYRDSLLPVPQDYNDKLDAWYPPGHGDLFEALHASGELDALLAQGREILFVSNGDNLGATVDLKILNHMIETGAEYIMELTDKTRADVKGGTLISYEGQVRLLEVAQVPKEHIDEFKNIRKFTNFNTNNLWINLKAIKRLVESSSLTMEIIPNKKTITRNGNEIEVLQLETACGAAIRHFKGAHGVVVPRSRFLPVKTCSDLLLVKSDLFYLEHGALKLDPSRFGPNPLIKLGSHFKKVSGFNAHIPHIPKIIELDHLTITGNVYLGKNVTLKGTVIVVCSDGQRIDIPNGSVLENVVITGNLQILEH

SEQ ID NO: 7861 - protein, 196 aa, Rhizobium tropici
PVPYLFGKTQIKEFDAFPTLAQLPLWGFDGSSHMQAEGRSSDCVLKPVAIYPDPARTNGALVMCEVMMPDGVTPHESNSRATILDDEDAWFGFEQEYFFYQDGRPLGFPESGYPAPQGPYYTGVGYKNVGDVAREIVEEHLDLCLEAGINHEGINAEVAKGQWEFQIFGKGSKKAADQIWMARYLLLRLCEKYGID

SEQ ID NO: 7862 - protein, 575 aa, Gibberella fujikuroi; identical to SEQ ID NO: 4097

SEQ ID NO: 7863 - protein, 127 aa, Brassica napus
MGVDYYKLLQVDRSATDDDLKKAYRKLAMKWHPDKNPTNKKDAEAKFKQISEAYDVLSDPQKRAVYDQYGEEGLKGNVPPPNAASGASYFSTGFNPRSADDIFAEFFGFSTPFGGGGGRWGWGDQGT

SEQ ID NO: 7864 - protein, 772 aa, Oryza sativa Japonica Group; identical to SEQ ID NO: 1734

SEQ ID NO: 7865 - protein, 738 aa, Ostreococcus tauri
MASHRISEGGAHAPSLDPIVARAFGAFDHTFTVCDATKPDCPIVYASDGFLRMTGYAAAEVIGYNCRFLQGEKTNKNDVRELREAIKNGDRWSVRLLNYKKDGTPFWNYLVVAPVKLADGTVVKYIGVQTDVTEVKDADTGERGIEFDEKGQPVPSRYDARAAAATLGRVSEVEQAVRTAEGLGNQAQRRTGMDLASTLERIEQSFVITDPSLPDHPIVFASDGFMEFTGYSVDEILGRNCRFLQGPKTDRAAVAKIREAIENGEECTVRLLNYTKTGEEFWNMFTLAPVRDEQGIVRFFAGVQVDITAHDPQTEHETVAEITFKEEDNDANVQVSKSAAQLVAGAAAKDKEFEPPWKHMSGHMLQPKPHQLENRRHWEALWRVTNYNDRPLTIDDFVPIRRIGQGDVGTVHLVALAKEKDVRFALKILTKQEIIDRNKLHRLQTESTILNQIDHPFVATLFASFQTSTHVYFLMEYCEGGELYDFLQKAPGKRLSEEATKFYAAEVLVSLQYLHLLGFVYRDLKPENVLLRRNGHIMITDFDLSFCASCQPHIKVRPGNPTWYPGQRATAHAKKKKLKPPRLPKSGSNPTIVAEPFTFTNSFVGTEEYLSPEVLNGTGHSGAVDWWELGIFMYEMAYGTTPFKAATRDETFSNITNAKLTFPDNIPMSEDFKDCVRKLLQRDSTSRLGTLGGAEEIKSHPFFSCVNWGLLRWEEPPYVPKPRRAAPVRDEEIFEMEI

SEQ ID NO: 7866 - protein, 392 aa, Caucanthus auriculatus
DLEPVNPADVPVTAAGALKSYKLAAKAISRLQSLPSGNISLLCDVLVKEVRDLTGYDRVMVYKFHEDEHGEVVSECHRSDLESYLGLHYPATDIPQASRFLFMKNKVRMICDCVAPPVKVIQEERLPQPLSLCGSTLRSPHGCHAQYMTNMGIIASLVMSVTVNEEDDMVDGDQPQMARKLWGLVVCHHTSTRFVPFPLRYACEFLIQVFGVQINKEVELAAQVREKHILQIQTMLCDMLLRDAPVAIITQSPNVMDLVKCDGAALYFKNKTWLLGVTPTEEQIRDITEWLLEYHSGNTGLSTDSLMEAGYPGASALGDAVCGMAAVSITSRDFLLWFRSHTAKEIKWGGAKHDPDDKDDGRKMHPRSSFKAFLEVVKWRSMPWEDMEMDAI

SEQ ID NO: 7867 - protein, 196 aa, Rhizobium tropici
PVPNLRGKTQIKEFDAFPTLEQLPLWGFDGSSTMQAEGRSSDCVLKPVAIYPDPARTNGALVMCEVMMPDGVTPHESNSRATILDDEDAWFGFEQEYFFYKDGRPLGFPESGYPAPQGPYYTGVGYKNVGDVAREIVEEHLDLCLEAGINHEGINAEVAKGQWEFQIFGKGSKKAADQIWMARYLLLRLCEKYGID

SEQ ID NO: 7868 - protein, 318 aa, Melia azedarach
AKAISRLQSLPSGNISLLCDVLVKEVSDLTGYDRVMVYKFHEDEHGEVVAECRRPDLEPYLGLHYPATDIPQASRFLIMKNKVRMICDCLAPPVKVIQDKKLDQPLSLCGSTLRAPHGCHAQYMENMGSIASLVMSVTINEESDDLDNDQQQGRKLWGLVVCHHTSPRFVPFPLRYACEFLIQVFGVQINKEVELAAQLREKHILRTQTVLCDMLLRDSPVGIVTQSPNVMDLVKCHGAALYYGGKLWLLGVTPTEAQIKDIAEWLLECHRGSTGLSTDSLMEAGYPGASVLGNAVCGMAAVKITSKDFLFWFRSHTA

SEQ ID NO: 7869 - protein, 392 aa, Caucanthus auriculatus
DLEPVNPADVPVTAAGALKSYKLAAKAISRLQSLPSGNISLLCDVLVKEVRDLTGYDRVMVYKFHEDEHGEVVSECHRSDLESYLGLHYPATDIPQASRFLFMKNKVRMICDCVAPPVKVIQEERLPQPLSLCGSTLRSPHGCHAQYMTNMGIIASLVMSVTVNEEDDMVDGDQPQMARKLWGLVVCHHTSTRFVPFPLRYACEFLIQVFGVQINKEVELAAQVREKHILQIQTMLCDMLLRDAPVAIITQSPNVMDLVKCDGAALYFKNKTWLLGVTPTEEQIRDIAEWLLEYHSGNTGLSTDSLMEAGYPGASALGDAVCGMAAVSITSRDFLLWFRSHTAKEIKWGGAKHDPDDKDDGRKMHPRSSFKAFLEVVKWRSMPWEDVEMDAI

SEQ ID NO: 7870 - protein, 250 aa, Zea mays
  misc_feature (241)..(241): Xaa can be any naturally occurring amino acid
MGRNRKGRKARVSHDADADADGSEDERATTAGRSLYEILGVEKTASQQEIKKAYHKLALRLHPDKNPGDEEAKEKFQQLQKVISILGDAEKRALYDETGITDDDALVGEAANNLQEYFRTMYKKVTEADIEEFEAKYRGSDSEKTDLKELYTKYKGNMNRLFCAMICSEPKLDSHRFKDIIDEAIGEGELKSTKVYEKWAKKISGMEPPTNPLERRVKKRKNSEENDLILAISQRRAERKXQFNSILSNI

SEQ ID NO: 7871 - protein, 392 aa, Diacidia ferruginea
DLEPVNPADVPVTAAGALKSYKLAARAISRLQSLPSGNISLLCDVLVKEVRDLTDYDRVMVYKFHEDEHGEVISECCRPDMEAYLGLHYPATDIPQASRFLFMKNKVRMICDCLATPVKVIQDERLPQPLSLCGSTLRSPHGCHAQYMANMGAIASLVMSVTINEDDDMMDGDRQHRARKLWGLVVCHHTSPRFLPFPLRYACEFLIQVFGVQINKEVELAAQVREKHILRTQTLLCDMLLRDAPVAIITQSPNVMDLVKCNGAALYYKKKFWLVGLTPTEAQIRDIAEWLLEYHNGNTGLSTDSLMEAGYPGASELGDTVCGMAVVKITSRDFLFWFRSHTAKEIKWGGAKHDPDDKDDGRKMHPRSSFKAFLEVVKWRSLPWEDIEMDAI

SEQ ID NO: 7872 - protein, 196 aa, Rhizobium tropici
PVPNLRGKTQIKEFDAFPTLEQLPLWGFDGSSTMQAEGRSSDCVLKPVAIYPDPARTNGALVMCEVMMPDGVTPHESNSRATILDDEDAWFGFEQEYFFYQDGRPLGFPESGYPAPQGPYYTGVGYKNVGDVAREIVEEHLDLCLEAGINHEGINAEVAKGQWEFQIFGKGSKKAADQIWMARYLLLRLCEKYGID

SEQ ID NO: 7873 - protein, 392 aa, Dinemandra ericoides
DLEPVNPADVPVTAAGALKSYKLAAKAISRLQSLPSGNIPLLCDVLVKEVRDLTGYDRVMVYKFHEDEHGEVVSECRRSDMESYLGLHYPATDIPQASRFLFMKNKVRMICDCLSPPVEVIQDERLPQPLSLCGSTLRSPHGCHAQYMANMGTIASLVMSVTVNEDDDMMDGDQQRMARKLWGLVVCHHTSPRFVPFPLRYACEFLIQVFGVQINKEVDLAAQVREKHILRIQTMLCDMLLRDAPVAIITQSPNVMDLVKCDGAALYYKNKFWLLGVTPTEAQIRDIAEWLLEYHRGNTGLSTDSLMEAGYPGASVLGDAVCGMAAVSITSRDFLFWFRSHTAKEIKWGGAKHDPGDKDDGRKMHPRSSFKAFLEVVKWRSLPWKDVEMDAI

SEQ ID NO: 7874 - protein, 209 aa, Austrosteenisia blackii
DRVMAYKFHEDDHGEVIAEITKPGLEPYLGLHYPATDIPQAARFLFMKNKVRMIVDCHAKHVKVLQDEKLPFDLTLCGSTLRAPHSCHLQYMANMNSIASLVLAVVVNDNEEDGDSSDAVQPQKRKRLWGLVVCHNTTPRFVPFPLRYACEFLAQVFAIHVNKEIELEYQIIEKNILRTQTLLCDMLMRDAPLGIISQSPNIMDLVKCD

SEQ ID NO: 7875 - protein, 392 aa, Dinemandra ericoides
DLEPVNPADVPVTAAGALKSYKLAAKAISRLQSLPSGNIPLPCDVLVKEVRDLTGYDRVMVYKFHEDEHGEVVSECRRSDMESYLGLHYPATDIPQASRFLFMKNKVRMICDCLSPPVEVIQDERLPQPLSLCGSTLRSPHGLHAQYMANMGTIASLVMSVTVNEDDDMMDGDQQRMARKLWGLVVCHHTSPRFVPFPLRYACEFLIQVFGVQIHKEVDLAAQVREKHILRIQTMLCDMLLRDAPVAIITQSPNVMDLVKCDGAALYYKNKFWLLGVTPTEAQIRDIAEWLLEYHRGNTGLSTDSLMEAGYPGASVLGDAVCGMAAVSITSRDFLFWFRSHTAKEIKWGGAKHDPGDKDDGRKMHPRSSFKAFLEVVKWRSLPWEDVEMDAI

SEQ ID NO: 7876 - protein, 205 aa, Austrosteenisia blackii
RTSSMRMIMGKVIAEIKKPGLEPYLGLHYPATDIPQATRFLFMKNKVRQIVDCRAKHVKVLQDKNIPFDLTLCGSTLRAPHSCHLQYMKNMNSSASLVMAVVVNDNNEDGDSSDAFQPQKRKRLWGLVVCHHTTPRFVPFPLRYACEFLAQVFAYLVNKELEIAYQIVEKNILRTQTLLCDMLMRDAPLGIVSQSPNIMDLVKCD

SEQ ID NO: 7877 - protein, 301 aa, Zea mays
MAFTRRRPCGILLLSLLAASGSLSLAATGPGDVAVFWGRNKDEGTLREACDTGTYTTVIISFLRGFGHGAAYYSLDLSGHPLAGVGADVKHCQAKGILVLLSIGGPPNTNTGAGAGYSLPSARAAADLAAYLWDAYLGGSRAGLRRPFGDAALDGVDLYIDQGGVDGHYDELARRLYAYNRSYRGRLGVTLTATVRCAYPDPRAQAALATGLVSRVHVRLYGDLKCTWSDREAWEKWAAAYPASRVFVGVVASPEADKDAYMFQKDLYYNVLQFAQKAPNYGGLMIWDRYYDKMNHYISSS

SEQ ID NO: 7878 - protein, 365 aa, Thermoplasma volcanium GSS1
MAKDYYKILGVDRNASEEDIKKAFRELAKKWHPDLHPDNKAEAEEKFKEISEAYEVLSDPEKRRIYDQTGSVDFGGGGSNFNWDNFTHFSDINDIFNEIFGGNFGSDFFSGFGNRQSTRNIDLDMYTNLDISLEEAYYGTEKRIKFRRNAICPDCKGTGAKNGKLITCPTCHGTGQQRVVRGQGFFRMVTVTTCNTCGGKGRIPEEKCPRCNGTGTIVVDEDITVKIPRGATDNLRLRVSGKGQSYDGRTGDLYVILRIKQDKNLQRINDDLLLDQKINFGQAALGADIPIQIFNEKYNLKIPEGTQPGDVIKIKGAGMPHLNGHGSGDLLVRINVEVPKRLTAKQRELIRELFDIKENHKSWFH

SEQ ID NO: 7879 - protein, 193 aa, Austrosteenisia blackii
MAYKFHEDDHGEVVSEIRRSDLEPYLGLHYPATDIPQASRFLFKQNRVRMICDCHAKPVKVIQSEELRQPLCLVNSTLRSPHGCHTQYMANMGSIASLVMAVTVNGNDTRRLWGLLVCHHTSPRYVPFPVRYACEFLMQAFGLQLYMEIQLASQMAEKRILKTQTLLCDMLLRDAPFGIVSQSPNIMDLVKCD

SEQ ID NO: 7880 - protein, 447 aa, Brassica napus
METTTTPLLPDRCGWLRRRLRLKNPLSSELSGAVGDLGTFIPIVLTLTLVSNLDLSATLIFTGFYNIATGLLFDIPMPVQPMKSIAAVAVSETPHLTPSQIAAAGASTAATPLLLGATGAMSFLYNLIPLPVVRGVQLSQGLQFAFTAIKYVRYDYDTATLKPSSSPRSWLGLDGLILALAALLFIILSTGSGTDRDCAGDGDFAESSPSNETQSRRRRLRLLSSIPSALIVFFVGLVLCFIRDPSIFKDLKFGPSKFKILKITWEDWKIGFVRAAIPQIPLSVLNSVIAVCKLSNDLFDKELSATTVSVSVGVMNLIGCWFGAMPVCHGAGGLAGQYRFGARSGLSVVFLGVGKLIVGLVFGNSFVRILSQFPIGILGVLLLFAGIELAMASKDMNTKEDSFIMLVCAAVSMTGSSAALGFGCGVVLYLLLKLRTLDSSETASHVA

SEQ ID NO: 7881 - protein, 1121 aa, Ceratodon purpureus
MSAPKKTYSSTTSAKSKHSVRVAQTTADAALEAVYEMSGDSGDSFDYSKSVGQSAESVPAGAVTAYLQRMQRGGLIQTFGCMVAVEEPNFCVIAYSENASEFLDLMPQAVPSMGEMDVLGIGTDIRTLFTPSSGAALEKAAATQDISLLNPITVHCRRSGKPLYAIAHRIDIGIVIDFEAVKMNDVSVSAAGALQSHKLAAKAITRLQALPGGDIGLLCDTVVEEVRELTGYDRVMAYKFHEDEHGEVVAEIRRMDLEPYLGLHYPATDIPQASRFLFMKNRVRVIADCCASPVKLIQDPDIKQPVSLAGSTLRAPHGCHAQYMGNMGSIASLVMAVIINDNEEDSRGAIQRGRKLWGLVVCHHTSPRTVPFPLRSACEFLMQVFGMQLNMEVELAAQLREKHILRTQTLLCDMLLRDAPIGIVSQTPNIMDLVKCDGAALYYGKRFWLLGTTPTENQIKDIAEWLLEYHKDSTGLSTDSLADANYPGAHLLGDAVCGMAAAKITAKDFLFWFRSHTAKEVKWGGAKHDPAEKDDGRKMHPRSSFKAFLEVVKRRSLPWEDVEMDAIHSLQLILRGSFQDIDDSDTKTMIHARLNDLKLHGMDELSVVANEMVRLIETATAPILAVDSTGMINGWNAKIAHVTGLPVSEAMGRSLVKDLVLDESVVVVERLLYLASQGEEEQNVEIKLKTFGTQTEKEAVILIVNACSSRDVSDSVVGVCFVGQDVTGQKMFMDKFTRIQGDYKTIVKNPHPLIPPIFGGDEYGYCFEWNPAMEALTGWKHDEVVGKLLVGEIFGMEMMCCRLKSQDSMTKFMISLNNAMDGTNTDKFSFSFCNREGKFVEALLSTNKRTNADGVITGVFCFLQIASSELQQALTVQRATEKVAIAKLKELAYIRQEIKNPLCGITFTRQLLEDTDLSDDQKQFLDTSAVCEQQLQKVLNDMDLESIEDGYLELDTAEFEMGTVMDAVISQGMTTSREKGLQIIRETPREISTMRLFGDQIRLQQVLSDFLINAIRFTPSSEGWVKIKVVPTRKRLGGNVHVMHLEFRVSHPGGGLPDELVLEMYDRAKGMTQEGLGLNMCRKLVRLMNGDVQYVRENAQCYFVVYVELPMAQRDDAASQM

SEQ ID NO: 7882 - protein, 376 aa, Burkholderia thailandensis E264
MAKRDYYEVLGVAKNASDDEIKKAYRKLAMKYHPDRNPDSKDAEEHFKEAKEAYEMLSDSQKRAAYDQYGHAGVDPNMGAAGAQGFGGFADAFGDIFGDIFGQAAGGGRGRGGPQVYRGADLRYSMEITLEQAAHGYDTQIRVPSWASCGICHGSGAKPGTKPETCPTCHGQGTVRMSQGFFSIQQTCPKCHGTGTYIPEPCVHCHGSGKVKETKTLEVKIPAGIDDGMRIRSAGNGEPGINGGPSGDLYVEIHIKPHPVFERDGDDLHCQMPIPFTTAALGGEIEVPTLAGRASFTVAEGTQSGKTFRLRGKGIKGLRSSIAGDLYVHVQVETPVKLTDQQRDLLKQFEKSLAEGGPRHSPQSKSWFDRVKSFFE

SEQ ID NO: 7883 - protein, 1124 aa, Lathyrus sativus
MSTTRPSQSSNNSGRSRNSARIIAQTTVDAKLHATFEESGSSFDYSSWVRVSGSVDGDQQPRSNKVTTAYLNHIQRGKQIQPFGCLLALDEKTCKVVAYSENAPEMLTMVSHAVPSVGDHPALGIGTDIRTVFTAPSASALQKALGFAEVSLLNPILVHCKTSGKPFYAIIHRVTGSLIIDFEPVKPYEVPMTAAGALQSYKLAAKAITRLQSLASGSMERLCDTMVQEVFELTGYDRVMAYKFHEDDHGEVIAEIAKPGLEPYLGLHYPATDIPQAARFLFMKNKVRMIVDCNAKHVKVLQDEKLPFDLTLCGSTLRAPHSCHLQYMANMDSIASLVMAVVVNDSDEDGDSADAVLPQKKKRLWGLVVCHNTTPRFVPFPLRYACEFLAQVFAIHVNKEIELEYQILEKNILRTQTLLCDMLMRDAPLGIVSQSPNIMDLVKCDGAALFYRNKLWLLGATPTEYQIREIALWMSEYHTDSTGLSTDSLLDAGFPGALSLSDTVCGMAAVRITSKDIVFWFRSHTAAEIRWGGAKHEPGEQDDGRKMHPRSSFKAFLEVVKARSVPWKDFEMDAIHSLQLILRNASKDTDIIDLNTKAINTRLNDLKIEGMQELEAVTSEMVRLIETATVPILAVDVDGTVNGWNIKIAELTGLPVGEAIGKHLLTLVEDSSTDIVKKMLNLALQGEEEKNVQFEIKTHGDQVEFGPISLIVNACASRDLRENVVGVCFVAQDITAQKTVMDKFTRIEGDYKAIVQNPNQLIPPIFGTDEFGWCCEWNAAMIKLTGWKREEVMDKMLLGEVFGTQMSCCRLKNQEAFVNFGIVLNKAMTGLETEKVAFGFFSRKGKYVECLLSVSKKIDAEGLVTGVFCFLQLASPELQQALHIQRLSEQTALKRLKVLTYMKRQIRNPLAGIVFSSKMLEGTDLETEQKQIVNTSSQCQRQLSKILDDSDLDGIIDGYLDLEMAEFTLHEVLVTSLSQVMNRSNTKGIRIANDVAEHIAKESLYGDSLRLQQVLADFLLISINSTPNGGQVVIASSLTKEQLGKSVHLVNLELSITHGGSGVPEAALNQMFGNNVLESEEGISLHISRKLLKLMNGDVRYLKEAGKSSFILSVELAAAHKLKG

SEQ ID NO: 7884 - protein, 1131 aa, Pinus sylvestris
MASNSRHTQSQSTGSNNRRSSTNTNTTTNKATAMAQYNSDARLLQVFEQSGESGKSFDYTRSIQVHNRAVPEQQITAYLSRIQRGGRIQPFGCVLAVEETTFRIIAYSENEEMLDLGAQSVPSMEKPQQDVLTIGTDVRTLFTAASAHSLEKAAVAQEISLMNPIWVHCKNSRKPFYAIVHRIDVGMVIDLEPLRTGDAFMSAAGAVQSQKLAVRAISRLQSLPCGDVGLLCDTVVENVRELTGYDRVMVYKFHEDEHGEVVAEIRRSDLEPYLGLHYPATDIPQASRFLFMQNRVRMICDCMATPVKVIQSEELMQPLCLVGSTPSAPHGCHAQYMANMGSIRSLLMAVIINGNDDEGGGSGRNSMKLWGLVVCHHTSPRAVPFPLRYACEFLMQALGLQLNMELQLAAQLTEKHILRTQTLLCDMLLRDAPMGIVTQSPSIKDLVKCDGAALYYGGMCWMLGVTPTEAQIKDIADWLLEHHGDSTGLSTDSLADAGYPGAASLGDAVCGMASARITSKDFLFWFRSHTAKEMKWGGAKHHPDDKDDARRMHPRSSFKAFLEVVKRRSLPWDNVEIDAIHSLQLILRCSFRDIDDSGTKTMVHSRLNYLRLQGIDELSSVASEMVRLIETATAPILAVDYNGLVNGWNAKVAELTGLPVGEAMGMSLVQDLVFEQSVERVEKMLHNALRGEEEKNVEMMLKTFGPQKEKEAVILVVNACSSRDFTDNIVGVCFVGQDVTSQKVVMDKFIRIQGDYRSIVQSPNPLIPPIFASDEYACCSEWNAAMEKVTGWTHDEVIGKMLVGEIFGGCCRLKGQDAVTKFTIVLHQCNHGQEIEKFPFAFFDKQGKYVEALLTANKRTDADGRITGSFCFFRIASSELQHALEVQRQQEKKCFARLKELAYIRQEIKNPLYGMMFTRKLLEETDLSDDQKQFVETSAVCERQMQKVMDDMDLESLEDGYMELDTAEFILGTVIDAVVSQGMIVLREKGLQLIREIPGEVKTMRLYGDEVKIQQILADFLLNVLRFTPSPEGWVAIKVFPTLKQLGGGLHVVHLEFRITHPGLGLPAELVQDLFDRSQWATQEGVGLSMCRKLLKLMNGDVRYIRESGICYFLVNVEFPMAQREDAASIK

SEQ ID NO: 7885 - protein, 379 aa, Alteromonadales bacterium TW-7
MSKRDYYEVLGVSKDASERDIKKAYKRLAMKYHPDRTAGDKELETKFKEVKEAYEILTDDQKRQMYDQYGHAAFEQGGGGGHGGFGGGHGDFGDVFGDVFGDIFGGGGGRRQSRQQRGSDLRYNMDLTLEEAVRGKEVEIKVPTWVSCDPCDGSGAKAGSKPKTCTTCHGAGQVQMRQGFFAVQQTCPTCQGQGQIISDPCNSCHGQGRVEKTKTLSVKIPAGVDTGDRIRLSGEGEAGVHGAPAGDLYVQVSVREHDIFVREGNNLYCEVPISFTTSGLGGEIQVPTLDGRAKLKIPSETQTGKMFRMRGKGVKSVRSGAQGDLICKVVIETPVNLNERQRELLKELEESMGTDSSKNRPKEQGFFDGVKKFFDDLTK

SEQ ID NO: 7886 - protein, 83 aa, Glycine max
MMTMLTRFTFCHFCLEATTVTATAAKKLFGLKSNVFRSNEIGENEKSWFMMLRSRYLIGQTHHVEWSKIQTPTDEWVVTYDTM

SEQ ID NO: 7887 - protein, 291 aa, Rhizobium sp. CIAM1141
GKTQIKEFDTFPTLEQLPLWGFDGSSTMQAEGRSSDCVLKPVALYPDPARTNGALVMCEVMMPDGVTPHATNARATILDDEDAWFGFEQEYFFYQNGRPLGFPEQGYPAPQGPYYTGVGYSNVGDVAREIVEEHLDLCLEAGINHEGINAEVAKGQWEFQVFGKGSKKAADQIWMARYLLQRLTEKYGIDIEYHCKPLGDTDWNGSGMHCNFSTKYMREVGGKDYFEALMAAFDKNLMDHIAVYGPDNDKRLTGKHETAPWNKFSYGVADRGASIRVPHSFVKNDYKGYVE

SEQ ID NO: 7888 - protein, 391 aa, Zea mays
  misc_feature (288)..(288): Xaa can be any naturally occurring amino acid
MAGRDKRRRAAPLEGDEQQLRRRLEEAALLLRRIKGLVRWIVEEVAAGRSPSIVLHRYRNYCSSADSASPSPWFSFRARSRDHLLPDQFTVTSLEQFSPKCVTSVDPGRALVRDCSACSYDIPVGTDVLSLLHKDYHTSRLNVLLRVLFVVQQLLQQNKHCSKRDIYYMYPSIFVEVAVVDRAINDICILFKCSRHNLNVVPVVKGLVMGWIRFMEGEKKVYCITSVNAAFSIPVDIEAIKDVVSVAHYILVVEKETVFQRLANDKFCERNRCIVITGRGYPDIPTRXQLAHDANLLRVPDIRWLGVFTSDFEEYCLPDCCLLRLSPEDRRKAEGILARCYLHREAPEWRSELEAMLQKGVKFEIEALSANSISFLSHEYIPQKIKQGMHL

SEQ ID NO: 7889 - protein, 296 aa, Rhizobium sp. CIAM1143
  misc_feature (216)..(216): Xaa can be any naturally occurring amino acid
RGKTQIKEFDTFPTLEQLPLWGFDGSSTMQAEGRSSDCVLKPVALYPDPARTNGALVMCEVMMPDGVTPHPTNARATILDDEDAWFGFEQEYFFYQNGRPLGFPEQGYPAPQGPYYTGVGYSNVGDVAREIVEEHLDLCLAAGINHEGINAEVAKGQWEFQVFGKGSKKAADQIWMARYLLQRLTEKYGIDIEYHCKPLGDTDWNGSGMHCNFSTXYMREVGGKDYFEALMAAFDKNLMDHIAVYGPDNDKRLTGKHETAPWNKFSYGVADRGASIRVPHSFVKNDYKGYLEDRRP

SEQ ID NO: 7890 - protein, 267 aa, Triticum aestivum
  misc_feature (209)..(209): Xaa can be any naturally occurring amino acid
  misc_feature (225)..(225): Xaa can be any naturally occurring amino acid
HYRTSLYKKAGWYRSGIPGISSTHASDSDNLGAIVDIKILNHLITNQNEYCMEVTPKTLADVKGGTLISYEGRVQLLEIAQVPDEHVNEFKSIEKFKIFNTNNLWVNLKAIKRLVDAEALKMEIIPNPKEVDGVKVLQLETAAGAAIRFFEKAIGINVPRSRFLPVKATSDLLLVQSDLYTLVDGYVIRNPARVKPSNPSIELGPEFKXVANFLARFKSIPSIVXELDSFEGPLAMSRFGSGVGLKGHVTIAAKGWIKLGNPEGSWA

SEQ ID NO: 7891 - protein, 295 aa, Rhizobium sp. CIAM1146
RGKTQIKEFDTFPTLEQLPLWGFDGSSTMQAEGRSSDCVLKPVALYPDPARTNGALVMCEVMMPDGVTPHASNARATILDDEDAWFGFEQEYFFYQNGRPLGFPEQGYPAPQGPYYTGVGYSNVGDVAREIVEEHLDLCLAAGINHEGINAEVAKGQWEFQIFGKGSKKAADQIWMARYLLQRLTEKYGIDIEYHCKPLGDTDWNGSGMHCNFSTKYMREVGGKDYFEALMAAFDKNMMDHIAVYGPDNDKRLTGKHETAPWNKFSYGVADRGASIRVPHSFIKNDYKGYLEDRR

SEQ ID NO: 7892 - protein, 293 aa, Rhizobium sp. CIAM490
GKTQIKEFDTFPTLEQLPLWGFDGSSTMQAEGRSSDCVLKPVALYPDPARTNGALVMCEVMMPDGVTPHASNARATILDDEDAWFGFEQEYFFYQNGRPLGFPEQGYPAPQGPYYTGVGYSNVGDVAREIVEEHLDLCLAAGINHEGINAEVAKGQWEFQIFGKGSKKAADQIWMARYLLQRLTEKYGIDIEYHCKPLGDTDWNGWGMHCNFSTKYMREVGGKDYFEALMAAFDKNMMDHIAVYGPDNDKRLTGKHETAPWNKFSYGVADRGASIRVPHSFIQNDYKGYVEDR

SEQ ID NO: 7893 - protein, 382 aa, Chlamydomonas reinhardtii
MAAGSVGVFATDEKIGSLLDQSITRHFLSTVTDQQGKICAEYVWIGGSMHDVRSKSRTLSTIPTKPEDLPHWNYDGSSTGQAPGHDSEVYLIPRSIFKDPFRGGDNILVMCDCYEPPKVNPDGTLAAPKPIPTNTRFACAEVMEKAKKEEPWFGIEQEYTLLNAITKWPLGWPKGGYPAPQGPYYCSAGAGVAIGRDVAEVHYRLCLAAGVNISGVNAEVLPSQWEYQVGPCEGITMGDHMWMSRYIMYRVCEMFNVEVSFDPKPIPGDWNGSGGHTNYSTKATRTAPDGWKVIQEHCAKLEARHAVHIAAYGEGNERRLTGKHETSSMSDFSWGVANRGCSIRVGRMVPVEKSGYYEDRRPASNLDAYVVTRLIVETTILL

SEQ ID NO: 7894 - protein, 174 aa, Zea mays
MEHKEAGCQAPEGPILCINNCGFFGSAATMNMCSKCHKEMITKQDQAKLAASSIDSIVNGSDAVMEPVVAGSNTVVAVAQVELQTMNVQQPADVAGSSEGVAAISKGGKVGPNRCSACRKRVGLTGFNCRCGNLYCALHRYSDKHDCKFDYRTAARDAIAKANPVVKADKLDKI

SEQ ID NO: 7895 - protein, 509 aa, Ustilago maydis 521
MSSNATLSTPNSGAQIKASRTRGASHIDFKSATTGVAAKAMRNEINALVSGIDDPAVRKAFDAEMSNFFTLFNRYLSEKAKGEKLVWDKIQPPSPKQITPYSELRNATDPSILNKLAVLKLNGGLGTTMGCTGPKSVIEVREGMTFLDLSVRQIEHLNSSHNVNVPFILMNSFNTDDDTARVIQKYANHNVEILTFNQSRYPRVNKESLLPCPRSATDNKNLWYPPGHGDLFDAMNNSGLLDRLISAGKEYLFVSNVDNLGADVDLNIYQHMIDTQAEFISEVTDKTKADVKGGTLIDYEGTIRLLEIAQVPSEHVEDFKSVKKFKIFNTNNLWLNLRAVKRVLENEELDLEIIVNNKALDSGEAVIQLETAVGAAIKHFRGAKGVNVPRSRFLPVKSCSDLLLITSDLYSLEHGKLVMNPGRMFSQTPVVKLGDTFKKVAQFQKRFKSIPEMIELDHLTVQGDVVFGRNITLRGTVIIVANEGNKIEIPEGSVLENKLISGNLAIIDH

SEQ ID NO: 7896 - protein, 295 aa, Rhizobium sp. CIAM540
RGKTQIKEFDTFPTLEQLPLWGFDGSSTMQAEGRSSDCVLKPVALYPDPARTNGALVMCEVMMPDGVTPHATNARATILDDEDAWFGFEQEYFFYQNGRPLGFPEQGYPAPQGPYYTGVGYSNVGDVAREIVEEHLDLCLEAGINHEGINAEVAKGQWEFQVFGKGSKKAADQIWMARYLLQRLTEKYGIDIEYHCKPLGDTDWNGSGMHCNFSTKYMREVGGKDYFEALMAAFDKNLMDHIAVYGPDNDKRLTGKHETAPWNKFSYGVADRGASIRVPHSFVKNDYKGYLEDRR

SEQ ID NO: 7897 - protein, 514 aa, Emericella nidulans
MATKDLPTHLSSNTGFGKHHGKTQSHMAFENASTSVAASQMRNALNALAETVPDPNERKRFEAEMDNFFALFRRFLNDKAKGNVVNWDRIAPPQPSQVVNYDDIGKESSVEFLNKLAVVKLNGGLGTSMGCVGPKSVIEVREGMSFLDLSVRQIEHLNRTYNVNVPFVLMNSFNTDQDTQSIIKKYQGHNVDIITFNQSRYPRIIKDSLLPAPKSFDAPLQDWYPPGHGDVFESLYNSGTLDKLLERGVEYIFLSNADNLGAVVDTRILQHMIDTKAEYIMELTDKTKADVKGGTIIDYEGKVRLLEIAQVPKEHVNEFKSIKKFKYFNTNNIWMNLRAIKRVVEENELEMEIIANEKSIPADKKGEADQAIYQLETAVGAAIRHFKNAHGVNVPRRRFLPVKTCSDLLLVKSDLYRLEHGQLVMDPNRFGGVPVIKLGSDFKKVSDFQKRIPSIPRIVELDHLTITGAVNLGRNVTLKGTVIIVATEGSTIDIPPGSVLENCVVQGSLRILEH

SEQ ID NO: 7898 - protein, 400 aa, Brasenia schreberi
DLEPVNPADVPVTAAGALKSYKLAAKAISRLQVLPSGNICLLCDVLVREVFELTGYDRVMAYKFHEDEHGEVIAECKRPDLEPYLGLHYPATDIPQASRFLFMKNKVRMICDCTAAPVKVIQDEKIEEPLSLCGSTLRFPHGCHAQYMANMGSIASLVMSVVISESDEAAANDQPEAAASEQPQKGRKLWGLVVCHHTKPRFIPYPLRYACEFLIQVFSVQLNKEVELAAQIREKHILRTQTMLCDMLLRDAPVGIVTQSPNVMDLVKCDGAALYYKRQFWLLGTTPTEARIRDIIAWLHECHGSSTGLSTDSLMEAGYPGAAVLGNAVCGMAAVKITSGDFLFWFRSHTAKEIKWSGAKHVRVDKDNGKKMHPRSSFKAFLEVIKWRSLPWDDIEMDAI

SEQ ID NO: 7899 - protein, 239 aa, Casimiroa edulis
  misc_feature (2)..(2): Xaa can be any naturally occurring amino acid
  misc_feature (8)..(8): Xaa can be any naturally occurring amino acid
  misc_feature (13)..(13): Xaa can be any naturally occurring amino acid
  misc_feature (18)..(18): Xaa can be any naturally occurring amino acid
  misc_feature (30)..(30): Xaa can be any naturally occurring amino acid
  misc_feature (65)..(65): Xaa can be any naturally occurring amino acid
  misc_feature (113)..(113): Xaa can be any naturally occurring amino acid
  misc_feature (136)..(136): Xaa can be any naturally occurring amino acid
  misc_feature (170)..(170): Xaa can be any naturally occurring amino acid
  misc_feature (182)..(182): Xaa can be any naturally occurring amino acid
  misc_feature (188)..(188): Xaa can be any naturally occurring amino acid
  misc_feature (203)..(203): Xaa can be any naturally occurring amino acid
  misc_feature (206)..(206): Xaa can be any naturally occurring amino acid
  misc_feature (212)..(212): Xaa can be any naturally occurring amino acid
KXKVRMKXDCLAXPVRVXQDKKLNQPLSLXGSTLRAPHGCHAQYMENMGSIASLVMLVTINEEEXELDNDQEQGRKLWGLVVCHHTSHSFVPFPLRYACEFLIQVFGVQVNKXVELAALIGEKHILRTQTVLCDMXLRDSPVGIVTQSPNVMDLVKCDGAALYYRGKLWXLGVTPTEAQIKXIAEWLXEYHGGSTGLSTDSLXEAXYPGALXLGDAVCGMAAVKIISKDFLFWFQSHTA

SEQ ID NO: 7900 - protein, 51 aa, Passiflora adenopoda
NGEVMPGQWEYQVGPAAGISAGDQLWMSRFILERIPQIAGVVLTFDPKPIQ

SEQ ID NO: 7901 - protein, 240 aa, Triticum aestivum
  misc_feature (57)..(57): Xaa can be any naturally occurring amino acid
MASGAADADLYAVLGLKKECSDADLRLAYRRLAMTWHPDRCSASGSSARVEEAKERXQEIQSAYSVLSDSGKRLLYDVGVYDSDGDSHDEQHVSGMGDFFGEMAEMMSQATPTDSFEELQQLFVDMFQADLLAGGFACGLGGAPPMGRRVQAPSPSCTSGPTFAQARPSCTSRANKRCSSAMGSPGACRPGSGPGLSVSSSKGSDWRRGEEAPWTTTQDDASVGGRTKKKRLSTGHGESC

SEQ ID NO: 7902 - protein, 418 aa, Triticum aestivum
  misc_feature (61)..(61): Xaa can be any naturally occurring amino acid
  misc_feature (323)..(323): Xaa can be any naturally occurring amino acid
  misc_feature (350)..(350): Xaa can be any naturally occurring amino acid
  misc_feature (363)..(363): Xaa can be any naturally occurring amino acid
  misc_feature (381)..(381): Xaa can be any naturally occurring amino acid
  misc_feature (396)..(396): Xaa can be any naturally occurring amino acid
  misc_feature (405)..(405): Xaa can be any naturally occurring amino acid
  misc_feature (413)..(413): Xaa can be any naturally occurring amino acid
MDAPSLPNGDGRDADGGARPRPTNPMVTPLLSDLYQFSMDYPYWKADKHLDRGRPALYFTXRPCVRANFKFQEEIINFLRAALPTCEDGFFEYLSSIDCSDVEVYAIPEGSAVFPKVPLMIIEGPVAVVQLLETPFLSLVNYASLVTTNAARHRLVAGKPKNLLEFGLRRAQGPDGGISASRYSYMGGFDATSNVAAGRLFGIPIRGTHSHAFVSSFLGLDEIIDKALSSSDGSNKCEDFVSLVQNWLVKIQDASSLRGSFGETNQSELAAFTSYALAFPNSFLALVDTYDVMRSGVPNFCAVALALNDMGYKAVGIRLDSGXLAYLSIETRKLFCGNEKEFGVGGFGKXDITAGNDLNEETXDALNRQGHEVDSFGIGPXLVNCLCQAALGCVFXVENYKQPRXKLSEDVTXVSIPC

SEQ ID NO: 7903 - protein, 392 aa, Dinemandra ericoides
DLEPVNPADVPVTAAGALKSYKLAAKAISRLQSLPSGNIPLLCDVLVKEVRDLTGYDRVMVYKFHEDEHGEVVSECRRSDMESYLGLHYPATDIPQASRFLFMKNKVRMICDCLSPPVEVIQDERLPQPLSLCGSTLRSPHGCHAQYMANMGTIASLVMSVTVNEDDDMMDGDQQRMARKLWGLVVCHHTSPRFVPFPLRYACEFLIQVFGVQINKEVDLAAQVREKHILRIQTMLCDMLLRDAPVAIITQSPNVMDLVKCDGAALYYKNKFWLLGVTPTEAQIRDIAEWLLEYHRGNTGLSTDSLMEAGYPGASVLGDAVCGMAAVSITSRDFLFWFRSHTAKEIKWGGAKHDPGDKDDGRKMHPRSSFKAFLEVVKWRSLPWKDMEMDAI

SEQ ID NO: 7904 - protein, 306 aa, Ailanthus altissima
AKAISRLQSLHSGNLSLLCDVLVKEVSELTGYDRVMVYKFHEDEHGEVVAECRRPDLEPYLGLHYPATDIPQASRFLIMRNKVRMICDCLAPLVKVIQDKRLDQPLSLCGSTLRAPHGCHAQYMANIGSIASLVMSVTINEEDDEPDNDQQQGKKLWGLVVCHHTSPRFVPFPLRYACEFLIQVFGVQVKKEVELTAQLREKHILQTQTVLCDMLLRDSPIGIVTQSPNVMDLVKCDGAALYYGGKLWLLGVTPTEVQLKDIAEWLLKYHRGSTGLSTDSLMEAGYPGASVLGDAVCGMAAVKITS

SEQ ID NO: 7905 - protein, 392 aa, Dinemandra ericoides
DLEPVNPADVPVTAAGALKSYKLAAKAISRLQSLPSGNIPLLCDVLVKEVRDLTGYDRVMVYKFHEDEHGEVVSECRRSDMESYLGLHYPATDIPQASRFLFMKNKVRMICDCLSPPVEVIQDERLPQPLSLCGSTLRSPHGCHAQYMANMGTIASLVMSVTVNEDDDMMDGDQQRMARKLWGLVVCHHTSPRFVPFPLRNACEFLIQVFGVQINKEVDLAAQVREKHILRIQTMLCDMLLRDAPVAIITQSPNVMDLVKCDGAALYYKNKFWLLGVTPTEAQIRDIAEWLPEYHRGNTGLSTDSLMEAGYPGASVLGDAVCGMAAVSITSRDFLFWFRSHTAKEIKWGGAKHDPGDKDDGRKMHPRSSFKAFLEVVKWRSLPWEDIEMDAI

SEQ ID NO: 7906 - protein, 392 aa, Hiraea fagifolia
DLEPVNPADVPVTAAGALKSYKLAAKAISRLQSLPSGNISLLCDVLVKEVRDLTGYDRVMVYKFHEDEHGEVVSECRRPDLESYLGLHYPATDIPQASRFLFMKNKVRMICDCLAPPVKVIQDKRLPQPLSLCGSTLRSPHGCHAQYMTNMRTIASLVMSVTINEDDDTMDGDQQQMTRKLWGLVVCHHTSPRFVPFPLRYACEFLIQVFGVQINKEVELAAQVREKHILQIQTMLCDMLLRDAPVAIITQSPNVMDLVKCDGAALYFKNKIWLLGVTPKEEQIRDIAEWLLEYHSGNTGLSTDSLMEAGYPGASVLGDAICGMAAASITSRDFLFWFRSHTAKEIKWGGAKHEPGDKDDGRKMHPRSSFKAFLEVVKWGSMPWEDIEMDAI

SEQ ID NO: 7907 - protein, 158 aa, Oryza sativa Japonica Group
MVATLRGRFEILSLTGTVLPPPAPPGASGLTVFLSGGQGQVIGGSVVGPLVAAGPVVLMAASFANAVYERLPLEGEEEEVAAPAAGGEAQDQVAQSAGPPGQQPAASQSSGVTGGDGTGGAGGMSLYNLAGNVGGYQLPGDNFGGWSGAGAGGVRPPF

SEQ ID NO: 7908 - protein, 392 aa, Hiraea fagifolia
DLEPVNPADVPVTAAGALKSYKLAAKAISRLQSLPSGNISLLCDVLVKEVRDLTGYDRVMVYKFHEDEHGEVVSECRRPDLEPYLGLHYPATDIPQASRFLFMKNKVRMICDCLAPPVKVIQDKRLPQPLSLCGSTLRSPHGCHAQYMTNMRTIASLVMSVTINEDDDTMDGDQQQMTRKLWGLGCCHHTSPRFVPFPLRYACEFLIQVFGVQINKEVELAAQVREKHILQIQTMLCDMLLRDAPVAIITQSPNVMDLVKCDGAALYFKNKIWLLGVTPKEEQIRDIAEWLLEYHSGNTGLSTDSLMEAGYPGASVLGDAVCGMAAASITSGDFLFWFRSHTAKEIKWGGAKHEPGDKDDGRKMHPRSSFKAFLEVVKWRSMPWEDVEMDAI

SEQ ID NO: 7909 - protein, 156 aa, Catharanthus roseus
IGWIYGSVTEDILTGFKMHARGWRSIYCMPQRPAFKGSAPINLSDRLNQVLRWALGSVEILFSRHCPIWYGYGGRLKWLERFAYVNTTIYPVTAIPLLLYCTLPAVCLLTGKFIIPQISNIASIWFISLFLSIFATGILEMRWSGVGIDEWWRNEQ

SEQ ID NO: 7910 - protein, 392 aa, Hiraea fagifolia
DLEPVNPADVPVTAVGALKSYKLAAKAISRLQSLPSGNISLLCDVLVKEVRDLTGYDRVMVYKFHEDEHGEVVSECRRPDLESYLGLHYPATDIPQASRFLFMKNKVRMICDCLAPPVKVIQDKRLPQPLSLCGSTLRSPHGCHAQYMTNMRTIASLVMSVTINEDDDTMDGDRQQMTRKLWGLVVCHHASPRFVPFPLRYACEFLIQVFGVQINKEVELAAQVREKHILQIQTMLCDMLLRDAPVAIITQSPNVMDLVKCDGAALYFKNKIWLLGVTPKEEQIRDIAEWLLEYHSGNTGLSTDSLMEAGYPGASVLGDAVCGMAAVSITSRDFLFWFRSHTAKEIKWGGAKHDPGDKDDGRKMHPRSSFKAFLEVVKWRSMPWEDIEMDAI

SEQ ID NO: 7911 - protein, 456 aa, Arabidopsis thaliana; identical to SEQ ID NO: 7064

SEQ ID NO: 7912 - protein, 570 aa, Vitis vinifera
MASEGRCLYEVLGLTTDATADEIRSAYKKLALQRHPDKLVHSGLSKADATAQFQELLNAYEVLSNPEERAWYDSHRSQILFSNPTSSNGSVPNLFSFFSNSVYSGYDDTRKGFYKVYSEVFDKIYATEVNFAKKLGLGSIKEAPMMGNLESPYSQVTAFYGYWIGFSTVMDFAWVDEYDVRAGPNRKSRRLMEEENRKLRKKAKREYNETVRGLAKFVKRRDKRVIDMQVKKSLEEEKRKEEEKTRKWEEFERGRLERARAKVEPEWVRAVEDDGNDDDWEFEDAGGGRKEEEEFYCVLCRKKFKSEKQWKNHEKSKKHKEWVAEFRESVKEEDERYGDAEAGIHGNGDQSEVELQEQFEDGLELEEEEIEDGAQIESSNEEEFVVGDVSHSGNGTNAELGSDDEMSVLEAMLSGHKNRKNGKTAVASVLEPESSVTEAPVDINNDEMDFMEYDNRKSSRRRRGKKDKGKRSNGEAMKPDSSTGDKGGQDEQNSGSDASHIQDSSTYSVAENETDGKEDHHAETNKIPKQPVNRKATSKGEIDTKPKESNKVRKAKLSLVFILDNLERKK

SEQ ID NO: 7913 - protein, 458 aa, Gemmata obscuriglobus UQM 2246
MPPAPAELAQHLTAHGQEHILHGWDRLSDAERTVLIEQVTGINFGALHDLYTAHDTAPAALPPRSAIGPLPVLPRAATPEAHAIGEEALRRGEVAVLLVAGGQGSRLGFDQPKGMYPVGPVSKATLFQVHAEKVLAVSRRYGRPVPFLVMTSQATHSETEAFFRANNFFGLAPEDVVFFRQGTMPAVDIATGRLLLEAPGKLFLSPNGHGGTLTALRETGTLAQMQARGIRHVFYFQVDNPLVKVCDPDFLGNHIRAESEASSKVVYKEQPGEKVGILAVVNGRCAIVEYSDLPAEMAAERTEDGTLRFRAGNPAIHLFDLGFLERVTGAGGLTYHVARKKVPHLDPATGDYVSPTKENALKFELFIFDALPMADRWVAMETSREEEFAPLKNATGADSPETVHRAMSALHASWLRRAGATVPEGAAVEISPLFALDPEECGRKMAPGTQVSASAYFR

SEQ ID NO: 7914 - protein, 195 aa, Poecilanthe falcata
RVMAYKFHEDDHGEVVSEIRRSDLEPYLGLHYPAKDIPQAARFLFKQNRVRMIFDCHAKPVNVIQSEELRQPLCLVNSTLRSPHGCHTQYMANMGSVASLVMAVIVNGNDTTRLWGLLVCHHTSPRYVPFPVRYACEFLMQAFGLQLYMEIQLATQLAEKRILKTQTLLCDMLLRDAPFGIVNQSPNIMDLVKCD

SEQ ID NO: 7915 - protein, 371 aa, Bacillus cereus E33L
MSKRDYYEVLGLSKGASKDEIKKAYRRLAKKYHPDVSKEENAIEKFKEVQEAYEVLSDDQKRAQYDQFGHAGANQGFGGFGGGGDFGGGFGFEDIFSSFFGGGGGRRRDPNAPRQGADLQYQVTLDFEEAIFGKELNVEIPVEDPCDTCKGSGAKPGTSKETCKHCSGSGQVSVEQNTPFGRIVNRQACSHCSGTGQMIKEKCTTCHGSGKVRKRKKINVKIPAGIDNGQQIRVSGKGEAGVNGGPAGDLYVVVHVRSHEFFEREGDHIICEMPLTFAQMALGAEVEVPTVHGKVKLKIPAGTQTGTEFRLKGKGAPNVRGYGQGDQYVVVRVVVPTKLTSHQKDLLREFAGQEEQDDSLFGKLKRAFKGE

SEQ ID NO: 7916 - protein, 369 aa, Mycoplasma arthritidis 158L3-1
MSDKQKRDYYEVLGVSKNATEKEIKSAYRKLAMQYHPDRNKEQGAEEKFKEATEAYEVLSDAEKRAKYDKYGHGAFDQSSFQYSDDLFGDIFKSFRDSFTSGGFGSGTFEDLFGFGRSSRNTRGEDLESTVTIEFLDAIFGKEVKLKLNKSTICSNCNGSGANSPSDVIVCSKCNGHGQVTKKMGFFSTVTTCPQCGGTGKTIKNVCHVCHGSTYETKQVIETVKIPAGVQNMQRIVVKGYGMPSNHGGKPGDLYISINIKPHEYYERINDDIVLTVPVSIKSILLEEEIEIPTPYGRTKIKLKKDTKLDAVIKLSNYGFSILNSKKRGDLVVVLKPYIPSLDKEASEELKIIFAKNEDNQYKKWLDKF

SEQ ID NO: 7917 - protein, 287 aa, Oryza sativa Japonica Group; identical to SEQ ID NO: 7010

SEQ ID NO: 7918 - protein, 240 aa, Neisseria meningitidis FAM18
MDKDLYAVLGVSPQAGADEIKRAYRKLAMKYHPDRNPGNPQAEEKFKEIQRAYDTLSDLSKRTQYDASFRGHEERGRQEEAFRREQARREQFYREQMRREQALRQAFERQASRSRHAYEPSGGGSGRNYVLAAYILFGLGAIMLFMPIVGVIFAYMPIVGVILAYMKRNSLDSIVYAAHTEYLIKTFWRTFWLYILGALTALLGIGVLIIIATNVWYFYRIIAGFIRFNGGRAVAPEKWI

SEQ ID NO: 7919 - protein, 293 aa, Rhizobium sp. USDA 3353
  misc_feature (291)..(291): Xaa can be any naturally occurring amino acid
RGKSQIKDYAEFPTLEQLPLWGFDGSSTQQAEGHSSDCVLKPVAVFPDPARTNGVLVMCEVMMPDGVTPHSSNKRATILDDEGAWFGFEQEYFFYKDGRPLGFPESGYPAPQGPYYTGVGYSNVGSVARQIVEEHLDQCLAAGINHEGINAEVAKGQWEFQIFGKGSKKAADQMWMARYLMQRLTEKYGIDIEYHCKPLGDTDWNGSGMHANFSTAYMREVGGKAYFEALMAAFDKNLMDHIAVYGPDNDKRLTGKHETAPWNKFSYGIADRGASIRVPHSFINNGYKGYXED

SEQ ID NO: 7920 - protein, 294 aa, Rhizobium sp. USDA 3357
  misc_feature (82)..(82): Xaa can be any naturally occurring amino acid
RGKTQIKDYAEFPTLEQLPLWGFDGSSTQQAEGHSSDCVLKPVAVFPDPARTNGVLVMCEVMMPDGVTPHSSNKRATILDDXGAWFGFEHEYFFYKDGRPLGFPESGYPAPQGPYYTGVGYSNVGSVARQIVEEHLDQCLAAGINHEGINAEVAKGQWEFQIFGKGSKKAADQMWMARYLMQRLTEKYGIDIEYHCKPLGDTDWNGSGMHANFSTAYMREVGGKAYFEALMAAFDKNLMDHIAVYGPDNDKRLTGKHETAPWNKFSYGIADRGASIRVPHSFINNGYKGYMEDR

SEQ ID NO: 7921 - protein, 381 aa, Schisandra plena
PADVPVTAAGALKSYKLAAKAIARLQSLPSGNIGLLCDVLVREVSELTGYDRVMAYKFHEDEHGEVIAEYRRSDLEPYLGLHYPATDIPQASRFLFMKNKVRMICDCYAPPVEVIQDKKLAQPLSLGGSTLRAPHGCHAQYMANMGSIASLVMSVTINEDYDEPSSKQQNQQKGRKLWGLVVCHHTSPRFVPFPLRYACEFLLQVCGVQLNKEIELAAQMKEKHILKTQTLLCDMLLRDAPIGIVTQSPNVMDLVKCDGAALYYRKQIWLLGTTPTEAQIQDIAGWLLDCHDSTTGLSTDSLMEAGYLGATSLGDAVCGMAAVKITSKDFLFWFRSHTAKEIKWGGAKHIPVDKDDGKKMHPRSSFKAFLEVVTRRSLPWE

SEQ ID NO: 7922 - protein, 51 aa, Passiflora coriacea
NGEVMPGQWEYQVGPAVGISAGDQLWMSRYILERITEIAGAELTFDPKPIQ

SEQ ID NO: 7923 - protein, 167 aa, Nostoc sp. PCC 7120
MPKSSEPTYYSLLGLHPSASVIDIRRAYRELSKRYHPDTTELPAALATRQFQQINEAYATLSNPDRRLNYDLKIGYSRFGVIQAPSDLNRPASYSYDYSKSAYLDASDRPLSPGEIFALFILGLTLVGCLLLAITIAFLRGDALFPPPIQQSISYLSQLTVLANFKF

SEQ ID NO: 7924 - protein, 296 aa, Rhizobium sp. USDA 3584
RGKTQIKEFAEFPTLEQLPLWGFDGSSTQQAEGHSSDCVLKPVAVFPDPARTNGVLVMCEVMMPDGVTPHASNKRATILDDEGAWFGFEQEYFFYKDGRPLGFPESGYPAPQGPYYTGVGYSNVGSVARQIVEEHLDLCLAAGINHEGINAEVAKGQWEFQIFGKGSKKAADQMWMARYLLQRLTEKYGIDIEYHCKPLGDTDWNGSGMHANFSTAYMREVGGKAYFEALMAAFDKNLMDHIAVYGPDNDKRLTGKHETAPWNRFSYGIADRGASIRVPHSFIKSDYKGYLEDRRP

SEQ ID NO: 7925 - protein, 380 aa, Trithuria submersa
PVTAAGALKSYKLAAKAISRLQTVPSGNINLLCDVLVHEVRHLTGYDRVMVYKFHEDEHGEVIAENKRMGLEPYIGLHYPATDIPQVSRFLFLKNKVRMICDCNAKPVKVIQDERLEKLLSLCGSTLRSPHGCHAQYMANMGSIASLVMSVTINENEEEIVNGQKRKGRKLWGLVVCHRTSPSFVPFPLRHACEFLIQVFSVQLNKEVELAAQLREKHILRTQAVLCEMLLRDAPAGIVTQSPNIMDLIKCDGAGVYYGKQFWSVGIAPTEVQVADIIEWLLECHSSSTGLSTDSLFEAGYPGAAALGDPVCGMAAVKITTRDFLFWFRSNSAKEIKWGGAKHNPVDDSKKMHPRSSFSSFLEVVKHRSLPWDDVEMDAI

SEQ ID NO: 7926 - protein, 51 aa, Passiflora biflora
NGEVMPGQWEYQVGPAVGISAGDQLWMSRFILERITEIAGVVLSFDPKPIQ

SEQ ID NO: 7927 - protein, 516 aa, Cryptococcus neoformans var. neoformans
MFQKVSDKFHRKQQSTTLPGKTQQVPNPTSPVLAKANSQAQQAYSLPQDHSPMEGIQRDSPPIQQPMATEKAPIVGSSASTSLPTLSVQDGTLPLTPGAQGMQTGTIDGHRQLQSPVSRSSSAGEDKMREKARDAQEQAAQSQANLHHATQQARVAAINAAATQAALETAAQLPATARVPVSGGGVEQGQARRKTAGRYALSDFLIERTLGTGSFGRVHLVRSRHNGRFYAVKVLNKEKVIKMKQVEHTNSEREMLVRVRHPFLVNLWGTFQDVNNLYMVMDFVAGGELFSLLRKSQRFPNSVAKFYAAEVALALDYLHSLDIIYRDLKPENLLLGADGHVKVTNFGFAKYVPDITWTLCGTPDYLAPEVVQSKGYNKSVDWYALGVLIFEMLAGYPPFFTEDGNPMKLYEKIIAGKVRYPTYFDALAKELLKNLLIGDLTKRYGNLRAGSSDIFAHGWFAEVDWDKLYRREIPAPYVPKIDGEGDASQFDRYQEADVSAYGKVGNGPYDHFFTEF

SEQ ID NO: 7928 - protein, 295 aa, Rhizobium sp. USDA 3876
RGKTQIKEFAEFPDLEQLPLWGFDGSSTQQAEGHSSDCVLKPVAVYPDPARTNGVLVMCEVMMPDGVTPHASNKRATILDDEGAWFGFEQEYFFYKDGRPLGFPESGYPAPQGPYYTGVGYSNVGSVARQIVEEHLDLCLAAGINHEGINAEVAKGQWEFQIFGKGSKKAADQMWMARYLMQRLTEKYGIDIEYHCKPLGDTDWNGSGMHANFSTAYMREVGGKAYFEALMAAFDKNLMDHIAVYGPDNDKRLTGKHETAPWNRFSYGIADRGASIRVPHSFIKSDYKGYLEDRL

SEQ ID NO: 7929 - protein, 51 aa, Passiflora capsularis
NGEVMPGQWEYQVGPAVGISAGDQLWMSRFILERITEIAGAVLSLDPKPIQ

SEQ ID NO: 7930 - protein, 284 aa, Rhizobium sp. USDA 3883
  misc_feature (279)..(279): Xaa can be any naturally occurring amino acid
RGKTQIKEFAEFPTLEQLPLWGFDGSSTQQAEGHSSDCVLKPVAVYPDPARTNGVLVMCEVMMPDGVTQHASNKRATILDDEGAWFGFEQEYFFYKDGRPLGFPESGYPAPQGPYYTGVGYSNVGSVARQIVEEHLDQCLAAGINHEGINAEVAKGQWEFQIFGKGSKKAADQMWMARYLMQRLTEKYGIDIEYHCKPLGDTDWNGSGMHANFSTSYMREVGGKAYFEALMAAFDKNLMDHIAVYGPDNDKRMTGKHETAPWNKFSYGIADRGASIRVXHSFIK

SEQ ID NO: 7931 - protein, 248 aa, Brassica napus
  misc_feature (191)..(191): Xaa can be any naturally occurring amino acid
MESQSRISPPEIPKRSPFTGIFHKLKTNLVFRSKLAEINGAMGDLGTYIPIVLALTLAKDLDLGTTLIFTGIYNFITGTVYGVPMPVQPMKSIAAVAISSTAAEFGIPEIMAAGICTGGILFVLGVSGLMQFVFNIIPLSVVRGIQLSQGLAFAMSTVKYIRKEQNFSKSKSVGDRPWLGLDGLVLALVCXLFIVLVNGDGEQGEEEEEERMVREREFDKKVYLCTSVVISVGALAYKSYIGCLVDAI

SEQ ID NO: 7932 - protein, 495 aa, Oryza sativa Indica Group
MAAALIVPANPNPTPNPTSSLRPPSRAASSVLRFPRRDRARTHLTAAFGRGSPAAAAERGGKDYYATLNLRRDATLQEVKTAYRTLARKYHPDMNKDPGAEEKFKEISAAYEILSDEEKRSLYDRFGEAGLTGDYGGGDIGSNGIDPYELFNAFFGGPDKLFRDSMGAGRFHYGTKVTDNRGLDIRYDLLLSFEESIIGGKREVSIFRYETCGTCHGTGAKSSNDITECTQCRGQGRRATGDLYIFVHVNKKEGIHREGLDLFSDVTIDYTDAILGTTVKVETIEGFKDLYIPPGTQPGERLKFAQLGAPDIKNPTIRGDHNFVINVKIPKSIREEKIPLAIYQEFVQGRRWGYEICFNQRTICYSIMDSATRISSSCSVARRIPDDHSALIRDKQNSYNQVDSKADNEIREKKSACYTDVENGLWGWACKSSATEKENCVLRCLSPECYDLIYGGDPLEEGELDYIRGHEYKYCMHKSSLGESLDGVKGSFSYS

SEQ ID NO: 7933 - protein, 292 aa, Rhizobium lusitanum
QLPLWGFDGSSTMQAEGRSSDCVLKPVALYPDPARTNGALVMCEVMMPDGVTPHASNSRATILDDEDAWFGFEQEYFFYKDGRPLGFPEAGYPAPQGPYYTGVGYSNVGDVAREIVEEHLDLCLEAGINHEGINAEVAKGQWEFQIFGKGSKKAADQIWMARYLLQRLTEKYGIDIEFHCKPLGDTDWNGSGMHCNFSTKFMREVGGKAYFEALMAQFDKNLDAHIAVYGPDNDKRLTGKHETAPWNKFSYGVADRGASIRVPHSFIKNDYKGYLEDRRPNSQGDSYRIPYG

SEQ ID NO: 7934 - protein, 392 aa, Hiraea fagifolia
DLEPVNPADVPVTAAGALKSYKLAVKAISRLQSLPSGNISLLCDVLVKEVRDLTGYDRVMVYKFHEDEHGEVVSECRRPDLESYLGLHYPATDIPQASRFLFMKNKVRMICDCLAPPVKVIQDKRLPQPLSLCGSTLRSPHGCHAQYMTNMRTIASLVMSVAINEDDDTMDGDQQQMTRKLWGLVVCHHASPRFVPFPLRYACEFLIQVFGVQINKEVELAAQVREKHILQIQTMLCDMLLRDAPVAIITQSPNVMDLVKCDGAALYFKNKIWLLGVTPKEEQIRDIAEWLLEYHSGNTGLSTDSLMEAGYPGASVLGDAVCGMAAVSITSRDFLFWFRSHTAKEIKWGGAKHDPGDKDDGRKMHPRSSFKAFLEVVKWRSMPWEDVEMDAI

SEQ ID NO: 7935 - protein, 557 aa, Glycine max
METKENGPSKKVSNGGIDGPTNPMVTPLLNDLYQFTMAYAYWKAGKHQERAVFDLYFRRNPFGGEYTVFAGLEECIRFIANFTLAEEEIDFVRECLSSSCEDGFFDYLRGLDCSDVEVYAIPEGTVVFPKVPLMRVEGPVAVVQLLETPFVNLINYASLVSTNAARHRNVAGKSKTLLEFGLRRAHGPDGGVGASKYCYIGGFDATSNVAAGKLFGIPLRGTHSHAFVSSYMSLDEITDKSLRGKDGSSRCDDFVSLVQTWLNKIQLSNGVFGETNQSELAAFTSYALAFPDGFLALVDTYDVMRSGIPNFRAVALALSDLGYKAVGIRLDSGDLAYLSCEVRNFFRSIEKEFGVPEFGKLQITASNDLNEETLDALNKQGHEVDAFGIGTYLVTCYAQAALGVVFKLVEINNQPRIKLSEDVSKVSIPCKKRCYRLYGKEGYPLVDIMTGENEPSPKVGERILCRHPFQESKRAYVVPQRVEELLRCYWPGSTDIKKDTLPALRDIRERCINQLEQMRPDHMRRLNPTPYKVSVSAKLYDFIHFLWLNEAPVGELQ

SEQ ID NO: 7936 - protein, 116 aa, Brassica napus
  misc_feature (110)..(110): Xaa can be any naturally occurring amino acid
MGLDYYTILKVDKNATEDDLKKSYRKLAMKWHPDKNPTTKTEAEAKFKQISEAYEVLSDPQKRAVYDQYGEEGLSGMPPPGSTGNNGRAGGFNPRDAEDIFAEFFGSSPXGFGSAG

SEQ ID NO: 7937 - protein, 392 aa, Janusia californica
DLEPVNPADVPVTAAGALKSYKLASKAISRLQSLPSGNISLLCDVLVKEVRDLTGYDRVMVYKFHEDEHGEVVSECRRSDLESYLGLHYPATDIPQASRFLFMKNKVRMICDCLAPPVKVIQDERLPQPLSLCGSTLRSPHGCHAQYMTNMGTIASLVMSVTVNEGDDTMDGDQQRMTRKLWGLVVCHHTSPQFVPFPLRYACEFLIQVFGVQINKEVELAAQVREKHILQIQTMLCDMLLRDAPVAIITQSPNVMDLVKCDGAALYFKNKTWLLGVTPTEEQIRGIAEWLLKYHSGNTGLSTDSLMEAGYPGASGLGDAVCGMAAVSITSRDFLFWFRSHTAKEIKWGGAKHDPDDKDDLRKMHPRSSFKAFLEVVKWRSMPWEDVEMDAI

SEQ ID NO: 7938 - protein, 318 aa, Brucea javanica
  misc_feature (50)..(50): Xaa can be any naturally occurring amino acid
  misc_feature (261)..(261): Xaa can be any naturally occurring amino acid
  misc_feature (263)..(263): Xaa can be any naturally occurring amino acid
AKAISRLQSLPSGNLSLLCDVLVKDVGELTGYDRVMVYKFHEDEHGEVVXECRRPDLEPYLGLHYPATDIPQASRFLIMRNKVRMICDCLAPAVKVIQDKRFNQPLSLCGSTLRAPHGCHAQYMANMGSIASLVMSVTINEEDDELDNDQQQGRKLWGLVVCHHTSPRFVPFPLRYACEFLIQVFGVQVNKEVELAAQLREKHILQTQTVLCDMLLRDSPVGIVTKSPNVMDLVKCDGAALYYRGKLWLLGVTPTEVQVKXIXEWLLEYHRGSTGLSTDSLMEAGYPGASVLGDAVCGMAAVKITSKDFLFWFRSHTA

SEQ ID NO: 7939 - protein, 184 aa, Arabidopsis thaliana
MVDHYQVLGVTRNATKKEVKDAFRRLAIKYHPDKHAQSPEHVRHNATVRFKLVSEAYEVLNDDLKRASYNAGSDSDCFRRTSGSYSNPYGNRGGRAQGSGYGYGYGYSTRNRQASSFSSGFDSTFRYLTTRAFLLNLALAGGLYFAFTAIDTSGETLWKMRNSGKSFEEAMESIEKSKSHKDEG

SEQ ID NO: 7940 - protein, 153 aa, Magnetospirillum magnetotacticum MS-1
MARYLLQRLCEKYEIDIEYHCKPLGDTDWNGSGMHCNFSTTFMRETGGKDYFEAMMAAFERNLEDHMAVYGPDNHMRLTGKHETAPWNKFSYGVADRGASVRVPHSFVNNGYKGYLEDRRPNSMGDPYQIASQVLKTISEVPLPSEAAQKAVA

SEQ ID NO: 7941 - protein, 392 aa, Janusia californica
DLEPVNPADVPVTAAGALKSYKLASKAISRLQSLPSGNISLLCDVLVKEVRDLTGYDRVMVYKFHEDEHGEVVSECRRSDLESYLGLHYPATDIPQASRFLFMKNKVRMICDCLAPPVKVIQDERLPQPLSLCGSTLRSPHGCHAQYMTNMGTIASLVMSVTVNEDDDTMDGDQQQMTRKLWGLVVCHHTSPQFVPFPLRYACEFLIQVFGVQINKEVELAAQVREKHILQIQTMLCDMLLRDAPVAIITQSPNVMDLVKCDGAALYFKNKTWLLGVTPTEEQIRGIAEWLLKYHSGNTGLSTDSLMEAGYPGASGLGDAVCGMAAVSITSRDFLFWFRSHTAKEIKWGGAKHDPDDKDDLRKMHPRSSFKAFLEVVKWRSMPWEDVEMDAI

SEQ ID NO: 7942 - protein, 392 aa, Janusia californica
DLEPVNLADVPVTAAGALKSYKLASKAISRLQSLPSGNISLLCDVLVKEVRDLTGYDRVMVYKFHEDEHGEVVFECRRSDLESYLGLHYPATDIPQASRFLFMKNKVRMICDCLAPPVKVIQDERLPQPLSLCGSTLRSPHGCHAQYMTNMGTIASLVMSVTVNEDDDTMDGDQQQMTRKLWGLVVCHHTSPQFVPFPLRYACEFLIQVFGVQINKEVELAAQVREKHILQIQTMLCDMLLRDAPVAIITQSPNVMDLVKCDGAALYFKNKTWLLGVTPTEEQIRGIAEWLLKYHSGNTGLSTDSLMEAGYPGASGLGDAVCGMAAVSITSRDFLFWFRSHTAKEIKWGGAKHDPDDKDDLRKMHPRSSFKAFLEVVKWRKMPWEDIEMDAI

SEQ ID NO: 7943 - protein, 206 aa, Anemia phyllitidis
VMVYKFHEDEHGEVVAEIRRSDLEPYLGLHYPATDIPQASRFLFMKNRVRMICNCAATPVRVIQDKGLRQPLSLAGSTLRAPHGCHSQYMANMGTIASLVMAVIVNDNDEEVEQQNTSPKQEKLWGLVVCHHTTPRAVPFPLRSACEFLMQVFGLQLNMEMELAAQMREKHILRTQTLLCDMLLRDAPIGIVSESPNIMDLVKGSI

SEQ ID NO: 7944 - protein, 1143 aa, Lotus japonicus
MASASRRGGGGGGSGSGSVVERGKEEEKLKRGGGGGGGESVMMRKAIAQYTEDARLHAVYEQSGESFDYSHSLRVTVESVPEQQITAYLARIQRGGYIQPFGCMIAVDDPSFRLLAYSDNARDMLGITPQSVPSIDDDSSSSSFALGTDVRSLFSPSSAVLLDKAFAAREISLMNPLWIHSRTSGRPFYGILHRVDVGVVIDLEPARSDDPALSIAGAVQSQKLAVRAISQLQSLPGGDVKLLCDAVVQSVRELTGYDRVMVYKFHEDEHGEVVAESKRADLEPYMGLHYPATDIPQASRFLFKQNRVRMIVDCHASPVGVVQDEALMQPLCLVGSTLRAPHGCHAQYMANMGSIASLVMAVIINGNDDDAVGVGGRSSMRLWGLVVCHHTSARCIPFPLRYACEFLMQAFGLQLNMELQMAAQSLEKRVLRTQTLLCDMLLRDSPAGIVTQSPSIMDLVKCDGAALYCQGSYYPLGVTPSESQIRDIIDWLLAFHGDSTGLSTDSLADAGYPGASSLGDAVCGMAVAYITEKDFLFWFRSHTAKEIKWGGAKHHPEDKDDGQRMHPRSSFKAFLEVVKSRSSPWDNAEMDAIHSLQLILRDSFKEDEHSDSKAVVNTHLAELELQGVDELSSVAREMVRLIETATAPIFAVDVEGHINGWNAKVSELTGLPVEEAMGKSLVRDLVYKESEETVDRLLSRALKGEEDKNVEIKLRTFGPEHQDKAVYVVVNACSSKDYTNNIVGVCFVGQDVTGQKVVMDKFINIQGDYKAIVHSPNPLIPPIFASDDNTCCLEWNNAMEKLTGWGRADVIGKLLVGEVFGSCCQLKGSDAITKFMIVLHNALGGQDTDKFPFSFLDRHGKYVQTFLTANKRVSIDGQIIGAFCFLQIVSPELQQALKVQKQQEKNCFARMKELAYICQEVKNPLSGIRFTNSLLEATGLTDEQKQFLETSAACEKQMLKIIRDVDLESIEDGSLELERGEFLLGNVINAVVSQVMVLLRERNLQLIRDIPEEIKTLAVYGDQLRIQQVLADFLSNVVRYAPSPDGWVEIHVYPKIKQISDGLTLLHAEFRLVCPGEGLPSELVQDMFHNSRWVTQEGLGLCMSRKILKLMNGEVQYIREAERCYFFVLLELPVTRRSSKGVN

SEQ ID NO: 7945 - protein, 363 aa, Coprinopsis cinerea okayama7#130
MDVFKDDVFWDINTARDPVSVLYAVEESERTDPMGDSGPYDDFEELGDGEEEKWPTSKQGSESEVDLEEEQIDVVKCIEDMVLSFLKQIEACGAVILDDGEESQGKKQRPKLEIQLADRKRLTVDGEPAKRSLKFPKRFATGSSRSMGEAQLRQVLDIMHEGLVTGTPTTKRDIYYKDVALFGRQSVVDTLVDDLAATWGTQRCDLNVPSNIPAGEDIESFGVDEDIAWVLVVEKEAVFQTLCQLGVTHGLNIGKGIMVTGKGYPDIATRHLVKSLGDALPKHVALAALVDCDPYGIDILSVYRYGSQSMRHENDTLATRRIKWLGLRISEVMEWDLDPSLLLPLTDYDENKVGYAVLHFEIA

SEQ ID NO: 7946 - protein, 392 aa, Mascagnia chasei
DLEPVNPADVPVTAAGALKSYKLASKAISRLQSLPSGNISLLCDVLVKEVRDLTGYDRVMVYKFHEDEHGEVVSECRRSDLESYLGLHYPATDIPQASRFLFMKNKVRMICDCLAPPVEVIQDERLAQPLSLCGSTLRSPHGCHAQYMTNMGTIASLVMAVTINEDDDMMDGDQQQMTRKLWGLVVCHHTSPRFVPFPLRYACEFLIQVFGVQINKEVELAAQVREKHILQIQTMLCDMLLRDAPVAIIMQSPNVMDLVKCDGAALYFKNKTWLLGVTPTEEQIRDIAEWLLEYHSGNTGLSTDSLMEAGYPGASALGDAVCGMAAVSITSRDFLFWFRSHTAKEIKWGGAKHDPDVKDDGRKMHPRSSFKAFLEVVKWRKMPWENIEMDAI

SEQ ID NO: 7947 - protein, 212 aa, Glycine max
  misc_feature (200)..(200): Xaa can be any naturally occurring amino acid
MAYQNPPSIPISDPEAPEITPTPTPSTNPLANGFSAKGVANKVKNNLVFHSKWGELNGAMGDLGTYIPIVLALTLARDLNLGTTLIFTGVYNIITGAIYGVPMPVQPMKSIAAQALSDTDFGVPEIMTAGILTGGVLFVLGVTGLMQLVYMLIPLCVVRGIQLAQGLSFALTAVKYVRKIQDLPKSKSLGQRHWFGLGWXWSWPLVCLCFIV

SEQ ID NO: 7948 - protein, 110 aa, Brassica napus
MEHKEAGCQAPEGPILCINNCGFFGSAATMNMCSKCHKEMITKQDQAKLAASSIDSIVNGSDAVMEPVVAGSNTVVAVAQVELQTMNVQQPADVAGPSEGVAAISKGGKV

SEQ ID NO: 7949 - protein, 347 aa, Glycine max
  misc_feature (203)..(203): Xaa can be any naturally occurring amino acid
  misc_feature (223)..(223): Xaa can be any naturally occurring amino acid
MGVDFYKILQVDRSAKDEDLKKAYRRLAMKWHPDKNPNNKREAEAKFKQISEAYDVLSDPQKRGVYDQYGEEGLNGVPMGAGGFPGGGGGGSSGDGGATSFRFNPRSADDIFSEFFGFSRPFGGGMPDMGGRAGGSGFSRGGPFGEDIFAQFRSAAGEGSGHMPRKGAAIERPLPCSLEDLYKGTTKKMKISRDVSDASGRPXTVDEILTIEIKPGWKKGTKXITFPEKGNEQRGVIPSDLVFIIDEKPHSLFKRDGNDLVVTQKISLVEALTGYTAQLTTLDGRSLTIPINSTISPTYEEVVKGEGMPIPKEPSKKGNLRIKFNIKFPSRLTSEQKSGIKRLLTSP

SEQ ID NO: 7950 - protein, 203 aa, Bradyrhizobium elkanii
QIKEFASFPTLEQLPLWGFDGSSTQQAEGHSSDCVLKPVACYPDAARENGVLVMCEVMMPDGKTPHVSNKRATVLDDEGAWFGFEQEYFFYKDGRPLGFPEEGYPAPQGPYYTGVGYKNVGSVARKIVEEHLNLCLAAGINHEGINAEVAKGQWEFQIFGKGSKTAADQMWMARYLMLRLTESYGIDIEFHCKPLGDTDWNGS

SEQ ID NO: 7951 - protein, 206 aa, Dryopteris filix-mas
VMAYKFHEDEHGEVLAEIRRSDLEPYLGLHYPATDIPQASRFLFMKNRVRMICDCRAIPVRVIQDKELRQPLSLAGSTLRAPHGCHGQYMANMGSIASLVMAVVVNDNDEDLSNRPHQPKMRRLWGLVVCHHTTPRAVPFALRSACEFLMQVFGLQINMELELAAQMREKHILRTQTLLCDMLLRDAPIGIVSESPNIMDFVKGSI

SEQ ID NO: 7952 - protein, 369 aa, Methanocaldococcus jannaschii DSM 2661
MVKLPAISKKPREIAKQKIIELAKKMYEDLMKGKRPKITMPIRSLSNAMFDKEKGSFTLVGKEKARTLTVNQAKIFAQTTKMLEFAKQLLETDDFSTLREAYYVSKNWGEARFDDQQASNNVIEDLEAALGVLREHLGFIPEEDGSSVVGPLKIIEETPEGELVVDCTKLGTGAYNIPNDVTKLNLETDADFILAIETSGMFARLNAERFWDKHNCILVSLKGVPARATRRFIKRLHEEHDLPVLVFTDGDPYGYLNIYRTLKVGSGKAIHLADKLSIPAARLIGVTPQDIIDYDLPTHPLKEQDIKRIKDGLKNDDFVRSFPEWQKALKQMLDMGVRAEQQSLAKYGLKYVVNTYLPEKIKDESTWLP

SEQ ID NO: 7953 - protein, 279 aa, Vitis vinifera
MISGRSYSGSISIYWGQNSKEGTLADTCGTGRFAFVNIAFLPVFGNNQTPALDLDDHCDPSTKNGCTGLATDIRSCQSRGVKVMLSIGGGDGSYFLASSEDAKQVAAYLWDNYLGGTSPSRPFGDAVLDGIDFDIEGGTTQHWDELASYLRSYSFAKKLCLTAAPQCPFPDVYMGQALSSGLFDYVWMQFYNNYCEYKGNAAELKATWDTWTSNVTATGFFLGLPAAPSAASSGYIPADVLISQVLPLVKNTSKYGGVMLWSKYYDDLTGYSSSIKSHV

SEQ ID NO: 7954 - protein, 335 aa, Griffonia simplicifolia
MATKTQALILLFSLFTISCSFIKPCHADCVSKEGVAVIWGQRSESEEKTLQETCATGNYKIILLDYLIVYENGTEPLLNLASHCGWAGNLCSKLESEIKYCQSNGIQVLISLWEDRPNAATPTRSALKADAPAEKLADYLWNNYLSGQSGPLGAVALDGINIIEAHEDQKLHWDEIVKAVSELSKQRKVYIGATPQCVDPYLEDAIATGLVDYAFVEFFYDPQCEYDSTNKDPTKLVNSWNKWISKDGLTDKQVFLGIPANKEVTGAGGYIDPEDLKRDVLPVVQKASNYGGIMLYDRAADVKNGYSDSVKDYVPTACKCVCDDSFPFYNQALAL

SEQ ID NO: 7955 - protein, 203 aa, Echinacea angustifolia
DARRDDLNAAIFNLKEIESYDDYERSLLISQMSFEKTFGMSSVFIESTLMENGGLAESANPATMINEAIHVISCGYEEKTAWGKEIGWIYGSVTEDILTGFKMHCRGWRSIYCMPVRPAFKGSAPINLSDRLHQVLRWALGSVEIFLSRHCPLWYGWGGGRLKLLQRFAYINTIVYPFTSLPLVAYCTLPAICLLTGKFIIPT

SEQ ID NO: 7956 - protein, 296 aa, Rhizobium sp. USDA 4004
RGKTQIKEFAEFPTLEQLPLWGFDGSSTQQAEGHSSDCVLKPVAVYPDPARTNGVLVMCEVMMPDGVTPHASNKRATILDNKGAWFGFEQEYFFYKDGRPLGFPESGYPAPQGPYYTGVGYSNVGSVARQIVEEHLDQCLAAGINHEGINAEVAKGQWEFQIFGKGSKKAADQMWMARYLMQRLTEKYGIDIEYHCKPLGDTDWNGSGMHANFSTAYMREVGGKGYFEALMAAFDKNLMDHIAVYGPDNDKRLTGKHETAPWNRFSYGIADRGASIRVPHSFINNGYKGYLEDRRP

SEQ ID NO: 7957 - protein, 297 aa, Rhizobium sp. USDA 4007
RGKTQIKEFAEFPTLEQLPLWGFDGSSTQQAEGHSSDCVLKPVAVYPDPARTNGVLVMCEVMMPDGVTPHASNKRATILDDEGAWFGFEQEYFFYKDGRPLGFPESGYPAPQGPYYTGVGYSNVGSVARQIVEEHLDQCLAAGINHEGINAEVAKGQWEFQIFGKGSKKAADQMWMARYLMQRLTEKYGIDIEYHCKPLGDTDWNGSGMHANFSTAYMREVGGKAYFEALMAAFDKNLMDHIAVYGPDNDKRLTGKHETAPWNKFSYGIADRGASIRVPHSFIKNDYKGYLEDRRPN

SEQ ID NO: 7958 - protein, 51 aa, Passiflora sexflora
NGEVMPGQWEYQVGPAVGISAGDQLWMSRFILERITEIAGAVLSFDPKPIQ

SEQ ID NO: 7959 - protein, 180 aa, Rhizobium etli bv. phaseoli
EFDVFPTLEQLPLWGFDGSSTMQAEGRSSDCVLKPVAIYPDPARTNGALVMCEVMMPDGVTPHPSNARATILDDEDAWFGFEQEYFFYQNGRPLGFPEQGYPAPQGPYYTGVGYSNVGDVAREIVEEHLDLCLAAGINHEGINAEVAKGQWEFQIFGKGSKKAADQIWMARYLLQRLTEK

SEQ ID NO: 7960 - protein, 297 aa, Rhizobium sp. CIAM0128
RGKTQIKEFAEFPTLEQLPLWGFDGSSTMQAEGHSSDCVLKPVAVYPDPARTNGVLVMCEVMMPDGVTPHASNKRATILDDEGAWFGFEQEYFFYKDGRPLGFPESGYPAPQGPYYTGVGYSNVGSVARQIVEEHLDLCLAAGINHEGINAEVAKGQWEFQIFGKGSKKAADQMWMARYLMQRLTEKYGIDIEYHCKPLGDTDWNGSGMHANFSTAYMREVGGKAYFEALMAAFDKNLMDHIAVYGPDNDKRLTGKHETAPWNRFSYGIADRGASIRVPHSFIKSDYKGYLEDRRPN

SEQ ID NO: 7961 - protein, 374 aa, Oryza sativa Indica Group
MSKLYVASGSAKRFFSRVTRQNAILPWDLRLICLAVRDLLKRNRFPFCVDGCFTPAGSEFRRGSLLSSATVLVAAQVTRELVRFSSQVDGELVICVSSSYGPRQTKWISKPIQNTNTLYMGLGLKCNHRRSHVGRVKLWSITRPENPPQKNQKKSTTRTFLASSKPTKSNYRQPSHGTGESPESARFSGHESGREIPGARCVEAARREGRGMWWEWEEDGEEAARPGEEVPVDFDFISLLCKPKDYYKILEVGYDASEEAIRSSYIRLALKWHPDKKQGEENATSRFQEINEAYQVLSNPAKRREYDKKGILYVQDHNVVHGHADLPLLGGNDDAEFILCFDKWKVVGRELRKISADLLVTLLLPLNFQCVKTQ

SEQ ID NO: 7962 - protein, 180 aa, Rhizobium etli bv. phaseoli
EFDVFPTLEQLPLWGFDGSSTMQAEGRSSDCVLKPVAIYPDPARTNGALVMCEVMMPDGVTPHPSNARATILDDEDAWFGFEQEYFFYQNGRPLGFPEQGYPAPQGPYYTGVGYSNVGDVAREIVEEHLDLCLAAGINHEGINAEVAKGQWEFQIFGKGSKKAADQIWMARYLLQRLNEK

SEQ ID NO: 7963 - protein, 110 aa, Glycine max
  misc_feature (88)..(88): Xaa can be any naturally occurring amino acid
  misc_feature (99)..(99): Xaa can be any naturally occurring amino acid
  misc_feature (105)..(105): Xaa can be any naturally occurring amino acid
MASSGKMEGPSAPALRRDPYEVLSVSRDSSDQEIKSAYRKLALKYHPDKNASNPEASELFKEVAYSYSILSDPEKRRQYDTAGFEALXNEGMDMEIDLXNLGTVXTMFAA

SEQ ID NO: 7964 - protein, 297 aa, Rhizobium sp. CIAM2026
  misc_feature (82)..(82): Xaa can be any naturally occurring amino acid
  misc_feature (91)..(91): Xaa can be any naturally occurring amino acid
RGKTQVKEFAEFPTLEELPLWGFDGSSTMQAEGHSSDCVLKPVAAYPDPTRTNGVLVMCEVMMPDGVTPHASNKRATILDDXGAWFGFEQXYFFYKDGRPLGFPETGYPAPQGPYYTGVGYKNVGDVARQIVEDHLDLCLAAGINHEGINAEVAKGQWEFQIFGKGSKKAADQMWIARYLLLRLTEKYRIDIEFHCKPLGDTDWNGSGMHANFSTAYMREVGGKAYFESLMAQFDKNLMDHIAVYGPDNDKRLTGKHETAPWNKFSYGIADRGASIRVPHSFVKNDYKGYLEDRRPN

SEQ ID NO: 7965 - protein, 864 aa, Pinus sylvestris
GESGKSFDYTRSIKSTTESVPEQQITAYLSRIQRGGRIQPFGCVLAVEETTFRIIAYSENAVEMLDLAPQSVPSMEKPQQDVLTIGTDVRTLFTAASAHSLEKAAVAQEISLMNPIWVHCKNSRKPFYAIVHRIDVGMVIDLEPLRTGDAFMSAAGAVQSQKLAVRAISRLQSLPCGDVGLLCDTVVENVRELTGYDRVMVYKFHEDEHGEVVAEIRRSDLEPYLGLHYPATDIPQASRFLFMQNRVRMICDCMATPVKVIQSEELMQPLCLVGSTLRAPHGCHAQYMANMGSIASLVMAVIINGNDDEGGGSGRNSMKLWGLVVCHHTSPRAVPFPLRYACEFLMQALGLQLNMELQLAAQLTEKHILRTQTLLCDMLLRDAPMGIVTQSPSIKDLVKCDGAALYYGGMCWMLGVTPTEAQIKDIADWLLEHHGDSTGLSTDSLADAGYPGAASLGDAVCGMASARITSKDFLFWFRSHTAKEMKWGGAKHHPDDKDDARRMHPRSSFKAFLEVVKRRSLPWDNVEIDAIHSLQLILRGSFRDIDDSGTKTMVHSRLNDLRLQGIDELSSVASEMVRLIETATAPILAVDYNGLVNGWNAKVAELTGLPVGEAMGMSLVQDLVFEQSVERVEKMLHNALRGEEEKNVEMMLKTFGPQKEKEAVILVVNACSSRDFTDNIVGVCFVGQDVTSQKVVMDKFIRIQGDYRSIVQSPNPLIPPIFASDEYACCSEWNAAMEKVTGWTHDEVIGKMLVGEIFGGCCRLKGQDAVTKFTIVLHSAIDGQEIEKFPFAFFDKQGKYVEALLTANKRTDADGRITGSFCFLQIASSELQHALEVQRQQEKKCFARLKELAYIRQEIKNPLY

SEQ ID NO: 7966 - protein, 297 aa, Rhizobium sp. CIAM2032
RGKTQVKEFAEFPTLEELPLWGFDGSSTMQAEGHSSDCVLKPVAVYPDPTRTNGVLVMCEVMMPDGVTPHASNKRATILDDEGAWFGFEQEYFFYKDGRPLGFPETGYPAPQGPYYTGVGYKNVGDVARQIVEDHLDLCLAAGINHEGINAEVAKGQWEFQIFGKGSKKAADQMWIARYLLLRLTEKYRIDIEFHCKPLGDTDWNGSGMHANFSTAYMREVGGKAYFESLMAQFDKNLMDHIAVYGPDNDKRLTGKHETAPWNKFSYGIADRGASIRVPHSFIKNDYKGYLEDRRPN

SEQ ID NO: 7967 - protein, 229 aa, Brucea mollis
  misc_feature (6)..(7): Xaa can be any naturally occurring amino acid
LDPSVXXIQDKRFDQPLSLCGSTLRAPHGCHAQYMANMGSIASLVMSVTINEEDDELDNDRQQGRKLWGLVVCHHTSPRFVSFPLRYACEFLIQVFGVQVNKEVELAAQLREKHILQTQTVLCDMLLRDSPVGIVTQSPNVMDLVKCDGAALYYRGKLWLLGVTPTEVQVKYIAEWLLEYHRGSTGLSTDSLMEAGYPGASVLGDAVCGMAAVKITSKDFLFWFRSHTA

SEQ ID NO: 7968 - protein, 492 aa, Solanum lycopersicum
MMEPLMKIWSFDLVAWRGFLFSALILNFIFACQLFFLQPLVSALDAKPGDAAALFERVAQNVKVKKYSEALNDLNSAIEADPTLSEAYWHRASLLRQLCRYEESEKSYKKFLEMKPRDSAAEKELSQMHQAKSALDSATNLLDTDDIKKALEYIDKVVLVFSPACSKAKLLKVKLLLADKDYSGVISEAGFILKEDEDNLEALLLRGRAYYYLADHDVSLRHYQKGLRSDPEHGELKKAYFGLKNLLKKTKSADDNVSKGKFRLAVEEYKAALALDPNHSAHNINLHLGLCKVLVKLGRGKDAISSCSEALELDGELIDALVQRGEAKLLTEDWEGAVADLKEAAEKSPQDRNIREVLMRAERSLKLSKRKDWYKILGVSKTSSVSEIKKAYKKLALQWHPDKNVDNREEAEEKFREIAAAYEVLGDEEKRTRYDQGEDIEDMGSGMGGGGFNPFGGGFGGGFGGGGQQYTFHFEGGFPGGGGGGGFGGFHF

SEQ ID NO: 7969 - protein, 172 aa, Glycine max
  misc_feature (11)..(11): Xaa can be any naturally occurring amino acid
MDHDKTGCEAXPEGPILCITNCGFFGSAATMNMCSKCHKDMMLKQEQAGLVASSIGNIMNGSSSSSGNEPAIATSVDVSVNSIEPKIIPAQPLVASGSEESDEAKPKDGPNRCSNCNKRVGLTGFNCRCGNLFCSVHRYSDKHNCPFDYHTAARDAIAKANPAVKVEKLDKI

SEQ ID NO: 7970 - protein, 393 aa, Frankia sp. EAN1pec
MSVRDMVEKDYYAALGVPKDASAADIKKAYRKLARELHPDKNPGDVKAEARFKEVSEAYDVLSDENRRREYDEARALFASGSYPGAGGRGGGMGGFGTPGGYGPGAGNLNLDDLLNGNGGGGLGGIFDNLFQRTPTGRAPRRGTDIAAEVTISFEKSLTGLEATVRLPGAATCATCAGIGARPGTSPRTCPVCRGLGVISRSQGGFALSEPCRDCLGKGSLIDHPCPDCHGTGRREREQRIRIPAGVSDGQRLRVRGRGSPGERGGAAGDLEVTVHVQSHPVFGREGHNLTINLPVTITEAALGASVKVPTIDGTPLTVKVPAGTSSGRRLRARNRGVPRPGGENGDLIVTLEVTVPKPSELSPKARTALQEFARAHPEDPRESLIAQMEGRA

SEQ ID NO: 7971 - protein, 477 aa, Nicotiana benthamiana
MEPLMKIWSFDLVAWRAFLFSALILNFVFACQFLFLQPLVSALDTKPGDAAALFERVSQNVKVKKYSEALNDLNSAIEADPALSEAYWHRASLLRQLCRYEESERSYKRFLEMKPGDSAAEKELSQLHQSKSAFDSATNLLDTGDIKRALEYIDKVVLVFSPACSKAKLLRRSYCSQIKIIPVTYLRRDTYLKKMRIIWRLYCYEAVPTTIWLIMMSPKALPKRSSVRPRAWELKKAYLLEKLTEKTKSAEDNASKGKLRLAVEEYKATLTMDPNHSAHNVNLHLGLCKVLVKLGRGKDAISSCSEALELDGELIDALVQRGEAKLLTEDWEGAVADLKEAAEKSPQDRNIREALMRAERSFKLSQRKDWYKILGVSKTASVSEIKKAYKKLALQWHPDKNVENREEAENKFREIAAAYEILGDEEKRTRYDQGEDIEDMDSGMGGGGFNPFGGGGQQYTFHFEGGFPGGGFGGFHF

SEQ ID NO: 7972 - protein, 171 aa, Zea mays
MEHKETGCQAPEGPILCINNCGFFGSAATMNMCSKCHKEMIMKQEQAKLAASSIDSIVNGNDAVMEPVVAGNTVVAAAPIELQTMNVQPADVAGPSEGAAVISKGKVGPNRCSTCRKRVGLTGFNCRCGNLYCALHRYSDKHDCKFDYRTAARDAIAKANPVVKADKLDKI

SEQ ID NO: 7973 - protein, 203 aa, Bradyrhizobium yuanmingense
QIKEFASFPTLEQLPLWGFDGSSTQQAEGHSSDCVLKPVAVFPDGARTNGVLVMCEVMMPDGKTPHPSNKRATILDDSGAWFGFEQEYFFYKDGRPLGFPTAGYPAPQGPYYTGVGFSNVGDVARKIVEEHLDLCLAAGINHEGINAEVAKGQWEFQIFGKGSKTAADQMWMARYLMLRLTEKYGIDIEFHCKPLGDTDWNGS

SEQ ID NO: 7974 - protein, 392 aa, Peixotoa glabra
DLEPVNPSDVPVTAAGALKSYKLAAKAISRLQSLPSGNISLLCDVLVKEVRDLTGYDRVMVYKFHEDEHGEVVSECRRSDLESYLGLHYPATDIPQASRFLFMKNKVRMICDCLAPPVQVIQDERLPQPLSLCGSTLRSPHGCHAQYMTNMGTIASLVKSVTVNEDDDTMDGDQQQMTRKLWGLVVCHHTSPRFVPFPLRYACEFLIQVFGVQINKEVELAAQVREKHILQIQTMLCDMLLRDAPVAIITQSPNVMDLVKCDGAALYFKNKTWLLGVTPTEEQIRDIAEWLLKYHSGNTGLSTDSLMEAGYPGASTLGDAVCGMAAVSITSRDFLFWFRSHTAKEIKWGGAKHDPDDKDDLRKMHPRSSFKAFLEVVKWRSMPWEDVEMDAI

SEQ ID NO: 7975 - protein, 238 aa, Zea mays
MAAANGDACRSVGGVPRPTNPMVTPLLTDLYQFTMAYAYWKAGKHLDRAVFDLYFRKNPFGGEFTIFGGLEECIRFIANFKFTEEEIKFLRSVMPACEDDFFEYLRSIDCSDVEVYAIPEGYAVFPKVPLMRIEGPVAFSHTSRLCCLPQVVQLLETPFLSLVNYASLVTTNAARHRLVAGKSKNLLEFGLRRAQGPDGGISASRYCYMGGFDATSNVAAGRLFGIPIRGTHSHAFVS

SEQ ID NO: 7976 - protein, 203 aa, Bradyrhizobium yuanmingense
QIKEFASFPTLEQLPLWGFDGSSTQQAEGHSSDCVLKPVAVFPDGARTNGVLVMCEVMMPDGKTPHASNKRATILDDAGAWFGFEQEYFFYKDGRPLGFPTSGYPAPQGPYYTGVGFSNVGDVARKIVEEHLDLCLAAGINHEGINAEVAKGQWEFQIFGKGSKTAADQMWMARYLMLRLTEKYGIDIEFHCKPLGDTDWNGS

SEQ ID NO: 7977 - protein, 392 aa, Tetrapterys discolor
DLEPVNPADVPVTAAGALKSYKLAAKAISRLQSLPSGNISLLCDVLVKEVRDLTGYDRVMVYKFHEDEHGEVVSECRRSDLESYLGLHYPATDIPQASRFLFMKNKVRMICDCLAPPVKVIQDERLPQPLSLCGSTLRSPHGCHAQYMTNMGTIASLVMSVTVNDDDDMMDGDQQQMTRKLWGLVVCHHTSPRFVPFPLRYACEFLIQVFGVQINKEVELTAQVREKHILQIQTMLCDMLLRDAPVAIITQSPNVMDLVKCDGAALYFKKKTWLLGVTPMEEQVRDIAEWLLEYHSGSTGLSTDSLMEAGYPGASDLGDAVCGMAAVSITSRDFLFWFRSHTAKEIKWGGAKHDPDDKDDGRKMHPRSSFKAFLEVVKWRSVPWEDIEMDAI

SEQ ID NO: 7978 - protein, 198 aa, Bradyrhizobium sp. CICS70
PTPNLRGKTQIKEFASFPTLEQLPLWGFDGSSTQQAEGHSSDCVLKPVAVFPDGARTNGVLVMCEVMMPDGKTPHASNKRATILDDAGAWFGFEQEYFFYKDGRPLGFPASGYPAPQGPYYTGVGFSNVGDVARKIVEEHLDLCLAAGINHEGINAEVAKGQWEFQIFGKGSKKAADEMWMARYLMLRLTEKYGIDIE

SEQ ID NO: 7979 - protein, 389 aa, Methanosarcina mazei Go1
MATKRDYYEILGLSKDSSVEDIKKTYRKLALQYHPDRNKEPGAEEKFKEISEAYAVLSDAEKRAQYDRFGHAGIDNQYSAEDIFRGADFGGFGDIFEMFFGGGRRGGPMGPRRGSDLQYDLYVTFEEAAFGVRKDIDIPRTERCSTCSGTGAKPGTSPKRCPNCGGTGQVRTTRSTLGMQFVSTTTCSACHGRGQVVESPCPTCSGAGRVRSRRKMSVNVPAGADSGMTLRLSGEGDAGEPGAPSGDLYIIVHVMEHKYFKRVDYDVISELPISFTQAALGADIMVDTLYGKVKMNIPSGTQTHSVFRLKDKGIQRLQGHGKGDQLVRVIIRTPTKLTQEQKDLLHQFEYLSNGKKPEAEERSRSDKQKSEKPRKSKGLFEKVKDAFES

SEQ ID NO: 7980 - protein, 392 aa, Tristellateia madagascariensis
DLEPVNPADVPVTAAGALKSYKLAAKAISRLQSLPSGNISLLCDVLVKEVRDLTGYDRVMVYKFHEDEHGEVVSECRRSDLESYLGLHYPATDIPQASRFLFMKNKVRMICDCLAPPVKVIQDERLPQPLSLCGSTLRSPHGCHAQYMANMGTIASLVMSVTINEDDDTMDGDQQQMARKLWGLVVCHHTSPRFVPFPLRYACEFLIQVFGVQINKELELAAQVREKHILRIQTMLCDMLLRDAPVGIITQSPNVMDLVKCDGAALFYKNKFWLLGITPTEAQIRDIAEWLLEYHSGNTGLSTDSLMEAGYPGASVLGDAVCGMASVSITSRDFLFWFRSHTAKEIKWGGAKHDPDDKDDGRKMHPRSSFKAFLEVVKWRSLPWKDMEMDAI

SEQ ID NO: 7981 - protein, 170 aa, Oryza sativa Japonica Group; identical to SEQ ID NO: 7659

SEQ ID NO: 7982 - protein, 48 aa, Glycine max
SARGNVWFGAGVILKGKISIVANPGVKLEVPDGAVISDKEINGPEDLL

SEQ ID NO: 7983 - protein, 197 aa, Bradyrhizobium yuanmingense
PTPNLRGKTQIKFASFPTLEQLPLWGFDGSSTQQAEGHSSDCVLKPVAVFPDGARTNGVLVMCEVMMPDGKTPHASNKRATILDDAGAWFGFEQEYFFYKDGRPLGFPTSGYPAPQGPYYTGVGFSNVGDVARKIVEEHLDLCLAAGINHEGINAEVAKGQWEFQIFGKGSKTAADQMWMARYLMLRLTEKYGIDIE

SEQ ID NO: 7984 - protein, 392 aa, Tristellateia madagascariensis
DLEPVNPADVPLTAAGALKSYKLAAKAISRLQSLPSGNISLLCDVLVKEVRDLTGYDRVMVYKFHEDEHGEVVSECRRSDLESYLGLHYPATDIPQASRFLFMKNKVRMICDCLAPPVKVIQDERLPQPLSLCGSTLRSPHGCHAQYMANMGTIASLVMSVTINEDDDTMDGDQQQMARKLWGLIVCHHTSPRFVPFPLRYACEFLIQVFGVQINKELELAAQVREKHILRIQTMLCDMLLRDAPVGIITQSPNVMDLVKCDGAALFYKNKFWLLGITPTEAQIRDIAEWLLEYHSGNTGLSTDSLMEAGYPGASVLGDAVCGMASVSITSRDFLFWFRSHTAKEIKWGGAKHDPDDKDDGRKMHPRSSFKAFLEVVKWRSLPWEDVEMDAI

SEQ ID NO: 7985 - protein, 392 aa, Tristellateia madagascariensis
DLEPVNPADVPLTAAGALKSYKLAAKAISRLQSLPSGNISLLCDVLVKEVRDLTGYDRVMVYKFHEDEHGEVVSECRRSDLESYLGLHYPATDIPQASRFLFMKNKVRMICDCLAPPVKVIQDERLPQPLSLCGSTLRSPHGCHAQYMANMGTIASLVMSVTINEDDDTMDGDQQQMARKLWGLVVCHHTSPRFVPFPLRYACEFLIQVFGVQITKELELAAQVREKHILRIQTMLCDMLLRDAPVGIITQSPNVMDLVKCDGAALFYKNKFWLLGITPTEAQIRDIAEWLLEYHSGNTGLSTDSLMEAGYPGASVLGDAVCGMASVSITSRDFLFWFRSHTAKEIKWGGAKRDPDDKDDGRKMHPRSSFKAFLEVVKWRSLPWEDVEMDAI

SEQ ID NO: 7986 - protein, 172 aa, Rhizobium leguminosarum
WGFDGSSTQQAEGRSSDCVLKPVAIYPDPARTNGALVMCEVMMPDGVTPHASNARATILDDEDAWFGFEQEYFFYQNGRPLGFPEQGYPAPQGPYYTGVGYSNVGDVAREIVEEHLDLCLAAGINHEGINAEVAKGQWEFQIFGKGSKKAADQIWMARYLLQRLTEKYGIDI

SEQ ID NO: 7987 - protein, 159 aa, Brassica napus
MEGGGSNVRSSYYNVLGIRKDASVSDVRAAYRKLAMKWHPDKYARNPDVAGEAKRRFQQIQEAYSVLNDENKRSMYDAGLYDPHEDDDDDFCDFMQEMISMMNNIKGEGDSLEDLQRMFTDIAGGDSVSFACNDNSRNSKRPRVNISRSSAAMRTVVLF

SEQ ID NO: 7988 - protein, 198 aa, Bradyrhizobium elkanii
PTPSLRGKTQIKEFASFPTLEQLPLWGFDGSSTQQAEGHSSDCVLKPVACYPDAARENGVLVMCEVMMPDGKTPHPSNKRATILDDDGAWFGFEQEYFFYKDGRPLGFPEEGYPAPQGPYYTGVGYKNVGSVARKIVEEHLNLCLAAGINHEGINAEVAKGQWEFQIFGKGSKTAADQMWMARYLMLRLTESYGIDIE

SEQ ID NO: 7989 - protein, 777 aa, Brassica napus
GTSVICEIWFAFSWILDQFPKPFPVNRETYLDRLALRYDREGEPSQLAAVDIFVSTVDPLKEPPLVTANTVLSILAVDYPVDKVSCYVSDDGAAMLSFEALAETSEFARKWVPFCKKYSIEPRAPEWYFAAKIDYLKDKVQTSFVKDRRAMKREYEEFKIRINALVSKALKCPEEGWVMQDGTPWPGNNTRDHPGMIQVFLGQNGGLDAEGNELPRLVYVSREKRPGFQHHKKAGAMNALVRVSAVLTNGPFILNLDCDHYINNSKALREAMCFLMDPNLGKQVCYVQFPQRFDGIDKNDRYANRNTVFFDINLRGLDGIQGPVYVGTGCVFNRTALYGYEPPIKVKHKKPSLLSKLCGGSRKKNSKSKKDSDKKKSGRHTDSTVPVFNLDDIEEGVEGAGFDDEKALLMSQMSLEKRFGQSAVFVASTLMENGGVPPTETPENLLKEAIHVISCGYEDKSDWGMEIGWIYGSVTEDILTGFKMHARGWRSIYCMPKLPAFKGSAPINLSDRLNQVLRWALGSVEILFSRHCPIWYGYSGRLKFLERFAYVNTTIYPLTSVPLLFYCTLPAVCLFTNQFIIPQISNIASIWFLSLFLSIFATGILEMRWSGVGIDEWWRNEQFWVIGGVSAHLFAVFQGLLKVLAGIDTNFTVTSKASDEDGDFAELYLFKWTTLLIPPTTLLIVNLVGVVAGFSYAINSGYQSWGPLFGKLFFAFWVIVHLYPFLKGLMGRQNRTPTIVVVWSVLLASIFSLLWVRIDPFTKRVTGPDILECGINC

SEQ ID NO: 7990 - protein, 487 aa, Clitoria ternatea; identical to SEQ ID NO: 4208

SEQ ID NO: 7991 - protein, 489 aa, Saccharomyces cerevisiae YJM789; identical to SEQ ID NO: 468

SEQ ID NO: 7992 - protein, 345 aa, Francisella tularensis subsp. holarctica
MKVITAEYIWADGSDPVPHLRSKARVLPFKEFETPDEFPEWSFDGSSTNQATGDNSDCILKPVNFVIDPLRDYGYLVLCEVYNPDGQTPHATNNRAKLRALLASADCQDMWAGFEQEYTMFKDGRPLGWPTTGFPGPQGPYYCSAGNSKAFGRDLVEAHMQACLEAGILFYGINAEVMPGQWEFQIGYRGVDGEDAGILNVADHTHLARWLLERLGEEYGIDISFDNKPIKGDWNGAGLHTNFSTSKTRNPQTGREAIKKICAALEKNHKKDILNYGHNLHERLTGKLETSDMNTFSVGDADRGCSIRIPRPVALKGYGYLEDRRPGANADPYVIAMALANAAIN

SEQ ID NO: 7993 - protein, 308 aa, Zea mays
  misc_feature (272)..(272): Xaa can be any naturally occurring amino acid
MAVASNRPATTLLPLAALVAVAGSLFLAGPAAATGKTGQVTVFWGRNKAEGTLREACDTGTYTIVVISFLNVSAGPGNSPPSLDLSGHPVAGIGADIKHCQSKSIMVFLSLGGGQHSLPSAEAAADLADYLWYAYFPAPAPRAGVRRPFGDAYVDGLDFFLDRGGRPPPDHLDALAARLWSYNRQFRARTPVQLSATPRCAFPPDGPALRLLATGLVTRVNVRLYGDARCAAYWQQEWDKWAAAYPGSGLYVGLPASERTVGYVHPKNLYYXGVLPVVQKAPSYAGIMIWDRYADKQTNYSSYAIQWA

SEQ ID NO: 7994 - protein, 174 aa, Arabidopsis thaliana; identical to SEQ ID NO: 6936

SEQ ID NO: 7995 - protein, 180 aa, Rhizobium leguminosarum bv. phaseoli
EFDEFPTLEQLPLWGFDGSSTMQAEGRSSDCVLKPVAIYPDPARTNGALVMCEVMMPDGVTPHASNARATILDDEDAWFGFEQEYFFYQNGRPLGFPEQGYPAPQGPYYTGVGYSNVGDVAREIVEEHLDLCLAAGINHEGINAEVAKGQWEFQIFGKGSKKAADQIWMARYLLQRLTEK

SEQ ID NO: 7996 - protein, 296 aa, Rhizobium sp. CIAM2209
  misc_feature (236)..(236): Xaa can be any naturally occurring amino acid
RGKTQIKDYAEFPTLEQLPLWGFDGSSTQQAEGHSSDCVLKPVAVFPDPARTNGVLVMCEVMMPDGVTPHSSNKRATILDDEGAWFGFEQEYFFYKDGRPLGFPESGYPAPQGPYYTGVGYSNVGSVARQIVEEHLDQCLAAGINHEGINAEVAKGQWEFQIFGKGSKKAADQMWMARYLMQRLTEKYGIDIEYHCKPLGDTDWNGSGMHANFSTAYMREVGGKAYFEALMAAFDXNLMDHIAVYGPDNDKRLTGKHETAPWNKFSYGIADRGASIRVPHSFVNNGYKGYLEDRRP

SEQ ID NO: 7997 - protein, 393 aa, Methanosarcina acetivorans C2A
MWKGLKKSWLPGQRLSGVFEMAGDVNNEVNSKKRQGDTLAKERLLGLAEKIYNQFEEEVIPSVSLPSRTKANIEYSDESDVWVYGDRESERSAKTVKGAFQLLKTTYATDFLINEHLAHNRGSTLRELYYISEGWDYAKFKEQAESDRLIEDLELLTSLQREYFHMRPEEDGATMFGPIEISELTKRGARNIHCQKDVGEGGYQIPFNVENIEFKNHDASMIIAIETGGMYARLMENGFDEAYNAILVHLKGQPARSTRRIIKRMNEELEIPVAVFTDGDPWSYRIYASVAYGAIKSAHLSEFMATPAARFLGLQPSDIVEYELSTDKLTEQDISALRSELSDPRFESEYWKEQIQLQLDIGKKAEQQAFAGKGLDFVTEVYLPNRLKELGMV

SEQ ID NO: 7998 - protein, 180 aa, Rhizobium leguminosarum bv. viciae
EFDVFPTLEQLPLWGFDGSSTQQAEGRSSDCVLKPVAIYPDPARTNGALVMCEVMMPDGVTPHASNARATILDDEDAWFGFEQEYFFYQNGRPLGFPEQGYPAPQGPYYTGVGYSNVGDVAREIVEEHLDLCLAAGINHEGINAEVAKGQWEFQIFGKGSKKAADQIWMARYLLQRLTEK

SEQ ID NO: 7999 - protein, 294 aa, Rhizobium sp. USDA 4003
RGKTQIKEFAEFPDLEQLPLWGFDGSSTQQAEGHSSDCVLKPVAVYPDPARTNGVLVMCEVMMPDGVTPHASNKRATILDDEGAWFGFEQEYFFYKDGRPLGFPESGYPAPQGPYYTGVGYSNVGSVARQIVEEHLDLCLAAGINHEGINAEVAKGQWEFQIFGKGSKKAADQMWMARYLMQRLTEKYGIDIEYHCKPLGDTDWNGSGMHANFSTAYMREVGGKAYFEALMAAFDKNLMDHIAVYGPDNDKRLTGKHETAPWNRFSYGIADRGASIRVPHSFIKSDYKGYLEDR

SEQ ID NO: 8000 - protein, 180 aa, Rhizobium sp. USDA 1920
EFDNFPTLEQLPLWGFDGSSTMQAEGRSSDCVLKPVAIYPDPARTNGVLVMCEVMMPDGVTPHASNARATILDDEDAWFGFEQEYFFYENGRPLGFPESGYPAPQGPYYTGVGYSNVGSVAREIVEEHLDLCLAAGINHEGINAEVAKGQWEFQIFGKGSKKAADQIWMARYLLQRLTEK

SEQ ID NO: 8001 - protein, 294 aa, Rhizobium sp. USDA 2061
RGKTQIKEFDAFPTLEQLPLWGFDGSSTQQAEGRSSDCVLKPVAVYPDPVRTNGALVMCEVMMPDGKTPHPSNTRATVLDDESAWFGFEQEYFFYKNGRPLGFPEQGYPAPQGPYYTGVGYKNVGDIARRIVEEHLDICLAAGINHEGINAEVAKGQWEFQVFGKGSKKAADEVWLARYLLLRLTEKYGIDVEFHCKPLGDTDWNGSGMHANFSTAYMREVGGKDYFEALMAAFEKNLHDHINVYGPDNHLRLTGKHETAPWDKFSYGVADRGASIRVPHSFVNNGYRGYVEDR

SEQ ID NO: 8002 - protein, 180 aa, Agrobacterium rhizogenes
EFDAFPTLEQLPLWGFDGSSTMQAEGRSSDCVLKPVAIYPDPARTNGALVMCEVMMPDGVTPHESNSRATILDDEDAWFGFEQEYFFYKDGRPLGFPESGYPAPQGPYYTGVGYKNVGDVAREIVEEHLDLCLEAGINHEGINAEVAKGQWEFQIFGKGSKKAADQIWMARYLLLRLCEK

SEQ ID NO: 8003 - protein, 355 aa, Picea sitchensis
MSLLTDLINLNLSDVTEKIIAEYIWIGGSGTDIRSKARTLSHEVSDPKDLPKWNYDGSSTGQAPGKDSEVIIYPQAIFRDPFRRGKNILVICDTYTPAGEPIPTNKRANAAKIFSHPDVVAEEPWFGIEQEYTLLQKDVQWPLGWPIGGYPGPQGPYYCGTGADKAYGRDIVDAHYKACLYAGINISGINGEVMPGQWEFQVGPTVGISSGDQVWAARYILERITEVAGVVLSFDPKPIQGDWNGAGAHTNYSTKSMREEGGIKVIKKAIEKLGLRHKEHISAYGEGNERRLTGRHETADINTFSWGVANRGASIRVGRDTEREGKGYFEDRRPASNMDPYIVTSMITETTILLK

SEQ ID NO: 8004 - protein, 296 aa, Rhizobium sp. 2M164
RGKTQIKEFDEFPTLEQLPLWGFDGSSTQQAEGRSSDCVLKPVAIYPDPARTNGALVMCEVMMPDGVTPHASNARATILDDEHAWFGFEQEYFFYQNGRPLGFPEQGYPAPQGPYYTGVGYSNVGDVAREIVEEHLDLCLAAGINHEGINAEVAKGQWEFQIFGKGSKKAADQIWMARYLLQRLTEKYGIDIEYHCKPLGDTDWNGSGMHCNFSTKFLREVGGKEYFEALMAQFDKNLMDHIAVYGPDNDKRLTGKHETAPWNKFSYGVADRGASIRVPHSFIKKDYKGYLEDRRP

SEQ ID NO: 8005 - protein, 1155 aa, Oryza sativa Japonica Group
MASGGGGRADAAESVSKAVAQYTLDARLHAVFEQSGASGRSFDYTQSLRASPTPSSEQQIAAYLSRIQRGGHIQPFGCTLAVADDSSFRLLAYSENTADLLDLSPHHSVPSLDSSAVPPPVSLGADARLLFAPSSAVLLERAFAAREISLLNPLWIHSRVSSKPFYAILHRIDVGVVIDLEPARTEDPALSIAGAVQSQKLAVRAISRLQALPGGDVKLLCDTVVEYVRELTGYDRVMVYRFHEDEHGEVVAESRRNNLEPYIGLHYPATDIPQASRFLFRQNRVRMIADCHAAPVRVIQDPALTQPLCLVGSTLRSPHGCHAQYMANMGSIASLVMAVIISSGGDDDHNISRGSIPSAMKLWGLVVCHHTSPRCIPFPLRYACEFLMQAFGLQLNMELQLAHQLSEKHILRTQTLLCDMLLRDSPTGIVTQSPSIMDLVKCDGAALYYHGKYYPLGVTPTEVQIKDIIEWLTMCHGDSTGLSTDSLADAGYPGAAALGDAVSGMAVAYITPSDYLFWFRSHTAKEIKWGGAKHHPEDKDDGQRMHPRSSFKAFLEVVKSRSLPWENAEMDAIHSLQLILRDSFRDSAEGTSNSKAIVNGQVQLGELELRGIDELSSVAREMVRLIETATVPIFAVDTDGCINGWNAKVAELTGLSVEEAMGKSLVNDLIFKESEETVNKLLSRALRGDEDKNVEIKLKTFGPEQSKGPIFVIVNACSSRDYTKNIVGVCFVGQDVTGQKVVMDKFINIQGDYKAIVHNPNPLIPPIFASDENTCCSEWNTAMEKLTGWSRGEVVGKLLVGEVFGNCCRLKGPDALTKFMIVLHNAIGGQDCEKFPFSFFDKNGKYVQALLTANTRSRMDGEAIGAFCFLQIASPELQQAFEIQRHHEKKCYARMKELAYIYQEIKNPLNGIRFTNSLLEMTDLKDDQRQFLETSTACEKQMSKIVKDASLQSIEDGSLVLEKGEFSLGSVMNAVVSQVMIQLRERDLQLIRDIPDEIKEASAYGDQYRIQQVLCDFLLSMVRFAPAENGWVEIQVSYLSSFSIPEGNTYSHAGISCVEFGRGQVKYLVKFIFVGHICCSTLGLPVLAKAFPQRLFKTCLVTPAGQPKRVTWDLLMENPVYESSRNQHFVHSDEAHLNFGTASVILGVEVVPPVS

SEQ ID NO: 8006 - protein, 377 aa, Neptuniibacter caesariensis
MSKRDYYEVLGVSRDSSDRDIKKAFRRMAMKYHPDRNPDDKEAEESFKEVNEAYEVLSDAQKKAAYDQYGHAGVDPNMRGGHGGGFEGNFSDIFGDVFGDIFGGGGGRGGRSSVQRGADLRYNMEMTLEEAVRGVEKEIRVPTLVGCETCDGSGAKPGTSAKICGTCGGQGQVRMQQGFFSVQQTCPTCHGEGKVISDPCNDCHGHGRIEKTKTLNVKIPAGVDTGDRIRLAGEGEAGTHGGPAGDLYVQVHVKDHPIFERDGKHLYCEVPISFVDAALGGELEVPTLDGRVKLKVPSETQTGKMFRLRGKGISPVRGGSTGDLLVKVVVETPVNLSSRQKELLREFQDEMEQGTHKHSPKKHGFFDSVKKFFEDMT

SEQ ID NO: 8007 - protein, 296 aa, Rhizobium sp. USDA 3620
  misc_feature (82)..(82): Xaa can be any naturally occurring amino acid
  misc_feature (291)..(291): Xaa can be any naturally occurring amino acid
  misc_feature (294)..(294): Xaa can be any naturally occurring amino acid
RGKTQIKEYAEFPTLDQLPLWGFDGSSTMQAEGHSSDCVLKPVAIYPDPARTNGVLVMCEVMMPDGVTPHASNKRATILDDXGAWFGFEQEYFFYKDGRPLGFPESGYPAPQGPYYTGVGYSNVGSVARQIVEEHLDLCLAAGINHEGINAEVAKGQWEFQIFGKGSKKAADQMWMARYLLQRLTEKYGIDIEYHCKPLGDTDWNGSGMHANFSTAHMREVGGKAYFEALMAAFDKNLMDHIAVYGPDNDKRLTGKHETAPWNKFSYGIADRGASIRVPHSFIKNDYKGYXEDXRP

SEQ ID NO: 8008 - protein, 204 aa, Arabidopsis thaliana
MVKMTLIARVTDGLPLAEGLDDGRDLPDSDMYKQQVKALFKNLSRENFSYIIEGRVCYLTMCDRSYPKKLAFQYLEDLKNEFERVNGPNIETAARPYAFIKFDTFIQKTKKLYQDTRTQRNIAKLNDELYEVHQIMTRNVQEVLGVGEKLDQVSEMSSRLTSESRIYADKAKDLNRQALIRKWAPVAIVFGVVFLLFWVKNKLW

SEQ ID NO: 8009 - protein, 466 aa, Zea mays
MASAAAGAPKRCYYEVLGLSRDCSPTDIKLAFRRLALSLHPDKQPPGSDLALATAAFQELQHAHSVLSDPQERAYYDSHRSQIIFSDPASAGAKSASTVPDLFAFFSSSAFSGFSDTGRGFYKVYGDVFDRVFAQELAYARRMVVPEPAAPPVIGNLDSPYAQVTAFYSYWLGFGSGMDFGWAAAWDAARGESRRVRRLMEEDNKKAMRKARREYNDAVRGLAAFCKKRDKRVVDMVLKKKLEEEKRKAEEKERRKEEDKRKKERAMAYQEHEWARAEEGLYDEDEEEEMRAKKELSYCAACNKKFKSDKQWKNHEQSKKHRNKIAELRKAFREEESLKKAEEGEGDWNEVDMGFDFKPTQESDDASAFSDAAEELAEEFESNYAGNGHHGKCEVQPEGSVHVNDVDDIMEGPSSSNVNNGAVIMVLQLPSPLPVLCCSRRNKLFSHLEETGHAMLKSLVGSAWFS

SEQ ID NO: 8010 - protein, 199 aa, Arabidopsis thaliana
MVDHYQVLGVTRNATKKEVKDAFRRLAIKYHPDKHAQSPEHVRHNATVRFKLVSEAYEVLNDDLKRASYNAGSDSDCFRRTSGSYSNPYGNRGGRAQGSGYGYGYGYSTRNRQASSFSSGFDSTFRYLTTRAFLLNLALAGGLYFAFTAIDTSGETLWKMRNSGVSIIFSINDRVKLLAVLIICILAFFYPVIYIHWCF

SEQ ID NO: 8011 - protein, 391 aa, Androstachys johnsonii
DLEPVNPADVPVTAAGALKSYKLAAKAISRLQSLPSGNISLLCDVLVKEVSDLTGYDRVMVYKFHEDEHGEVVAECRRPDLEPYLGLHYPATDIPQASRFLFMKNKVRMICDCLAPPVEVVQDGKLSQPLGLCGSTLRSPHGCHSQYMRNMGTIASLVMSVTINENDDEMEGDQQKGRKLWGLVVCHHTSPRFVPFPLRYACEFLIQVFGVQINKEVELAAQMREKHILRTQTLLCDMLLRNAPVAIITQSPNVMDLVKCDGAALYYRKKFWLLGITPTEAQIRDIAEWLLEYHSGTTGLSTDSLMEAGYPGASILGDAVCGMAAVRITSKDFLFWFRSHTAKEIKWGGAKHDPNDKEDGRKMHPRSSFKAFLEVVKRRSLPWEDMEMDAI

SEQ ID NO: 8012 - protein, 392 aa, Blepharandra heteropetala
DLEPVNPADVPVTAAGALKSYKLAARAISRLQSLPSGNISLLCDVLVKEVRDLTGYDRVMVYKFHEDEHGEVISECCRPDLEAYLGLHYPATDIPQASRFLFMKNKVRMICDCLAPAVKVIQDERLPQALSLCGSTLRSPHGCHAQYMANMGTIASLVMSVIINEDNDMMDGDQQHIARKLWGLVVCHHTSPRFVPFPLRYACEFLIQVFGVQINKEVELAAQVREKHILRTQTLLCDMLLRDAPVAIITQSPNVMDLVKCDGAALYYRKKFWLLGVTPTEVQIRDTAEWLLEYHGGNAGLSTDSLMEAGYPGASDLGNAVCGMAAVRITSRDFLFWFRSHTAKEIKWGGAKHHPNDKDDVRKMHPRSSFKAFLEVVKWRSLPWEDIEMDAI

SEQ ID NO: 8013 - protein, 91 aa, Zea mays
SNLYSLNAGSRTMSDKREFPTVPLVKLGSSFTKVQDYLRRFESIPDMLELDHLTVSGDVTFGKNVSLQGTVIIIAYHGDTFDIPPGAVLEH

SEQ ID NO: 8014 - protein, 203 aa, Rhizobium leguminosarum
QIKEFDVFPTLEQLPLWGFDGSSTMQAEGRSSDCVLKPVAIYPDPARTNGALVMCEVMMPDGVTPHPSNARATILDDEDAWFGFEQEYFFYQNGRPLGFPEQGYPAPQGPYYTGVGYSNVGDVAREIVEEHLDLCLAAGINHEGINAEVAKGQWEFQIFGKGSKKAADQIWMARYLLQRLTEKYGIDIEYHCKPLGDTDWNGS

SEQ ID NO: 8015 - protein, 198 aa, Bradyrhizobium elkanii
PTPSLRGKTQIKEFASFPTLEQLPLWGFDGSSTQQAEGHSSDCVLKPVACYPDAARENGVLVMCEVMMPDGKTPHVSNKRATVLDDEGAWFGFEQEYFFYKDGRPLGFPEEGYPAPQGPYYTGVGYKNVGSVARKIVEEHLNLCLAAGINHEGINAEVAKGQWEFQIFGKGSKTAADQMWMARYLMLRLTESYGIDIE

SEQ ID NO: 8016 - protein, 392 aa, Lophanthera lactescens
DLEPVNPADVPVTAAGALKSYKLAARAISRLQSLPSGNISLPSDVLVKEVRDLTGYDRVMVYKFHEDEHGEVVSECCRPDLEAYLGLHYPATDIPQASRFLFMKNKVRMICDCLAPPVKVIQDERLPQPLSLCGSTLRSPHGCHAQYMANMGSIASLVMSVTVNEDDDMVDGDQQQMARKLWGLVVCHHTSPRFVPFPLRYACEFLIQVFGVQINKKVELAAQVREKHILRTQTLLCDMLLRDAPVAIVIQSPNVMDLVKCDGAALYYRKKFWLLGVTPTEAQIRDIAEWLLEYHSGNTGLSTDSLMEAGYPGTSVLGNAVCGMAAVKITSRDFLFWFRSHTAKEIKWGGAKHDPGDKDDIRKMHPRSSFKAFLEVVKWRSLPWEDIEMDAI

SEQ ID NO: 8017 - protein, 470 aa, Brassica napus
MAAAAIEKLPQLKSATDGLKEMSDNERSGFISLVSRYLSGEAQHIEWSKIQTPTDEIVVPYDKMANVSEDVSETKYLLDKLVVLKLNGGLGTTMGCTGPKSVIEVRDGLTFLDLIVIQIENLNNKYGCKVPLVLMNSFNTHDDTQKIVEKYTNSNVDIHTFNQSKYPRVVADEFVPWPSKGKTDKDGWYPPGHGDVFPSLMNSGKLDAFISQGKEYVFVANSDNLGAVVDLKILKHLIQNKNEYCMEVTPKTLADVKGGTLISYEGKVQLLEIAQVPDEHVNEFKSIEKFKIFNTNNLWVNLKAIKKLVEADALKMEIIPNPKEVDGVKVLQLETAAGAAIRFFDNAIGVNVPRSRFLPVKATSDLLLVQSDLYTLVDGFVIRNSARTNPSNPTIELGPEFKKVFNFLSRFKSIPSIVELDSLKVSGDVYFGSSVVLKGKVTVTAKSGTKIEIPDGAVIENKDINGPEDL

SEQ ID NO: 8018 - protein, 198 aa, Bradyrhizobium japonicum bv. glycinearum
PTPNLRGKTQIKEFASFPTLEQLPLWGFDGSSTQQAEGHSSDCVLKPVAVFPDAARTNGVLVMCEVMMPDGKTPHASNKRATILDDAGAWFGFEQEYFFYKDGRPLGFPSSGYPAPQGPYYTGVVFSNVGDVARKIVEEHLDLCLAAGINHEGINAEVAKGQWEFQIFGKGSKKAADEMWMARYLMLRLTEKYGIDID

SEQ ID NO: 8019 - protein, 380 aa, Diacidia ferruginea
ETPAGALKSYKLAARAISRLQSLPSGIISLLCDVLVKEVRDLTDYDRVMVYKFHEDEHGEVISECCRPDMEAYLGLHYPATDIPQASRFLFMKNKVRMICDCLATPVKVIQDERLPQPLSLCGSTLRSPHGCHAQYMANMGAIASLVMSVTINEDDDVMDGDRQHRARKLWGLVVCHHTSPRFLPFPLRYACEFLIQVFGVQINKEVELAAQVREKHILRTQTLLCDMLLRDAPVAIITQSPNVMDLVKCNGAALYYKKKFWLVGLTPTEAQIRDIAEWLLEYHNGNTGLSTDSLMEAGYPGASELGDTVCGMAVVKITSRDFLFWFRSHTAKEIKWGGAKHDPDDKDDGRKMHPRSSFKAFLEVVKWRSLPWEDVEMDA

SEQ ID NO: 8020 - protein, 203 aa, Rhizobium leguminosarum
QIKEFDVFPTLEQLPLWGFDGSSTMQAEGRSSDCVLKPVAIYPDPARTNGALVMCEVMMPDGVTPHASNARATILDDEDAWFGFEQEYFFYQNGRPLGFPEQGYPAPQGPYYTGVGYSNVGDVAREIVEEHLDLCLAAGINHEGINAEVAKGQWEFQIFGKGSKKAADQIWMARYLLQRLTEKYGIDIEYHCKPLGDTDWNGS

SEQ ID NO: 8021 - protein, 198 aa, Bradyrhizobium japonicum bv. glycinearum
PTPNLRGKTQIKEFASFPTLEQLPLWGFDGSSTQQAEGHSSDCVLKPVAVFPDAARTKGVLVMCEVMMPDGKTPHASNKRATILDDAGAWFGFEQEYFFYKDGRPLGFPASGYPAPQGPYYTGVGFSNVGDVARKIVEEHLDLCLAAGINHEGINAEVAKGQWEFQIFGKGSKKAADEMWMARYLMLRLTEKYGIDIE

SEQ ID NO: 8022 - protein, 469 aa, Clitoria ternatea; identical to SEQ ID NO: 4233

SEQ ID NO: 8023 - protein, 613 aa, Zea mays
MACNRRRKLLCACLLLACAAPAAAAAVNISVYWGQNSNEGSLGQTCSSGRYALVAMAFLSTFGSGQTPVLNLAGHCDPASGGCTALAADIAACQARGVRVLLSIGGGAGSYNLSSASDAESVATYLWDNFLGGTSSSRPLGDAVLDGIDMDIEISPSSHFDGLARNLTSLYGGDRRGRKYLLTAAPQCPYPDASLGAALATGLFDHVWVQFYNNPGCEYQQKDGDGVANLAASWKAWTQSLPSSASVFLGLPASPAAAGSGYVPPDDLVSRVLPAVSGSANYGGLMLWNRYYDNSTGYSARILSSRALLHPKGYTYSEVKRMTRSFAHKLGQGGYGAVYRGSMPDGREVAVKMLTGMLEGDGEEFMNEGGEHQQDGPKRALLYEYMPNGSLERYTFGSSSGEDALSWDRLFGIVVGVARGLEYLHTGCNTRIVHFDIKPHNILLDQDMCPKISDFGLAKLCGQKASRVSIAGARGTVGYIAPEVFSRSYEAVGSKADVYSYGMVVLEMVGARKNVHVSATDDGGNSSSSRYFPQWLYENLDQFCRPTTTSNGEIRGDDDDATEVLLVRKMVVVGLWCIQSKPDSRPSMGQVLEMLESNAADLQLPPKALCTAY

SEQ ID NO: 8024 - protein, 392 aa, Byrsonima crassifolia
DLEPVNPADVPVTAAGALKSYKLAARAISRLQSLPSGNISLLCDVLVKEVRDLTGYDRVMVYKFHEDEHGEVISECRRPDLEAYLGLHYPATDIPQASRFLFMKNKVRMICDCLAPPVKVIQDERLLQPLSLCGSTLRSPHGCHAQYMANMGTIASLVMSVTINEDDDMMDMDQQHMAGKLWGLVVCHHTSPRFVPFPLRYACEFLIQVFGVQINKEVELAAQVREKHILRTQTLLCDMLLRDAPVAIITQSPNVMDLVKCNGAALYYRKKFWLLGVTPTEAQIRDIAEWLLEYHSGNTGLSTDSLMEAGYPGASDLGHAVCGMAAVKITSRDFLFWFRSHTAKEIKWGGAKHDPDDKDDGRKMHPRSSFKAFLEVVKWRSLPWEDMEMDAI

SEQ ID NO: 8025 - protein, 433 aa, Vitis vinifera
  misc_feature (5)..(5): Xaa can be any naturally occurring amino acid
  misc_feature (25)..(25): Xaa can be any naturally occurring amino acid
  misc_feature (36)..(36): Xaa can be any naturally occurring amino acid
  misc_feature (50)..(50): Xaa can be any naturally occurring amino acid
  misc_feature (60)..(60): Xaa can be any naturally occurring amino acid
MAHIXAPSVQCQVRVVPTSSFTARXMTAKLWNSLLXNQRKKGTSRSSARXRVLALQSESXTVNRLKDLLNLDITPYTDKIIAEYIWIGGSGIDLRSKSRTISKPVKHPSELPKWNYDGSSTGQAPGEDSEVILYPQAIFKDPFRGGNNILVICDSYTPAGEPIPTNKRHGAAEIFSSQKVINEVPWYGIEQEYTLLQTNVKWPLGWPVGGYPGPQGPYYCGAGADKSFGRDISDAHYKACLYAGINISGTNGEVMPGQWEYQVGPSVGIEAGDHIWCSRYILERITEQAGVVLSLDPKPIEGDWNGAGCHTNYSTKSMREDGGFEVIKKAILNLSLRHEVHISAYGEGNERRLTGKHETASIDTFSWGVANRGCSIRVGRDTEKNGKGYLEDRRPASNMDPYVVTSLLAETTILWEPTLEAEALAAQKLSLKV

SEQ ID NO: 8026 - protein, 203 aa, Rhizobium etli
QIKEFDAFPTLEQLPLWGFDGSSTMQAEGRSSDCVLKPVAIYPDPARTNGVLVMCEVMMPDGVTPHPSNARATILDDEDAWFGFEQEYFFYQNGRPLGFPEQGYPAPQGPYYTGVGYSNVGDVAREIVEEHLDLCLAAGINHEGINAEVAKGQWEFQIFGKGSKKAADQIWMARYLLQRLTEKYGIDIEYHCKPLGDTDWNGS

SEQ ID NO: 8027 - protein, 198 aa, Bradyrhizobium japonicum bv. glycinearum
PTPNLRGKTQIKEFASFPTLEQLPLWGFDGSSTQQAEGHSSDCVLKPVAVFPDAARTNGVLVMCEVMMPDGKTPHASNKRATILDDAGAWFGFEQEYFFYKDGRPLGFPSSGYPAPQGPYYTGVGFSNVGDVARKIVEEHLDLCLAAGINHEGINAEVAKGQWEFQIFGKGSKKAADEMWMARYLMLRLTEKYGIDIE

SEQ ID NO: 8028 - protein, 481 aa, Gentiana triflora; identical to SEQ ID NO: 4235

SEQ ID NO: 8029 - protein, 402 aa, Ustilago maydis 521
MGKDYYQVLGVAKDADDETLKKAYKKAALKWHPDRNKDNIETANKKFKEVGEAFEVLSDKNKRAIYDQFGEEGLKAGGPPPPGADGAAGGFSGFPGGAAGFSGGFPGGGGRTFTFTTGGAGGAGGAGGMGGMGGFSPSDPNDIFASIFGGASPFGGGMGGMPMGGMGGMSGMEDMFGGAGGGGARRKAGGGMPGAFNFGASPNTGAGAAADEKPSDVEKQLPLSLQDLYTGTTKRLKVGRKLASGGSEEKILTVEVKPGWKKGTKIRFGGAGHEVSPGSFQDVVFIVDEKPHAHFRRDGDDLRLTIPLKLIDALDPPKPGTPGSRKQVETLDGRKIDVPIPQPVAGTSCITPGKTTRLANEGMPISKTGGKRKGDLVVEWSVQLPEHLTPAQKEGLRKVLAP

SEQ ID NO: 8030 - protein, 198 aa, Bradyrhizobium sp. IRBG127
PVPNLRGKTQIKEFSSFPTLEQLPLWGFDGSSTMQAEGHSSDCVLKPVAVYPDAARTNGVLVMCEVMMPDGKTPHPSNARATILDDPDAWFGFEQEYFFYKDGRPLGFPEYGYPAPQGPYYTGVGFKNVGDVARKIVEEHLDLCLAAGINHEGINAEVAKGQWEFQVFGKGSRTAADQMWMARYLMLRLTEKYGIDIE

SEQ ID NO: 8031 - protein, 494 aa, Gentiana triflora; identical to SEQ ID NO: 4239
  misc_feature (158)..(158): Xaa can be any naturally occurring amino acid

SEQ ID NO: 8032 - protein, 250 aa, Vigna unguiculata
ISVYWGQNGNEGSLADACNTGNYKYVNIAFLSAFGGGQTPQLNLAGHCNPSINNCNVFSDQIKGCQSRGIKVLPSLGGASGSYSLSSADDATQVANYIWNNFLGGQSSSRPLGDAVLDGVDFDIEAGSGNHWDDLARSLKGNNSQLLLAAAPQCPIPDAHLDSAIKTGLFDYVWVQFYNNPPCQYSSGNTNSLISSWNQWTSSQAKQLFLGVPASTAAAGSGFIPANDLISQVLPAIKGSSKYGGVMLWD

SEQ ID NO: 8033 - protein, 352 aa, Physcomitrella patens subsp. patens
MGVDYYNILKVPKTATEDDLKKAYRKLAMKWHPDKNPNNKKEAEAKFKQISEAYEVLSDPQKRLIYDQEGEEGLKGGMPPPGAAHGFANGSGGTHSFRFNPRNAEDIFAEFFGGGSPFGGMGGLGGRGSRGGPFGDGMFGGFGGGENVFRTSDGNQAFRSFGEGSSHTQVRKAPAVENKLLCSLEELYKGSTRKMKISRSIADASGKSTPVEEILTIEVKPGWKKGTKITFPEKGNEQHGMLAADLVFVIDERPHDTYKRDGNDLIVTKKISLVEALTGLNFTLMSLDGRTLNISIPDVIHPGYEKVLPKEGMPVAKEPGRRGNLRIKFDIDFPTRLSAEQKAGVKRLLGGV

SEQ ID NO: 8034 - protein, 353 aa, Physcomitrella patens subsp. patens
MGVDYYSVLKVPKTATEDDLKKAYRKLAMKWHPDKNPNNKKEAEAKFKQISEAYEVLSDPQKRQIYDQAGEEGLKGGMPPPGGASYGFGNGGTAHSFRFNPRNAEDIFAEFFGNASPFGGMGSMGGMGGGRTGRGGPFGDGMFGGFGGPETMFRTTDGAQGFRSFGDTTSQARKAPAVENKLLCSLEEIYKGSTRKMKISRMIADASGKTMPIEEILTIDIKPGWKKGTKITFPEKGNEKLGVTPADLVFVIDEKPHDTFKRDGNDLTMTKKVSLVEALTGCSFSISTLDGRALNVSVSDVIHPGYEKVLSKEGMPVAKEPGRKGNLRIKFDITFPNRLSSEQKAGVRKLLGA

SEQ ID NO: 8035 - protein, 484 aa, Gentiana triflora; identical to SEQ ID NO: 4243
  misc_feature (158)..(158): Xaa can be any naturally occurring amino acid

SEQ ID NO: 8036 - protein, 297 aa, Vigna unguiculata
MVKTKISLLLPLLFFTLVGTSHAGGIAIYWGQNGNEGTLSEACDTGRYTHVNIAFLNKFGNGQTPEMNLAGHCNPATNSCTKFSAQIKYCQSKNIKVLLSIGGGIGTYTLASVEDAGTVSTFLWNTFLGGHSSTRPLGDAELDGIDFDIEQGSTQNYDHLARFLKAYSKKGKKRVYLGAAPQCPIPDRFLGTALDTGLFDFVWVQFYNNPPCQYADGNVTNLLNSWKRWTSTVPAGKIFLGLPAPPAAAGSGFVPADVLTSKILPVIKKSRKYGGVMLWSRFFDVQNGYSTSIIGSV

SEQ ID NO: 8037 - protein, 481 aa, Lobelia erinus; identical to SEQ ID NO: 4248
  misc_feature (422)..(422): Xaa can be any naturally occurring amino acid

SEQ ID NO: 8038 - protein, 171 aa, Saccharomyces cerevisiae
MAEASIEKTQILQKYLELDQRGRIIAEYVWIDGTGNLRSKGRTLKKRITSIDQLPEWNFDGSSTNQAPGHDSDIYLKPVAYYPDPFRRGDNIVVLAACYNNDGTPNKFNHRHEAAKLFAAHKDEEIWFGLEQEYTLFDMYDDVYGWPKGGYPAPQGPYYCGVGAGKVYARD

SEQ ID NO: 8039 - protein, 476 aa, Triticum aestivum
  misc_feature (219)..(219): Xaa can be any naturally occurring amino acid
  misc_feature (228)..(228): Xaa can be any naturally occurring amino acid
MAAAAVAADSKIDNLRDAVAKLGEISENEKAGFISLVSRYLSGEAEQIEWSKIQTPTDEVVVPYDTLAPPPEDLDAMKALLDKLVVLKLNGGLGTTMGCTGPKSVIEVRNGFTFLDLIVIQIESLNKKYGCSVPLLLMNSFNTHDDTQKIVEKYSNSNIEIHTFNQSQYPRIVTEDFLPLPSKGQTGEGWLGTPQATGDVFPSLNNSGKLDTLLSQGKXEYVFVANSXDNLGAIVDIKILNHLITNQNEYCMEVTPKTLADVKGGTLISYEGRVQLLEIAQVPDEHVNEFKSIEKFKIFNTNNLWVNLKAIKRLVDAEALKMEIIPNPKEVDGVKVLQLETAAGAAIRFFEKAIGINVPRSRFLPVKATSDLLLVQSDLYTLVDGYVIRNPARVKPSNPSIELGPEFKKVANFLARFKSIPSIVELDSLKVSGDVSFGSGVVLKGNVTIAAKAGVKLEIPDGAVLENKDINGPEDL

SEQ ID NO: 8040 - protein, 120 aa, Zea mays
MTALGKGGVARFAAALFVLLNLSAAIAGKSYYDVLQVPKGASEDQIKRSYRKLALKYHPDKNPDNEEANKRFAEINNAYEVLTDQEKRKIYDQYGEEGLKQFQGGGGGGGGMNIQDIFRK

SEQ ID NO: 8041 - protein, 392 aa, Coleostachys genipifolia
DLEPVNPADVPVTAAGALKSYKLAARAISRLQSLPSGNISLLCDVLVKEVRDLTGYDRVMVYKFHEDEHGEVVSECRRPDLEAYLGLHYPATDIPQASRFLFMKNKVRMICDCLAPPVKVIQDKRLVQPLSLCGSTLRSPHGCHAQYMANMGAIASLVMSVTINEGDDTMDGDQQQMARKLWGLVVCHHTSPRFVPFPLRYACEFLIQVFGVQINKEVELAAQVREKHILRTQTLLCDMLLRDAPVAIITQSPNVMDLVKCDGAALYYRKKFWLLGVTPTEAQIKEIAQWLIEYHSGDTGLSTDSLMEAGYPSASVLGDAVCGMAAVKITSRDFLFWFRSHTAKEIKWGGAKHDPDDKDDGRKMHPRSSFKAFLEVVKWRSLPWEDVEMDAI

SEQ ID NO: 8042 - protein, 1157 aa, Oryza sativa Indica Group
MASKGILKNGGKPPTAPSSAAPTVVFGRRTDSGRFISYSRDDLDSEISSVDFQDYHVHIPMTPDNQPMDPAAGDEQQYVSSSLFTGGFNSVTRAHVMEKQASSARATVSACMVQGCGSKIMRNGRGADILPCECDFKICVDCFTDAVKGGGGVCPGCKEPYKHAEWEEVVSASNHDAINRALSLPHGHGHGPKMERRLSLVKQNGGAPGEFDHNRWLFETKGTYGYGNAIWPEDDGVAGHPKELMSKPWRPLTRKLRIQAAVISPYRLLVLIRLVALGLFLMWRIKHQNEDAIWLWGMSIVCELWFALSWVLDQLPKLCPINRATDLSVLKDKFETPTPSNPTGKSDLPGIDIFVSTADPEKEPVLVTANTILSILAADYPVDKLACYVSDDGGALLTFEAMAEAASFANLWVPFCRKHEIEPRNPDSYFNLKRDPFKNKVKGDFVKDRRRVKREYDEFKVRVNGLPDAIRRRSDAYHAREEIQAMNLQREKMKAGGDEQQLEPIKIPKATWMADGTHWPGTWLQASPEHARGDHAGIIQVMLKPPSPSPSSSGGDMEKRVDLSGVDTRLPMLVYVSREKRPGYDHNKKAGAMNALVRASAIMSNGPFILNLDCDHYVYNSKAFREGMCFMMDRGGDRLCYVQFPQRFEGIDPSDRYANHNTVFFDVNMRALDGLQGPVYVGTGCLFRRIALYGFDPPRSKDHTTPWSCCLPRRRRTRSQPQPQEEEEETMALRMDMDGAMNMASFPKKFGNSSFLIDSIPVAEFQGRPLADHPSVKNGRPPGALTIPRETLDASIVAEAISVVSCWYEEKTEWGTRVGWIYGSVTEDVVTGYRMHNRGWKSVYCVTHRDAFRGTAPINLTDRLHQVLRWATGSVEIFFSRNNALFASSKMKVPSLLFDRLFFFFFFFFRCRQTNNYPLHLQVLQRIAYLNVGIYPFTSVFLIVYCFLPALSLFSGQFIVQTLNVTFLTYLLIITITLCLLAMLEIKWSGIALEEWWRNEQFWLIGGTSAHLAAVLQGLLKVIAGIEISFTLTSKQLGDDVDDEFAELYAVKWTSLMIPPLTIIMINLVAIAVGFSRTIYSTIPQWSKLLGGVFFSFWVLAHLYPFAKGLMGRRGRTPTIVYVWSGLVAITISLLWIAIKPPSAQANSQLGGSFSFP

SEQ ID NO: 8043 - protein, 203 aa, Rhizobium huautlense
QIKEFDSFPTLEQLPLWGFDGSSTMQAEGRSSDCVLKPVALYPDPARTNGVLVMCEVMMPDGVTPHPSNSRATILDDEDAWFGFEQEYFFYENGRPLGFPESGFPAPQGPYYTGVGYKNVGSIAREIVEEHLDLCLAAGINHEGINAEVAKGQWEFQVFGKGSKKAADQIWMARYLLLRLCEKYGIDIEFHCKPLGDTDWNGS

SEQ ID NO: 8044 - protein, 392 aa, Acmanthera latifolia
DLEPVNPADVPVTAAGALKSYKLAARAISRLQSLPSGNISLLCDVLVKEVRDLTGYDRVMVYKFHEDEHGEVVSECRRPDLEAYLGLHYPATDIPQASRFLFMKNKVRMICDCLAPPVKVFQDKRLAQPLGLCGSTLRSPHGCHAQYMANMGAIASLVMSVTINEGDDMIDGDQQQMARKLWGLVVCHHTSPRFVPFPLRYACEFLIQVFGVQINKEVELAAQVREKHILRTQTLLCDMLLRDAPVAIVTQSPNVMDLVKCDGAALYYRKKFWLLGVTPTEVQIKEIAEWLIEYHSGNTGLSTDSLMEAGYPGASVLGDAVCGMAAVKITSKDFLFWFRSHTAKEIKWGGAKHDPDDKDDGRKMHPRSSFKAFLEVVKWRSLPWEDMEMDAI

SEQ ID NO: 8045 - protein, 309 aa, Physcomitrella patens subsp. patens
MVKDSAYYDVLGIQPDATPADIKKAYYVQARKVHPDKNPNNPAAAKEFQALGEAYQVLSDPQKREAYDKHGKEEIPGESMVDPGAVFGMMFGSDAFEEYVGQLALATVSGQDSEMSDGKQVKDRFRRVQEERERKLADLLLLHIKLYMEGNKEKFIQEALENRDRLSLASFGEEMLETIGYIYSRQASKELGRTSKYLGVPYVTEWMRGKGHRIKSQFTAVGGAVQLMRMQEEMKKMMQTTEVQEQKLETYLETNQKIMLDNLWKINVIDIESTLSHVCQKVIRDPKISDPKELLKRAEAIKLLGQIFE

SEQ ID NO: 8046 - protein, 470 aa, Populus tremula x Populus tremuloides
MATDTEKISQLKSAVANLNQISESEKTGFVNLVSRYLSGEAQQVEWSKIQTPTDEVVVPYDTLESTPEDPEETKMLLDKLVVLKLNGGLGTTMGCTGPKSVIEVRNGLTFLDLIVIQIESLNKKYGCSVPLLLMNSFNTHDDTQKIIEKYSNSNIEIHTFNQSQYPRLVADDFVPLPSKGHTDKDGWYPPGHGDVFPSLKNSGKLDALLSQGKEYVFVANSDNLGAVVDLKILNHLIRNKNEYCMEVTPKTLADVKGGTLISYEGKVQLLEIAQVPDQHVNEFKSIEKFKIFNTNNLWVNLKAIKRLVEADALKMEIIPNPKEVDGVKVLQLETAAGAAIRFFDHAIGINVPRSRFLPVKASSDLLLVQSDIYTPVVDGFVIRNPGRANPANPSIELGPEFKKVASFLSRFKSIPSIIELDSLKVAGDVWFGVNVTLKGKVSIVVKSGVKLEIPEGVVLENKEINGPKDL

SEQ ID NO: 8047 - protein, 392 aa, Pterandra arborea
DLEPVNPADVPVTAAGALKSYKLAARAISRLQSLPSGDISLLCDVLVKEVRDLTGYDRVMVYKFHEDEHGEVVSECRRPDLEAYFGLHYPATDIPQASRFLFMKNKVRMICDCLAPPVQVIQDKRLAQPLSLCGSTLRSPHGCHAQYMANMGAIASLVISVTINEGDDMMDGDQQQMARKLWGLVVCHHTSPRFVPFPLRYACEFLIQVFGVQITKEVELAAQVREKHILRTQTLLCDMLLRDAPVAIITQSPNVMDLVKCDGAALYYRKKFWLLGVTPTEAQIKEIAEWLLEYHSGNMGLSTDSLMEAGYPGASVLGNAVCGMAAVKITSRDLLFWFRSHTAKEIKWGGAKHDPDDKDDGRKMHPRSSFKAFLEVVKWRSLPWEDVEMDAI

SEQ ID NO: 8048 - protein, 377 aa, Opitutaceae bacterium TAV2
MRNPSSSPTRQFFCRQTQDETPQTLSGSSLKPLQTTYLSMAKLKLEYIWLDGYTPVANLRSKTKIIEGDAAKLTLADVPVWGFDGSSTKQAEGRSSDCLLKPVALYPDITRENGFLVMSEVLLPNGTPHPTNSRATIIDDPDTWFGFEQEYFLYKDGRPLGFPAEGFPAPQGTYYTGVGFKNVGDVAREIVEEHLDICIGAGINHEGINAEVAKGQWEFQIFGKGAQTAADEIWVARYILSRVCEQYGVDVEWSCKPIRGDWNGSGMHSNFSTKFMRETGGKDYFEKLMDAFRKHHDEHIAVYGPDNHLRLTGLHETQSIDKFSYGLADRGSSIRIPHSFVNSGYKGYLEDRRPNSAADPYLIAARILKTISTVPTV

SEQ ID NO: 8049 - protein, 392 aa, Galphimia gracilis
DLEPVNPADVPVTAAGALKSYKLAARAISRLQSLPSGNISLLCDVLVKEVRDLTGYDRVMVYRFHDDEHGEVVSECCGPDLEAYLGLHYPATDIPQASRFLFMKNKVRMICDCLAPPVKVLQDERLPQPLSLCGSTLRSPHGCHAQYMANMGTMASLVMSVTINEDDNMLDGDQQHMARKLWGLVVCHHTSPRFVPFPLRYACEFLIQVFGVQINKEVELAAQMTEEHILRTQTLLCDMLLRDAPVAIITQSPNVMDLVKCDGAALYYRKKFWLLGVTPTEAQIRGIAEWLLEYHGGNTGLSTDSLMEAGYPGASVLGDAVCGMAAVKITSRDFLFWFRSNTAKEIKWSGAKHDPGDKDDIKKMHPRSSFKAFLEVVKWRSLPWEDVEMDAI

SEQ ID NO: 8050 - protein, 345 aa, Aspergillus nidulans FGSC A4
MKYMSLDQRGSVMAEYIWIDAHGGTRSKTKTLSKAPSSVDELPEWNFDGSSTAQAPGDNSDVYLRPVAMYPDPFRRGDNILVLCETWDSDGSPNKFNYRHDCARLMETHAKEEFWFGLEQEYTLLGPDGWPYGWPKGGFPGAQGPYYCGVGTGKVYCRDIVEAHYRACLYAGVKISGINAEVMPSQWEYQVGPCHGIEMGDHLWISRFLLHRVAEEFGVKISFDPKPIKGDWNGAGLHTNVSTTSTRAEGGIKAIESYMKKLEARHVEHIAVYGEGNEERLTGRHETGNIDKFSYGVADRGGSIRIPRQVAKDGKGYFEDRRPASNADPYQITGIIAETVSFSNR

SEQ ID NO: 8051 - protein, 392 aa, Acridocarpus natalitius
DLEPVNPADVPVTAAGALKSYKLAAKAISRLQSLPSGNISLLCDVLVKEVRDLTGYDRVMVYKFHEDEHGEVVSECRRSDLEAYLGLHYPATDIPQASRFLFMKNKVRMICDCLAPPIKVIQDERLPQPLSLGGSTLRSPHGCHAQYMANMGTIASLVMSVTINEDDDMMDGDQQQMARKLWGLVVCHHTSPRFVPFPLRYACEFLIQVFGVQINKEVELAAQVREKHILQIQTLLCDMLLRDAPVAIITQSPNVMDLVKCDGAALYYKKKFWLLGITPTEAQIRDIVEWLLEFHSGNTGLSTDSLMEAGYPGASVLGDAVCGMAAVSITSKDFLFWFRSHTAKEIKWGGAKHDPDVKDDGRKMHPRSSFKAFLEVVKWRSLPWEDVEMDAI

SEQ ID NO: 8052 - protein, 146 aa, Avena sativa
GEFLATTLERIEKNFVITDPRLPDNPIIFASDSFLQLTEYSREEILGRNCRFLQGPETDRATVRKIRDAIDNQTEVTVQLINYTKSGKKFWNLFHLQPMRDQKGDVQYFIGVQLDGTEHVRDAAEREGVMLIKKTAENIDEAAKEL

SEQ ID NO: 8053 - protein, 202 aa, Echinacea angustifolia
ARRDDLNAAIFNLKEIESYDDYERSLLISQMSFEKTFGMSSVFIESTLMENGGLAESANPATMINEAIHVISCGYEEKTAWGKEIGWIYGSVTEDILTGFKMHCRGWRSIYCMPVRPAFKGSAPINLSDRLHQVLRWALGSVEIFLSRHCPLWYGWGGGRLKLLQRFAYINTIVYPFTSLPLVAYCTLPAICLLTGKFIIPT

SEQ ID NO: 8054 - protein, 144 aa, Avena sativa
FLATTLERIEKNFVITDPRLPDNPIIFASDSFLQLTEYSREEILGRNCRFLQGPETDRATVRKIRDAIDNQTEVTVQLINYTKSGKKFWNLFHLQPMRDQKGDVQYFIGVQLDGTEHVRDAAEREGVMLIKKTAENIDEAAKEL

SEQ ID NO: 8055 - protein, 392 aa, Chlamydia trachomatis D/UW-3/CX
MDYYTILGVAKTATPEEIKKAYRKLAVKYHPDKNPGDAEAERRFKEVSEAYEVLGDAQKRESYDRYGKDGPFAGAGGFGGAGMGNMEDALRTFMGAFGGDFGGNGGGFFEGLFGGLGEAFGMRGGSESSRQGASKKVHITLSFEEAAKGVEKELLVSGYKSCDACSGSGANTAKGVKVCDRCKGSGQVVQSRGFFSMASTCPDCSGEGRVITDPCSVCRGQGRIKDKRSVHVNIPAGVDSGMRLKMEGYGDAGQNGAPAGDLYVFIDVEPHPVFERHGDDLVLELPIGFVDAALGIKKEIPTLLKEGTCRLSIPEGIQSGTVLKVRGQGFPNVHGKSRGDLLVRVSVETPQHLSNEQKDLLRQFAATEKAENFPKKRSFLDKIKGFFSDFAV

SEQ ID NO: 8056 - protein, 1124 aa, Nicotiana tabacum
MSSSRPSQSSTTSARSKHSARIIAQTTIDAKLHADFEESGDSFDYSSSVRVTSVAGDERKPKSDRVTTAYLNQIQKGKFIQPFGCLLALDEKTFKVIAFSENAPEMLTMVSHAVPSVGELPALGIGTDIRTIFTGPSAAALQKALGFGEVSLLNPVLVHCKTSGKPYYAIVHRVTGSLIIDFEPVKPYEVPMTAAGALQSYKLAAKAITRLQALPSGSMERLCDTMVQEVFELTGYDRVMTYKFHDDDHGEVVAEITKPGLDPYLGLHYPATDIPQAARFLFMKNKVRMICDCRAKHVKVVQDEKLPFDLTLCGSTLRAPHYCHLQYMENMSSIASLVMAVVVNDGDEEGESSDSTQSQKRKRLWGLVVCHNTTPRFVPFPLRYACEFLAQVFAIHVNKELELESQILEKNILRTQTLLCDMLMRVAPLGIVSQSPNIMDLVKCDGAALLYKNKIHRLGMTPSDFQLHDIVSWLSEYHTDSTGLSTDSLYDAGFPGALALGDVVCGMAAVRISDKGWLFWYRSHTAAEVRWGGAKHEPGEKDDGRKMHPRSSFKAFLEVVKTRSVPWKDYEMDAIHSLQLILRNASKDADAMDSNTNIIHTKLNDLKIDGLQELEAVTAEMVRLIETASVPIFAVDVDGQLNGWNTKIAELTGLPVDEAIGNHLLTLVEDSSVDTVSKMLELALQGKEERNVEFEIKTHGPSGDSSPISLIVNACASRDVGDSVVGVCFIAQDITGQKNIMDKFTRIEGDYRAIIQNPHPLIPPIFGTDQFGWCSEWNSAMTKLTGWRRDDVIDKMLLGEVFGTQAACCRLKNQEAFVNFGVVLNNAMTGQECAKISFGFFARNGKYVECLLCVSKRLDREGAVTGLFCFLQLASHELQQALHIQRLSEQTALKRLKVLAYIRRQIRNPLSGIIFSRKMLEGTNLGEEQKNILRTSSQCQRQLNKILDDTDLDSIIDGYLDLEMLEFKLHEVLVASISQIMMKSNGKNIMIVNDMVEDLLNETLYGDSPRLQQVLANFLLVCVNSTPSGGQLSISGTLTKDRIGESVQLALLEVRISHTGGGVPEELLSQMFGTEAEASEEGISLLISRKLVKLMNGEVQYLREAGRSTFIISVELAVATKSSC

SEQ ID NO: 8057 - protein, 471 aa, Cucumis sativus
MEDDYSIFPPDSDLDFSFTSTTTDRTFTTSSSARTSLARSSLTLSFNESRLSAAAAALNLRPYHRSDSHWSAIRAATTLSSDGHLHLRHLKLIRHLGTGNLGRVFLCHLRDNDHASFALKVVDKEALSNKKLLQVQTEAEILASLDHPFLPTLYARLDVSHYTCLLIDYCPAGDLHSLLRKQPGSRFSVAAARFFAAEVLVALEYLHALGIVYRDLKPENVLLREDGHVMLSDFDLCFKSDVVPTFHTWTRPGPQATGSCFGWRTSPEFEEEIVGEFVAEPTSAFSKSCVGTHEYLAPELVTGGGHGNGVDWWAFGVFVYELLHGTTPFKGVNKEGTLRNIASSEGVKFRGGGEEEGGMGEARDLIERLLVKDPGRRLGWEKGATEIKRHPFFEGIKWPLIRTYRVPEVYGMMRKGRAQVSHVREVTERIRRRGWWNWRKVMRKRLIKNGSCSKSHSNTNYYSYSSKKKTG

SEQ ID NO: 8058 - protein, 432 aa, Zea mays; identical to SEQ ID NO: 541
  misc_feature (370)..(370): Xaa can be any naturally occurring amino acid

SEQ ID NO: 8059 - protein, 860 aa, Coccidioides immitis
MGPTNILAAFIAVSSLFIQSLALNPYAKSNLAVYWGQGAGQNRLSYFCEKTSFDIIVVGFINVFPDQGPAGWPGSNFGNQCADSYYYTKNGTKTKLLDGCYQIKEDLPKCKALGKTILLSLGGGAVHDFYEVKSEESALNFADFLWGAFGPLTPDWTGPRPFGEASVDGFDFDIEKGSNFGYSIMVRRLRELFLQDPLNRYYISAAPQCIMPDKYLSHAISNSAFDFIFIQFYNNPSCSAKRWVTNPKSVTYTVDDWVKYIRKSGNPLAKLFIGLPASKSAAAKEDYLTPGEATKIVSTYMAKYPSTFGGMMVWEATASENNKLGGLPYADIMKEVLLRCDPDPPTSTVTSTTSASTSTQTSSQSTTMETKTLSASTTPSSPSTVSPSSTMQTTSTGSTSIETVTTRSQEPPSTTISTRSASTEPVTTRSQEPPSTTISTRSASTETVTTRSQEPPSTTISTWSASTETSTSSQDSPSTTISTKSAPTGTVTTRSQDLPSTTISTRSPETETETATTKSQGSPSITLSTRSSSAETVSTRSQHSSSTTISTKSAPTETGTTSEHSTSMPVSTRSASTETVITRSQNSDSQSMTVSTRSPSTESITTRSQGSPSETFSTKSVPVDTISTELPSQTPTTIITGTPSDPVSAPTTTVPPNPTLTLAPSSSTTEDRTTITTIITTSYVTVCPTGFTTVTITYTTTYCPETASLTPTQPPIPGAPAPPPDGWTTIVTVCPQCAPTPTTITLTVPTRSAFLPARTETRPVVTVVPVPENPIKNVKPSESGDFVTVTTAAPATVTKTLEYNNPVDSDVNVQPTGGSSPVEFEGSAMTVRSMDVVAKALITAGALCWDCSWGYNLLIC

SEQ ID NO: 8060 - protein, 1123 aa, Solanum tuberosum
MSSSRPSQSSTTSSRSKHSARIIAQTSIDAKLHADFEESGDSFDYSSSVRVTNVAEGEQRPKSDKVTTAYLHQIQKGKFIQPFGCLLALDEKTLKVIAFSENAPEMLTMVSHAVPSVGEHPVLGIGIDIRTIFTGPSGAALQKALGFGEVSLLNPVLVHCKNSGKPFYAIVHRVTGSLIIDFEPVKPYEVPMTAAGALQSYKLAAKAITRLQSLPSGSMERLCDTMVQEVFELTGYDRVMGYKFHDDDHGEVVSEITKPGLEPYLGLHYPATDIPQAARFLFMKNKVRMICDCRAKHVKVVQDEKLPFDLTLCGSTLRAPHYCHLQYMENMNSIASLVMAVVVNDGDEEGESSDSSQSQKRKRLWGLVVSHNTTPRFAPFPLRYACEFLAQVFAILVNKELELENQFLEKNILRTQTLLCDMLMRDAPLGIVSQSPNIMDLIKCDGAALLYKNKIHRLGMNPSDFQLHDIVSWLCEYHTDSTGLSTDSLYDAGFPGALALGDAVCGMAAVRISDKDWLFWYRSHTAAEVRWGGAKHEPGEKDDGRKMHPRSSFKGFLEVVKTRSIPWKDYEMDRIHSLQLILRNAFKDADAVNSNTISIHTKLNDLKIDGMQELEAVTAEMVRLIETASVPIFAVDVDGQVNGWNTKVAELTGLPVDEAIGKHLLTLVEDSSVDTVNKMLELALQGQEERNVEFEIKTHGPSRDSSPISLIVNACASKDVRDSVVGVCFIAQDITGQKSIMDKFTRIEGDYRAIIQNPHPLIPPIFGTDQFGWCSEWNSAMTMLTGWRRDDVMDKMLLGEVFGTQAACCRLKNQEAFVNFGVILNNAITGQESEKIPFGFFARYGKYVECLLCVSKRLDKEGAVTGLFCFLQLASHELQQALHVQRLSEQTALKRLKVLAYIRRQIRNPLSGIIFSRKMLEGTSLGEEQKNILHTSAQCQRQLDKILDDTDLDSIIEGYLDLEMLEFKLHEVLVASISQVMMKSNGKNIMISNDMVEDLLNETLYGDSPRLQQVLANFLLVSVNSTPSGGKLSISGKLTKDRIGESVQLALLEFRIRHTGGGVPEELLSQMFGSEADASEEGISLLVSRKLVKLMNGEVQYLREAGRSTFIISVELAVATKSS

SEQ ID NO: 8061 - protein, 210 aa, Brownea sp. Lavin 6225
YDRVMAYKFHEDDHGEVIAEITKPDMEPYLGLHYPATDIPQAARFLFMKNKVRIIVDCRAKHVKVLQDEKLPFDLTLCGSTLRDPHSCHLQYMENMNSVASLVMAVVVNDNDEDGDSSDSVQPQKRKRLWGLVVCHNTTPRFVPFPLRYACEFLVQVFAIHVNKELELEYQIVEKNILRTQTLLCDMLMRDAPLGIVSQGPNIMDLVKCD

SEQ ID NO: 8062 - protein, 1122 aa, Stellaria longipes
MASRAQSQSSTNSGRSKHSARIIAQTIQDAKFHAEFEESSNEFDYSSSVRGSTSGVNQLPKSDKVTSSYLLQIQKGKFIQPFGCLLALDDKTFRVIAFSENAPEMLTMVSHAVPSVGDLPVIGIGTDIRTIFTGPSASALQKALGFTDVSLLNPILVHCKNSGKPFYAIVHRVTRSLVIDFEPVKPYEVPMTAAGALQSYKLAAKAITRLQSLPSGNMVRLVDTMVQEVFELTGYDRVMAYKFHDDDHGEVVSEVTKPNLDSYLGLHYPATDIPQAARFLFMKNKVRLICDCRAKNVRVVQDEKLSVDLTLCGSTLRAPHGCHAQYMENMNSIGSLVMAVVVNDEDDEDGGSAPAQPHKRKRLWGLVVCHHTSPRFVPFPLRYACEFLAQVFAIHVNKELELENQFLEKKILRTQTLLCDMLIRDAPLGIVTHSPNIMDLVKCDGAALLYNNKVWRLGSTPTDYQLQEIGGWLSRDHMDSTGLSTDSLYDAGYPAALELGDSVCGMAAVSITVNDMLFWFTSHTAAEIKWGGAKHEAGEKDDGSKMHPRSSFKAFLEVVKRRSVPWKDYEMDAIHSLQLILRNAFKDGEAADLNTSVIHSKISDLQISGLKELEAVTSEMVRLIETATVPIFAVDSDGLVNGWNTKIYELTGIPVEEAVGKHIAALVEDSSIDNVKQMLQSALQGEEKKNVQFEVKRHHSIPDSGPISLIVNACASKDVNGNVVGVCLIAQDITGQKTVMDKFLRIEGDYKAIIQSPNPLIPPIFGTDEFGWCSEWNPAMAKLTGWTREEVIDKMLLGEVFGMHKSCCRLKNQEAFVNLGVLLNGAMSGQNIEKLSIGFFTRSGKYIECLLCVNKKLNGEGDVTGVFCFLQLASHDLQHALHIQRLAEQAATKRANVLAYMKRQIKNPLAGIIFSGKILDGTNVDEKQRLVLQTSARCQGQLNKILDDSDLDSIIDGYCELEMVEFAVQDILVASISQVMAKSSEKGIQMSNNCTEHGFKETLYGDSLRLQQILADFLSISVNFTSPGGHIGVTVRLTKDKIGESVQLANLEFRIMHTGGGISEELLSEMFESRGNASEDGISLLISRKLVKLMNGDIQYLRSAGTSTFIISVELAVAGNSS

SEQ ID NO: 8063 - protein, 158 aa, Zea mays
MAGRGGGSKSSLYAALGVASDCSDAELRSAYRKLAMKWHPDKCAGAGSSGGGADAAKARFQKIQGAYAVLSDPNKRILYDVGAYDGEGDDDGAGEILGDILEAMSQAGPAADNGKGESLEDLQRQFEELFLRPSPSSFSPVGILLTRLCFLSVASLAS

SEQ ID NO: 8064 - protein, 1132 aa, Nicotiana tabacum
MASGSRTKHSHQSGQGQVQAQSSGTSNVNYKDSISKAIAQYTADARLHAVFEQSGESGKSFDYSQSIKTTTQSVVPEQQITAYLTKIQRGGHIQPFGCMIAVDEASFRVIAYSENACEMLSLTPQSVPSLERPEILTVGTDVRTLFTPSSSVLLERAFGAREITLLNPIWIHSKNSGKPFYAILHRVDVGIVIDLEPARTEDPALSIAGAVQSQKLAVRAISHLQSLPGGDVKLLCDTVVESVRELTGYDRVMVYKFHEDEHGEVVAESKIPDLEPYIGLHYPATDIPQASRFLFKQNRVRMIVDCHATPVRVVQDESLMQPLCLVGSTLRAPHGCHAQYMANMGSIASLTLAVIINGNDEEAVGGRSSMRLWGLVVGHHTSARCIPFPLRYACEFLMQAFGLQLNMELQLASQLSEKHVLRTQTLLCDMLLRDSPTGIVIQSPSIMDLVKCDGAALYCQGKYYPLGVTPTEAQIKDIVEWLLTYHGDSTGLSTDSLADAGYPGAALLGDAVCGMAVAYITSKDFLFWFRSHTAKEIKWGGAKHHPEDKDDGQRMHPRSSFKAFLEVVKSRSLPWENAEMDAIHSLLILRDSFKDAEASNSKAVVHAQLGEMELQGIDELSSVAREMVRLIETATAPIFAVDVEGRINGWNAKVAELTDLSVEEAMGKSLVHDLVHKESQETAEKLLFNALRGEEDKNVEIKLRTFGPEQLKKAVFVVVNACSSKDYTNNIVGVCFVGQDVTGQKVVMDKFIHIQGDYKAIVHSPNPLIPPIFASDENTCCSEWNTAMEKLTGWSRGEIIGKMLVGEIFGSCCRLKGPDAMTKFMIVLHNAIGVQDTDKFPFSFFDRNGKYVQALLTANKRVNMEGQIIGAFCFIQIASPELQQALRVQRQQEKKCYSQMKELAYLCQEIKSPLNGIRFTNSLLEATDLTENQKQYLETSAACERQMSKIIRDVDLENIEDGSLTLEKEEFFLGSVIDAVVSQVMLLLRERSVQLIRDIPEEIKTLTVHGDQVRIQQVLADFLLNMVRYAPSPDGWVEIQLQPNMKQISDEVTVVHIEFRIVCPGEGLPPELVQDMFHSSRWVTKEGLGLSMCRKILKLMNGDIQYIRESERCYFLIILDLPMTRRGSKSLG

SEQ ID NO: 8065 - protein, 244 aa, Zea mays
MTGFGSPCGACKFLRRKCVRGCVFAPYFCHEQGAAHFAAIHKVFGASNVSKLLAHLPLADRAEAAVTISYEAQARLRDPIYGCVAHIFALQQQVMTLQAQLASLKAQAAQGQQGVHEDAKGYVGSAAAEQLGYGYPWCSGNGGAAAAAAGAVGAPAAQPGAYGNGAHESLTALLGSSDYMQQSLYHAFEQAGADDDDGRQGYAFEAAAESSSLGAEESGWRSSSGYQDCEDLQSVAYAYLNHRS

SEQ ID NO: 8066 - protein, 1128 aa, Stellaria longipes
MESRNEGSRTNNNNNSNNPSDTMSRAIAQYTIDARLHAVFEQSGESGKSFDYSQSVKTYTSAESVPEQQITAYLSKIQRGGLIQPFGCMLAIDDLTYRIIAYSQNSVELLGFITTTTTTAVPSLEAVQQRIIAVGTDIRSLFMSSSCVLLEKAFSAREITLLNPVWIHSKANGKPFYAILHRIDVGIVIDLEPARTEDPALSIAGAVQSQKLAVRAISQLQSLPGGDVKLLCDTVVESVRQLAAYDRVMVYKFHEDEHGEVVAESKRADLEPYLGLHYPATDIPQASRFLFKQNRVRMIVDCHADSVSVVQDERLRQPLCLVGSTLRAPHGCHSQYMANMGSIASLVMAVIINGNDDEGSTRNAMRLWGLVVCHHTSPRSIPFPLRYACEFLMQAFGLQLNMELQLSAQVLEKRVLRTQTLLCDMILRESPTGIVTQSPSIMDLVKCDGAALLFCGKYYPLGVTPTELQLKDIVQWLLSNHGDSTGLSTDSLADAGYPGALALADAVCGMAVAFITRSDFLFWFRSHPAKEIKWGGAKHHPEDKDDVQRMNPRSSFKAFLEVVKSRSLPWENAEMDAIHSLQLILRDSFKDEETTHSKAIVHDQAGDVAMQGIDELSSVAKEMVRLIETAMAPIFAVDADGCINGWNAKASELIGLSVEEAMGKSLVHDLVCEDSKNVTQELLLHALQGDEDKNVEIKLKAFGSQQHKKAVYVVVNACCSKDYTNKIVGVCFVGHDVTGQKNVMDKFVNIQGDYKAIVHSPSPLIPPIFASDENSCCTEWNTAMEILTGYGKEDVIGKTLVGEIFGSICRLKGHDSLTKFMVVLHNAIGGQDSDKFPFSFYNRGGRYVQGLLTANKRTNIDGHITGAFCFLQIASSDLQQALEIQRQQENVCFERMKELAYLCQEIKNPLNGIRFANSLLEATSLGEDQKQFIETSNACEKQIKKILGDIHLESVDESPFELVKTEFMLGNIINAVVSQVMIPLRERELQLIRDIPEEIKTLAVCGDQIRIQQILAEFLVNMVRYAPSPDGWVEIHVLPRLKQVADGATVAYIEYRLVSPGEGLPPDLVQDMFHNSRWTTQEGLGLSMCRKILKLMNGEVQYIRESERSYFFVILELRMPPKQLMNVE

SEQ ID NO: 8067 - protein, 469 aa, Arabidopsis thaliana
SAATTENLPQLKSAVDGLTEMSESEKSGFISLVSRYLSGEAQHIEWSKIQTPTDEIVVPYEKMTPVSQDVAETKNLLDKLVVLKLNGGLGTTMGCTGPKSVIEVRDGLTFLDLIVIQIENLNNKYGCKVPLVLMNSFNTHDDTHKIVEKYTNSNVDIHTFNQSKYPRVVADEFVPWPSKGKTDKEGWYPPGHGDVFPALMNSGKLDTFLSQGKEYVFVANSDNLGAIVDLTILKHLIQNKNEYCMEVTPKTLADVKGGTLISYEGKVQLLEIAQVPDEHVNEFKSIEKFKIFNTNNLWVNLKAIKKLVEADALKMEIIPNPKEVDGVKVLQLETAAGAAIRFFDNAIGVNVPRSRFLPVKASSDLLLVQSDLYTLVDGFVTRNKARTNPSNPSIELGPEFKKVATFLSRFKSIPSIVELDSLKVSGDVWFGSSIVLKGKVTVAAKSGVKLEIPDRAVVENKNINGPEDL

SEQ ID NO: 8068 - protein, 477 aa, Solanum tuberosum
MATAATLSPADAEKLNNLKSAVAGLNQISDNEKSGFINLVGRYLSGEAQHIDWSKIQTPTDEVVVPYDKLAPLSEDPAETKNLLDKLVVLKLNGGLGTTMGCTGPKSVIEVRNGLTFLDLIVKQIEAFNAKFGCSVPLLLMNSFNTHDDTLKIVEKYANSNIDIHTFNQSQYPRLVTEDFAPLPCKGNSGKDGWYPPGHGDVFPSLMNSGKLDALLAKGKEYVFVANSDNLGAIVDLKILNHLILNKNEYCMEVTPKTLADVKGGTLISYEGKVQLLEIAQVPDEHVNEFKSIEKFKIFNTNNLWVNLSAVKRLVEADALKMEIIPNPKEVDGVKVLQLETAAGAAIKFFDRAIGANVPRSRFLPVKATSDLLLVQSDLYTLTDEGYVIRNPARSNPSNPSIELGPEFKKVANFLGRFKSIPSIIDLDSLKVTGDVWFGSGVTLEGKVTIAAKSGVKLEIPDGAVIANKDINGPEDI

SEQ ID NO: 8069 - protein, 303 aa, Helianthus annuus
MEFTHPALLLLLFITVFSFLKPSTAAGIATYWGQQSDDTEGTLEAACATGNYQFVNIAFLSTFGNNQQPVLNLAAHCDPASTCSRYSSQIKACQAQNVKVFLSIGGQRGSYSLSSPQDAQQVADFLWNTYLGGQPATRPLGDAVLDGIDFDIEQGTDQFWSDLAKAPAAYSSQKKVYLSAAPQCPFPSGDVRNQLLPAIREGLFDYVWVQFYNNEQCQYGANADALLARWNEWTQVTTNTIFLGLPAAASGAAPSGGYIPPDILTSQILPSIKSSPKYGGVMLWDRFYDKQSGYSDAIKGSIN

SEQ ID NO: 8070 - protein, 214 aa, Prunus persica
IDFEPVKPYEVPMTAAGALQSYKLAAKAIARLQSLPSGSMERLCDTMVQEVFELTGYDRVMAYKFHDDDHGEVVSEITKPGLEPYLGLHYPSTDIPQASRFLFMKNKVRMIVDCCAKQVKVLQDEKLPFDLTLCGSTLRSPHSCHLQYMKNMESIASLVMAVVVNEGDDEVASPDSVQPQKRKRLWGLVVCHNTSPRFVPFPLRYACEFLAQSS

SEQ ID NO: 8071 - protein, 379 aa, Treponema denticola
MPASKRDYYEVLGVDKKASNDDIKKAYRKLAIKYHPDKNQGDKAAEEKFKEATEAYEILIDEKKRSMYDQFGHAGVDGMSGGGGYDPSAFQGFEDIFGGSFSDIFENLFGGGFSSRSSGFGGRHAGPVRGSNLRYDLQISFVDAVYGKKAELSYTRNEKCSECHGTGSESGSSKRMCPDCKGTGQVRQSTGFFSISRPCPTCGGEGSIIEKPCKKCGGNGLERKKQRIIVTIPAGVENGKRITIPSQGNAGQAGGDYGDLFVFIFVQAHPYFERNGIDLYCAVPISMTQAALGGEINIKSLDEKTLRLKIPAGTQNGKLLRIRGEGVPTGIGRKGDLYIQIQVQIPSKLSSNSKKLLQEISAIEGENENPNLIPLKDLP

SEQ ID NO: 8072 - protein, 314 aa, Leitneria floridana
AKAISRLQSLPSGNLSLLCDVLVKNVSELTGYDRVMVYKFHEDEHGEVVAECRRPDLEPYLGLHYPATDIPQASRFLIMRNKVRMICDCLASSVKVIQDKRLDQPLSLCGSTLRAPHGCHAQYMANMGSIASLVMSVTINEEDDELDNDQQQGRKLWGLVVCHHTSPRFVPFPLRYACEFLIQIFGVQVNKEVELIDQLREKHILRTQTVLCDMLLRDSPVGIVTQSPNVMDLVKCDGAALYYGGKLWLLGVTPTEAQIKDIAQWLLEYHRESTGLSTDSLMEAGYPGASVLSDAVCGMAAVKIASKDFLFWFR

SEQ ID NO: 8073 - protein, 218 aa, Brassica napus
MVKMTLIARVTDGLPLAEGLDDGRDLPDSDMYKQQVKALFKNLSRGHNEASRMSVETGPYIFHYIIEGRVCYLTMCDRSYPKKLAFQYLEDLKNEFERVNGPNIETAARPYAFIKFDTFIQKTKKLYQDTRTQRNIAKLNDELYEVHQIMTRNVQEVLGVGEKLDQVSEMSSRLTSESRIYADKAKDLNRQALIRKWAPVAIVLGVVFLLFWVKNKLW

SEQ ID NO: 8074 - protein, 477 aa, Solanum tuberosum
MATATTLSPADAEKLNNLKSAVAGLNQISENEKSGFINLVGRYLSGEAQHIDWSKIQTPTDEVVVPYDKLAPLSEDPAETKKLLDKLVVLKLNGGLGTTMGCTGPKSVIEVRNGLTFLDLIVKQIEALDAKFGCSVPLLLMNSFNTRDDTLRIVEKYANSNIDIHTFNQSQYPRLVTEDFAPLPCKGNSGKDGWYPPGHGDVFPSLMNSGKLDALLAKGKEYVFVANSDNLGAIVDLKILNHLILNKNEYCMEVTPKTLADVKGGTLISYEGRVQLLEIAQVPDEHVNEFKSIEKFKIFNTNNLWVNLSAIKRLVEADALKMEIIPNPKEVDGVKVLQLETAAGAAIKFFDRAIGANVPRSRFLPVNATSDLLLVQSDLYTLTDEGYVIRNPARSNPSNPSIELGPEFKKVANFLGRFKSIPSIIDLDSLKVTGDVWFGSGVTLKGKVTVAAKSGVKLEIPDGAVIANKDINGPEDI

SEQ ID NO: 8075 - protein, 209 aa, Mesorhizobium amorphae
PSSRQTQIKDYAEFPTLEQLPLWGFDGSSTQQAEGHSSDCVLKPVAVFPDPARTNGVLVMCEVMMPDGVTPHSSNKRATILDDEGAWFGFEQEYFFYKDGRPLGFPESGYPAPQGPYYTGVGYSNVGSVARQIVEEHLDQCLAAGINHEGINAEVAKGQWEFQIFGKGSKKAADQMWMARYLMQRLTEKYGIDIEYHCKPLGDTDWNGS

SEQ ID NO: 8076 - protein, 389 aa, Mycoplasma genitalium G37
MAAGKRDYYEVLGISKNASSQDIKRAFRKLAMQYHPDRHKAENETTQKQNEEKFKEVNEAYEVLSDEEKRKLYDQFGHEGLNASGFHEAGFNPFDIFNSVFGEGFSFGMDGDSPFDFIFNRSKKRQQQIVVPYNLDIALVIEINFFEMTNGCNKTIKYERKVSCHSCNGFGAEGGESGLDLCKDCNGNGFVIKNQRSIFGTIQSQVLCSTCNGQGKQIKVKCKTCRSNKYTVTNQIKEINIPAGMYSGEALVDESGGNEFKGHYGKLIIQVNVLASKIFKRSDNNVIANVLVDPMVAIVGGVIELPTLEGIKEFNIRPGTKSGEQIVIPNGGIKFSKSFKRKAGDLIIIISYARPCEYTNLELKKLREFIKPNQEVKQYLNTLKNEYKT

SEQ ID NO: 8077 - protein, 392 aa, Acridocarpus macrocalyx
DLEPVNPADVPVTAAGALKSYKLAAKAISRLQSLPSGNISLLCDVLVKEVRDLTGYDRVMVYKFHEDEHGEVVSECRRSDLEAYLGLHYPATDIPQASRFLFMKNKVRMICDCLAPPVKVIQDERLPQPLSLCGSTLRSPHGCHAQYMANMGTIASLVMSVTVNEDDDMMDGDQQQMARKLWGLVVCHHTSPRFVPFPLRYACEFLIQVFGVQINKEVELAAQVREKHILQIQTLLCDMLLRDAPVAIITQSPNVMDLVKCDGAALYYKKKFWLLGITPTEAQIRDIVEWLLEYHSGNTGLSTDSLMEAGYPGVSVLGDAVCGMAAVSITSKDFLFWFRSHTAKEIKWGGAKHDPDDKDDGRKMHPRSSFKAFLEVVKWRSLPWEDMEMDAI

SEQ ID NO: 8078 - protein, 138 aa, Platanus x acerifolia
TKMGMGGKAIPPNIDRVGDMQSDALFILLVEKDAAYMRLAEDRFYNRFPCIIVTAKGQPDVATRLFLKKMKTELKLPVLALVDSDPYGLKILSVYGCGSKNMSYDSANLTTPDIKWLGVRPSDLDKYKIPEQCRLPMT

SEQ ID NO: 8079 - protein, 392 aa, Triaspis hypericoides
DLEPVNPADVPVTAAGALKSYKLAAKAISRLQSLPSGNISLLCDVLVKEVRDLTGYDRVMVYKFHEDEHGEVVSECRRSDLESYLGLHYPATDIPQASRFLFMKNKVRMICDCVAPPVKVIQDKRLPQPLSLCGSTLRSPHGCHAQYMTNMGIIASLVMSVTVNEEDDMVDGDQLQMARKLWGLVVCHHTSTRFVPFPLRYACEFLIQVFGVQINKEVELAAQVREKHILQIQTMLCDMLLRDAPVAIITQSPNVMDLVKCDGAALYFKNKTWLLGVTPTEEQIRDIAEWLLEYHSGNTGLSTDSLMEAGYPGASALGDAVCGMAAVSITSTDFLLWFRSHTAKEIKWGGAKHDPDDKDDGRKMHPRSSFKAFLEVVKWRSMPWEDVEMDAI

SEQ ID NO: 8080 - protein, 357 aa, Phytophthora infestans
MSQLDRAVYDQYMSLDVSESVTLAEYVWIGGSGQDLRCKTKTLTKPVKSVADLPIWNFDGSSTGQAPGEDSEVLLRPVAIFKDPFRRGQHILVLCDCLKPDMTPIANNTRADAARVMKAAEGEEPWFGIEQEYTLFEKDGVTPYGWPKGGFPGPQGPYYCGAGAHSVFGRIIVDAHYRASLYAGINISGINAEVMPGQWEYQVGPCTGIESGDHLWMSRYILLRVCEDFGVNVSWDPKPIPGDWNGAGCHTNYSTKAMREEGGMAKIIEAIEKMKLKHKEHIAAYGTGNERRLTGRHETASMDTFSYGVANRGASIRIPRVAEAEGKGYFEDRRPASNMDPYVVTGRIIKTTILNEA

SEQ ID NO: 8081 - protein, 392 aa, Triopterys rigida
DLEPVNPADVPVTAAGALKSYKLAAKAISRLQSLPSGNISLLCDVLVKEVRDLTGYDRVMVYKFHEDEHGEVVSESRRSDLESYLGLHYPATDIPQASRFLFMKNKVRMICDCLAPPVKVIQDERLSQPLSLCGSTLRSPHGCHAQHMTNMGTIASLVMSVTVNEDDDMVDGDQPQMTRKLWGLVVCHHTSPRFVPFPLRYACEFLIQVFGLQINKEVELAAQVREKHILQIQTMLCDMLLRDAPVAIITQSPNVMDLVKCDGAALYFKNKTWLLGVTPTEEQIRDIAEWLLEYHSGNTGLSTDSLMEAGYPGASAVGDAVCGMAAVSITSRDFLFWFRSHTAKEIKWGGAKHDPDDKDDGRKMHPRSSFKAFLEVVKWRSMPWEDVEMDAI

SEQ ID NO: 8082 - protein, 228 aa, Glycine max
  misc_feature (132)..(132): Xaa can be any naturally occurring amino acid
LQSFRVGLEDCELRKMVKLTMIARVTDGLPLAEGLDDGRDLKDAEFYKQQVKALFKNLSRGHYEASRMSVETGPYVFHYIIEGRVCYLTMCDRAYPKKLAFQYLEELRNEFERVNGSQIETAARPYAFIKFXTKKLYQDTHTQRNIAKLNDELYEVHQIMTRNVQEVLGVGEQLDQVSQMSSRLSSESRIYADKARDLNRQALIRKWAPVAIVFGVVFVLFWIKNKLW

SEQ ID NO: 8083 - protein, 392 aa, Janusia linearifolia
DLEPVNPADVPVTAAGALKSYKLAAKAISRLQSLPSGNISLLCDVLVREVRDLTGYDRVMVYKFHEDEHGEVVSECRRSDLESYLGLHYPATDIPQASRFLFMKNKVRMICDCLAPPVKVIQHERLPQPLSLCGSTLRSPHGCHAQYMTNMATIASLVMSVTVNEDDETMDGDQQQMTRKLWGLVVCHHTSPRFVPFPLRYACEFLIQVFGVQINKEVELAAQVREKHILQIQTMLCDMLLRDAPVAIITQSPNVMDLVKCDGAALYFKNKTWLLGVTPTEEQIRGIAEWLLEYHSGNTGLSTDSLMEAGYPGASGLGDAVCGMAAVSITSRDFLFWFRSHTAKEIKWGGAKHDPDDKDDLRKMHPRSSFKAFLEVVKWRSMPWEDMEMDAI

SEQ ID NO: 8084 - protein, 250 aa, Triticum aestivum
MANIIKSALPTHLKPNTGDEQGNERRHGKTRSHMAFENTSTNVAAAQMRNALTNLAETVKDPEQKKLFETEMDNFFALFRRYLNDKAKGNAVDWDRIAPPAQGQVVDYDDLANTESVQFLNKLAVLKLNGGLGTSMGCVGPKSVIEVRDGMSFLDLSVRQIEYLNRTYDVNVPFILMNSFNTNDDTAAIIKKYEGHNVDILTFNQSRYPRVYKDSLLPVPKDNDSPINEWYPLGHGDVFESLYNSGILDK

SEQ ID NO: 8085 - protein, 392 aa, Janusia anisandra
DLEPVNPADVPVTAAGALKSYKLAAKAISRLQSLPSGNISLLCDVLVKEVRDLTGYDRVMVYKFHEDEHGEVVSECRRSDLESYLGLHYPATDIPQASRFLFMKNKVRMICDCLAPPVKVIQDERLPQPLSLCGSTLRSPHGCHAQYMTNMGTIASLVMSVTVNEDDDTMDGDQQQMARKLWGLVVCHHSSPQFVPFPLRYACEFLIQVFGVQINKEVELAAQVREKHILQIQTMLCDMLLRDAPVAIITQSPNVMDLVKCDGAALYFKNKTWFLGVTPTEEQIRGIAEWLLKYHSGNTGLSTDSLMEAGYPGASGLGDAVCGMAAVSITSRDFLFWFRSHTAKEIKWGGAKHDPDDKDDLRKMHPRSSFKAFLEVVKWRSVPWEDVEMDAI

SEQ ID NO: 8086 - protein, 339 aa, Oryza sativa
MGMDYYNILKVNRNATLEDLKKSYRRLARTWHPDKNPTGGAEAEAKFKQITEAYEVLSDPEKRAIYDRYGEEGLKGMPPPGSQSRTSAAAGSSGPSNFRYNPSDPDDFFAEFMASNKPYSFDQERTRFQPRSQWTAGNTRGEASSASHKESSTSTSQLEKPAAIEKTLLCTLEELYNGTKRKMKITRNVANTDGKVEIETEVLPVEVLPGWKKGTKITFPNKGDRLSGQLPQDLTFVIDLKPHDVYLLEGNNLVATQVIPLVDALAGTTIHLKTLDGRNLPIRVEEVVRPGHEIVLANEGWPIRKEPGKKGNLKIKFDVTFPTRLSSSQRAAIRQIMGG

SEQ ID NO: 8087 - protein, 371 aa, Francisella tularensis subsp. holarctica
MQQKCYYEILNISKTASGVEIKRAYRKLAMKYHPDRNPGDKEAEIKFKEISEAYEILSDDSKRSRYDQFGHAGVNQQSGFGGTGGFEDIFDTFFGGGTSRGSNRSRASRGSDLEYTLEITLEEAFFGVEKEITIPRMESCDSCDGTGSKSRSKTTCHACHGQGTIRRQQGFFAFEQTCPVCNGTGYSITDPCDACYGNGKVKKQKTLKVKIPEGVDNGDRIRLQGEGDSGSNGAMNGDLYVQIIIKEHKIFERRDINLYCEMPISFTKACLGGDIKVPTLDGEVVLKVVPETQTGKVFRLREKGMKSLRGHRRGDLLCKVVVETPVNLSAEQKELLEKFADSLGEDYQSKHAPKSKTWFDNVKDYAKKFFE

SEQ ID NO: 8088 - protein, 323 aa, Musa acuminata
MAIRSPASLLLFAFLMLALTGRLQARRSSCIGVYWGQNTDEGSLADACATGNYEYVNIATLFKFGMGQTPEINLAGHCDPRNNGCARLSSEIQSCQERGVKVMLSIGGGGSYGLSSTEDAKDVASYLWHSFLGGSAARYSRPLGDAVLDGIDFNIAGGSTEHYDELAAFLKAYNEQEAGTKKVHLSARPQCPFPDYWLGNALRTDLFDFVWVQFFNNPSCHFSQNAINLANAFNNWVMSIPAQKLFLGLPAAPEAAPTGGYIPPHDLISKVLPILKDSDKYAGIMLWTRYHDRNSGYSSQVKSHVCPARRFSNILSMPVKSSK

SEQ ID NO: 8089 - protein, 294 aa, Vigna angularis
MACLKQVSALLLPLLFISFFKPSHAGGISVYWGQNGNEGSLADACNTGNYKYVNIAFLFTFGGGQTPQLNLAGHCNPSINNCNVFSDQIKECQSKDIKVLLSLGGASGSYSLTSADDATQVANYIWNNFLGGQSSSRPLGDAILDGVDFDIESGTGEHWDDLARALKGFNSQLLLTAAPQCPIPDAHLDTAIKTGLFDIVWVQFYNNPPCQYSSGNTNDLISSWNQWTSSQAKQLFLGVPASTAAAGSGFIPADVLTSQVLPTIKGSSKYGGVMLWDRFNDGQSGYSGAIIGSV

SEQ ID NO: 8090 - protein, 60 aa, Passiflora kalbreyeri
WEYQVGPSVGIDAGDHIWCSRYILERITEQAGVVLTLDPKPIEGDWNGAGCHTHYSTKSR

SEQ ID NO: 8091 - protein, 786 aa, Coccidioides immitis RS; identical to SEQ ID NO: 577

SEQ ID NO: 8092 - protein, 477 aa, Solanum tuberosum
MATATTLSPADAEKLNNLKSAVAGLNQISENEKSGFINLVGRYLSGEAQHIDWSKIQTPTDEVVVPYDKLAPLSEDPAETKKLLDKLVVLKLNGGLGTTMGCTGPKSVIEVRNGLTFLDLIVKQIEALNAKFGCSVPLLLMNSFNTHDDTLKIVEKYANSNIDIHTFNQSQYPRLVTEDFAPLPCKGNSGKDGWYPPGHGDVFPSLMNSGKLDALLAKGKEYVFVANSDNLGAIVDLKILNHLILNKNEYCMEVTPKTLADVKGGTLISYEGKVQLLEIAQVPDEHVNEFKSIEKFKIFNTNNLWVNLSAIKRLVEAVALKMEIIPNPKEVDGVKVLQLETAAGAAIKFFDRAIGANVPRSRFLPVKATSDLLLVQSDLYTLTDEGYVIRNPARSNPSNPSIELGPEFKKVANFLGRFKSIPSIIDLDSLKVTGDVWFGSGVTLKGKVTVAAKSGVKLEIPDGAVIANKDINGPEDI

SEQ ID NO: 8093 - protein, 189 aa, Metschnikowia pulcherrima
IMVYWGQNSGGDQERLRHTCERDSVDTVILSFLTDFPKMKLNFSNMCSKAFRSGLLHCRDISDDIKYCQLRGKTVLLSLGGDSGKYGFESDAEARDFAHTMYDTFGPGFTEERPFDDAVVDGYDFNMETEGIGYVAFAQELNRLHANMKRFYLTASPQCPFPDQALNDVLTNAQISALYIQFYNNYYCS

SEQ ID NO: 8094 - protein, 371 aa, Bacillus cereus ATCC 14579
MSKRDYYEVLGLSKGASTDEIKKAYRRLAKKYHPDVSKEENAIEKFKEVQEAYEVLSDDQKRAQYDQFGHAGANQGFGGFGGGGDFGGGFGFEDIFSSFFGGGGGRRRDPNAPRQGADLQYQVTLDFEEAIFGKELNVEIPVEDPCDTCKGSGAKPGTSKETCKHCSGSGQVSVEQNTPFGRIVNRQACGHCSGTGQIIKEKCTTCHGSSKVRKRKKINVKIPAGIDNGQQIRVSGKGEAGVNGGPARDLYVVVHVRNHEFFEREGDHIICEMPLTFAQMALGDEVEVPTVHGKVKLKIPAGTQTGTEFRLKGKGAPNVRGYGQGDQYVVVRVVVPTKLTSQQKDLLREFAGQEEQDDSLFGKLKRAFKGE

SEQ ID NO: 8095 - protein, 194 aa, Metschnikowia pulcherrima
IMMYWGQNSGHHLGLSQQRLSHYCDKKHVDIVVISYLNEFPAMKMNLANMCWETFSSGLLKCPDVGKDITYCQEQGKIVLLSLGGDLGNYKFEDDKEARDFAQVLYNTFGPGKAQDRPFGKAVVNGYDLNLEKKSPGYAALATELNKLHKDMEIPYFLTATPQSPYPDENLKEALLSAPFHAIFIQFYNNYYCS

SEQ ID NO: 8096 - protein, 275 aa, Larix gmelinii var. principis-rupprechtii
WLTSVICEIWFAFSWVLDQFPKWNPVNRETYIERLSARYEREGEPSQLAGVDFFVSTVDPLKEPPLITANTVLSILAVDYPVDKVSCYVSDDGAAMLSFESLVETAEFARKWVPFCKKYSIEPRAPEFYFSQKIDYLKDKVQPSFVKERRAMKRDYEEYKVRVNALVAKAQKTPEEGWTMQDGTPWPGNNTRDHPGMIQVFLGNTGARDIEGNELPRLVYVSREKRPGYQHHKKAGAENALVRVSAVLTNAPYILNVDCDHYVNNSKAVREAMCI

SEQ ID NO: 8097 - protein, 375 aa, Xanthomonas campestris pv. vesicatoria str. 85-10
MSKRDYYEVLGVARGASDEELKKAYRRCAMKHHPDRNPGDAAAEAAFKECKEAYEVLSDGNKRRAYDAHGHAAFEHGMGGGGGPGGPDMGDIFGDIFGNIFGGGAAGPRAARRGADVGYVLELDLEEAVAGIERRIEIPTLVECAPCHGSGSEDGKVETCGTCHGRGQVRIQRGIFAMQQSCPHCDGRGTLIQNPCKTCHGAGRVEEDKVLSIKVPAGVDTGDRIRLAGEGEAGPAGTPPGDLYVEVRVREHAIFQRDGDDLHCEVPIRISQAALGDTVRVATLGGEAEIRIPAETQTGKLFRLRGKGVRSVRSRSEGDLYCRVVVETPVNLTADQRELLQQFEATFTGEDARKHSPKSATFIDGVKGFWDRMTS

SEQ ID NO: 8098 - protein, 189 aa, Metschnikowia pulcherrima
IMVYWGQNSGGGQVRLRHTCDRDAVDTVILSFLTSFPKMVLNFSNMCWQTFPDGLLHCKDIADDIKYCQLKGKTVLLSLGGASGTYGFSSDDEARQFAQTMYDTFGPGHTAERPFDDAVVDGYDFDMETSGVGYVAFAQELNRLHSHMKKFYLTAAPQCPYPDRALGDVLSSAQMSAVYIQFYNNYYCS

SEQ ID NO: 8099 - protein, 274 aa, Phytolacca americana
GGIAIYWGQNGGEGTLRDTCNSGLYSYVNIGFLSTFGNGQTPQLNLAGHCDPSSGGCKQLSNSIKQCQSQGIKVMLSIGGGGGSYSIASADEGRNVANYLWDNFLGGQSSNRPLGDAILDGIDFDIEQGTDNYVTLAKTLSQHGQQSGRKVYLTAAPQCPFPDHWLNKGLKTGLFDFVWVQFYNNPQCNFDAGNPQGFKDAWNQWTSQIPAQKFFVGLPASRAAAGNGFVPSQTLINQVLPFVKGSGQKYGGVMLWDRFNDKNSGYSTRIKGSV

SEQ ID NO: 8100 - protein, 86 aa, Glycine albicans
INISGTNGEVMPGQWEYQVGPSVGIEAGDHIWASRYILERITEQAGVVLSLDPKPIEGDWNGAGCHTNYSTKSMREDGGFEVIKKA

SEQ ID NO: 8101 - protein, 172 aa, Vitis vinifera
MDHNETGCQAPPEAPILCINNCGFFGSAATMNMCSKCHKDLVLKQEQAKLAASSFESIVEGSSNCNAKESMVAIAKADIIQTGPSESMPVPTQAACASPSETNDRVKEGPNRCSSCRKRVGLTGFNCRCGNIFCAVHRYSDKHACPFDYRTAARDAIAKSNPVIKPEKLDKI

SEQ ID NO: 8102 - protein, 58 aa, Passiflora kawensis
WEYQVGPSVGIEAGDHIWCSRYILERITEQAGVVLTLDPKPIDGDWNGAGCHTNYSTK

SEQ ID NO: 8103 - protein, 336 aa, Oryza sativa Japonica Group
MAGMDPGGGGAGAGSSRYFHHLLRPQQPSPLSPLSPTSHVKMEHSKMSPDKSPVGEGDHAGGSGSGGVGGDHQPSSSAMVPVEGGSGSAGGSGSGGPTRRPRGRPPGSKNKPKPPIIVTRDSPNALHSHVLEVAGGADVVDCVAEYARRRGRGVCVLSGGGAVVNVALRQPGASPPGSMVATLRGRFEILSLTGTVLPPPAPPGASGLTVFLSGGQGQVIGGSVVGPLVAAGPVVLMAASFANAVYERLPLEGEEEEVAAPAAGGEAQDQVAQSAGPPGQQPAASQSSGVTGGDGTGGAGGMSLYNLAGNVGGYQLPGDNFGGWSGAGAGGVRPPF

SEQ ID NO: 8104 - protein, 210 aa, Carmichaelia sp. 'Lavin 6201'
YDRVMAYKFHEDDHGEVIAEVKKPGLEPYLGLHYPATDVPQAARFLFMKNKVRIIVDCSAKRVKVIQDKNIPFDLTLCGSTLRAPHNCHLQYMDNMKASASLVMAVVVNDSNEDGDSSDAVQPQKRKRLWGLVVCHHITPKFVPFPLRYACEFLAQVFAIHVNKEIELEYQVIERNILRTQTLLCDMLMRDAPLGIISQSPNIMDLVKCD

SEQ ID NO: 8105 - protein, 500 aa, Zea mays
MRYFELDFQYPIGSKRRRSCLCSVHIRLTSLEESWELLPLPEASALVARPGSSPPGLLYPDASHFPFCLLPSPPPYQTNLTESQLARTVKTPKRARARQPKRRSAKEGRKEASKAAAMGLDYYKILGVDKGATDDDLKKAYRKLAMKWHPDKNPNNKKEAENKFKQISEAYDVSVRASGEIHAGLTAQSSECRDPLLLYVVAVQVLSDPQKRAVYDQYGEEGLKGQVPPPGAGGAGSTFFSTGGDGPTVFRFNPRNADDIFAEFFGGSSPFGGMGGSGMPGMRAGGSRFSSSIFGDDMFGSAFGGGGPDGHGMHTGGRAVKAPAIERKLPCSLEELYKGTTKKMKISREIADASGKTMPVEEILTIDVKPGWKKGTKITFPEKGNETPHTIPADLVFIIDEKPHPVFTRDGNDLVVTQKVPLAEALTGHTARLATLDGRILTVPISSVIHPGYEEVVRGEGMPVPKDPSRKGNLRIKFDIKFPARLSADQKSGVKRLLGQ

SEQ ID NO: 8106 - protein, 95 aa, Oxalis tuberosa
LYAGINISGTNGEVMPGQWEYQVGPSVGIEAGDHIWASRYILERITEQAGVVLTLDPKPIDGDWNGAGCHTNYSTKSMRDEGGFEVTKKAILNLS

SEQ ID NO: 8107 - protein, 376 aa, Azoarcus sp. EbN1
MAKRDYYEVLGVNRDASDNEIKKAYRKLAMKHHPDRNPDNKDSEDHFKEAKNAYEILSDAQKRAAYDRYGHAGVDPSAGAGPGGQGFDGFADAFSDIFGDIFGGAGGAGRGRSNVYRGADLRYNLEISLEEAARGADKTIRIPTVEECETCHGSGAKPGTQPKPCPTCGGAGQVRIQQGFFSIQQTCPKCHGTGRIIPDPCRDCGGAGRVKRQKTLEVKIPAGIDEGMRLRHAGHGEPGVNGGPPGDLYVEIHIRAHPVFQRDHDDLHCEMPISITTAALGGEIEIPTLEGMARLKIPAETQSGKVFRLRGKGIRNVRSQAHGDLMCHVVVETPVNLTERQKELLREFEEVSSSDADRHNPKAKSWMDKVKDFFGA

SEQ ID NO: 8108 - protein, 136 aa, Chlamydomonas reinhardtii
MCTSEGRRASGCRSLGLYDVLGVPIKASSEEIRGAFLRLARVWHPDRHGGAENAKRKFQSIQYAYEVLSNETRRAHYDLQWLDLLDVEDYLNRFKDLILTANGLGMSLSGSGAGSHSEGDWGPTSTPLCGAPIKAA

SEQ ID NO: 8109 - protein, 329 aa, Sinorhizobium meliloti
MTKYKLEYIWLDATRPYQTLRGKTQIKEFDAFPTLEQLPLWGFDGSSTLQAEGRTSDCVLKPVTVYPDPVRTNGALVMCEVMMPDAETPHASNTRATVLDDEGAWFGFEQEYFFYKNGRPLGFPEQGYPAPQGPYYTGVGYKNVGDVARQIVEEHLDICLAAGINHEGINAEVAKGQWEFQIFGKGSKKAADEVCVARYLLVRLTEKYGIDVEFHCKPLGDTDWNGSGMHANFSTAYLREVGGQDYFEALMAAFEKNLHDHINVYGPDNHLRLTGKHETAPWDKFSYGVADRGASIRVPHSFVNNAYPGYLEDRRANSQGDPYQMLLSS

SEQ ID NO: 8110 - protein, 200 aa, Dunaliella tertiolecta
PKWNFDGSSTGQAPADDSEVYLVPRAIYKDPFRMGDNIMVMCETYEPPREKKDGTMNPLKPRPPTRALGCAQPMEKAKPQEPWFDIEQEYTLLNSVTKWPLGWPKGGYPAGQGPYYCSVGAGRSIRRDIPEVHYRSCLHAGIQISGVNGEVLPSQWEYQVGPVEGIAMGDQMWMSRYLMYRVAELFNVEVTFDPKPITGD

SEQ ID NO: 8111 - protein, 399 aa, Populus tremula x Populus alba
ALTLSVDLNLGTTLIFTGIYNILTGAIYGVPMPVQPMKSIAAVAISNSAEFGVPEIMAAGICTGGILLLLGVTGLMQLVYKLIPLSVVRGIQLSQGLSFAMSAVKYIRKVQDFSKSKSGGDRHWLGLDGLVLAIVCACFIIVVNGAGEEGSEREGDDINLGGRERPRKRGLRQIVASLPSAFMVFLLGVILAFIRRPGVVHDFKFGPSSIEAVKISKHAWKEGFVKGTIPQLPLSVLNSVIAVCNLSSDLFPGKDFSASSVSVSVGLMNLVGCWFGAMPCCHGAGGLAGQYKFGGRSGGCVALLGAAKLVLGLVLGSSLVMVLNQFPVGVLGVLLLFAGIELAMASRDMNTKEEAFVMLICSAVSITGSSAALGFLCGIAVHLLLKVRNWHNDQPCSTV

SEQ ID NO: 8112 - protein, 271 aa, Zea mays
MTAGQCGNIQDQEAAPGADLYAVLGLNRECTDAELRVAYRRLAMIWHPDRCSASGSSARVEEAKERFQEIQGAYSVLSDSNKRLLYDVGVYDSEDDDADLSGMGDFLGEMADMMSQATPTESFEELQQLFVDMFQDDLDGAGFFGGLPTSRSAQGPSSTSLPPSTSPLRPTPPARSKGAQTPSSFNGAGRRGSTAKRPRTGWAGLEPDLGLSGFCFMVSKSKERPAAWACDGGDERSGSKQRLSTSRDVSGSGGGMSRSRGRAKAVETCGQ

SEQ ID NO: 8113 - protein, 333 aa, Populus tremula x Populus alba
LLLGVTGLMQLVYKLIPLPVVRGIQLSQGLSFAMTAVKYIRNVQDFSKSKSGGDRHWLGLDGLVLAIVCACFVVVVNGAGEEGSDQRDGDDINLDGRERPKRRGPRQIVASLPSAFMVFLLGVILAFIRRPGLVRGLKFGPSSIEVVKISKHAWKEGFIKGTIPQLPLSVLNSVIAVCKLSSDLFPGKDFSASSVSVSVAMMNIVGCWFGAMPCCHGAGGLAGQYKFGGRSGGCVALLGAAKMLLGLVLGSSLVMVLKQFPVGVLGVLLLFAGIELALASRDMNTKEEAFVMLICAAVSLVGSSAALGFVCGIIVHVLLYLRNWQKEQPCPVL

SEQ ID NO: 8114 - protein, 286 aa, Ipomoea trifida
FYVAEVLLALEYLHMLGVVYRDLKPENILVREDGHIMLSDFDLSLRCAVNPKLLKSSSPVGQPPKKMSSPCSDSSCIEPFCLHPSWQVSCFTPRFLSAAAKTRKLKADIAAQVTPLPQLVVEPTSARSNSFVGTHEYLAPEIIKGEGHGSAVDWWTFGIFMYELLYGRTPFKGTTNEDTLGNVVSQCLKFPETPMISSHARDLIRRLLQKEPENRLGSSKGATEIKNHSFFEGLNWALIRCATPPEMPRIFDLGNLISDTNSQKKQGGKCQKEGTSGEENIEFEMF

SEQ ID NO: 8115 - protein, 332 aa, Populus tremula x Populus alba
LLLGVTGLMQLVYKLIPLPVVRGIQLSQGLSFAMTAVKYIRNVQDFSKSKSGGDRHWLGLDGLVLAIVCACFVIVVNGAGEEGGERDGDDINLDGRERPKRRGPRQIVASLPSAFMVFLLGVILAFIRRPGVVRGFKFGPSSIEVVKISKHAWKEGFIKGTIPQLPLSVLNSVIAVCKLSSDLFPGKDFSASSVSVSVAMMNIVGCRFGAMPCCHGAGGLAGQYKFGGRSGGCVALLGAAKMLLGLVLGSSLVMVLKQFPVGVLGVLLLFAGIELALASRDMNTKEEAFVMLICAAVSLVGSSAALGFVCGIIVHVLLYLRNWQKEQPCPVL

SEQ ID NO: 8116 - protein, 855 aa, Ralstonia eutropha JMP134
MRLPSVSGMWEALRRQLARELGISVSAPAGLWWLRLLFRAPPPGRPDVPLHCAVWLSERAHVRLEIGRAHGARIWLQRLLLRAPRAIRPLAADLRQRRQPQAAPEPSALRRWFRSWLEPAYFRVKRLRHRLMARLPTVDWHGIANRLEALSPTLGQVPLLMPILLVLAAVSGILLCTTPLPLRDQFLLVVLILTGLFFLRRIPGRLATLSMAALSVLMAGRYIWWRLTTTLRFETTVEAVFGYLLLIAELYTWIVLFLGYLQTIWPLNRRPAALSPDPADWPTVDVFIPTYNEPLRVLQPTVYAARSMDWPAGKMNVYVLDDGGREEIRAFAEEAGVHYLARDEHSHAKAGNINSALKQTAGEYVAIFDCDHIPTRSFLQMTMGEFLADPNCAMVQTPHHFFSPDPFERNFDTFRRVPNEGSLFYGLIQDGNDFWNATFFCGSCAVIKRAPLTEIGGIAVETVTEDAHTALKLHRLGYNSAYLRTVQAAGLATENLAGHIGQRIRWARGMAQIFRIDNPMFGKGLHLFQRLCYSNAMLHFFYGIPRLIFLTMPIAYLYFGLHVIHTSAVLLMAYVIPYLMVASITNSRLQGRYRHSFWAEVYESVLAWYIVLPTTMAFVNPRLGKFNVTAKGGQIEEDYLDWTISKPYVLLLALNVVGLALGAGRVLFDDSFEASAVIMNMGWALFNLVMLGAAIGVAREARQVRISHRIPMRVPATLLLPDGRTLACRTENYSLGGLGLMLPVETRVDPGEQVGVCLSRGKRSYHFPAVVTRNADRHLGVRFEDMDALAEQQLIQCTFGRADAWINWIDEQPVDVPLNGLKEVIEMGYQGLLRLVDAARASVAGIFGRVGPRQP

SEQ ID NO: 8117 - protein, 441 aa, Zea mays
MAGPKFGSFKAEKGDSAAAAGAAAQRRDPYEVLGVGRNATEQEIKSAFRRMALKYHPDKNSDDPVASEKFQEATFSYNILSDPDKRRQYDASGFEAIEADSQELELDLSSLNTVNTVFAALFSKLGVPIKTTVSATVLEEALNGSVEISQLQLGKSLCRKVEKQSAHFYSVDITDKEAKMGLVCRVHSTSKSKFKLLYFELEDNGGLSLALQEDSAKTGKVTSAGMFFLGFPVYRFEQNNSAAAAKDPDSAFFKRLDGFQPCEVNELKAGSHYFAVYGDNFFKSASYTIEVVSAEPFSAQKEKLRSVEAKIIAKRSELSKFESEYREVLAKFTEMTSRYAQEMQTIDDLLKERNAIHASYTNNPTLQRSSSSSKGKSPSKGSRSEDDQTVKKEKKSKSQPMEGSKSDDEGPENKKEETPKDRIRRKKWFNIHLKVDKRRPC

SEQ ID NO: 8118 - protein, 151 aa, Glycine max
PNPKKVDGVKFLQLETAAGAAIRFFDKAIGINVPRSRFLPVKATSDLLLVQSDLYTLQDGLVIRNQARANPENPSIELGPEFKKVSNFLSRFKSIPSIVELDSLKVAGDVWFGAGVILKGKASILAKPGVKLEIPDGAVIADKEINGPEDL

SEQ ID NO: 8119 - protein, 86 aa, Glycine tomentella
INISGTNGEVMPGQWEYQVGPSVGIEAGDHIWASRYILKRITEQAGVVLSLDPKPIEGDWNGAGCHTNYSTKSMREDGGFEVIKKA

SEQ ID NO: 8120 - protein, 376 aa, Xanthomonas campestris pv. campestris str. ATCC 33913
MSKRDYYEVLGVARGASDEELKKAYRRCAMKYHPDRNPGDAAAEATFKECKEAYEVLSDGNKRRAYDAHGHAAFEHGMGGGGGGPGGPDMGDIFGDIFGNIFGGGAAGPRAARRGADVGYVLELDLEEAVAGIERRIEIPTLIECEPCHGSGSEDGKVEVCATCHGRGQVRIQRGIFAMQQSCPHCDGRGTLIQNPCKTCHGAGRVEEDKVLSIKVPAGVDTGDRIRLAGEGEAGPAGTPPGDLYVEVRVREHAIFQRDGDDLHCEVPIRISQAALGDTVRVATLGGEAEIRIPAETQTGKLFRLRGKGVRSVRSRSEGDLYCRVVVETPVNLTTDQRELLKQFEATFTGEDARKHSPKSATFIDGVKGFWDRMTS

SEQ ID NO: 8121 - protein, 87 aa, Glycine latifolia
INISGTNGEVMPGQWEYQVGPSVGIEAGDHIWASRYILERITEQAGVVLSLDPKPIEGDWNGAGCHTNYSTKSMREDGGFEVIKKAI

SEQ ID NO: 8122 - protein, 446 aa, Physcomitrella patens subsp. patens; identical to SEQ ID NO: 4376

SEQ ID NO: 8123 - protein, 272 aa, Brassica napus
  misc_feature (252)..(252): Xaa can be any naturally occurring amino acid
ARGDVDIRLPLLVYVSREKRPGYDHNKKAGAMNALVRASAIMSNGAFILNLDCDHYIYNSEAMREGMCFMMDRGGDRLCYVQFPQRFEGPAPSDRYANHNTVFFDVNMRALDGLMGPVYVGTGCLFRRIALYGFDPPRSKEHSSGCCSCCFPRPKKKSHVSEENRALRMDDDDDEEMTLSLVPKKFGNSTFLIDSIPVAEFQGRPLADHPSVKNGRPPGALTIPRELLDASTVAEAIAVISCWYEDKTEWGXRIGWIYGSVTEDVVTGYRMH

SEQ ID NO: 8124 - protein, 55 aa, Passiflora ligularis
  misc_feature (54)..(54): Xaa can be any naturally occurring amino acid
WEYQVGPSVGIDAGDHIWCSRYILEKITEQAGVVLSLDPKPIEGDWNGPGGHTXY

SEQ ID NO: 8125 - protein, 92 aa, Oxalis tuberosa
GINISGTNGEVMPGQWEYQVGPSVGTEAGDHIWASRYILERITEQAGVVLTLDPKPIDGDWNGAGCHTNYSTKSMRDEGGFEVIKKAILNLS

SEQ ID NO: 8126 - protein, 108 aa, Zea mays
MDGGSGNASSGGAAVCCYYALLGVRKSASATDIRTAYRRLAMKWHPDRWASDPGAAGEAKRRFQRIQEAYSVLSDKGKKAMYDAGLFDPLDDDDQVNEQMSFLLLIGL

SEQ ID NO: 8127 - protein, 561 aa, Oryza sativa Indica Group
MASAAAPKRCYYEVLGVPRDCSPADIKLAFRRLALSLHPDKQPPGSDVAAATAAFQELQHAHSVLSDPHERSYYDSHRSQILFSDHHPSSGPGRGGGVASASASPVPDLFAFFSSSAFSGFSDSGRGFYKVYGDVFDRVFAQELAYARRMGMPADAVPTPPWDAERGASRRVKRLHGGGQQEGDAQGAAGVQRRRERLAAFCKKRDKRVVDMALKKKAEEEKRKAEEAARKKEEERRRKERAMAYQEPEWARVDEDEAAVFEDEEEEETRAKRKEELYCVACNKKFKSDKQWKNHEQSKKHRDKVSELRMVFEEEEEALKDAEEEEPEEVDVGFDFQPAQESEESEFSDAAEELADELSEGLEVRDEEEKGDKHLGNGEQKVGSYDETSVLEEMLSRSRRKNRKSGFVAPQEEASPAGAMDDDDDEDTSYEINNVKKKGRRRRAAKKGGTYADNGQGRKSENQPEESRHNNDENGADDKMEGPSSNEDSAAASKEDQQKGKTGNTKKNKKGTEKNTTTISSEQKGTSKGKKQKEQVVFSLGRNRSCNAEDTTEKSLKRTRK

SEQ ID NO: 8128 - protein, 170 aa, Anabaena variabilis ATCC 29413
MPKSSEPTYYSLLGLHPSASVIDIRRAYRELSKRYHPDTTELPAALATRQFQQINEAYATLSNPDRRLNYDLKIGYSRFGVIQAPADLNRPASYTYDYSKSAYLDASDRPLSSGEIFALFILGLTLVGCLLLAITIAFIRGDALFPTPLQQSTATLQQSITYLSQICSLL

SEQ ID NO: 8129 - protein, 245 aa, Zea mays
  misc_feature (102)..(102): Xaa can be any naturally occurring amino acid
MTGFGSPCGACKFLRRKCVRGCVFAPYFCHEQGAAHFAAIHKVFGASNVSKLLAHLPLADRAEAAVTISYEAQARLRDPIYGCVAHIFALQQQVMTLQAQLXASLKAQAAQGQQGVHEDAKGYVGSAAAEQLGYGYPWCSGNGGAAAAAAGAVGAPAAQPGAYGNGAHESLTALLGSSDYMQQSLYHAFEQAGADDDDGRQGYAFEAAAESSSLGAEESGWRSSSGYQDCEDLQSVAYAYLNHRS

SEQ ID NO: 8130 - protein, 112 aa, Glycine max
  misc_feature (45)..(45): Xaa can be any naturally occurring amino acid
  misc_feature (50)..(50): Xaa can be any naturally occurring amino acid
PYSPQHSISISIQTLIAFLDFLVGRGFLLSFSDIRTAYRKLAMRXHPDKXALNPATAGEAKRRFQQIQEAYSVLSDQSKRSKYDAGLYDPLEEEDQVRKVFSFHFFSITIFI

SEQ ID NO: 8131 - protein, 332 aa, Synechocystis sp. PCC 6803
MASTDFKDYYQILGVTKTASEAEIKKQFRKLALKYHPDKNPGDKAAEEKFKEISEAYEVLSDPEKRQKYDQFGRYWQQAGTAGQPSGSYGPGVGVDFGGFDFSQYGNFDEFINELLGRFNTPGGGGQRTSYSYSTGGPGFNDFGGFGNAQAPAGDREATLQLTLAEAFRGVEKRLNLGEEMVTVRIPAGAKNGSRVRVRGKGMASPYGQRGDLYLNLQLTPHPFFQFEGDNLVCELAIAPDEAVLGADISVPTPDGMVRMKVPAGVKSGQSLRLKGKGWPNPKQGRGDQLVRLIITAPKNPSAIERECYEKIQAQRTENPRQAVEKYANLLA

SEQ ID NO: 8132 - protein, 210 aa, Enterolobium cyclocarpum
YDRVMAYKFHEDDHGEVIAEITKPGLEPYLGLHYPATDIPQAARFLFMKNKVRMIVDCHARHVKVLQDEKLPFELTLCGSTLRAPHTCHLQYMENMNSIASLVMAVVVNDNDEDVDSSDSIQPQKRKRLWGLVVCHNTTPRFVPFPLRYACEFLAQVFAIHVNKELELENQIVEKKILRTQTLLCDMLMRDAPLGIISQSPNIMDLVKCD

SEQ ID NO: 8133 - protein, 285 aa, Bradyrhizobium japonicum
RSELEQLPLWGFDGSSTQQAEGHSSDCVLKPVAVFPDAARTNGVLVMCEVMMPDGKTPHASNKRATILDDAGAWFGFEQEYFFYKDGRPLGFPASGYPAPQGPYYTGVGFSNVGDVARKIVEEHLDLCLAAGINHEGINAEVAKGQWEFQIFGKGSKKAADEMWMARYLMLRLTEKYGIDIEFHCKPLGDTDWNGSGMHANFSTEYMRTVGGKEYFEALMAAFDKNLMDHIAVYGPDNDKRLTGKHETAPWNKFSYGVADRGASIRVPHSFVNNGYKGYLMTEAP

SEQ ID NO: 8134 - protein, 470 aa, Zea mays
  misc_feature (409)..(409): Xaa can be any naturally occurring amino acid
MGRFRCLRHASRFLALQSGEVVLQRRAWIQPNTSCSSTGIYISNKFYDRFMLIPFVWSRSFHATDHRCSKHKDYYKILGVPKDASQDDIKKAFHSLAKKYHPDTNRGNTAAKRMFQEIRDAYETLRDPSKREQYDMLFSRGSRVEFDGSYHDTFSGSNNQRHNPFTEFRRQNDGHFSSKFYKIFSEVFPQDINTPANDIKVELNLSFSEAANGCIKQVSYHAKNVCDSCGGRGHLPNAKIYVCPSCKGLGRVTMYPFTSVCSSCRGIGKVIKDYCLTCQGSGVVGGMKHVTLDMPAGLDSGDTINVPEAGDSGGLGVQSGNLHIKIQVEIDPLFTRDGADIHVDKRISFTQAMLGGKVEVPTLNGKTEVKIPKGVQPGQVVVLRGKGLPNPSGYLGDQYVRFRIHFPSXVTERQRMLLEEFAVEEAAKEHNTFVAGNWWELVAENMTKQNVMVGIGILLLIHLMLSKAMN

SEQ ID NO: 8135 - protein, 358 aa, Lactuca sativa
MALLSDLVNLDLSSITDKIIAEYIWIGGSGMDLRSKARTLSGPVSDPSELPKWNYDGSSTGQAPGEDSEVIIYPQAIFKDPFRRGNHILVMCDAYTPAGEPIPTNKRAAAAKIFSNPEVEKEVTWYGIEQEYTLLQKDTNWPLGWPLGGFPGPQGPYYCGIGADKAFGRDIVDAHYKACLYAGVNISGINGEVMPGQWEFQVGPSVGIAAADQIWVARYILERITEIYGVVVSFDPKPIPGDWNGAGAHTNYSTKTMREEGGYEVIKKAIEKLGLRHKEHIAAYGEGNERRLTGRHETADINTFLWGVANRGASIRVGRDTEKEGKGYFEDRRPASNMDPYVVTSMIAETTILWDNKS

SEQ ID NO: 8136 - protein, 95 aa, Oxalis tuberosa
  misc_feature (81)..(81): Xaa can be any naturally occurring amino acid
  misc_feature (89)..(89): Xaa can be any naturally occurring amino acid
LYAGINISGTNGEVMPGQWEYQVGPSVGIEAGDHIWASRYILERITEQAGVVLTLDPKPIDGDWNGAGCHTNYSTKSMRDXGGFEVIKXAILNLS

SEQ ID NO: 8137 - protein, 151 aa, Phaseolus vulgaris
ARAGTPWPGNNTRDHPGMIQVFLGQSGGLDTEGNELPRLVYVSREKRPGFQHHKKAGAMNAPVRVSAVLTNGPFLLNLDCDHYINNSKALREAMCFMMDPNLGKNVCYVQFPQRFDGIDRNDRYANRNTVFFDINLRGLDGIQGPVYVGTS

SEQ ID NO: 8138 - protein, 279 aa, Borrelia hermsii DAH
MSKDYYNILGIHKNATIEEIKKAYKKLAIKYHPDKNKGNKFAEEKFKEINEAYEILSSPQKKANYDNFGSADFNNNFNTESFSKGFKNTGFHHFENFDLFSNIFGESTRGILKDKEITIKISLYDAYMGGRKSILINNEKIDINIPKGTIETTKLKFNGKGNIHPISGKRSNLIIKFEISSYKNFNLKERNLETKITVYPWEIALGSEKIFETIEGKKIKIKIPKDTKNGEILKLKGLGMPALGNTIKGDLKATLIIDVPKIINDEVKKIYERLKEIYN

SEQ ID NO: 8139 - protein, 424 aa, Hordeum vulgare subsp. vulgare; identical to SEQ ID NO: 640

SEQ ID NO: 8140 - protein, 1084 aa, Pinus radiata
MEASAGLVAGSHNRNEFVVIHGHEGPKPLNTLSGHVCQICGEDVGLNTDGELFVACNECGFPVCRPCYEYERREGNQSCPQCNTRYKRQKGSPRVEGDDDEEDVDDIEHEFNVEAQQRNRQQITEAMLHGRMSYGRGPDDENSQIAHNPELPPQIPVLANGHSVVSGEIPTSYYADNQLLANPAMLKRVHPSSEPGSGRIIMDPNRDIGSYGFGNVSWKERGDGYKSKENKSGQLDMTEGRYQYNGGFAPNEPEDYIDPDMPMTDEARQPLSRKVPIPSSKINPYRMVIVIRLIVLGIFLRYRLLNPVKNAYGLWATSIVCEIWFALSWILDQFPKWLPISRETYLDRLSLRYEREGEPSMLAPVDLFVSTVDPLKEPPLVTANTVLSILSVDYPVDNVSCYVSDDGASMLTFESLSETSEFARKWVPFCKKFDIEPRAPEIYFSQKIDYLKDKFQPTFVKERRAMKREYEEFKVRINRLVAKASKVPKEGWTMQDGTPWPGNNTRDHPGMIQVFLGHSGGLDTEGNELPRLVYVSREKRPGFQHHKKAGAMNALVRVSAVLTNAPFMLNLDCDHYINNSKAIREGMCFMMDPQVGRKVCYVQFPQRFDGIDRNDRYANRNTVFFDINMKGLDGIQGPVYVGTGCMFRRQALYGYGPPKGPKRPKMVTCDCLPCCGPRKKSPKKNSSKKSAGIPAPAYNLDGIEEGVEGYDDERALLMSQLDFEKKFGQSSAFVQSTLMENGGVPQTANPAELLKEAIHVISCGYEDKTEWGKELGWIYGSVTEDILTGFKMHTRGWRSIYCMPKRAAFKGSAPINLSDRLNQVLRWALGSVEIFMSRHCPIWYGYGGGLKWLERFAYINTIVYPFTSLPLIAYCTLPAVSLLTGKFVIPQISTFASLFFIALFISIFATGILEMRWSGVSIEEWWRNEQFWVIGGVSAHFFAVIQGLLKVLAGIDTNFTVTAKASDDGEFGELYAFKWTTLLIPPTTLLVINLVGVVVGVADAINNGFQSWGPLLGKLFFAFWVIVHLYPFLKGLMGRQNRTPTIVVIWSILLASVFSLFWVRIDPFLSKVKGPDTKQCGINC

SEQ ID NO: 8141 - protein, 522 aa, Metarhizium anisopliae
MPSLGFLKKKRTRDSNPDPSTSTPTSPVAATSPSKPFDSSTLQQRTSGSQAKTAPGTAPAPSQGSAATAAPASQQQQMNPANAQGGTFVTPLPMQTNQADSQSLPSINNLIHQPQNGASTNNYSSFNPAALGAQISHPPSASPGTDPGHMQQQQQQAYPQPAMQPQQQAGHLPDQQQQQYQQQQHEQRVHHQHQGSVTRVTKGKYSLGDFDILRTLGTGSFGRVHLVQSKHNQRFYAIKVLKKAQVVKMKQVEHTNDERRMLSDVKHPFLITLWGTFQDWKNLYMVMDFVEGGELFSLLRKSGRFPNPVAKFYAAEATLALEYLHSKNIIYRDLKPENLLLDRHGHLKITDFGFAKRVPDKTWTLCGTPDYLAPEVVSNKGYNKSVDWWSLGILIYEMLCGYTPFWDSGSPMRIYENILKGKVKYPAYINTDAQNLLERLITSDLTKRLGNLYGGSQDVKNHPWFSEVTWDRLARKDIDAPYTPPVKAGTGDASQFDRYPEDPEKYGGIGGSDEYGHMFTDF

SEQ ID NO: 8142 - protein, 230 aa, Neisseria gonorrhoeae FA 1090
MDKDLYAVLGVSPQAGADEIKRAYRKLAMKYHPDRNPGNLQAEEKFKEIQRAYDTLSDLSKRTQYDASFRRHEERGRQEEAFRREQARREQFYGEQMRREQAFRREFERQASRSRHAYEPSGSGSGRNYILAAYILFGLGAIIQFMPIVGVILAYMKRNSLDSIVYAAHTEYLIKTFWRTFWLYLLGALTARFGIGVLVIIATTVWYFYRIIAGFIRFNDGRAVAPEKWI

SEQ ID NO: 8143 - protein, 164 aa, Zea mays
AKVLCTSPCFYVTIYINITNKVLLDQFFDHAIGINVPRSRFLPVKATSDLKLVQSDLYTLVDGFVTRNSARTNPSNPSIELGPEFKKVGSFLGRFKSIPSIVELDILKVSGDVWFGSGIVLKGKVTITAKPGVKLEILDGAVIGNKDNFGKGKRKQYQMPYNLN

SEQ ID NO: 8144 - protein, 874 aa, Salmonella enterica subsp. enterica serovar Typhi str. CT18
MSALSRWLLIPPVSARLSERYQGYRRHGASPFSAALGCLWTILAWIVFPLEHPRWQRIRDGHKALYPHINAARPRPLDPARYLIQTLWLVMISSTKERHEPRWRSFARLKDVRGRYHQWMDTLPERVRQKTTHLEKEKELGHLSNGARRFILGVIVTFSLILALICITQPFNPLSQFIFLLLLWGVALLVRRMPGRFSALMLIVLSLTVSCRYIWWRYTSTLNWDDPVSLVCGLILLFAETYAWIVLVLGYFQVVWPLNRQPVPLPKEMSQWPTVDIFVPTYNEDLNVVKNTIYASLGIDWPKDKLNIWILDDGGRESFRQFARHVGVHYIARATHEHAKAGNINNALKHAKGEFVAIFDCDHVPTRSFLQMTMGWFLKEKQLAMMQTPHHFFSPDPFERNLGRFRKTPNEGTLFYGLVQDGNDMWDATFFCGSCAVIRRKPLDEIGGIAVETVTEDAHTSLRLHRRGYTSAYMRIPQSAGLATESLSAHIGQRIRWARGMVQIFRLDNPLFGKGLKLAQRLCYLNAMFHFLSGIPRLIFLTAPLAFLLLHAYIIYAPALMIALFVIPHMVHASLTNSKIQGKYRHSFWSEIYETVLAWYIAPPTLVALINPHKGKFNVTAKGGLVEEKYVDWVISRPYIFLVLLNLLGVAAGVWRYYYGPENETLTVIVSLVWVFYNLVILGGAVAVSVESKQVRRAHRVEIAMPGAIAREDGHLFSCTVHDFSDGGLGIKINGQAQVLEGQKVNLLLKRGQQEYVFPTQVVRVTGNEVGLQLMPLTTKQHIDFVQCTFARADTWALWQDSFPEDKPLESLLDILKLGFRGYRHLAEFAPPSVKVIFRSLTALIAWIVSFIPRRPERQAAIQPSDRVMAQAQQ

SEQ ID NO: 8145 - protein, 469 aa, Ostreococcus tauri
MTSAGAYEIREDEEGRVDASSAKCAGSSREETWVSGATGTAAATAARGASTLRARGRKFWDEFTWREASGSLGDLGTFLPLLIGMSIECGVDAGTTMLFTGAYNVLTAFLYEIPMPVQPMKTIAAVALGDDALNVNEIMTAGIFVSAIVLALGSTRMMDVFNRLTPLAVVQGMQVGLGLLLARKGFLLAVYKSGDAIEVREMLGTDGLIVTIVAMCAVMYVCSPEYPAACSQGELDTGEERRKPRRHYIPVALILVIIGIIMAMTKDRALDGLTMGPARPKILSASWSEAKRGVVHAGVPQLPLTTLNSVISVCALSKELFPNFPASPSSVATSVGVMNLVGCWVGAMPSCHGAGGLAAQYAFGARGGGSIVFLGVCKMFLGLVFGSSLVKLLGHFPKTILGVMLFSSSLELIGMGLKTKPGWQQHQKYLVMVTAAVTISTKSTAIGFAAGMSTHLLMEVQRRIEVPVG

SEQ ID NO: 8146 - protein, 350 aa, Glycine max
MGVDYYKILQVDRSAKDDDLKKAYRKLAMKWHPDKNPNNKKEAEAKFKQISEAYEVLSDPQKKAIYDQYGEEGLKGQVPPPDAGGAGTGTTFFSTGDMPGSFRFNPRNADDIFAEFFGFSSPFGGMGGRGGGGSGGGMRSRFPGGMFGDDMFASFGEGGGIHMSQGAPRKAAPIENKLPCTLEEIYKGTTKKMKISREIADASGKTMPVEEILTINVKPGWKKGTKITFPEKGNEQPNVTPADLVFIIDEKPHSVFARDGNDLVVTQKISLAEALTGYTVHLTTLDGRNLTIPINNVIHPTYEEVVPREGMPLPKDPSKKGNLRIKFNIKFPTRLTEEQKAGIRKLLNNA

SEQ ID NO: 8147 - protein, 1161 aa, Zea mays
MASGSRATPTRSPSSARPEAPRHAHHHHHSQSSGGSTSRAGGGAAATESVSKAVAQYTLDARLHAVFEQSGASGRSFDYSQSLRAPPTPSSEQQIAAYLSRIQRGGHIQPFGCTLAVADDSSFRLLAFSENSPDLLDLSPHHSVPSLDSSAPPHVSLGADARLLFSPSSAVLLERAFAAREISLLNPIWIHSRVSSKPFYAILHRIDVGVVIDLEPARTEDPALSIAGAVQSQKLAVRAISRLQALPGGDVKLLCDTVVEHVRELTGYDRVMVYRFHEDEHGEVVAESRRDNLEPYLGLHYPATDIPQASRFLFRQNRVRMIADCHATPVRVIQDPGLSQPLCLVGSTLRAPHGCHAQYMANMGSIASLVMAVIISSGGDDEQTGRGGISSAMKLWGLVVCHHTSPRCIPFPLRYACEFLMQAFGLQLNMELQLAHQLSEKHILRTQTLLCDMLLRDSPTGIVTQSPSIMDLVKCDGAALYYHGKYYPLGVTPTESQIKDIIEWLTVFHGDSTGLSTDSLADAGYLGAAALGEAVCGMAVAYITPSDYLFWFRSHTAKEIKWGGAKHHPEDKDDGQRMHPRSSFKAFLEVVKSRSLPWENAEMDAIHSLQLILRDSFRDAAEGTNNSKAIVNGQVQLRELELRGINELSSVAREMVRLIETATVPIFAVDTDGCINGWNAKIAELTGLSVEEAMGKSLVNDLIFKESEATVEKLLSRALRGEEDKNVEIKLKTFGSEQSKGPIFVVVNACSSRDYTQNIVGVCFVGQDVTGQKVVMDKFVNIQGDYKAIVHNPNPLIPPIFASDENTSCSEWNTAMEKLTGWSRGEVVGKFLIGEVFGNCCRLKGPDALTKFMVIIHNAIGGQDYEKFPFSFFDKNGKYVQALLTANTRSKMDGKSIGAFCFLQIASTEIQQAFEIQRQQEKKCYARMKELAYICQEIKNPLSGIRFTNSLLQMTDLNDDQRQFLETSSACEKQMSKIVKDASLQSIEDGSLVLEQSEFSLGDVMNAVVSQAMLLLRERDLQLIRDIPDEIKDASAYGDQCRIQQVLADFLLSMVRSAPSENGWVEIQVRPNVKQNSDGTNTELFIFRFACPGEGLPADVVQDMFSNSQWSTQEGVGLSTCRKILKLMGGEVQYIRESERSFFLIVLEQPQPRPAAGREIV

SEQ ID NO: 8148 - protein, 348 aa, Oryza sativa
  misc_feature (38)..(38): Xaa can be any naturally occurring amino acid
  misc_feature (130)..(130): Xaa can be any naturally occurring amino acid
MAAPRWIGPLLLLLLHFVAAVAGKSYYDVLQVPKGASXDQIKRSYRKLALKYHPDKNPNNEEANKRFAEINNAYEILTDQEKRKIYDRYGEEGLKQFQAQGGRGGGRGMNIQDIFSSFFGGGGGGMEEEXEEQIIKGDDVIVELDASLEDLYMGGSLKVWREKNVIKPAPGKRRCNCRNEVYHRQIGPGMYQQMTEQVCDQCANVKYVREGDFLTVDIEKGMQDGQEVSFFEEGEPKIDGEPGDLKFRIRTAPHERFRREGNDLHTTVTISLLQALVGFEKTIKHLDNHMVEIGTKGITKPKEVRKFKGEGMPLYQSNKKGDLYVTFEVLFPKTLTDDQKSKLKSILT

SEQ ID NO: 8149 - protein, 566 aa, Schizosaccharomyces pombe
MNELHDGESSEEGRINVEDHLEEAKKDDTGHWKHSGTAKPSKFRAFIRLHFKDSRKFAFSRKKEKELTSEDSDAANQSPSGAPESQTEEESDRKIDGTGSSAEGGDGSGTDSISVIKKSFFKSGRKKKDVPKSRNVSRSNGADTSVQREKLKDIFSPHGKEKELAHIKKTVATRARTYSSNSIKICDVEVGPSSFEKVFLLGKGDVGRVYLVREKKSGKFYAMKVLSKQEMIKRNKSKRAFAEQHILATSNHPFIVTLYHSFQSDEYLYLCMEYCMGGEFFRALQRRPGRCLSENEAKFYIAEVTAALEYLHLMGFIYRDLKPENILLHESGHIMLSDFDLSKQSNSAGAPTVIQARNAPSAQNAYALDTKSCIADFRTNSFVGTEEYIAPEVIKGCGHTSAVDWWTLGILFYEMLYATTPFKGKNRNMTFSNILHKDVIFPEYADAPSISSLCKNLIRKLLVKDENDRLGSQAGAADVKLHPFFKNVQWALLRHTEPPIIPKLAPIDEKGNPNISHLKESKSLDITHSPQNTQTVEVPLSNLSGADHGDDPFESFNSVTVHHEWD

SEQ ID NO: 8150 - protein, 195 aa, Malus x domestica
NSLVIIYWGQNGNEGTLVDACNSGNYQFVNIAFLTTFGNNQAPVLNLAGHCDPISSTCTGLSVDIRACQSQNIKVLLSIGGAVGSYNLTSADDARQVADYIWNNFLGGQSASRPLGDAVLDGVDFAIVIGGGQFYDELARLLNGHNRQAKTVYLAAAPQCPIPDAHLDGAIQTGLFDYVWVQFYNNPPCNRIPAA

SEQ ID NO: 8151 - protein, 459 aa, Saccharomyces cerevisiae
MSGSDRGDRLYDVLGVTRDATVQEIKTAYRKLALKHHPDKYVDQDSKEVNEIKFKEITAAYEILSDPEKKSHYDLYGDDNGAASSGGANGFGDEDFMNFFNNFFNNGSHDGNNFPGEYDAYEEGNSTSSKDIDIDISLTLKDLYMGKKLKFDLKRQVICIKCHGSGWKPKRKIHVTHDVECESCAGKGSKERLKRFGPGLVASQWVVCEKCNGKGKYTKRPKNPKNFCPDCAGLGLLSKKEIITVNVAPGHHFNDVITVKGMADEEIDKTTCGDLKFHLTEKQENLEQKQIFLKNFDDGAGEDLYTSITISLSEALTGFEKFLTKTFDDRLLTLSVKPGRVVRPGDTIKIANEGWPILDNPHGRCGDLYVFVHIEFPPDNWFNEKSELLAIKTNLPSSSSCASHATVNTEDDSNLTNNETISNFRIIHTDDLPEGIRPFKPEAQDSAHQKARSSYCCIQ

SEQ ID NO: 8152 - protein, 297 aa, Glycine max
MKTLNKASLILFPLLFLSLFKHSHAAGIAIYWGQNGGEGTLAEACNTRNYQYVNIAFLSTFGNGQTPQLNLAGHCDPNNNGCTGLSSDIKTCQDLGIKVLLSLGGGAGSYSLSSADDATQLANYLWQNFLGGQTGSGPLGNVILDGIDFDIESGGSDHYDDLARALNSFSSQRKVYLSAAPQCIIPDAHLDRAIQTGLFDYVWVQFYNNPSCQYSSGNTNNLINSWNQWITVPASQIFMGLPASEAAAPSGGFVPADVLTSQVLPVIKQSSKYGGVMLWNRFNDVQNGYSNAIIGSV

SEQ ID NO: 8153 - protein, 228 aa, Brassica napus
  misc_feature (220)..(220): Xaa can be any naturally occurring amino acid
MKQMRKSNLSIFAVVFSLFLVGIIMYNDNVKSIAYLTSSSPFSSLFEDGGAVELPPEECDLFTGKWVFDNKTHPLYKEEQCEFLTEQVTCLRNGRKDSLFQNWRWQPRDCSLPKFKARVLLEKLRNKRLMFVGDSLNRNQWESMVCLVQSVVAPGRKSLDQTGSLTTFQIQDYNATVEFYWAPFLVESNSDDPRKHSIIDRIIMPESIEKHAVNWKDVDXLVFNSYIW

SEQ ID NO: 8154 - protein, 68 aa, Vitis vinifera
MDPEGGSAGSCYYSVLGIRRDASSSDIRTAYRKLALKWHPDRWAKNQALAGEAKRRFQQIQEAYSGGW

SEQ ID NO: 8155 - protein, 822 aa, Coprinopsis cinerea okayama7#130
MFLFKLPARLRRRREDKTSHASAEGGPFALRTVLTRLVKSIPKRKRKAVANDLESFIHLFERYQSENHAQPEIDWDKVSVPRSEQIVQYKDLNDAEDVQPLHRLAVLKVNGGLGTSMELSGAKGALEVQNKLSFIDLAIRQIQTLNATEGVDIPLLFMTSFNTEEDTNRIIRKYAKGPTKISTFSQSRYPRLDVESLLPIAKPRQDDRQTRYPPGHGDLYNALVRSGTLDRLLAEGKEYLFVPNSDNLGATVDRRILRHMIETQTEFIMQITEKTKADIKGGTLVDYEGTLRLLELAQVPTQHVEEFTSAKNFKIFNTNNLWINLPVTSGSHVVRNEARVFETIPLIKLGDHFKHISQFDKRFKQIPSIIDFDHLTVSGDVYFGRDVTLRGTVIITANEGQVVHIPDGVDIRKSDHDGTIIVLSRTYSRRPSRSIYFQDQQLAKDCIRPHFTVNQRLILTMAATRSSARLALKANAMQTSEETISSPANSSNGKRKNNNAALKAPAFKKSKTQTGAGSTTVGSTANPQTTRAPSDTNADAPVPAVLSFDFNEAMRHLITVDPRFQDLGQQISWKAARSITHKFIRLYSPSIPEEVTDESRAAAMQVFPTPEQVSKTEVSLLRTAGLSERKAQYIQDLAARFADGRLSTDKLLNASDEELAEMLIEVKGIGRWTVDMFAIFSLRRPDILPVGDLGVQRGLARWFLSLHSPAHTYTLSPEKVDASTSFQRRKTNHASNDVEDDALPTVASSANKLEGGEAAAIGGVNRDGDTMTSDTSASTLLPPPFTPSIQKTLSKAPEKAVPLPTGITISLLKSRLDGKKVK

SEQ ID NO: 8156 - protein, 566 aa, Aspergillus nidulans FGSC A4
MATKDLPTHLSSNTGFGKHHGKTQSHMVSSVLCLCVDSFSGFRGAWKAPPAMTDASGYAICSQDVMSQTALQLCSLGTQAFENASTSVAASQMRNALNALAETVPDPNERKRFEAEMDNFFALFRRFLNDKAKGNVVNWDRIAPPQPSQVVNYDDIGKESSVEFLNKLAVVKLNGGLGTSMGCVGPKSVIEVREGMSFLDLSVRQIEHLNRTYNVNVPFVLMNSFNTDQDTQSIIKKYQGHNVDIITFNQSRYPRIIKDSLLPAPKSFDAPLQDWYPPGHGDVFESLYNSGTLDKLLERGVEYIFLSNADNLGAVVDTRILQHMIDTKAEYIMELTDKTKADVKGGTIIDYEGKVRLLEIAQVPKEHVNEFKSIKKFKYFNTNNIWMNLRAIKRVVEENELEMEIIANEKSIPADKKGEADQAIYQLETAVGAAIRHFKNAHGVNVPRRRFLPVKTCSDLLLVKSDLYRLEHGQLVMDPNRFGGVPVIKLGSDFKKVSDFQKRIPSIPRIVELDHLTITGAVNLGRNVTLKGTVIIVATEGSTIDIPPGSVLENCVVQGSLRILEH

SEQ ID NO: 8157 - protein, 180 aa, Rhizobium gallicum bv. gallicum
DFDAFPALEQLPLWGFDGSSTMQAEGRSSDCVLKPVAVYPDPARTNGALVMCEVMMPDGVTPHPSNSRATILDDEDAWFGFEQEYFFYENGRPLGFPEQGYPAPQGPYYTGVGYKNVGSVAREIVEEHLDLCLAAGINHEGINAEVAKGQWEFQIFGKGFKRAADQIWMARYLLLRLCEK

SEQ ID NO: 8158 - protein, 281 aa, Bradyrhizobium japonicum
NELEQLPLWGFDGSSTQQAEGHSSDCVLKPVAVFPDAARTNGVLVMCEVMMPDGKTPHASNKRATILDDAGAWFGFEQEYFFYKDGRPLGFPASGYPAPQGPYYTGVGFSNVGDVARKIVEEHLDLCLAAGINHEGINAEVAKGQWEFQIFGKGSKKAADEMWMARYLMLRLTEKYGIDIEFHCKPLGDTDWNGSGMHANFSTEYMRTVGGKEYFEALMAAFDKNLMDHIAVYGPDNDKRLTGKHETAPWNKFSYGVADRGASIRVPHSFVNNGYKGYLMS

SEQ ID NO: 8159 - protein, 55 aa, Passiflora mathewsii
WEYQVGPSVGIDAGDDIWCSRYILERITEQAGVILSLDPKPIEGDWNGAGCHTNY

SEQ ID NO: 8160 - protein, 452 aa, Physcomitrella patens subsp. patens; identical to SEQ ID NO: 4411

SEQ ID NO: 8161 - protein, 375 aa, Bradyrhizobium sp. BTAi1
MSTKRCYYETLEVERDADETKLKAAFRKLAMKWHPDKNPGDASSEVKFKEINEAYEVLRDADKRAAYDRYGHAAFEQGAGGPHGFGAGFASSFSDIFEDLFGMAGQRRGGTGRERGADLRYNMEITLEEAFQGKTAQIEIPVSVTCESCSGTGAKAGTKPKTCAMCGGAGRVRQAQGFFTLERTCPGCHGRGQMIEDPCPSCSGSGRVTRDRTLSVNIPQGVEDGTRIRLAGEGEAGLRGGPPGDLYIFLSLSQHEFFQRDGADLHCRVPISMVTAALGGEFEVPTIDKGKTKVKIPAGAQSGRRFRIASKGMPVLRSRQTGDMYVQIVVETPQNLTKKQQELLAEFEKLSSGATQPEAAGFFTKVKDFFGKAAS

SEQ ID NO: 8162 - protein, 358 aa, Glycine max
MTIHSVVIQKLLSTNAQVGRRVAAHHLKEFTYGFRNKMATIDSDKTLICMRSACNFMASLARHNGRFMFINTNPLFDEIFDLMTKKVGSYSPSTNSLWRTGGFLTNSLSPKKFRSRNKKLVFGPTQPPDCIFIVDTERKSSVINEAFKLQIPVVALVDSAMPLDVYKRIAYPVPANHSVQFVYLFCNLITKTLLHEKAKSDAANPDIDAQMEEAPRKGKGKTYLDKVDVTVVLYDNLAPLPQDIEETKKLLDKLVVLKFNGSQGRNMCFDGPKSAIDICDGLTYLDLIINQIETLNSKYGSRVPLLLFNKDDIHDSSLKVLEKYSKSSVEVHTFKQGEDRELKSLGEYYSKEEVYVIL

SEQ ID NO: 8163 - protein, 212 aa, Bradyrhizobium betae
DGYAPTPNLRGKTQIKEFASFPTLEQLPLWGFDGSSTQQAEGRSSDCVLKPVAVFPDAARTNGVLVMCEVMMPDGKTPHATNKRATILDDAGAWFGFEQEYFFYKDGRPLGFPVSGYPAPQGPYYTGVGFSNVGDVARKIVEEHLDLCLAAGINHEGINAEVAKGQWEFQIFGKGSKKAADEMWMARYLMLRLTEKYGIDIEFHCKPLGDTD

SEQ ID NO: 8164 - protein, 144 aa, Linum usitatissimum
GFKMHCHGWRSVYCIPKRPAFKGSAPINLSDRLHQVLRWALGSVEIFFSKHCPIWYGYGGGLKWLERFSYINSVVYPWTSIPLLVYCTLPAICLLTGKFIVPEISNYASLVFMALFISIAATSILEMQWGKVGLDDMWRNEEFW

SEQ ID NO: 8165 - protein, 333 aa, Arabidopsis thaliana
MGVDYYNILKVNHNATEDDLKKAYKRLAMIWHPDKNPSTRRDEAEAKFKRISEAYDVLSDPQKRQIYDLYGEEGLKSGKIPNSSSSEHRPQHPPNASSFRFNPRDAEDIYAEFFGSENGGGSNNAGGRGNRAFRNGHFNTGGANGYSGEMRKVPAMENPLPVSLEDLYKGVVKKMRITRNVYDASGRMMVEAEILPIEIKPGWKKGTKLTFPKKGNEEPGIIPADIVFVVEEKPHPVYKRDGNDLLVSQEITLLEALTGKTVNLITLDGRTLMIPLTEIIKPDHEIVVPNEGMPISKEPGKKGNLKLKLSVKYPSRLTSDQKFELKRVLGGVS

SEQ ID NO: 8166 - protein, 1125 aa, Populus tremuloides
MSSSRPSHSSSNSARSRHSARIIAQTTVDAKLHADFEESGSSFDYSSSVRVTDSVGGDQPPRSDKVTTAYLHHIQKGKLIQPFGCLLALDEKTFRVVAYSENAPELLTMVSHAVPSVGEHPVLGIGTDIRTIFTAPSASALQKAMGFGDVSLLNPILVHCKTSGKPFYAIVHRVTGSLIIDFEPVKPYEVPMTAAGALQSYKLAAKAITRLQSLPSGSMERLCDTMVQEVFELTGYDRAMAYKFHDDDHGEVVSEVTKPGMEPYLGLHYPATDIPQASRFLFMKNKVRMIVDCHAKHVKVLQDEKLPFDLTLCGSTLRAPHSCHLQYMENMNSIASLVMAVVVNDGDEDGDTPDSANPQKRKRLWGLVVCHNTSPRFVPFPLRYACEFLAQVFAIHVNKELELENQIVEKNILRTQTLLCDMLMRDAPLGIVTQSPNIMDLVKCDGAVLFYRNKIWRLGITPSDLQLQDIAFWLSEYHMDSTGLSTDSLYDAGYPGALALGDVVCGMAAVRITSKDMLFWFRSQTAAEIRWGGAKHEPGEKDDGRRMHPRSSFKAFLEVVKTRSLPWKDYEMDAIHSLQLILRNTFKDIETMDVDTKTIHARLSDLKIEGMQELEAVTSEMVRLIETATVPILAVDVDGLVNGWNTKISELTGLLVDKAIGKHLLTLVEDSSVDIVKRMLFLALQGKEEQNIQFEIKTHGSKSECGPICLVVNACASRDLHENVVGVCFVGQDITGQKMVMDKFTRIEGDYKAIVQNRNPLIPPIFGTDEFGWCSEWNPAMTNLTGWKREEVLDKMLLGEVFGLNMACCRLKNQEAFVNLGVVLNTAMTGQESEKVSFGFFARTGKYVECLLCVSKKLDREGAVTGVFCFLQLASQELQQALHVQRLSEQTALKRLKALAYLKKQIWNPLSGIIFSGKMMEGTELGAEQKELLHTSAQCQCQLSKILDDSDLDSIIEGYLDLEMVEFTLREYYGCYQSSHDEKHEKGIPIINDALKMAETLYGDSIRLQQVLADFCRCQLILTPSGGLLTVSASFFQRPVGAILFILVHSGKLRIRHLGAGIPEALVDQMYGEDTGASVEGISLVISRKLVKLMNGDVRYMREAGKSSFIISVELAGGHKSQKRA

SEQ ID NO: 8167 - protein, 382 aa, Pyrococcus abyssi GE5
MKLKRQKPKEKFSYDPQKVLKKLEDLAWKILEEVKSGKNPYFDVPTRGLNNVYFDEEARLIKLGDKLSRRYFLNVAHARKFTQTLILMAYIKRLVSEGKHASLREAYYANKHTIPGTRENTFEDQSESDPIIEDLERMLGVLREEMHITADRRGYIYGDIVIKDGEDEFNASKLGTGGWAVPGTVEHIQFPEVNVDYVLVVETAAMADRLIEEKYPKKENCLIVATQGQASRGVRRLIHRLHYEEGLPIIVFTDGDPYGWYIYSTIKQGSINLAYLSEKLATPDAKFVGMTMDDIKEYNLEHVTEKLKGIPPDKKGGPTGDYKRLIEELNYPWFQNKEWQRQLKLALKWGVRIEQQALANKSLEFVAKEYLPEKIREGKLLP

SEQ ID NO: 8168 - protein, 95 aa, Oxalis tuberosa
  misc_feature (13)..(13): Xaa can be any naturally occurring amino acid
  misc_feature (28)..(28): Xaa can be any naturally occurring amino acid
LYAGINISGTNGXVMPGQWEYQVGPSVXIEAGDHIWASRYILERITEQAGVVLTLDPKPIDGDWNGAGCHTNYSTKSMRDEGGFEVIKKAILNLS

SEQ ID NO: 8169 - protein, 384 aa, Brachylophon curtisii
DLEPVNPADVPVTAAGALKSYKLAAKAISRLQSLPSGNISMLCDVLVKEVRDLTGYDRVMVYKFHEDEHGEVVSECRRPDLEAYLGLHYPATDIPQASRFLFMKNKVRMICDCLAPPVKVIQDERLPQPLSLCGSTLRSPHGCHAQYMANMGTIASLVMSVTINEDDDMMDGDQRQMARKLWGLVVCHHTSARFVPFPLRYACEFLIQVFGVQINKEVELAAQVREKHILRIQTLLCDMLLRDAPVAIITQSPNVMDLVKCDGAALYYKKKFWLLGITPTEAQIRDIAEWLLEYHNGNTGLSTDSLMEAGYPGASVLGDAVCGMAAVSITSRDFLFWFRSHTAKEIKWGGAKHDPDDKDDGRKMHPRSSFKAFLEVVKWRSLPW

SEQ ID NO: 8170 - protein, 189 aa, Dacrydium franklinii
DEHGEVVAEIRRSDLEPYLGLHYPATDIPQASRFLFMQNRVRMICDCSATPVQVIQSEELRQPLCLVGSTLRAPHGCHAQYMANMGSIASLVMAVVINGNDEEGAGTSGRSSMKLWGLVVCHHTSPRAVPFPLRYACEFLMQAFGLQLNMELQLAAQLTEKHILRTQTLLCDMLLRDAPIGIVTQSPSI

SEQ ID NO: 8171 - protein, 630 aa, Arabidopsis thaliana; identical to SEQ ID NO: 7283

SEQ ID NO: 8172 - protein, 388 aa, Floydia praealta
PYEVPMTAAGALQSYKLAAKAIARLQSLPSGSMDRLCDTLVQEVYELTGYDRVMAYKFHEDDHGEVVSEITRPGLEPYLGLHYPATDIPQAARFLFMKCKVRMICDCHSKHAKVLQDEKLTFDLTLCGSTLRAPHSCHLQYMENMGSIASLVMAVVINEGNEESESSGSLQPQRRKRLWGLVVCHNTTPRFVPFPLRYACEFLIQVFAIHVNKEIELENQILEKNILRTQTLLCDMLMRDVPLGIVSQSPNIMDLVKCDGAALLYKNKIWLLGLTPTEFQIHEIATWLSNSHMDSTGLSTDSLYDAGFPGSLSLADVVCGMAAVWINSNDLLFWFRSPTAAEVQWGGAKHDPNDKDDVRRMHPRSSFKAFLQVVKTRSLPWKDYEMDA

SEQ ID NO: 8173 - protein, 332 aa, Gonyaulax polyedra
MAGPQLDDFTLVKVLGKGSYGKVMLVRGAQDNRLYAMKMLRKENVIKRNQVEHTKTERSVLETVSHPFIVTLHYAFQTPKKLYMVMEYCPGGELFFHLSRAGRFSEGRTRFYVAETSSAVAYLHQLNVIYRDLKPENLLIDGEGHAKITDFGLRKEGIQDNHSAMTMCGTPEYLAPEILDKKGHGKAVDWYSVGALTYEMLTGLPPFYTKDLQKLFDRIRRGELTYPDYVSVLAKEFLRALLQRNPDARLAGGVPGGDEVKGHEFFGGLDWVALEKRAIPPPFKPTFGGQKEDDVVKYFEKDFVGQPVVNSEVGEGGRDLGHLEASTLTGKR

SEQ ID NO: 8174 - protein, 388 aa, Lambertia formosa
PYEVPMTAAGALQSYKLAAKAIARLQSLPSGSMDRLCDTVVQEVYELTGYDRVMAYKFHDDDHGEVVSEITKPGLEPYLGLHYPATDIPQAARFLFMKCKVRMICDCHAKHVRVLQDEKLTFDLTLCGSTLRAPHSCHLQYMENMSSIASLVMAVVINEGNEESESSGSLQSQKRKRLWGLVVCHNTTPRFVPFPLRYACEFLIQVFAIHVNKEIELENQILEKNILRTQTLLCDMLMRDAPLGIVSQSPNIMDLVKCDGAALLYTNKIWLLGLTPTESQIHEIATWLSNSHMDSTGLSTDSLYDAGFPGSLSLADVVCGMAAVRINSNDMLFWFRSPTAAEVQWGGAKHDPNDKDDGRRMHPRSSFKAFLEVVKTRSLPWKDYEMDA

SEQ ID NO: 8175 - protein, 388 aa, Roupala montana
PYEVPMTAAGALQSYKLAAKAIARLQSLPSGSMDRLCDTVVQEVYELTGYDRVMAYKFHEDDHGEVVSEITKPGLEPYLGLHYPATDIPQAARFLFMKCKVRMICDCHAKHVKVLQDEKLTFDLTLCGSTLRAPHSCHLLYMENMGSIASLVMAVVINEGNEESESSGSLQPQKRKRLWGLVVCHNTTPRFVPFPLRYACEFLIQVFAIHVNKEIDLENQILEKNILRTQTLLCDMLMRDAPLGIVSQSPNIMDLVKCDGAVLLYRNKIWSLGLTPTESQIHEIATWLSNSHMDSTGLSTDSLYDAGFPGSLSLADVVCGMAAVRINSNDMLFWFRSPTAAEVQWGGAKHDPNDKDDVRRMHPRSSFKAFLEVVKARSLPWKDYEMDA

SEQ ID NO: 8176 - protein, 410 aa, Skeletonema costatum
MKLAVTFLATIGPTGRFAPAANTVARTSALNMVQQLDLKTGQSQLDTSVVDRFSALPYPDDKVLAEYVWVDAKGECRSKTRTLPVARTEAVDKLPNWNFDGSSTDQAPGDDSEVILRPCRIFKDPFRPRAHGLDNNLVMCDTYTPAGEAIPTNTRAIAAKAFEGKEDEEVWFGLEQEFTPLQPRPTHSPRLAQEPVSQPRSGPYYSSAGPENSFGRAVTDAMYRCCLYAGLEISGTNGEVMPGQQEYQIGPCVGIDAGDQLFMSRYILQRVCEEFQVYCTLHPKPITDEDWNGAGMHTNDSTKSMREAGGLDIIKQAIYKLGAKHKEHIAIYGEGNELRLTGKFETASMDEFSFGVANRGASVRIGRDTEAEEMLGYFEDRKPQFPNADPYLVTGKRSWLPIIMEDIEVS

SEQ ID NO: 8177 - protein, 552 aa, Saccharomyces cerevisiae
MSLLYIILLFTQFLLPPTDAFDSSANTNIAVYWGQNSAGTQESLATYCESSDADIFLLSFLNQFPTLGLNFANACSDTFSDGLLHCTQIAEDIETCQSLGKKVLLSLGGASGSYLFSDDSQAETFAQTLWDTFGEGTGASERPFDSAVVDGFDFDIENNNEVGYSALRTKLRTLFAEGTKQYYLSAAPQCPYPDASVGDLLENADIDFAFIQFYNNYCSVSGQFNWDTWLTYAQTVSPNKNIKLFLGLPGSASAAGSGYISDTSLLESTIADIASSSSFGGIALWDASQAFSNELNGEPYVEILKNLLTSASQTATTTVASSKTSAASTSSASTSQKKTTQSTTSTQSKSKVTLSPTASSAIKTSITQTTKTLTSSTKTKSSLGTTTTESTLNAVAITSMKTTLSSQITSAALVTPQTTTTSIVSSASLQTAITSTLSPATKSSSVVSLQTATTSKLSPTTTSTSSGSTSSDSTARTLAKELNAQYAAGKLNGKSTCTEGEIACSADGKFAVCDHSAWVYMECASGTTCYAYDSGDSVYTQCNFSYLESNYF

SEQ ID NO: 8178 - protein, 388 aa, Carnarvonia araliifolia
PYEVPMTAAGALQSYKLAAKAIARLQSLPSGSMDRLCDTVVQEVYELTGYDRVMAYKFHEDDHGEVVSEITKPGLEPYLGLHYPATDIPQAARFLFMKCKIRMICDCHAKHVKVLQDEKLTFDLTLCGSTLRAPHSCHLQYMENMSSIASLVMAVVINEGNEESESSGSLQPQKRKRLWGLVVCHNTTPRFIPFPLRYACEFLIQVFAIHVNKEIELENQILEKNILRTQTLLCDMLMRDAPLGIVSQSPSIMDLVKCDGAALLYKNKIWLLGLTPTESQIQGIATWLSNSHMDSTGLSTDSLYDAGFQGALSLADVVCGMAAVRINSNDMLFWFRSPTAAEVQWGGAKHDPNDKDDGRRMHPRSSFKAFLEVVKTRSLPWKDLRWTP

SEQ ID NO: 8179 - protein, 87 aa, Glycine argyrea
INISGTSGEVMPGQWEYQVGPSVGIEAGDHIWASRYILERITEQAGVVLSLDPKPIEGDWNGAGCHTNYSTKTMREDGGFEVIKKAT

SEQ ID NO: 8180 - protein, 562 aa, Saccharomyces cerevisiae
MSLLYIILLFTQFLLLPTDAFDRSANTNIAVYWGQNSAGTQESLATYCESSDADIFLLSFLNQFPTLGLNFANACSDTFSDGLLHCTQIAEDIETCQSLGKKVLLSLGGASGSYLFSDDSQAETFAQTLWDTFGEGTGASERPFDSAVVDGFDFDIENNNEVGYSALRTKLRTLFAEGTKQYYLSAAPQCPYPDASVGDLLENADIDFAFIQFYNNYCSVSGQFNWDTWLTYAQTVSPNKNIKLFLGLPGSASAAGSGYISDTSLLESTIADIASSSSFGGIALWDASQAFSNELNGEPYVEILKNLLTSASQTATTTVATSKTSAASTSSASTSSASTSQKKTTQSTTSTQSKSKVTLSPTASSAIKTSITQTTKTLTSSTKTKSSLGTTTTESTLNSVAITSMKTTLSSQITSAALVTPQTTTTSIVSSAPIQTAITSTLSPATKSSSVVSLQTATTSTLSPTTTSTSSGSTSSGSTSSDSTARTLAKELNAQYAAGKLNGKSTCTEGEIACSADGKFAVCDHSAWVYMECASGTTCYAYDSGDSVYTQCNFSYLESNYF

SEQ ID NO: 8181 - protein, 85 aa, Arabidopsis thaliana
  misc_feature (35)..(35): Xaa can be any naturally occurring amino acid
TRAATIENFLKLKSAADGLTGISESEKSGLISRVXRYLSGGAHHIGGGRIQTPTVEIVVPYRKMTPVSKEVAGPKILWAKLVGLK

SEQ ID NO: 8182 - protein, 261 aa, Zea mays
MDAGGEKCGDAAAEGGDLYAVLGLKKECSEAELKVAYRKLAKKWHPDKCSSSSSVKHMEEAKEKFQEIQGAYSVLSDANKRLLYDVGVYDDEDDEESMQGMGDFIGEMAQMMSQAQPTRQESFEELQQLFVDMFQSDIDSGFCNRTAKAHQFQGPAKSRTCSTSPSSSPSPPSPTTAKDAEVPSCNGFNKRGSSALDSGKPPKPVEGGAGQNQAGFCFGVSDTKQAPKLPGQNASRRRNGRKQKLSSKHDVSSEDETAAGS

SEQ ID NO: 8183 - protein, 145 aa, Linum usitatissimum
GFKMHCRGWRSIYCMPKRPAFKGSAPINLSDRLNQVLRWALGSVEIFFSRHSPLLYGYKDGKLKWLERFAYVNTTVYPFTSLPLLAYCTLPAICLLTDKFIMPEISTFASLFFIALFLSIFTTGILELRWSGVSIEGWWRNEEFW

SEQ ID NO: 8184 - protein, 43 aa, Passiflora mixta
WEYQVGPSVGIDAGDDIWCSRYILERITEQAGVILSLDPKPIE

SEQ ID NO: 8185 - protein, 210 aa, Myrospermum sousanum
YDRVMAYKFHEDDHGEVVAEITKSGLEPYLGLHYPATDIPQAARFLFMKNKVRMIVDCHAKHVKVLQDEKLPFDLTLCGSTLRAPHSCHLQYMANMDSIASLVLAVVVNDSDEDGDSSDAVQPQKRKRLWGLVVCHNTTPRFVPFPLRYACEFLAQVFAIHVNKEFELEYQIIEKNILRTQTLLCDMLMRDAPLGIVSQSPNIMDLVKCD

SEQ ID NO: 8186 - protein, 53 aa, Passiflora mixta
WEYQVGPSVGIDAGDDIWCSRYILERITEQAGVILSLDPKPIEGDWNGAGCHT

SEQ ID NO: 8187 - protein, 144 aa, Linum usitatissimum
GFKMHCHGWRSVYCIPKRPAFKGSAPINLSDRLHQVLRWALGSVEIFFSRHCPIWYGYGGGLKWLERFSYINSVVYPWTSIPLLVYCTLPAICLLTGKFIVPEISNYASLVFMALFISIAATSILEMQWGKVGLDDVWRNEEFW

SEQ ID NO: 8188 - protein, 475 aa, Triticum aestivum
  misc_feature (260)..(260): Xaa can be any naturally occurring amino acid
  misc_feature (302)..(302): Xaa can be any naturally occurring amino acid
MAAAAVAADSKIDNLRDAVAKLGEISENEKAGFISLVSRYLSGEAEQIEWSKIQTPTDEVVVPYDTLAPPPEDLDAMKALLDKLVVLKLNGGLGTTMGCTGPKSVIEVRNGFTFLDLIVIQIESLNKKYGCSVPLLLMNSFNTHDDTQKIVEKYSNSNIEIHTFNQSQYPRIVTEDFLPLPSKGQTGKDGWYPPGHGDVFPSLNNSGKLDTLLSQGKEYVFVANSDNLGAIVDIKILNHLITNQNEYCMEVTPKTLADVXKGGTLISYEGRVQLLEIAQVPDEHVNEFKSIEKFKIFNTNNXLWVNLKAIKRLVDAEALKMEIIPNPKEVDGVKVLQLETAAGAAIRFFEKAIGINVPRSRFLPVKATSDLLLVQSDLYTLVDGYVIRNPARVKPSNPSIELGPEFKKVANFLARFKSIPSIVELDSLKVSGDVSFGSGVVLKGNVTIAAKAGVKLEIPDGAVLENKDINGPEDL

SEQ ID NO: 8189 - protein, 95 aa, Oxalis tuberosa
  misc_feature (12)..(12): Xaa can be any naturally occurring amino acid
LYAGINISGTNXEVMPGQWEYQVGPSVGIEAGDHIWASRYILERITEQAGVVLTLDPKPIDGDWNGAGCHTNYSTKSMRDEGGFEVIKKAIFNLS

SEQ ID NO: 8190 - protein, 410 aa, Arabidopsis thaliana
MSAKKLEGSSAPANRRDPYEVLCVSKDANDQEIKSAYRKLALKYHPDKNANNPDASELFKEVAFSYSILSDPEKRRHYDNAGFEALDADGMDMEIDLSNLGTVNTMFAALFSKLGVPIKTTVSANVLEEAMNGTVTVRPLPIGTSVSGKVEKQCAHFFGVTISEQQAESGVVVRVTSTAQSKFKLLYFEQDSSGGYGLALQEEREKTGKVTSAGMYFLHFQVYRMDTTVNALAAAKDPESAFFKRLEGLQPCEVSELKAGTHIFAVYGDNFFKTASYTIEALCAKTYEGTTEKLKEIEAQILRKRNELRQFETEYRKALARFQEVTNRYTQEKQTVDELLKQRDTIHSTFSVVKTPSGNNLSNGSSSKAQGDESKGDGDSAGEEGGTENRDKSKRKWFNLNLKGSDKKLG

SEQ ID NO: 8191 - protein, 348 aa, Arabidopsis thaliana
MGVDYYKVLQVDRSANDDDLKKAYRKLAMKWHPDKNPNNKKDAEAKFKQISEAYDVLSDPQKRAVYDQYGEEGLKGNVPPPNAATSGASYFSTGDGSSSFRFNPRSADDIFAEFFGFSTPFGGGGGGTGGQRFASRMFGDDMYASFGEGAGGGGAMHHHHHHHHHAAARKVAPIENKLPCSLEDLYKGTTKKMKISREIVDVSGKAMQVEEILTIGVKPGWKKGTKITFPEKGNEHPGVIPADLVFIIDEKPHPVFTREGNDLIVTQKVSLADALTGYTANIATLDGRTLTIPITNVIHPEYEEVVPKEGMPLQKDQTKKGNLRIKFNIKFPARLTAEQKAGFKKLIG

SEQ ID NO: 8192 - protein, 172 aa, Oryza sativa
  misc_feature (111)..(111): Xaa can be any naturally occurring amino acid
MLPCFGILANGVLQPDGRDRRREPRGAARRARDAGADDADRELRPHHAPFGHTSSATRASSECESEPHPDRQGGGALLHALGGRLTSQPDEEACLNRLAVLKLNGGLGTTXMDCTRPNIVIEGRNGCTVIYLIVIQIEYVIKRDGRTGPLLLMNSFITHDDAHKIEDDVLQL

SEQ ID NO: 8193 - protein, 358 aa, Magnaporthe grisea 70-15
MATANVTYVENLQKYLKLDQRGAVIAEYVWIDSEGGVRSKSRTLESKKDGFKPDDLPTWNFDGSSTGQAPGDNSDVYLKPVAVFPDPFRGGENILVLSECINADGTPNKFNHRHECAKLMETHAEHQPWFGLEQEYTLLDLNDRPFGWPQNGFPAPQGPYYCGVGAGKVVQRDIVEAHYKSCLYAGVKISGTNAEVMPAQWEFQVGPCTGIEMGDHLWIARFLLHRVAEEFGAKVSFDPKPIPGDWNGAGLHSNFSTKEMRVEGGMKHIEAAIKKLEGRHQEHIAVYGEGNEKRLTGRHETGAIDTFSYGVANRGASIRIPRECAAKGYGYFEDRRPASNADPYQITGIIMETCFGEA

SEQ ID NO: 8194 - protein, 95 aa, Oxalis tuberosa
LYAGINISGTNGEVMPGQWEYQVGPSVGIEAGDHIWASRYILEGITEQAGVVLTLDPKPIDGDWNGAGCHTNYSTKSMRDEGGFEVIKKAIFNLS

SEQ ID NO: 8195 - protein, 276 aa, Borrelia burgdorferi B31
MTKDYYNILGIQKNASNEEIKKAYKKLAIKYHPDKNKGNKIAEEKFKEINEAYEILSSPDKKRNYDSLGNTNFNGNNDHFEREFSSTRFGNFEDLDFFSKIFGGSSRKTADREIIINISLYDAYMGSKKIILINNKKIEVIIPKGTLETTTIKINNKGPINPISGIKGSLIVKFNISSYKNFKLNGKTLETTIEVYPWEIALGCEKLFETIEGKKIKLKIPSDAKNGEILNLKGLGMPIIGSSSKRDLKVTLIVKIPKIINNEVKTIYERLKEIYS

SEQ ID NO: 8196 - protein, 375 aa, Alcanivorax sp. DG881
MSKRDYYEVLGAAKDASAQDLKKAYRRLAMKYHPDRNPDDEEALAKFKEAKEAYEVLADEQKRAAYDQFGHAGVNGQGGAGAGGGFGGGGFGDIFGDIFGDIFGGGGGGRRGPARGADLRYTLELTLEQAVRGCDEKIRIPTWDGCDVCHGTGAKEGSQPVACTTCGGVGQVRMQQGFFTVQQACPTCKGEGKIIKDPCGNCGGQGRVQNTKTLSVKIPAGVDTGDRIRLAGEGEAGMHGAPSGDLYVQVAVREHDIFQRDGDNLFCEVPISFVDASLGGELDVPTLNGKVKLKVPAETQSGKIFRLRGKGVAPVRGGAPGDLLCKVVIETPVKLSGEQKELLRKFQESLESGGNRHNPRKSSWFEGVKRFFDTK

SEQ ID NO: 8197 - protein, 429 aa, Phragmites australis
MAQPVVPAMQCQVGARGKAAVRARPAGAGGRVWGVKRSGRGTSGFKVMAVSTESTGVVPRLEQLLNMDTKPFTDKIIAEYIWVGGSGIDLRSKSRTLSKPVEDPSELPKWNYDGSSTGQAPGEDSEVILYPQAIFKDPFRGGNNILVICDTYTPAGEPIPTNKRHRAAQIFSDPKVVDQVPWFGIEQEYTLLQTDVNWPLGWPVGGYPGPQGPYYCAVGADKSFGRDISDAHYKACLYAGINISGTNGEVMPGQWEYQVGPSVGIEAGDHIWISRYILERITEQAGIVLTLDPKPIQGDWNGAGCHTNYSTKSMREDGGFEVIKKAILNLSLRHDLHISAYGEGNERRLTGLHETASIDNFSWGVANRGCSIRVGRDTEAKGKGYLEDRRPASNMDPYVVTSLLAETTILWEPTLEAEALATKKLALKV

SEQ ID NO: 8198 - protein, 416 aa, Treponema pallidum subsp. pallidum str. Nichols
MFGCSLRRRCFRRPAFVPVSRAHPVFLCVRANVDKDSLDGVIVAKKDYYEVLGISKTASGEEIKKAYRRLAIQFHPDRNQGNKEAEERFKEATEAYEVLIDAQKRAAYDRYGFDGLKDMHGAHGFNSSAFQGFEDIFGGGFSDIFENIFGTSSRRGGSGNDGSGGSGRGANLRYDLQISFEEAVYGKKSELHYVRDETCITCKGAGSASGGRKMCPDCKGTGQIRRSTGFFSIAQSCARCGGEGTIIESPCARCAGSGIERKKQKIIVSIPAGVEEGRRITIPRQGNAGRAGGAYGDLYVFVFVRAHEYFEREGADLYCATSISVTQAILGAQVTVRALDGSAQQVRVPAGTQGGALLRVKGMGVPLARGAGDLYVKVLVRIPTTLSARSRALLAEISQEEGENAHPPLLELSSLK

SEQ ID NO: 8199 - protein, 306 aa, Nicotiana tabacum
MGVDYYKILKVSRNASEEDLKKSYKRLAMKWHPDKNSEKEAEAKFKQISEAYDVLSDPQKRQIYDIYGDEALKSGQFDPSSPMNGNGRGFKFDSRDAEDIFAEFFGGSDGYSRSPTGGTVRIRKPAPVENKLPCSLEELYKGSKRKMKISRIVLDVTGKPTTIEEVLAIHIKPGWKKGTKITFPEKGNHEPGAAPGDLIFVIDEKPHDVFKRDGNDLVINQKISLVDALSGKIINLATLDGRELTIPITDVVKPGHEQIIADEGMPISKEPGKKGNLRIKFEVKFPSRLSSDQKLDIRRVLGRTVD

SEQ ID NO: 8200 - protein, 260 aa, Oryza sativa
  misc_feature (173)..(173): Xaa can be any naturally occurring amino acid
RETAVGSRNFRAPATPPAAISSSSSSPALPGDDQLPPSCSFGILVQFAVVSGLLDKMVKLTMVARVTDGLPLAEGLDDGRDQKDADFYKQQAKLLFKNLSKGQHEASRMSIETGPYFFHYIIEGRVCYLTMCDRSYPKKLAFQYLEDLKNEFERVNGSQIETAARPYAFIKFXTQRNLAKLNDELYEVHQIMTRNVQEVLGVGEKLDQVTEMSTRLTSDTRMYADKAKDLNRQALIRKYAPVAIVIGVVLMLFWLKNKIW

SEQ ID NO: 8201 - protein, 305 aa, Nicotiana tabacum
MGLDYYNVLKVSRNASEEDLKRSYKRLAMKWHPDKNSQNKKEAEAKFKQISEAYDVLSDPQKRQIYDVYGDDALKSGQFASASPTSAGSNARGFRFNTRDAEAIFAEFFGGSGSNSGAGVGRKAAPVENKLPCSLEELYKGSRRKMKISRILLDDSGKPTTVEEVLAIHIKPGWKKGTKITFPEKGNYEPGATPGDLIFVIDEKPHAVFKRDGNDLEINQKISLLDALTGKTISLITLDGRELTIPITDIVKPGHEHIIPNEGMPISKERGKKGNLKIKFDIKFPSRLSADQKSDIRRVLCRSAD

SEQ ID NO: 8202 - protein, 554 aa, Zea mays
TGLEFPGRPTRPPTRPPTRPHTHHTTPPRFHSARLTSRPVLSFRSLASPDDGHRRGVGRREARQASRRGRQARPDQASAPLLSALDLAARSLRLPFLLISECVFPRSENEKSGFISLVSRYLSGEAEQIEWSKIQTPTDEVVVPYDTVASPPEDLEETKKLLDKLVVLKLNGGLGTTMGCTGPKSVIEVRNGFTFLDLIVIQIESLNKKYGCNVPLLLMNSFNTHDDTQKIVEKYSNSNIEIHTFNQSQYPRIVTEDFLPLPSKGKSGKDGWYPPGHGDVFPSLNNSGKLDILLAQGKEYVFVANSDNLGAIVDIKILNHLINNQNEYCMEVTPKTLADVKGGTLISYEGRVQLLEIAQVPDEHVNEFKSIEKFKIFNTNNLWVNLKAIKRLVEAEALKMEIIPNPKEVDGVKVLQLETAAGAAIRFFDKAIGINVPRSRFLPVKATSDLLLVQSDLYTLVDGFVIRNPSRANPANPSIELGPEFKKVANFLARFKSIPSIVELDSLKVSGDVWFGSGITLKGKVTIIAKPGVKLEIPDGDVLENKDVNGPEDL

SEQ ID NO: 8203 - protein, 302 aa, Oryza sativa
MADGGEKCRDAAGEGGGGGDLYAVLGLKKECSDADLKLAYRKLAMCVRAPPLQQKANYKVCDLSKAGTAATFNERWHPDKCSSSSSAKHMEEAKEKFQEIQGAYSVLSDSNKRFLYDVGVYDDDDNDDDNLQGMGDFIGEMAQMMSQARPTRQESFKELQQLFVDMFQADLDSGFCNGPSKCYHTQAQSQTRTSSTSPSMSPSPPPPVATEAESPSCNGINKRGSSAMDSGKPPRASEVGSGQSQSGFCFGQKSDAKQAAKTRSGNTASRRRNGRKQKVSSKHDVSSEDEMPGHPYTVKAKN

SEQ ID NO: 8204 - protein, 560 aa, Oryza sativa Japonica Group
MAAAAAAAANGAGGGGGVPRPTNPMVTPLLTDLYQFTMAYAYWKAGKHLDRAVFDLYFRKNPFGGEFTIFGGLEECIRFIANFKLTDTEITFLRSAMPTCEDGFFEYLSSIDCSDVEVYAIPEGSVVFPKVPLMIIEGPVAVIQLLETPFLSLVNYASLVTTNAARHRLVAGKSKNLLEFGLRRAQGPDGGISASRYCYMGGFDATSNVAAGWLFGIPIRGTHSHAFVSSFMGLDDIIDRTLASSDGSNKCEDFVSLVQNWLARIKDAGSLRGTFRETNLSELAAFTSYALAFPNSFLALVDTYDVMRSGVPNFCAVALALNDMGYKAAGIRLDSGDLAYLSVETRKFFRAIEEEFGFIGFGKMNITASNDLNEETIDALNKQGHEVDAFGIGTYLVTCYAQAALGCVFKLVEINKQPRIKLSEDVTKVSIPCKKRCYRLFGKEGYPLVDIMTGEDEPAPKVGERLLCRHPFNESKRAYVVPQHVEELLKCYWPGTTSEPREELPSINEIRSRCMGYLDRMRPDHMRRLNPTPYKVSVSAKLYDFIHFLWLNEAPVGELQ

SEQ ID NO: 8205 - protein, 389 aa, Oryza sativa
MADEKLAKLREAVAGLSQISDNEKSGFISLVARYLSGEEEHVEWAKIHTPTDEVVVPYDTLAAPPEDLEETKKLLNKLAVLKLNGGLGTTMGCTGPKSVIEVRNGFTFLDLIVIQIESQYPRVVADEFLPWPSKGKTCKDGWYPPGHGDIFPSLMNSGKLDLLLSQVTPKTLADVKGGTLISYEDKVQLLEIAQVPDAHVNEFKSIEKFKIFNTNNLWVNLKAIKRLVEADALKMEIIPNPKEVDGVKVLQLETAAGAAIRFFDHAIGINVPRSRFLPVKATSDLQLVQSDLYTLVDGFVTRNPARTNPSNPSIELGPEFKKVGCFLGRFKSIPSIVELDTLKVSGDVWFGSSITLKGKVTITAQPGVKLEIPDGAVIENKDINGPEDL

SEQ ID NO: 8206 - protein, 220 aa, Zea mays
  misc_feature (65)..(65): Xaa can be any naturally occurring amino acid
  misc_feature (188)..(188): Xaa can be any naturally occurring amino acid
MAGSRFGSFKSEKGDSASAAAAAGGAAQRRDPYEVLGVGRTATDQEIKSAFRRMALKYHPDKNGXDDPVASDRFQEVTFSYNILSDPDKRRQYDTSGFDAIESDSQELELDLSSLNTVNTVFAALFSKLGVPIKTTVSATVLEEALNGSVMVSQLQLGNSVQRKVEKQSAHFYSVDITEKQAKMGLVXRVHSNDKSKFKVSRRVLGPPGILVDAFEIEGF

SEQ ID NO: 8207 - protein, 1339 aa, Arabidopsis thaliana
MEREDLYAVLDLNNECTQGDLRLSYKNLVLKWHPDRFLEEIEKDEAKMKFQSIQRAYSVLSDSNKRLLYDVGAYDSDDDETGMADFINEMVTLMAQTQSTGDESLEEFEELFQELLKDDVNQFKTRSSSSSCSQFSGTSTLVHCDDLSNSNDIPNKINGHDNYCCISSSKQSGLVRMRSDTVLDYVVFELSPKHSKCELFVSSNEQTEKLASGLIQPFVNHLKVLEAKASPVAQSSIRLEVEKSNTWFTKRTLERFVQFVNSPETLEKVNTYYSEMLQLEAARTLYSQRSEDSKFGASDDGAAADATKKELLKAIDLRLEAIKKDLTTSISHASASGFDPHTVSELKQFADRFSAHHLDEACSKYISLWKQRPDLIDMKYSNQLAGVDNVSLQKDSTRQKQNAVNESEHQIQQCATTSTKRNEEEKTDDSLDVTSSTVKTTQHTRRLSVQDRINLFENKQKENSPSGGSKPVAVTKSTELRRLSSDVSSSEKPILRRSSIVSDMSTDLASEKKLESFPEDPSSTSSSLPHTIAQPNFNESVKKDDEVKYELKSDSEKVGDEEASRDRVESSKTVTETRLVSGVEATSYVQSRSVIDPNVSSASQNQTERHVDRLQNVMSDAKSRQREEGYEHKANNVSQSSAMFPSRHTRSQSAHIEASFKEDVASQPQSRYSFGRIKKKEVVPSDEQPVLPQKPQFNVRDGPDDGEGRQVRANSSRFPPASVDQIQRTRLSKENPGANDELKLKANELEKLFAEHQLRVPGDQSSSSRRGKSSENQVAHKEPSHSIAATEKRLSLGGGSADFSKLMTPLVGDKDKGDALRRNLSDLSLTDDSKGKFYEKYMKKRDAKLREEWSLKKGEKETKLKSMQEALEQSRTEMKAKLSASSSERKDLLSSTRQRAEKFRSFNSRSSMKKYQSEEDEDISEQKPRAKDKAASGQQSVGSISSRSSQARKLQPNRNMSSSITPRSAASVPKPSGKVSNTSSGRRRSDKSLAQSVPNFSELIKENTKPSSLAVKTTMRSQVKSSGRTKNIKEDTLLQRPRSLRKSSSGNIDFTELSTLCSDDMMVSLRVDSDISETLRNEEYDEPEAEPEEVLENAVREEEEVEELETLVFEDGNPMLSEAYEKVDHSGEENCSFLPATVPTTLLASLMDSPGESPLSWNANLQHSFSYPHEHSSDVDASVDSPTGSPASWSSRMRKKWGTAQTPVTVAAANNMSQYQSKKDLSKGFKRLLKFGRKSRGAESLMMDWVSVTTSEGDDEVEDRRDFADRSSEDLRKSRMGSLQNHLSEDGFNESEFPEQASNTELKDDHQMSGSNFKAQKSFFSLSTFRGKGNDSKPR

SEQ ID NO: 8208 - protein, 59 aa, Passiflora murucuja
WEYQVGPSVGIEAGDHIWCSRYILERITEQVGVVLTLDPKPIEGDWNGAGCHTNYSTKS

SEQ ID NO: 8209 - protein, 335 aa, Oryza sativa Japonica Group
MHCYISLSSICRSTKQYTMATRANGSSCSLASLMAAIFFLLVVSSRGAHGGRIAIYWGQNGNEGTLADTCATGNYAFVNLAFLCSFGSGQAPQLNLAGHCDAYSGACANLTADIARCQSMGVKVLLSIGGGAGGYSLASKQDVSHLARYLWESFLGGRPSAPGGRRPLGDAVLDGVDFDIEGGGGDPRYYGDLAAYLKAYSGKGAAGKEVLLSAAPQCPFPDQWVGKALDTGLFDYVWVQFYNNPPCQYAAGSGGGAANLLDAWRQWTSGVEARYIFLGLPASPGAAGSGFIPVGSLESQVLPALKASSKYGGVMLWSRYYDDQDGYSSAIKNAV

SEQ ID NO: 8210 - protein, 158 aa, Triticum aestivum
MTSAPAMATTALSDPEALSGDGGTKQPLSLLERARDNLSFRSAWSELNGAMGDLGTYIPIVLSLALSRHLDLGTTLIFTGIYNAVTGLVYGVPMPVQPMKAIAATALSDPSFDIPEIMAAGILTAAFVLLLGVTRLMKLVYWLVPLPVVRGIQLAQGL

SEQ ID NO: 8211 - protein, 158 aa, Brassica napus
NGTVANVVLRLPVTIHGNNGGTGAGVGGVVTLHGKFDILSITGTVLPPPAPPGSGGLSIFLSGGQGQVIGGNVVAPLVASGPVILMAASFSNATFERLPLKDEEEEGGGGGPPPATTASPPSGPGQGEIRGNPSGYDQFTGDPHSLGWVAGAASRPSF

SEQ ID NO: 8212 - protein, 286 aa, Zea mays
MGRNRKGRKARVSHDADADADADGSEDERATTAGRSLYEILGVEKTASQQEIKKAYHKLALRLHPDKNPGDEEAKEKFQQLQKVISILGDVEKRALYDETGITDDDALVGEAANNLQEYFRTMYKKVTEADIEEFEAKYRGSDSEKTDLKELYTKYKGNMNRLFCAMICSEPKLDSHRFKDIIDEAIGEGELKSTKVYEKWAKKISGMEPPTNPLERRVKKRKNSEENDLILAISQRRAERKKQFNSILSNIMSKCDSKASSSEPTEEEFEQAQQRLESRRAKRRK

SEQ ID NO: 8213 - protein, 95 aa, Oxalis tuberosa
LYAGINISGTNGEVMPGQWEYQVGPSVGIEAGDHIWASRYILERITEQAGVVLTLDPKPTDGDWNGAGCHTNYSTKSMRDEGGFEVIKKAIFNLS

SEQ ID NO: 8214 - protein, 55 aa, Passiflora nitida
WEYQVGPSVGIDAGDHIWCSRYILERITEQAGAVLSLDPKPIEGDWNGAGCHTNY

SEQ ID NO: 8215 - protein, 386 aa, Helicosporidium sp. ex Simulium jonesii
MSPPTGEKYSLPPVFGTQGQITQLLDPIMAERFKDLSQHGKVMAEYVWIGGTGSDLRCKTRVLDSVPNSVEDLPVWNYDGSSTGQAPGDDSEVFLIPRAIYRDPFRGGDNILVLADTYEPPRVLPNGKVSPPVPLPTNSRHACAEAMDKAAAHEPWFGIEQEYTVLDARTKWPLGWPSNGFPGPQGPYYCAAGAGCAIGRDLIEAHLKACLFAGINVSGVNAEVMPSQWEYQVGPCTGIESGDQMWMSRYILIRCAELYNVEVSFDPKPVPGDWNGAGGHVNYSNKATRTAETGWAAIQQQVEKLGKRHAVHIAAYGEGNERRLTGKHETSSMNDFSWGVANRGASVRVGRLVPVEKCGYYEDRRPASNLDPYVVTRLLVETTLLM

SEQ ID NO: 8216 - protein, 95 aa, Oxalis tuberosa
LYAGIDISGTNGEVMPGQWEYQVGPSVGIEAGDHIWASRYILERITEQAGVVLTLDPKPIDGDWNGAGCHTNYSTKSMRDEGGFEVIKKAIFNLS

SEQ ID NO: 8217 - protein, 429 aa, Phragmites australis
MAQAVVPAMQCQVGVKAAVRARPAAAGAGGRVWGVRRSGRGTSGFKVMAMGMSTSGVVPRLEQLLNMDTKPYTDNIIAEYIWVGGSGIDVRSKSRTISKPVEDPSELPKWNYDGSSTGQAPGEDSEVILYPQAIFKDPFRGGNNILVICDTYTPAGEPIPTNKRHRAAQIFSDPKVVSQVPWFGIEQEYTLLQTDVNWPLGWPVGGYPGPQGPYYCAVGADKSFGRDISDAHYKPCLYAGINISGTNGEVMPGQWEYQVGPSVGIEAGDHIWISRYILERITEQAGVVLTLDPKPIQGDWNGAGCHTNYSTKSMREDGGFEVIKKAILNLSLRHDLHISAYGEGNERRLTGLHETASIDNFSWGVANRGCSIRVGRDTEAKGKGYLEDRRPASNMDPYVVTSLLAETTILWEPTLEVEALAAKKLALKV

SEQ ID NO: 8218 - protein, 118 aa, Triticum aestivum
MRHKLHTFFCSMFAEPLFFSLAQSRDSYSDMLEGGNFSNQETLYEVLSVRKDATYDEIRAAYKSAVLNTHPDKAQMALNPLVSSSERNEFLSVQKAWEILRYPKSRAEYDKQLQSSRQ

SEQ ID NO: 8219 - protein, 95 aa, Oxalis tuberosa
LYAGINISGTNGEVMPGQWEYQVGPSVGIEAGDYIWASRYILERITEQAGVVLTLDPKPIDGDWNGAGCHTNYSTKSMRDEGGFEVIKKAIFNLS

SEQ ID NO: 8220 - protein, 150 aa, Arachis hypogaea
EYVFVANSDNLGAVVDLKILNHLIQNKNEYCMEVTPKTLADVKGGTLISYEGRVQLLEIAQVPDEHVNEFKSIEKFKIFNTNNLWVNLKAVKRLVEADALKMEIIPNPKEVDGVKVLQLETAAGAAIRFFDKAIGINVPRSRFLPVKQLQ

SEQ ID NO: 8221 - protein, 184 aa, Zea mays
MAGRGGGSKSSLYAALGVASDCSDAELRSAYRKLAMKWHPDKCAGAGSSGGGADAAKARFQKIQGAYAVLSDPNKRILYDVGAYDGEGDDDESVCLIFHVWQGAGEILGDILEAMSQAGPAADNGKGESLEDLQRQFEELFLRPSPSSFSPNRCWVLSTVRVSWSQQNDAAGKSASKSRPAGRK

SEQ ID NO: 8222 - protein, 305 aa, Nicotiana tabacum
MGLDYYDVLKVSRNASEEDLKRSYKRLAMKWHPDKNSQNKKEAEAKFKQISEAYDVLSDPQKRQIYDVYGDDALKSGQFASASPTSAGSNGRGFRFNTRDAEAIFAEFFGGSDSNSAAGVGRKAAPVENKLPCSLEELYKGSRRKMKISRILLDDSGKPTTVEEVLAIHIKPGWKKGTKITFPEKGNYEPGATPGDLIFVIDEKPHAVFKRDGNDLVINQKISLLDALTGKTISLITLDGRELTIPITDVVKPGHEHIIPNEGMPISKERGKKGNLKIKFDIKFPSRLSADQKSDIRRVLCRNSD

SEQ ID NO: 8223 - protein, 341 aa, Bifidobacterium longum DJO10A
MAENEWLSKDFYKVLGVSKDASDDDIKKAYRKLARKYHPDVNKTKEAEEKFKDISEAYDVLSKKEDRQKYDAIRQFGMGGARFAGGSGTGGFDASGFSDIFGSMFGQGAGGNGSRIRFSTSGGGPNNINDIFSMFGGAAGQGGQPYGGYGQSPYGNAGGYGYEEAPRPENGEDRNSKISLTLRQAVKGATVSLSVDGKKFKAHVPAGVKDGQKIKLAGKGKPGINGGKAGDLYLHVTVKPDATFSMRGHDIVMDLPVTVGQAVAGGKVEAKDIDGNPVTFKVPAGSSSGAEVKLTGLGVQRSNQPGDLIGRVQIMVPAKPGLAVKHAAKEFDEKAGDYLSL

SEQ ID NO: 8224 - protein, 1164 aa, Arabidopsis thaliana
MVSGGGSKTSGGEAASSGHRRSRHTSAAEQAQSSANKALRSQNQQPQNHGGGTESTNKAIQQYTVDARLHAVFEQSGESGKSFDYSQSLKTAPYDSSVPEQQITAYLSRIQRGGYTQPFGCLIAVEESTFTIIGYSENAREMLGLMSQSVPSIEDKSEVLTIGTDLRSLFKSSSYLLLERAFVAREITLLNPIWIHSNNTGKPFYAILHRVDVGILIDLEPARTEDPALSIAGAVQSQKLAVRAISHLQSLPSGDIKLLCDTVVESVRDLTGYDRVMVYKFHEDEHGEVVAESKRNDLEPYIGLHYPATDIPQASRFLFKQNRVRMIVDCYASPVRVVQDDRLTQFICLVGSTLRAPHGCHAQYMTNMGSIASLAMAVIINGNEEDGNGVNTGGRNSMRLWGLVVCHHTSARCIPFPLRYACEFLMQAFGLQLNMELQLALQVSEKRVLRMQTLLCDMLLRDSPAGIVTQRPSIMDLVKCNGAAFLYQGKYYPLGVTPTDSQINDIVEWLVANHSDSTGLSTDSLGDAGYPRAAALGDAVCGMAVACITKRDFLFWFRSHTEKEIKWGGAKHHPEDKDDGQRMNPRSSFQTFLEVVKSRCQPWETAEMDAIHSLQLILRDSFKESEAMDSKAAAAGAVQPHGDDMVQQGMQEIGAVAREMVRLIETATVPIFAVDIDGCINGWNAKIAELTGLSVEDAMGKSLVRELIYKEYKETVDRLLSCALKGDEGKNVEVKLKTFGSELQGKAMFVVVNACSSKDYLNNIVGVCFVGQDVTGHKIVMDKFINIQGDYKAIIHSPNPLIPPIFAADENTCCLEWNTAMEKLTGWPRSEVIGKLLVREVFGSYCRLKGPDALTKFMIVLHNAIGGQDTDKFPFPFFDRKGEFIQALLTLNKRVSIDGKIIGAFCFLQIPSPELQQALEVQRRQESEYFSRRKELAYIFQVIKNPLSGLRFTNSLLEDMDLNEDQKQLLETSVSCEKQISKIVGDMDVKSIDDGSFLLERTEFFIGNVTNAVVSQVMLVVRERNLQLIRNIPTEVKSMAVYGDQIRLQQVLAEFLLSIVRYAPMEGSVELHLCPTLNQMADGFSAVRLEFRMACAGEGVPPEKVQDMFHSSRWTSPEGLGLSVCRKILKLMNGGVQYIREFERSYFLIVIELPVPLMMMMPSS

SEQ ID NO: 8225 - protein, 100 aa, Triticum aestivum
  misc_feature (48)..(48): Xaa can be any naturally occurring amino acid
RWCRYVDEKRKGLMESGLRRTLGPDGAISASKYCCMGSYDAYSYVWTXHIFSIPLLGTHSDAYVRSYMSLDEIPYWTLRNKDGSKICTEFMRLMNDWLCK

SEQ ID NO: 8226 - protein, 338 aa, Vitis vinifera
MGVDYYKILQVDRSAKDDDLKKAYRKLAMKWHPDKNPNNKKEAEAKFKQISEAYDVLSDPQKRAVYDQYGEEGLKGQVPPPGAGGFSGGSDGGPTMFRFNPRSADDIFSEFFGFSSPFGDMGGSRAGGSGFPRGMFSEDFFSSFRGGAGEASSATMPRKGAPIERALPCSLDDLYKGTSKKMKISRDVIDHFGRTTTTEEILTIEIKPGWKKGTKITFPEKGNEQRGIVPSDLIFIIDEKPHLVFKRDGNDLIFTQKISLVEALTGYTVQVTTLDGRTLTIPINSIISPTYEEVVKGEGMPIPKEPSKKGNLRIKFNIKFPARLTSEQKTGIKRLLSS

SEQ ID NO: 8227 - protein, 841 aa, Cryptococcus neoformans var. neoformans B-3501A
MGNDQSRTSSGDGKQVDEKPPDYYELLQVDEEAGYDEIKRSYRKLALINHPDKNPHRIEEATKLFADLQHAYEVLSDPQERAFYDSHRNAPVAATDDDIFEHVRTGDKATNDPKSKLNRRRQGDPGVTIAQLMRFFDPKIASKMDDTSEGFYSIYRTLFALLASDEALHTTSTTPLSYPSFGNSSTAYAPPPGLTRAQKDSQVWARDFYAVWGEFVTEKKFEWLNKWDAERGDDRMVRRAMEKENKKAREETRKEYNETVRQLVVFIQHRDPRYKAHQTKLAQERAASKSAKTSGASTPAGKPVVDAEAAKRRHEERLRAAAQYEEQDWQKFSSRNSDDEEMEEEEPEEELGDGTGVRLDDGQGGEIFECVACGKTFASEASWINHERSKKHKQAVWRLKKEMRAEAKAMGLTEPQSEEEPGDERAEDADAGEGEIGGETKGVGMTEEEQLAELQALEAEMIDLALEESEDVDYGNKKSKKKGKKNRRDGVIDEVDAATGLSPSRNESQPDASNTPSAAVSDDGVARESDKTSELSKRDKRRAREARKKIEEEERKAAFKEARKAAKKAGASVETFASPRQSDRKDKVDDDGFVAPKQKGKNSIKSGKGTKGGREQGENDYSDERVAKVVAGIQEKREKMVEKWGDTWADLVSKLKHLLSGDSHLPLSILCLGLGKPFSDRTAQIQLALALELADALNCTVHDLEMYDPVWDEGDKKVLSSIGVTLLQDNLLGRHTLETGRPYLLYLPHAPKQLYESILSTNYAPSLCGNKPGRILLGNDLAEYLPGFVRPSQKKEPSGEADGDGEFVKPKKKRRGRGEVKPQIKDGVLSRVGESHSALLR

SEQ ID NO: 8228 - protein, 216 aa, Brassica napus
  misc_feature (131)..(131): Xaa can be any naturally occurring amino acid
  misc_feature (197)..(197): Xaa can be any naturally occurring amino acid
  misc_feature (208)..(208): Xaa can be any naturally occurring amino acid
MAATTENLPQLKSAVDGLTEMSENERSGFINLVSRYLSGEAQHIEWSKIQTPTDEIVVPYDKMAPVSEDVSETKNLLDKLVVLKLNGGLGTTMGCTGPKSVIEVRDGLTFLDLIVIQIENLNNKYGCKVPXLVLMNSFNTHDDTQKIVEKYTNSNVDIHTFNQSKYPRVVADELVPGPSKGKTDKDGWYPPGHGDVXPSLMNRGKLDXFLSQGKSM

SEQ ID NO: 8229 - protein, 230 aa, Oryza sativa
MNITSALLLVMLLAGGAWAKDYYEILGVKKSDSIATIKKAFRKLAIKYHPDKNPDKKNAEAQFREIAEAYEVLSDPDKKRAYDQSGGTFSGGSGGGGSGSYSNQHFNQEFNYNDFFREFDEAMKRHHETHQRAHERHHREHMKAHHEKLKSQGFAFDFDDLFEDFGGGGFGIDEDMFGFGGGGFGDFHGQDGDVLGSSYFHEEVVEKNGQTCRMVRKKEGNTVMMQTECH

SEQ ID NO: 8230 - protein, 484 aa, Musa acuminata; identical to SEQ ID NO: 4520

SEQ ID NO: 8231 - protein, 307 aa, Glycine max
MAFRRPLALHPLVIAFVLVSCLAGAATAKQTGQLTVFWGRNAGEGTLREACDTGLYSTVVISFYSVFGHGRYWGDLSGHPLAGVGADIKHCQSTNILVLLSIGGPGNGYSLPSSASAAAVADNLWNAHLGGRRNGVYRPFGDAAVDGIDFYIDQGAPDHYDELASRLDGYNRFYRGRKGVRLTATPRCGLPDRRLGAALRTGLFERIHVRFYGNDTCSLGKGGTYGVVGQWEKWTAAFPRTQVYLGLAPAESGVPEGAQGTVAVYLKYLYYDLLPKVQKANNYGGVMVWDRFADKKTRWSSVVSGWA

SEQ ID NO: 8232 - protein, 349 aa, Arabidopsis thaliana
MGVDYYNVLKVNRNANEDDLKKSYRRMAMKWHPDKNPTSKKEAEAKFKQISEAYDVLSDPQRRQIYDQYGEEGLKSTDLPTAAETAAQQQQRSYSSSNSEFRYYPRDAEDIFAEFFGESGDAFGGGSSGRTRGDGGDGGGRRFKSAEAGSQANRKTPPTNKKTTPPANRKAPAIESKLACTLEELYKGAKKKMRISRVVPDDFGKPKTVQEILKIDIKPGWKKGTKITFPEKGNQEPGVTPADLIFVVDEKPHSVFKRDGNDLILEKKVSLIDALTGLTISVTTLDGRSLTIPVLDIVKPGQEIVIPNEGMPTKDPLKRGDLRVTFEILFPSRLTSEQKNDLKRVLGGS

SEQ ID NO: 8233 - protein, 1122 aa, Physcomitrella patens
MSAPKKTYSSTSSAKSKAHSVRVAQTTADAALHAVFEKSGVSGDNFDYSKSVSKSTAGSLHTGAVTAYLQRMQRGGLTQSFGCMVAVEETGFRVIAYSENAPEFLDLMPQAVPNIGEINTLGIGTDVRTLFTPSSAASLEKAAETQEISLLNPITVYCRSKKPLYAIAHRIDIGIVIDFEAVNMNDVTISADGALQSHKLAAKAITRLQALPGGDIGLLCDTVVEEVRELTGYDRVMAYKFHEDEHGEVVAEIRRTDLEPYLGLHYPATDIPQASRFLFMKNRVRMIGDCSAPPVKIVQDPNLRQPVSLAGSTLRSPHGCHAQYMGNMGSISSIVMAVIINDNEDDSRGSVQRGRKLWGLVVCHHTSPRTVPFPLRSACEFLMQVFGLQLNMEVELAAQLREKHILRTQTLLCDMLLRDAPIGIVSQVPNIMDLVKCDGAALYYGKRFWLLGTTPTESQIKDIAEWLLEYHKDSTGLSTDSLADANYPAAHLLGDAVCGMAAAKITSKDFLFWFRSHTAKEIKWGGAKHDPGEKDDNRKMHPRSSFKAFLEVVKRRSLPWEDVEMDAIHSLQLILRGSFQDIDDSDTKTMIHARLNDLKLHDMDELSIVANEMVRLIETATAPILAVDSNGMINGWNAKIAQETGLPVAEAMGRSLVKDLVMDESLEVVERLLYLALRGEEEQGVEIKLKTFGAQTVKGAVILIVNACASRDVSENVVGVCFVGQDVTGQKMFMDKFTRIQGDYKTIVQNPHPLIPPIFGADEFGYCFEWNPAMEGLTGWKRDEVIGKLLVGEIFGMQKMCCQMKSQDAMTKFMISLNSAMDGQNTDKFSLSFFDREGRYVDALLSTNKRTNADGAITGVICFLQIASSELQQALRVQQATEKVAIAKLKELAYIRQEIKNPLCGITFTRQLLEDTDLSNDQKQFLDTSAVCEQQLQKVLNDLDLESIEDGYLELDTAEFEMRTVMDAVISQGMTISREKGLQIIRETPREIITMRLFGDQVRLQQVLSDFLLNAVRFTPSSEGWVKIKVVPTRKRLGGNEHVMHLEFRVSHPGAGLPEELVLEMFDKGKGMTQEGLGLNICRKLVRLMNGDVQYVREAMQCYFVLYVELPLAQQDDAASQM

SEQ ID NO: 8234 - protein, 204 aa, Mesorhizobium septentrionale
TQIKDYAEFPTLEQLPLWGFDGSSTQQAEGHSSDCVLKPVAVFPDPARTNGVLVMCEVMMPDGVTPHSSNKRATILDDEGAWFGFEQEYFFYKDGRPLGFPESGYPAPQGPYYTGVGYSNVGSVARQIVEEHLDQCLAAGINHEGINAEVAKGQWEFQIFGKGSKKAADQMWMARYLMQRLTEKYGIDIEYHCKPLGDTDWNGS

SEQ ID NO: 8235 - protein, 295 aa, Mesembryanthemum crystallinum
MAAKSQLTKLFVTILVLALIDASYGGGIAVYWGQGPEGTLNQTCATKLYKIVNIAFLNKFGKGQHASLNLAGHCSPSNGGCKIASSEIKYCQSIGIKVFLSIGGGGNTYSLDSVKDAKNTAAYLWNNFLGGKSASRPLGSAVLDGIDFDIELGSTKNYALLAQTLANYGKKSKRGILTAAPQCPFPDRHLGAALNTGLFDYIFVQFYNNPQCEYTVSPASFMTAWKKWTSLKVKKVYLGLPASRKAANNGYISPSLLKSKVLPKIKKSPKYGGVMLWSRYWDKVSGYSKAIKSSV

SEQ ID NO: 8236 - protein, 645 aa, Ralstonia metallidurans CH34
MSENHYQTLGVSPDADAATIRTAYRRLAQKWHPDRLSKAPEAERKLAEERLKDINRAYAVLSDDARKQAYDARTGFGGFAADDEADGDDDFDSGPSRHQRQSSRRSPPPKPPEHGRDLFVKATTDVQTVLRGGYVRVGWLADDDCPLCDGTGFLFHAYTTECPECGGIGCYACSGRGRARARTRCPWCTGRGYLSRDHLFEVTVPARTHNGCNLRLLGKGGPGFNGGAPGDLYCIIQVKKHKLGHVRGLNVYTEIRIDCIDAMLGATRTFEVLGSDLQIKIPAGTRAGKYLRLAGQGLRSGDGSGDLVLHVSIDIPKGTLSDKQRLHLRRFAGLEPEPSTDQEQARPATTRHPESEPLRASERETPRMRQIVYAEAVADFHIRTMTAQEFANYCIASKAFSDYADGFYAWRGQKQTAQRVADLRTSMLSVEGTNKTLFAGQHAPSTLVSFLRALRQMELGDRLVAIGNYACLVYASAAGAIITDASRHRLFGKRVQLLAAGALTPKALIDALREVDETFEELVGHAGRFSALNAAGLTIDIIGAGLGTTLPGKRAPSRLLNDESAELEDYGIASLLGDGIVSAVVVSDSGQMERLAALKPSTFIRYKRWASELADIAPEKRGHCSRMAALVSELARGIAPAAVNP

SEQ ID NO: 8237 - protein, 72 aa, Passiflora oerstedii var. choconiana
GEVMPGQWEYQVGPSVGIDAGDHIWCSRYILERITEQAGVVLTLDPKPIEGDWNGAGCHTNYSTKSMREDGG

SEQ ID NO: 8238 - protein, 157 aa, Triticum aestivum
MAGCGEKSDAGVGLYAVLGVASDCSDAELRSAYRKLAMKWHPDKCGSGSSGGSEAAKARFQKIQAAYAVYVFPFLSDPNKRILYDVGTYKSDGNDEGAGEILGDILKAMTHTPPPLRDPCSCLLISYHGGSYRANHPSTYLLVPTVPSPCKKNVKKQ

SEQ ID NO: 8239 - protein, 57 aa, Passiflora ornithoura
WEYQVGPSVGIDAGDHIWCSRYILERITEQVGVVLTLDPKPIEGDWNGAGCHTNYST

SEQ ID NO: 8240 - protein, 204 aa, Rhizobium galegae
TQIKEFDTFPTLEQLPLWGFDGSSTMQAEGRSSDCVLKPVAIYPDPARTNGVLVMCEVMMPDGVTPHASNARATILDDEDAWFGFEQEYFFYQNGRPLGFPEQGYPAPQGPYYTGVGYSNVGDVAREIVEEHLDLCLAAGINHEGINAEVAKGQWEFQIFGKGSKKAADQIWMARYLLQRLTEKYGIDIEYHCKPLGDTDWNGS

SEQ ID NO: 8241 - protein, 429 aa, Phaseolus vulgaris
MAQILAPSTQWQMRFTKSSRHASPITSNTWSSLLMKQNKKTSSAKFRVLAVKSDGSTINRLEGLLNLDITPFTDKIIAEYIWIGGTGIDVRSKSRTISKPVEHPSELPKWNYDGSSTGQAPGEDSEVILYPQAIFKDPFRGGNNILVICDAYTPAGEPIPTNKRHRAAEVFSNPRVIAEVPWFGIEQEYTLLQTNVNWPLGWPVGGYPGPQGPYYCSAGADKSFGRDISDAHYKACLFAGINISGTNGEVMPGQWEYQVGPSVGIEAGDHIWASRYILERITEQAGVVLSLDPKPIEGDWNGAGCHTNYSTKSMREDGGFEVIKKAILNLSLRHKEHISAYGEGNERRLTGKMETASINTFSWGVANRGCSIRVGRDTEKNGKGYLEDRRPASNMDPYVVTSLLAESTLLWEPTLEAEALAAQKLALKV

SEQ ID NO: 8242 - protein, 56 aa, Passiflora penduliflora
  misc_feature (40)..(40): Xaa can be any naturally occurring amino acid
  misc_feature (52)..(52): Xaa can be any naturally occurring amino acid
WEYQVGPSVGIDAGDHIWCSRYILERITEQVGVVLTLDPXPIEGDWNGAGCXTIYG

SEQ ID NO: 8243 - protein, 346 aa, Rhizobium leguminosarum bv. viciae 3841
MTKYKLEYIWLDGYTPVPNLRGKTQIKEFDVFPTLEQLPLWGFDGSSTQQAEGRSSDCVLKPVAIYPDPARTNGALVMCEVMMPDGVTPHASNARATILDDEDAWFGFEQEYFFYQNGRPLGFPEQGYPAPQGPYYTGVGYSNVGDVAREIVEEHLDLCLAAGINHEGINAEVAKGQWEFQIFGKGSKKAADQIWMARYLLQRLTEKYGIDIEYHCKPLGDTDWNGSGMHCNFSTKYMREVGGKAYFEALMAQFDKNLMDHIDVYGPDNDKRLTGKHETAPWNKFSYGVADRGASIRVPHSFVKNDYKGYLEDRRPNSQGCPYQIASQVLKTISEVPTASSASAAA

SEQ ID NO: 8244 - protein, 197 aa, Rhizobium mongolense
AFPALEQLPLWGFDGSSTMQAEGRSSDCVLKPVAVYPDPARTNGALVMCEVMMPDGVTPHPSNSRATILDDEDAWFGFEQEYFFYENGRPLGFPEQGYPAPQGPYYTGVGYKNVGSVAREIVEEHLDLCLAAGINHEGINAEVAKGQWEFQIFGKGSKRAADQIWMARYLLLRLCEKYGIDIEFHCKPLGDTDWNGS

SEQ ID NO: 8245 - protein, 126 aa, Zea mays
  misc_feature (6)..(6): Xaa can be any naturally occurring amino acid
  misc_feature (13)..(13): Xaa can be any naturally occurring amino acid
  misc_feature (16)..(21): Xaa can be any naturally occurring amino acid
  misc_feature (28)..(29): Xaa can be any naturally occurring amino acid
  misc_feature (37)..(37): Xaa can be any naturally occurring amino acid
  misc_feature (41)..(41): Xaa can be any naturally occurring amino acid
  misc_feature (43)..(46): Xaa can be any naturally occurring amino acid
  misc_feature (52)..(52): Xaa can be any naturally occurring amino acid
  misc_feature (59)..(61): Xaa can be any naturally occurring amino acid
  misc_feature (71)..(71): Xaa can be any naturally occurring amino acid
  misc_feature (78)..(78): Xaa can be any naturally occurring amino acid
  misc_feature (81)..(81): Xaa can be any naturally occurring amino acid
  misc_feature (83)..(87): Xaa can be any naturally occurring amino acid
  misc_feature (94)..(94): Xaa can be any naturally occurring amino acid
  misc_feature (97)..(97): Xaa can be any naturally occurring amino acid
  misc_feature (100)..(100): Xaa can be any naturally occurring amino acid
  misc_feature (105)..(105): Xaa can be any naturally occurring amino acid
MGWSGXKCVIEVXNGXXXXXXILFFFEXXEKRWGGGXFLFXMXXXXRGGGGXKIVEKYXXXKIEIYILNEXEYGGIVXEEXLXXXXXGKCGKDXWYXFGXGDVFXFLNNRGKFEILLGEGGEYVFV

SEQ ID NO: 8246 - protein, 477 aa, Solanum tuberosum
MATATTLSPADAEKLNNLKSAVAGLNQISENEKSGFINLVGRYLSGEAQHIDWSKIQTPTDEVVVPYDKLAPLSEDPAETKKLLDKLVVLKLNGGLGTTMGCTGPKSVIEVRNGLTFLDLIVKQIEALNAKFGCSVPLLLMNSFNTHDDTLKIVEKYANSNIDIHTFNQSQYPRLVTEDFAPLPCKGNSGKDGWYPPGHGDVFPSLMNSGKLDALLAKGKEYVFVANSDNLGAIVDLKILNHLILNKNEYCMEVTPKTLADVKGGTLISYEGKVQLLEIAQVPDEHVNEFKSIEKFKIFNTNNLWVNLSAIKRLVEADALKMEIIPNPKEVDGVKVLQLETAAGAAIKFFDRAIGANVPRSRFLPVKATSDLLLVQSDLYTLTDEGYVIRNPARSNPSNPSIELGPEFKKVANFLGRFKSIPSIIDLDSLKVTGDVWFGSGVTLKGKVTVAAKSGVKLEIPDGAVIANKDINGPEDI

SEQ ID NO: 8247 - protein, 57 aa, Passiflora pittieri
WEYQVGPSVGIEAGDHIWCSRYILERITEQAGVVLTLDPKPIEGDWNGAGCHTNYST

SEQ ID NO: 8248 - protein, 356 aa, Dehalococcoides ethenogenes 195
MANKRDYYEVLGIERSASDEDIKKAFRKMAMKHHPDRNHEDGAAEKFKEINEAYEVLSNPEKRAAYDRFGFSAGSDAFGQGGFENFDFGGLGSIFETFFGGATQSAKRGPRRGPDMSYDIRITLEEAATGVEKEITTERLEYCSECSGTGAKAGTSLVKCTNCNGTGQVYQVQKSVFGRFTSVTPCPKCRGEGTIIGEPCAKCRGTGKEYVKRTVQVKIPAGVADGNQIRLNGYGGVGDKGASAGDVYINVSIASHADFKRDGDDVIYELEINFAQAALGTEVNVPGLSTSHKLKIPSGSQNGKYFVLKGKGIPHLNRFGSGDEMVHLNVVTPEKLSRKQKQLFEELEKSFAEDKK

SEQ ID NO: 8249 - protein, 366 aa, Halobacterium sp. NRC-1
MSETHTSDETEARDQLLAIAEQFYDQFADGDIPRMSLPTRSKSNIEYDEDADVWVYGDSQSTRSANSVRGARKLLKSVYTVDFLAQQLDEGRSSTLRELYYLSESWDEAEAQFNDQSESDKLVEDLEIVSGVKREDFHMRPEESGAKVMGPLRLREQTRRGDREIHCQEDVGQGGYQIPNNPDTIDFLDTDADFVLCVETGGMRDRLVENGFDDDYNAIVVHLGGQPARATRRLTKRLHDELDLPVTVFTDGDPWSYRIYGSVAYGSIKSAHLSEYLATPQAQFIGIRPQDIVDYDLPTDPLSDSDVNALESELEDPRFQSDFWTEQIGLQLDIDKKAEQQALASRGLDFVTDTYLPERLAEMGVL

SEQ ID NO: 8250 - protein, 473 aa, Aspergillus nidulans FGSC A4
MLPCVHGHLMSCIRVRASTQLLTPTPAYLQRTLQGFKLRKMTLQSIRSITEYNISTFRRHYVSEIAGSLGDLGTFLPIALALAANGTVSLASTLIFSGLFNILTGLFFGIPLPVQPMKAIAAVAIARSFSPGSIAAAGIFVAAVLFLGSITGLLQWFTRVVPIPVVKGIQVGAGLSLVMAACTTLHGLGWTHPSWADNRLWAIGVFVALLLTNSTPKRLPYALVVFIIGVVLAIIRSSLKSNLPSFSIWHPSIVIPVGSEWSEGAVDAGLGQLPLTTLNSVVAVVHLAADLLPSVPTPSVTAIGLSVSIMNLIGVWFGAMPVCHGSGGLAAQYRFGARSGASVVFLGVCKLVLGLVFGESLVNLLHRFPKALLAVMVIAAGLELVRVGESLNTSGARDLGRQVEDESGEQVHLSEEERNKRWMVMMVTVGLLVGFRNDAVGFVAGMLCHWSFELPALIHRARHRWSERRVRLP

SEQ ID NO: 8251 - protein, 115 aa, Glycine max
  misc_feature (93)..(93): Xaa can be any naturally occurring amino acid
MGVDYYKILQVDKHATDEELKKAYRKLAMKWHPDKNPTNKKEAETKFKQISEAYEVLSDPQKRAIYDEYGEEGLKGQVPPPDAGGHTFFQTGXPTTFSSSPRNADDIFAEFFGFS

SEQ ID NO: 8252 - protein, 95 aa, Oxalis tuberosa
  misc_feature (75)..(75): Xaa can be any naturally occurring amino acid
LYAGINISGTNGEVMPGQWEYQVGPSVGIEAGDHIWASRYILERITEQAGVVLTLDPKPIDGDWNGAGCHTNYSXKSMRDEGGFEVIKKAIFNLS

SEQ ID NO: 8253 - protein, 341 aa, Triticum aestivum
RPIPGDLVEQVCTKKQAGTGPEFPGYRRPTRPEDFVSLVENWLVKIQGASSLRGSFGETNQSELAAFTSYALAFPNSFLALVDTYDVMRSGVPNFCAVALALNDMGYKAVGIRLDSGDLAYLSIETRKFFCAIEKEFGVVGFGKTNITASNDLNEETIDALNKQGHEVDSFGIGTYLVTCYAQAALGCVFKLVEINKQPRIKLSEDVTKVSIPCKKRCYRLYGKEGYPLVDIMTGQDEPSPKVGERILCRHPFIESKRAHVVPQHVEELLKCYWPGNSSVQREELPSLNENRSRCMRQLERMRPDHLRKLNPTPYKVSVSAQLYDFIHFLWLNEAPVGELQ

SEQ ID NO: 8254 - protein, 459 aa, Saccharomyces cerevisiae
MSGSDRGDRLYDVLGVTRDATVQEIKTAYRKLALKHHPDKYVDQDSKEVNEIKFKEITAAYEILSDPEKKSHYDLYGDDNGAASSGGANGFGDEDFMNFFNNFFNNGSHDGNNFPGEYEAYEEGNSTSSKDIDIDISLTLKDLYMGKKLKFDLKRQVICIKCHGSGWKPKRKIHVTHDVECESCAGKGSKERLKRFGPGLVASQWVVCEKCNGKGKYTKRPKNPKNFCPDCAGLGLLSKKEIITVNVAPGHHFNDVITVKGMADEEIDKTTCGDLKFHLTEKQENLEQKQIFLKNFDDGAGEDLYTSITISLSEALTGFEKFLTKTFDDRLLTLSVKPGRVVRPGDTIKIANEGWPILDNPHGRCGDLYVFVHIEFPPDNWFNEKSELLAIKTNLPSSSSCASHATVNTEDDSNLTNNETISNFRIIHTDDLPEGIRPFKPEAQDSAYQKARSSYCCIQ

SEQ ID NO: 8255 - protein, 218 aa, Oryza sativa
MVKLTMIARVTDGLPLAEGLDDGRDQKDADFYKQQAKLLFKNLSKGQHEASRMSIETGPYYFQYPYVLCGYFILGIVHDSTQKLAFQYLEDLRNEFERVNGSQIETAARPYAFIKFDTFIQKTKKLYLDTRTQRNLAKLNDELYEVHQIMTRNVQEVLGVGEKLDQVTEMSTRLTSDTRIYADKAKDLNRQALIRKYAPVAIVIGVVLMLFWLKNKIW

SEQ ID NO: 8256 - protein, 143 aa, Vitis vinifera
MDPEGGSAGSCYYSVLGICRDASSSDIRTAYRKLALKWHPDWWAKNQALAGDAKRQFQQIQEVYSVLSDASKKSMYDAGFYDPMEEDRDFCDFMQEMISMMNKVGDEPGNVEDLQKIFVNMVILVKFSLGLKSWSLLFPSPKA

SEQ ID NO: 8257 - protein, 364 aa, Xylella fastidiosa Ann-1
MSKRDYYQVLGVPRTASEDDLKKAYRRCAMKYHPDRNPGDAAAEAAFKECKEAYEVLADTKKRKLYDTHGHAAFEHGVGSGNAPDMNDIFGNIFGGARASRRGADVGYMVELDLEEAVAGVERQIQIPTLVECTHCHGSGSEDGHVETCGTCRGSGQVRIQRGIFAMQQTCPHCGGRGVIIRNPCKVCNGAGRVEDHKTLSVKIPAGVDNGDRIRLSGEGEQGPDGVPPGDLYVEVRVREHPIFQRDGDDLHCEVPVRISQAALGDIVRVATLDGEAEIRIPAETQSGKLFRLRGKGVRSVRSRTEGDLYCRIVVETPVNLTAEQRNLLEQFEMTFAGEDARKHSPKSATFLDGVKSFWDRMTS

SEQ ID NO: 8258 - protein, 424 aa, Arabidopsis thaliana
MSSYMHPLLGQELHLQRPEDSRTPPDQNNMELNRSEADEAKAETTPTGGATSSATASGSSSGRRPRGRPAGSKNKPKPPTIITRDSPNVLRSHVLEVTSGSDISEAVSTYATRRGCGVCIISGTGAVTNVTIRQPAAPAGGGVITLHGRFDILSLTGTALPPPAPPGAGGLTVYLAGGQGQVVGGNVAGSLIASGPVVLMAASFANAVYDRLPIEEEETPPPRTTGVQQQQPEASQSSEVTGSGAQACESNLQGGNGGGGVAFYNLGMNMNNFQFSGGDIYGMSGGSGGGGGVRKNGVVMRIGSPMLHESENLVGDGVEAPPRGERDEIGEEVGGETNVVSESCGGEEGAQDAAKTTPEGEADRIGEEARGQANVVSNVDVADVAEVRSPLRRSKRRQIRLEEEAHDAVEPVPEGEANQIGEEA

SEQ ID NO: 8259 - protein, 390 aa, Mycoplasma pneumoniae M129
MAAGKRDYYEVLGVSRSATAQDIKRAFRKLAMQYHPDRHKGEGETVQKQNEEKFKEVNEAYEVLSDTEKRGMYDRFGHEGLNASGFHETGFNPFDIFNSVFGEGFSFDMDGGSPFDFIFSRGKKSRQNRVVLPYDLEIAVGVDISFFEMTNGCTRTIEYTKRVTCSACDGFGAEGGETGMVSCNSCEGNGFILKNQRSIFGTVQSQMLCQSCGGQGKQAKHKCKTCKGSKYKKVPTTKEIQIPAGIYHGDALVDDHGGNEFGGHVGKLVVHVGVLPSKIFKRVDHNVVANVLVDPMIAITGGKIELPTLEGIKEFNLRAGTKSGEQIVIPGGGIKFTKNFRKKAGDLIIIISYARPSEYSAPELRKLKEFIKPNQEVKQYLNALKNEYKS

SEQ ID NO: 8260 - protein, 351 aa, Gelidium crinale
MEKSFDQLLSLNVDEGCIVEYVWIDGYDAVRSKGRYLKNIPSKASDLPDWNYDGSSTNQASGEDSEVIIKPQRIFPDPFRGKPNLLVMCDTYTPNGEPLKTNTRFECERIMNQAKDLKPWFGLEQEYFLINPNTGKPLGFPNDKDPEPQGPYYCGVSGSKMFGRDIADAHFKACVYAGIKISGINAEVAPGQWEFQVGPCVGIEEGDELWMGRYLLQRIAEMKGLDVNYDPKPVKGDWNGSGCHSNFSTKPMREKDGYQNAIIPALEKLSKKHKEHIAAYGIGNEDRLTGKHETASIEQFKWGVADRGASCRVGHDVEKKGYGYFEDRRPAGNCDPYVVTMMLVKTCCLED

SEQ ID NO: 8261 - protein, 178 aa, Glycine max
MLLDKNDTQETHYEVLNVKEDANYEEIRASYRSAVLSLHPDKLLKTSETSSSNQTAEERFLKVQKAWEILSNSSSRSFYDNDLRSSRQDVLAADVAEDLSLQDMMIEDDGEALELFYQCRCGDYFSVDSLELKNMGYSLLREGSGISIMNVDTSPGSVILPCGSCSLKARLLINMDVN

SEQ ID NO: 8262 - protein, 204 aa, Rhizobium mongolense
TQIKEFDAFPALEQLPLWGFDGSSTMQAEGRSSDCVLKPVAVYPDPARTNGALVMCEVMMPDGVTPHPSNSRATILDDEDAWFGFEQEYFFYENGRPLGFPEQGYPAPQGPYYTGVGYKNVGSVAREIVEEHLDLCLAAGINHEGINAEVAKGQWEFQIFGKGSKRAADQIWMARYLLLRLCEKYGIDIEFHCKPLGDTDWNGS

SEQ ID NO: 8263 - protein, 371 aa, Magnaporthe grisea 70-15
MVKETKLYDALGIKPDATQDDIKKGYRKQALKWHPDKNKNNTDAAEKFKEVSQAYEILSDPEKRKTYDQYGLEFLLRGGVPMDTDGGNPFAGGAGGMPGGFQNFGFGGPGGGGTFRFSTNGSGFSFSNPDSVFSDFFRQASGGGGGGMGGINPEDLEDILGGGARSSRGGPRVRSSFGDSVPGGGARSQRQPTPEITTVERPLPVTLEEMFNGTTKKMKIKRKMFDDSGKRTTTDTVLEVPIKPGLKKGSKIRFKGVGDQEEGGQQDLVFIVEEKKHALYTREGDDVVHDVDLELKEALTGWKRTITTIDGKQLQIDKAGPTQPGSRDTYPGLGMPISKKPGQRGNFVVKYNVKFPTYLTPEQKTKLKEIL

SEQ ID NO: 8264 - protein, 463 aa, Oryza sativa Japonica Group
MASSAGDPLLSGEAGDGRRRFVPSTIRLKTSVWSELGGAVGDLGTYIPIVLALSLASHLDLGTTLIFTALYNFATGLLFGIPMPVQPMKSIAAVALSSAHLTIPQIMSAGLAVAAILLFLGVTGLMTTLYRLLPLPVVRGVQLSQGLSFAFTAVKYIRYVQDFSRSSSASTSVPRPLLGLDGLVLALAALLFIILATGSGDDEDVNRDGTSRRRRSCSRVPAALIVFALGLVLCFVRDPSILQDLRFGPAPLGLVKITWDDFKIGFWEGAVPQLPLSVLNSVIAVCKLSSDLFPERAELSPARVSVSVGLMNFVGCWFGAMPCCHGAGGLAGQYRFGGRTGASVVFLAIGKLALGLVFGNSFVTILGQFPIGILGVMLLFSGIELAMASRDMGSKQESFVMLVCAGVSLTGSSAALGFISGIVLYLLLRLRDLEWDIRGLLGRWAAGRRQSTNEANEDGAGDA

SEQ ID NO: 8265 - protein, 82 aa, Glycine max
MDARGEGSSTSYYNVLGVSSDSNVDEIRRAYRKLAMQWHPDKCTRSPSLLGEAKRKFQQIQEAYSGKALRFGRVAGHVNGNG

SEQ ID NO: 8266 - protein, 233 aa, Brassica napus
MASNSNEKGNDDLYAVMGLKKECTTTELRSAYKKLALRWHPDRCSSMGDSEFVDESKKKFQAIQEAYSVLSDSNKRFLYDVGAYNSDDDDHDQNGMGDFLNEMATMMNQSKPSENNTGDSFEQLQDLFNEMFQGDASAFSSSSSSCNASTFTSSCSFVFDTNTQQSPFETNSMGMNDPFAFDPRAHTFSLGVKHQQDFKKGKNNGGRRNRRKNNAQSATHETSSSNNYGVPTS

SEQ ID NO: 8267 - protein, 197 aa, Rhizobium gallicum
AFPALEQLPLWGFDGSSTMQAEGRSSDCVLKPVAVYPDPARSNGALVMCEVMMPDGVTPHPSNSRATILDDEDAWFGFEQEYFFYENGRPLGFPEQGYPAPQGPYYTGVGYKNVGSVAREIVEEHLDLCLAAGINHEGINAEVAKGQWEFQIFGKGSKRAADQIWMARYLLLRLCEKYGIDIEFHCKPLGDTDWNGS

SEQ ID NO: 8268 - protein, 204 aa, Rhizobium gallicum
TQIKEFDAFPALEQLPLWGFDGSSTMQAEGRSSDCVLKPVAVYPDPARSNGALVMCEVMMPDGVTPHPSNSRATILDDEDAWFGFEQEYFFYENGRPLGFPEQGYPAPQGPYYTGVGYKNVGSVAREIVEEHLDLCLAAGINHEGINAEVAKGQWEFQIFGKGSKRAADQIWMARYLLLRLCEKYGIDIEFHCKPLGDTDWNGS

SEQ ID NO: 8269 - protein, 182 aa, Glycine max
VLNNIYILVSTNLFPSGNSGSGPLGNVILDGIDFDIESGGSDHYDDLARALNSFSSQRKVYLSAAPQCIIPDAHLDRAIQTGLFDYVWVQFYNNPSCQYSSGNTNNLINSWNQWITVPASQIFMGLPASEAAAPSGGFVPADVLTSQVLPVIKQSSKYGGVMLWNRFNDVQNGYSNAIIGSV

SEQ ID NO: 8270 - protein, 379 aa, Ralstonia metallidurans CH34
MAKRDYYEVLGVGKNASDDEIKKAYRKLAMKHHPDRNPDNKEAEEKFKEVKEAYEMLSDPEKKAAYDQYGHAGVDPNMAGGFGGGGFGGGGFAEAFGDIFGDIFGQAAGGGRRGGGPQAYRGADLRYSMEISLEQAAHGHEAQIRVPHWDDCEHCHGNGAEPGSSVETCPTCNGVGQVRVSQGFFTMQQTCPKCHGSGKFIPKPCTKCHGQGKLKSQKTLEVKIPAGIDEGMRIRSSGNGEPGINGGPPGDLYVEVHIKQHPVFERDGDDLHCQMPISFATAALGGDIEVPTLGGRASFPVPEGTQAGKTFRLRGKGIKGVRSGYPGDLYVHVNVETPVKLTEAQKDILRQFDRSVHEGGSRHSPQEQSWLDKVKSFFS

SEQ ID NO: 8271 - protein, 58 aa, Passiflora punctata
WEYQVGPSVGIEAGDHIWCSRYILERITEQVGVVLTLDPKPIEGDWNGAGCHTNYSTK

SEQ ID NO: 8272 - protein, 198 aa, Rhizobium leguminosarum
AIYPTLEQLPLWGFDGSSTQQAEGRSSDCVLKPVAIYPDPARTNGALVMCEVMMPDGVTPHASNARATILDDEDAWFGFEQEYFFYQNGRPLGFPEQGYPAPQGPYYTGVGYSNVGDVAREIVEEHLDLCLAAGINHEGINAEVAKGQWEFQIFGKGSKKAADQIWMARYLLQRLTEKYGIDIEYHCKPLGDTDWNGS

SEQ ID NO: 8273 - protein, 872 aa, Escherichia coli str. K12 substr. W3110
MSILTRWLLIPPVNARLIGRYRDYRRHGASAFSATLGCFWMILAWIFIPLEHPRWQRIRAEHKNLYPHINASRPRPLDPVRYLIQTCWLLIGASRKETPKPRRRAFSGLQNIRGRYHQWMNELPERVSHKTQHLDEKKELGHLSAGARRLILGIIVTFSLILALICVTQPFNPLAQFIFLMLLWGVALIVRRMPGRFSALMLIVLSLTVSCRYIWWRYTSTLNWDDPVSLVCGLILLFAETYAWIVLVLGYFQVVWPLNRQPVPLPKDMSLWPSVDIFVPTYNEDLNVVKNTIYASLGIDWPKDKLNIWILDDGGREEFRQFAQNVGVKYIARTTHEHAKAGNINNALKYAKGEFVSIFDCDHVPTRSFLQMTMGWFLKEKQLAMMQTPHHFFSPDPFERNLGRFRKTPNEGTLFYGLVQDGNDMWDATFFCGSCAVIRRKPLDEIGGIAVETVTEDAHTSLRLHRRGYTSAYMRIPQAAGLATESLSAHIGQRIRWARGMVQIFRLDNPLTGKGLKFAQRLCYVNAMFHFLSGIPRLIFLTAPLAFLLLHAYIIYAPALMIALFVLPHMIHASLTNSKIQGKYRHSFWSEIYETVLAWYIAPPTLVALINPHKGKFNVTAKGGLVEEEYVDWVISRPYIFLVLLNLVGVAVGIWRYFYGPPTEMLTVVVSMVWVFYNLIVLGGAVAVSVESKQVRRSHRVEMTMPAAIAREDGHLFSCTVQDFSDGGLGIKINGQAQILEGQKVNLLLKRGQQEYVFPTQVARVMGNEVGLKLMPLTTQQHIDFVQCTFARADTWALWQDSYPEDKPLESLLDILKLGFRGYRHLAEFAPSSVKGIFRVLTSLVSWVVSFIPRRPERSETAQPSDQALAQQ

SEQ ID NO: 8274 - protein, 74 aa, Passiflora quadrangularis
TNGEVMPGQWEYQVGPSVGIDAGDHIWCSRYILERITEQAGVVLSLDPKPIEGDWNGAGCHTNYSTKSMREDGG

SEQ ID NO: 8275 - protein, 204 aa, Mesorhizobium temperatum
TQIKEYAEFPTLDQLPLWGFDGSSTMQAEGHSSDCVLKPVAIYPDPARTNGVLVMCEVMMPDGVTPHASNKRATILDDEGAWFGFEQEYFFYKDGRPLGFPESGYPAPQGPYYTGVGYSNVGSVARQIVEEHLDLCLAAGINHEGINAEVAKGQWEFQIFGKGSKKAADQMWMARYLMQRLTEKYGIDIEYHCKPLGDTDWNGS

SEQ ID NO: 8276 - protein, 75 aa, Passiflora quadrangularis
GTNGEVMPGQWEYQVGPSVGIDAGDHIWCSRYILERITEQAGVVLSLDPKPIEGDWNGAGCHTNYSTKSMRDDGG

SEQ ID NO: 8277 - protein, 171 aa, Oryza sativa Japonica Group
MEHKETGCQQPEGPILCINNCGFFGSAATMNMCSKCHKEMIMKQEQAKLAASSIDSIVNGGDSGKEPIIAGHAEVAVAQVEVKTLVAQPAEIAGPSEGVTVNPKGREGPNRCSTCRKRVGLTGFNCRCGNLYCAMHRYSDKHDCQFDYRTAARDAIAKANPVVKAEKLDKI

SEQ ID NO: 8278 - protein, 342 aa, Streptomyces avermitilis MA-4680
MTFKAEYIWIDGTEPTAKLRSKTKILADDAKGAELPIWGFDGSSTNQAEGHASDRVLKPVATYPDPIRGGDDVLVMCEVLNIDMTPHESNTRATLAEVEEKFGAQEPIFGIEQEYTFFKGSRPLGFPEGGFPAAQGGYYCGVGSDEIFGRDVVEAHLENCLKAGLGISGINAEVMPGQWEFQVGPLAPLEVSDQLWVARWLLYRTAEDFGVSATLDPKPVKGDWNGAGAHTNFSTKAMREGYDAIITACESLGEGSKPLDHVKNYGAGIDDRLTGLHETAPWNEYSYGVSNRGASVRIPWQVEKDGKGYIEDRRPNANVDPYVVTRLLVDTCCSALEKAGQV

SEQ ID NO: 8279 - protein, 590 aa, Saccharomyces cerevisiae
MKTCYYELLGVETHASDLELKKAYRKKALQYHPDKNPDNVEEATQKFAVIRAAYEVLSDPQERAWYDSHKEQILNDTPPSTDDYYDYEVDATVTGVTTDELLLFFNSALYTKIDNSAAGIYQIAGKIFAKLAKDEILSGKRLGKFSEYQDDVFEQDINSIGYLKACDNFINKTDKLLYPLFGYSPTDYEYLKHFYKTWSAFNTLKSFSWKDEYMYSKNYDRRTKREVNRRNEKARQQARNEYNKTVKRFVVFIKKLDKRMKEGAKIAEEQRKLKEQQRKNELNNRRKFGNDNNDEEKFHLQSWQTVKEENWDELEKVYDNFGEFENSKNDKEGEVLIYECFICNKTFKSEKQLKNHINTKLHKKNMEEIRKEMEEENITLGLDNLSDLEKFDSADESVKEKEDIDLQALQAELAEIERKLAESSSEDESEDDNLNIEMDIEVEDVSSDENVHVNTKNKKKRKKKKKAKVDTETEESESFDDTKDKRSNELDDLLASLGDKGLQTDDDEDWSTKAKKKKGKQPKKNSKSTKSTPSLSTLPSSMSPTSAIEVCTTCGESFDSRNKLFNHVKIAGHAAVKNVVKRKKVKTKRI

SEQ ID NO: 8280 - protein, 356 aa, Nicotiana tabacum
MSPLSDLISLNLSDSTQKIIAEYIWIGGSGMDLRSKARTLSGPVTDPSELPKWNYDGSSTGQAPGEDSEVILYPQVYFKDPFRRGNNILVMCDAYTPAGEPIPTNKRHAAAKIFSNPDVVAEEPWYGIEQEYTLLQRDINWPLAWPIGGFPGPQGPYYCGTGADKAFGRDIVDSHYKACLYAGFNISGINGEVMPGQWEFQVGPSVGISAGDEVWVARYILERIAEIAGVVVSFDPKPIPGDWNGAGAHTNYSTKSMREDGGYEVILKAIEKLGLKHKVHIAAYGEGNERRLTGKHETANISTFKWGVANRGASVRVGRDTYKAGKGYFEDRRTASNMDPYAVTAMIADTNHICKS

SEQ ID NO: 8281 - protein, 311 aa, Hevea brasiliensis
MAKRTQAILLLLLAISLIMSSSHVDGGGIAIYWGQNGNEGTLTQTCSTRKYSYVNIAFLNKFGNGQTPQINLAGHCNPAAGGCTIVSNGIRSCQIQGIKVMLSLGGGIGSYTLASQADAKNVADYLWNNFLGGKSSSRPLGDAVLDGIDFDIEHGSTLYWDDLARYLSAYSKQGKKVYLTAAPQCPFPDRYLGTALNTGLFDYVWVQFYNNPPCQYSSGNINNIINSWNRWTTSINAGKIFLGLPAAPEAAGSGYVPPDVLISRILPEIKKSPKYGGVMLWSKFYDDKNGYSSSIRDSVLFLHSEKCMTVL

SEQ ID NO: 8282 - protein, 75 aa, Triticum aestivum
  misc_feature (9)..(9): Xaa can be any naturally occurring amino acid
  misc_feature (18)..(18): Xaa can be any naturally occurring amino acid
LYEVHQIMXRNVQEVLVXEKLDQVSEMSSRLTSDTRIYADKAKDLNRQALIRKYAPVAIVIGVVLMLFWLKNKIW

SEQ ID NO: 8283 - protein, 472 aa, Candida albicans SC5314
MRNALNNLADTVENPEQTTRFENEMDNFFTLFRRYLTEKASGSTLDWDKIRSPSSDEVVEYGDLNSANNSANLSKLAVLKLNGGLGTSMGCVGPKSVIEVRDGNNFLDLAVRQIEHLNRKYDADVPLLLMNSFNTDADTEKIIKKYQSHRIRVKTFNQSRFPRIYKDSLLPVPESFDDSLEAWYPPGHGDLFEALVQSGELDALLAQGREILFVSNGDNLGATVDSKILDHMIETGAEYIMELTPKTRADVKGGTLINYQGEVRLLEIAQVPKEHVEEFKSIKKFKYFNTNNLWINLRAIKKLVEANAIEVEIIPNQKTISHGKSDINVLQLETAVGAAIRHFKGAHGVVVPRSRFLPVKTCSDLLLVKSDLFYLEHGALVLDPTRDGFSNPLIKLGSHFKKVSGFQSRIPYIPKILELDHLTITGNVTIGKGVQLKGTVIIVCNDGDKIDIPNGAILENVVVTGNLTILEH

SEQ ID NO: 8284 - protein, 356 aa, Nicotiana tabacum
MAHLSDLVNLNLSDSTQKIIAEYIWIGGSGMDVRSKARTLSGPVDDPSKLPKWNYDGSSTGQAPGEDSEEILYPQAIFKDPFRRGNNILVICDCYTPAGEPIPTNKRHSAAKIFSHPDVVVEEPWYGLEQEYTLLQKDINWPLGWPLGGFPGPQGPYYCGIGAGKVFGRDIVDSHYKACLYAGINISGINGEVMPGQWEFQVGPSVGISAADELWAARYILERITEIAGVVVSFDPKPIPGDWNGAGAHTNYSTKSMRNEGGYEVIKKAIENLGLRHKEHIAAYGEGNERRLTGRHETADINTFKWGVANRGASIRVGRDTEREGKGYFEDRRPASNMDPFVVTSMIAETTILSEP

SEQ ID NO: 8285 - protein, 95 aa, Oxalis cf. tuberosa EE259
LYAGINISGTNGEVMPGQWEYQVGPSVGIEAGDHIWASRYILEGITEQAGVVLTLDPKPIDGDWNGAGCHTNYSTKSMRDEGGFEVIKKAILNLS

SEQ ID NO: 8286 - protein, 73 aa, Codonanthe serrulata
ISGTNGEVMPGQWEFQVGPSVGIEAGDHIWCARYLLERITEQAGVVLSLDPKPIEGDWNGAGCHTNYSTKSTR

SEQ ID NO: 8287 - protein, 347 aa, Arabidopsis thaliana
MGLDYYDILKVNRNATEDDLKKSYRKLAMKWHPDKNPNTKTEAEAKFKQISEAYEAKYEVMFQVLSDPQKRAVYDQYGEEGLSDMPPPGSTGNNGRAGGFNPRNAEDIFAEFFGSSPFGFGSAGGPGRSMRFQSDGGGGMFGGFGGGNNGSENNIFRTYSEGTPAPKKPPPVESKLPCSLEELYSGSTRKMKISRSIVDANGRQAQETEILTIVVKPGWKKGTKIKFPDKGNEQVNQLPADLVFVIDEKPHDLFTRDGNDLITSRRVTLAEAIGGTTVNINTLDGRNLPVGVAEIVSPGYEFVVPGEGMPIAKEPRNKGDLKIKFDVQFPARLTTEQKSALKRVLAG

SEQ ID NO: 8288 - protein, 112 aa, Triticum aestivum
  misc_feature (99)..(99): Xaa can be any naturally occurring amino acid
MVKLTMIARVTDGLPLSEGLDDSRDLKDADFYKQQAKLLFKNLSRGQHEASRMSIETGPYLFHYIIEGRVCYLTLCDRSYPKKLAFQYLEDLKNEFEKXQWQQIETAARHMH

SEQ ID NO: 8289 - protein, 646 aa, Oryza sativa Indica Group
MTRHARETFLMALTTFSFLATFPWLDLMAWRMDEYLSWIRPKLLRVAASLNGTTGCSARRRAAPRDEDKDSFMHLVSRYLIREEKEMIDWNKVERPTPEMVVPYDSLVQAPRDIPEIRNLLNKLAVLKLNGGLGTTMECVAPKCTIEVRSGLTFLDLAIMQTEIVEKYTNIEIHTFNQNKYPRIITEKFLPLSSEGSTGSHCWYPPGHGDVFFSLCKSGILDTMLSQGKEYVFIASSENLGATVDIEIESLTSTEILNHLIHNKNEYCMELLEIFQVPYENVAFGYRRVNLKAIKRLVKAEALKMEIIPNLKEVDGVKVLQLEKEAGSAIQCFEKAIGVTVPRSRFLAVKNTSDLFLILSDLYIVMDGTVTRNPARDNSTNPLIDLGPEFRKVDSFLDRFKSIPSIVALDSLKISGDVWFGSRITLKGEVTIAAQLGLKLDILDGSVFDNKHSTHSSGAIKYTMKLDEGADCASIDSALNRLNPGSTLILKKDDFYRYIDPIQARNRAMFHSESNCIITATLKDNWFAKLVQGKLWLIILVFHQFKLLSRRRLRWGERRRRTLRSIHQDIQSYLDNYSDSDMWHLIVHSVARVISNVLEDVNRKYMKNHYLGFLAIHSTVFAIEVIGSYAVELNYDIEHYAEPPEL

SEQ ID NO: 8290 - protein, 293 aa, Beta vulgaris
MAAKIVSVLFLISLLIFASFESSHGSQIVIYWGQNGDEGSLADTCNSGNYGTVILAFVATFGNGQTPALNLAGHCDPATNCNSLSSDIKTCQQAGIKVLLSIGGGAGGYSLSSTDDANTFADYLWNTYLGGQSSTRPLGDAVLDGIDFDIESGDGRFWDDLARALAGHNNGQKTVYLSAAPQCPLPDASLSTAIATGLFDYVWVQFYNNPPCQYDTSADNLLSSWNQWTTVQANQIFLGLPASTDAAGSGFIPADALTSQVLPTIKGSAKYGGVMLWSKAYDSGYSSAIKSSV

SEQ ID NO: 8291 - protein, 334 aa, Sesbania rostrata
MMSSERQALILLLFTLLKLSFKSCEASIGVNWGQNKREGSLSSTCDSGNYDTVHLGYLNVFGCGRIPSGNFGGHCGGYRNPCTILEPQIQHCQQKGIKLFLSLGGPYGDYSLCSRRDAKQVANYLYNNFLSGQYGPLGSVTLDGIDLEIKGGSNRYWDDLANELASLKSHNYQFSLSAVPQCAMPDYYLDRAIGTGVFDDILVQFYNSPTCQYSRGNTERLLDSWNGWASVGEAFNSTVYMGLAASPEMSPFGGYIQPRVLTSEVIPFVKNGPNYGGIMLWSRYYDIQNQYSDKIKPYLSNYVWQSVTEAISEAASAALHRILHKPYVATTPTI

SEQ ID NO: 8292 - protein, 344 aa, Xanthobacter autotrophicus Py2
MPKFKLEYIWLDGYTPTPNLRGKTQIKEYDVFPTLEQLPLWGFDGSSTQQAEGRSSDCVLKPVAVYPDPARTDGALVMCEVMMPDGVTPHPTNKRATILDDAGAWFGFEQEYFFYKDGRPLGFPEHGYPAPQGPYYTGVGFKNVGNIARQIVEEHLDLCLAAGINHEGINAEVAKGQWEFQIFGKGSKKAADEVWMARYLLLRLTEKYGVDIEFHCKPLGDTDWNGSGMHANFSTTYLREVGGKAYFEALMAAFEANLEDHIAVYGPDNHMRLTGKHETAPWNKFSYGVADRGASIRVPHSFVKNDYKGYLEDRRPNSMGDPYQIASQILKTIASVPTDVSAAA

SEQ ID NO: 8293 - protein, 335 aa, Arabidopsis thaliana; identical to SEQ ID NO: 7809

SEQ ID NO: 8294 - protein, 293 aa, Cicer arietinum
MEKCFNIIPSLLLISLLIKSSNAAGIAVYWGQNGNEGSLQDACNTNNYQFVNIAFLSTFGNGQNPQINLAGHCDPSTNGCTKFSPEIQACQAKGIKVLLSLGGGAGSYSLNSAEEATTLANYLWNNFLGGTSTSRPLGDAVLDGIDFDIESGGQHYDELAKALNGFSQQKVYLSAAPQCPYPDAHLDSAIQTGLFDYVWVQFYNNPQCQYSNGNINNLVNAWNQWTSSQAKQVFLGVPASDAAAPSGGLIPADVLTSQVLPAIKTSPKYGGVMIWDRFNDAQSGYSNAIKGSV

SEQ ID NO: 8295 - protein, 168 aa, Vitis vinifera
MESTSLQESFDCAAFMADDTPSTTTLIRPSRWWFSSFRLKTTLSVELGGSVGDLGTYIPIVLTLTLVNHLDLSTTLIFTALYNISTGFLFSIPMPIQPMKSIAVVAISDPLLSLPQIAVASLSTAATLFIFGATSLMSLLYRFIPLPVVRGVQLSQAWCFALFETLQL

SEQ ID NO: 8296 - protein, 85 aa, Glycine max
DFSATSLSVTVGLMNLIGSWFGAMPSCHGAGGLAGQYKFGGRSGGCVALLGVAKLVLGLVLGTSLAHILKQFPVGILGVLLLFAG

SEQ ID NO: 8297 - protein, 164 aa, Zea mays
AKVLCTSPCFYVTIYINITNKVLLDQFFDHAIGINVPRSRFLPVKATSDLQLVQSDLYTLVDGFVTRNSARTNPSNPSIELGPEFKKVGSFLGRFKSIPSIVELDILKVSGDVWFGSGIVLKGKVTITAKPGVKLEIPDGAVIGNKDNFGKGKRKQYQMPYNLN

SEQ ID NO: 8298 - protein, 464 aa, Oryza sativa Japonica Group
MKEEKKRSEEDETAVGSRNFRAPATPPAAISSSSSSPALPGDDQLPPSWFGVLIDAFSVVCLSNGNRGVELDAFGHVVSKSCLMHDDADVVVRAPFAVVSGLLDKMVKLTMVARVTDGLPLAEGLDDGRDQKDADFYKQQAKLLFKNLSKGQHEASRMSIETGPYFFHYIIEGRVCYLTMCDRSYPKKLAFQYLEDLKNEFERVNGSQIETAARPYAFIKFDTFIQKTKKLYLDTRTQRNLAKLNDELYEVHQIMTRNVQEVLGVGEKLDQVTEMSTRLTSDTRMYADKAKDLNRQRLIYGCGGRGCCGGGIGFGGRHLVVLLLLLLLPILEARARLLDPLARGGGHPLQAAALAVRLLEAALQLSGAGAGPLQLRQRLGQPRPRRRQLRVRRGLPPPQLRRRRPRPPRVGEPPPLAHPPAASRGARLGRGRKAEGGAVWWAPGLWSGWVEVEVEVVVDSFPPL

SEQ ID NO: 8299 - protein, 379 aa, Salmonella enterica subsp. enterica serovar Typhi str. CT18
MAKRDYYEILGVSKTAEEREIKKAYKRLAMKYHPDRNQGDKEAEAKFKEIKEAYEVLTDAQKRAAYDQYGHAAFEQGGMGGGFGGGFNGGADFSDIFGDVFGDIFGGGRGRQRAARGADLRYNMDLTLEEAVRGVTKEIRIPTLEECDVCHGSGAKAGTQPQTCPTCHGSGQVQMRQGFFAVQQTCPHCQGRGTLIKDPCHKCHGHGRVEKSKTLSVKIPAGVDTGDRIRLAGEGEAGEHGAPAGDLYVQVQVKQHPIFEREGNNLYCEVPINFAMAALGGEIEVPTLDGRVMLKVPSETQTGKLFRMRGKGVKSVRGGAQGDLLCRVVVETPVGLSEKQKQLLKDLQESFGGPTGEKNSPRSKSFFDGVKKFFDDLTR

SEQ ID NO: 8300 - protein, 809 aa, Zea mays; identical to SEQ ID NO: 1915
  misc_feature (320)..(320): Xaa can be any naturally occurring amino acid

SEQ ID NO: 8301 - protein, 202 aa, Mesorhizobium amorphae
IKDYAEFPTLEQLPLWGFDGSSTQQAEGHSSDCVLKPVAVFPDPARTNGVLVMCEVMMPDGVTPHSSNKRATILDDEGAWFGFEQEYFFYKDGRPLGFPESGYPAPQGPYYTGVGYSNVGSVARQIVEEHLDQCLAAGINHEGINAEVAKGQWEFQIFGKGSKKAADQMWMARYLMQRLTEKYGIDIEYHCKPLGDTDWNGS

SEQ ID NO: 8302 - protein, 356 aa, Dehalococcoides sp. VS
MVNKRDYYEVLGIERSASDEDIKKAFRKMAMKHHPDRNHEEGAAEKFKEVNEAYEVLSNPEKRAAYDRFGFSAGADAFGQGGFENFDFGGLGSIFETFFGGATQGAKRGPRRGPDMSYDIQISLEEAATGVEKEITTERLEYCTECSGTGAKAGTSPVKCTNCNGTGQVYQVQKSVFGRFTSVTPCPKCRGEGTIIGEPCAKCRGTGKEYVKRTVQVKIPAGVADGNQIRLNGYGGVGDKGASAGDVYINVSIAEHTDFKRDGDDVVYELKINFAQAALGTEVNVPGLNTEHKLKIPPGSQNGKYFVLKGKGIPHLNRFGSGDEMVQLNVVTPEKLSRKQKQLFEELEKSFAEDKK

SEQ ID NO: 8303 - protein, 79 aa, Solanum lycopersicum
QETIAAYGEGNERRLTGRHETADINTFKWGVANRGASIRVGRDTEKEGKGYFEDRRPASNMDPYVVTSMIAETTILWNP

SEQ ID NO: 8304 - protein, 67 aa, Passiflora racemosa
GTNGEVMPGQWEYQVGPSVGIDAGDDIWCSRYILERITEQAGVILSLDPKPIEGDWNGAGCHTNYST

SEQ ID NO: 8305 - protein, 58 aa, Passiflora reflexiflora
WEYQVGPSVGIDAGDHIWCSRYILERITEQAGVVLTLDPKPVEGDWNGAGCHTNYSTK

SEQ ID NO: 8306 - protein, 383 aa, Lactobacillus reuteri
MAEQDYYDILGVSKDASEKDIKRAYRRLAAKYHPDVNHEPGAEEKFKKINEAYETLSDSQKRAQYDQFGSAGPQGAGGQGFGGFGGGQAYSNFGGGFDDIFSQFFGGGGRTRRDPTAPRQGRDLQYAMTLDFMDAVFGKTTTIKYNRDAECKTCHGTGAKPGKSPITCPRCHGAGVITSVRQTPLGNMQTQTTCPECNGTGKIIKPEDRCDACHGAGHVHERHELEVKVPAGVDDGQQMRLQHQGDAGENGGPAGDLYIVFRVTPSREFRRDGSTIYVDRDISFAQAALGDEVKIKTVHGDVNLKIPAGTQSETNFRLRGKGVPHLNGNGNGDEHVTVHVKTPKSLNKRQREAMLAFAAASGEDVKGVKKTVLDKLRDAFEDK

SEQ ID NO: 8307 - protein, 502 aa, Candida glabrata CBS 138
MSTAKKHTKTHSTYAFESNTNSVAASQMRNALNKLADSIGSEHGDDARTRFENELDSFFTLFRRYLVEKSSSNTLEWDKIKSPNPEEVVRYDTINSQAENVSSLSKLAVLKLNGGLGTSMGCVGPKSVIEVREGNSFLDLSVRQIEHLNRQYDSDVPLLLMNSFNTDKDTEHLIKKYSANRIRIRSFNQSRFPRVYKDSMLPVPETYNDPKDAWYPPGHGDLFESLHASGELDALIAQGREILFVSNGDNLGATVDLKILNHMIETGAEYIMELTDKTRADVKGGTLISYDGQVRLLEVAQVPKEHIDEFKNIRKFTNFNTNNLWINLKAVKRLVESSALEMEIIPNQKTITRGGQEINVLQLETACGAAIRHFSGAHGVVVPRSRFLPVKTCSDLLLVKSDLFYLQHGALKLDPSRFGPNPLIKLGSHFKKVSDFSARIPHIPKLVELDHLTITGNVFLGKGVTLRGTVIIVCSDGQKIDIPNGSVLENVVITGNLQILEH

SEQ ID NO: 8308 - protein, 605 aa, Oryza sativa Indica Group
MDRYRVAPRPVYLSAAAAAGGDHGDGPRRLPRGVAGGGGAELDIFSAERYFNADDVVKKEEYRDEEQPRQEVAVDAASQSGRTVACSSEASWTSRSGLLSGHAQSAASAGAAAKLQMGGANGGGGAAAAAASAHRGKKPGSGQRWGLFSRDCPCAGRKAVTVDVASEPRSPATPRTHARGVEANCPRLGMATRGAPGRTAGVQLLEIFQVPYENVAFGYRRVNLKAIKRLVKAEALKMEIIPNLKEVDGVKVLQLEKEAGSAIQCFEKAIGVTVPRSRFLAVKNTSDLFLILSDLYIVMDDTVTRNPARDNSTNPLIDLGPEFRKVENFLDRFKSIPSIVALDSLKISGDVWFGSRITLKGEVTIAAQLGLKLDILDGSVFDNKHSTHSSGAIKYTMKLDEGADCASIDSALNRLNPGSTLILKKDDFYRYIDPIQAQNRAMFHSESSKPSSSNNELLQDNGTPFTPNDNSDRIQPLPLAPFSSSLGSSSLLPLYHSRARRAPYCSSCVAAGASAGVRGGGRSDLFISIQSYLDNYSDSDMWHLIVHGVARVISNVLEDVNRNYMKNHYLGFLAIHSTVFAIEVIGSYAVELNYDIEHYAEPPEL

SEQ ID NO: 8309 - protein, 379 aa, Legionella pneumophila subsp. pneumophila str. Philadelphia 1
MEQRDYYELLEVSRNASDAEIKKAYRRLAMKYHPDRNPGDTSAEEKFKEIQKAYNILSDKQKRAAYDQFGHAGVDPSMGGGPGGFGGFGGFGDVFEDIFENIFSGGRGHGRQSRGQRGADLQFNVQLTLEEAAIGKEVEITVPRHGTCTVCEGSGAKKGTSPKTCETCQGMGQVRIQQGFFSIQQTCPTCHGEGKIISDPCASCHGQGRVRESKKINVKIPAGVDNGDRVRLSGEGEAGVHGGGSGDLYVQISLKKHAIFERHENDLHCEVPISFATAALGGSIEVPTLEGRVTLKIPAETQTGKVFRLRSKGMKSVRGYGQGDLLCKVVVETPVNLSREQKELLNKLQDSLENAKGTHSPKTSSWFAGVKKFFEDMKF

SEQ ID NO: 8310 - protein, 368 aa, Pseudotsuga menziesii
IQPFGCMVAVNDKTFEVIAYSENAPDMLQVSAHAVPSVEDQQILCIGSDARTLFTPSSTMALQKAAKFGDLNLLNPILVHSKSSGKPFYAILHRIDVALVMDFEPIKPSDVSTSAMGALQSYKLAAKAISRLQSIPSGNIGLLCDMIAQEVHELMGYDRVMAYKFHDDDHGEVISEIRRSDLEPYLGLHYPATDIPQASRFLFMRNRVRMICDCCAPPVIVIQDKRLPRDLSFCGSTLRAPHGCHAQYMANMGSIASLVMAVVVTEKEEDADSEGQIQQKGRRLWGLVVCHHTSPRYVPFPLRYACEFLMQVFGIHLNKEVELAIQMKEKRILRTQTLLCDMLLRDAPLGIVSQKPNIMDLVKSDGAA

SEQ ID NO: 8311 - protein, 84 aa, Oxalis staffordiana
  misc_feature (56)..(68): Xaa can be any naturally occurring amino acid
ISGTNGEVMPGQWEYQVGPSVGIEAGDHIWASRYILERITEQAGVVLTLDPKPIDXXXXXXXXXXXXXTKSMRDEGGFEVIKKA

SEQ ID NO: 8312 - protein, 714 aa, Cupriavidus taiwanensis
MTTELPGRAIRWLVVAYVLVGLTYLAWRIDTINLSAPLFSIALYAAEVYGYISGLLFVLMTYRLSVREAPPPEPGLSVDVYVPTYNESVELIRRTLLAVMRMDYPHVTWLLDDGRRESMRALAQELGCRYLARSDNAHAKAGNLNHALKHSSGELIAIFDADHAPRKDFLVKTLGYFRDQRVAFVQTPQDFFNIDSFNHRLGKKRVWDEQALFFKVIQRGKDALNAAFFCGSCAVIRRAAVARIGGFATETVTEDVHTAIRMHKLGYQSVYHAESLAFGLAPHSIDTYLKQRMRWGMGAMQVFRRENILFGRGLTLGQRLNYLASALFFFEGWQKLVFFLTPPVVFLTGVLPIISPLNNFLLLFCLYYLLSILVHLELGRGYNSLFLSEQYAMARFFAFMSTSVGLFRKNIPFAVTDKQMTQTGKMWLWLSPLLVLCAVAAASVPVGLYRIYTGSIPLGAGLVTLFWTLMTLGSAAAVAAYARKHSRNRRAEYRFPLRVPATLTVNGKTCLGLTADLSPNGALYLGEAIPGLALGDAVDVALHLPNLIVRDTAIATFVRAAAPGAPYGMSVGLRFNWSAHGNTGALETFLFGSRLQLEMGALRETETPPLTRLAEILGGDEGRSSVAYIWAAGLLMQPLRVDMLPVAIATMDGAAPLLFSSTELDFHASATLRQPLAARAGGAHEQSIRLTPTGRVSTPTGDFHLYHIAPHSAA

SEQ ID NO: 8313 - protein, 289 aa, Glycine max
MGAGEYYKILKVNRNATDEELKRAYKRLAMKWHPDKNHQHHHVTKEEAEAKFKQVSEAYDVLSDPKKRQIYDFYGHYPLNSMKVNEENSDGDVNRVPKGKGEKNVGVVESKLVCTLEELYKGCKKKLKISRTVPHEFGKMKTVEEVLKIDIKPGWKRGTKITFPGKGNQEAESKTPDDLIFVVDEKPHAFFKRDGNDLVVTQKILLVEALVGKTLNLTTLDGRELTIQVTEVVKPKYVLVVPNEGMPISKEPGKKGNLRIKFDVLFPSRLTSQQKYELKRILSNSTADD

SEQ ID NO: 8314 - protein, 270 aa, Arabidopsis thaliana
MELNRSEADEAKAETTPTGGATSSATASGSSSGRRPRGRPAGSKNKPKPPTIITRDSPNVLRSHVLEVTSGSDISEAVSTYATRRGCGVCIISGTGAVTNVTIRQPAAPAGGGVITLHGRFDILSLTGTALPPPAPPGAGGLTVYLAGGQGQVVGGNVAGSLIASGPVVLMAASFANAVYDRLPIEEEETPPPRTTGVQQQQPEASQSSEVTGSGAQACESNLQGGNGGGGVAFYNLGMNMNNFQFSGGDIYGMSGGSGGGGGGATRPAF

SEQ ID NO: 8315 - protein, 297 aa, Vibrio salmonicida LFI1238
MSKRDYYEVLGVSKSSTEKEIKKAYKRLAMKYHPDKNQGDPQAADKFKEIKEAYEILTDADKRGQYDDYGHAAFQNGGSGGGGFGGQSQGYGGFEDIFGGAFGGGGRSRGGFEDMFSQQRRPRPQKGQDRQFNLTVEFADAINGCEQVIELPINGENKKINVKVPAGIDDGEKIRFSGKGESGANGGPAGDLLIQINTRPHEILKRDGNDLICPVTMDFATAALGGEVEIQTLESRFKLKVPAGTQSGRKFRMKDKGVKGRKGITGDLMVEIIVATPTNLTDKQKELLMAFRDLATA

SEQ ID NO: 8316 - protein, 753 aa, Oryza sativa; identical to SEQ ID NO: 7666

SEQ ID NO: 8317 - protein, 204 aa, Sinorhizobium meliloti
TQIKEFDAFPTLEQLPLWGFDGSSTQQAEGRSSDCVLKPVAVYPDPVRTNGALVMCEVMMPDGKTPHPSNTRATVLDDESAWFGFEQEYFFYKNGRPLGFPEQGYPAPQGPYYTGVGYKNVGDIARQIVEEHLDICLAAGINHEGINAEVAKGQWEFQVFGKGSKKAADEVWLARYLLLRLTEKYGIDVEFHCKPLGDTDWNGS

SEQ ID NO: 8318 - protein, 181 aa, Brassica napus
  misc_feature (173)..(173): Xaa can be any naturally occurring amino acid
MNVLGKKPGRVVDKPTNPMVTPLLNDLYQFTMAYAYWKAGKQSERSVFDLYFRKNPFGGEYTIFAGLEECIKFLANFTLTDAEIDFVRDSLPGCEEAFCDYLRGLDCSDIEVYAVSEGSVVFPKVPLLRIEGPVAVVQLLGTPFLNLINYASLVATNAARHRFVAGKSKLLLXEFGARRAQ

SEQ ID NO: 8319 - protein, 64 aa, Passiflora rufostipulata
GEVMPGQWEYQVGPSVGIDAGDHIWCSRYILERITEQAGVVLSLDPKPIEGDWNGAGCHTNYST

SEQ ID NO: 8320 - protein, 297 aa, Vitis vinifera
MARTPQSTPLLISLSVLALLQTSYAGGIAIYWGQNGNEGTLTQTCNTGKYSYVNIAFLNKFGNGQTPEINLAGHCNPASNGCTSVSTGIRNCQNRGIKVMLSIGGGVGSYSLSSSNDAQNVANYLWNNFLGGQSSSRPLGDAVLDGIDFDIELGSTLHWDDLARALSGFSKRGRKVYLTAAPQCPFPDKFLGTALNTGLFDYVWVQFYNNPQCQYSSGNTNNLLNSWNRWTSSINSQIFMGLPASSAAAGSGFIPANVLTSQILPVIKRSPKYGGVMLWSKYYDDQSGYSSSIKSSV

SEQ ID NO: 8321 - protein, 419 aa, Oryza sativa Japonica Group; identical to SEQ ID NO: 7475

SEQ ID NO: 8322 - protein, 197 aa, Sinorhizobium fredii
AFPALEQLPLWGFDGSSTNQAEGRSSDCVLKPVAVYPDPVRTNGVLVMCEVMMPDGKTPHPSNSRATILDDEGAWFGFEQEYFFYKNGRPLGFPEQGYPAPQGPYYTGVGYSNVGDVARKIVEEHLDICLAAGINHEGINAEVAKGQWEFQVFGKGSKRAADEVWMARYLLQRLTEKYGIDVEYHCKPLGDTDWNGS

SEQ ID NO: 8323 - protein, 55 aa, Passiflora sandrae
WEYQVGPSVGIDAGDHIWGSRYILERITEQAGVVLTLDPKPIEGDWNGAGCHTNY

SEQ ID NO: 8324 - protein, 100 aa, Triticum aestivum
  misc_feature (47)..(47): Xaa can be any naturally occurring amino acid
  misc_feature (65)..(65): Xaa can be any naturally occurring amino acid
  misc_feature (73)..(73): Xaa can be any naturally occurring amino acid
  misc_feature (77)..(77): Xaa can be any naturally occurring amino acid
  misc_feature (79)..(79): Xaa can be any naturally occurring amino acid
MDASAGAGSGNAPGAGAGASSCCYYALLGIRKNASSTDIRAAYRRLXAMKWHPDRLASDPARTGXAKRRFQRXQEAXLXKGEKGAIFPGPLFPLRQDSPA

SEQ ID NO: 8325 - protein, 196 aa, Bradyrhizobium japonicum
FPTLEQLPLWGFDGSSTQQAEGHSSDCVLKPVAVFPDAARTNGVLVMCEVMMPDGKTPHSTNKRATILDDAGAWFGFEQEYFFYKDGRPLGFPASGYPAPQGPYYTGVGFSNVGDVARKIVEEHLDLCLAAGINHEGINAEVAKGQWEFQIFGKGSKKAADEMWMARYLMLRLTEKYGIDIEFHCKPLGDTDWNGS

SEQ ID NO: 8326 - protein, 365 aa, Oryza sativa; identical to SEQ ID NO: 864

SEQ ID NO: 8327 - protein, 374 aa, Pseudomonas putida GB-1
MSKRDYYEVLGVERGASEADLKKAYRRLAMKYHPDRNPGDKESEDKFKEANEAYEVLSDASKRAAFDQYGHAGVDPSMGGGGAGFGGANFSDIFGDVFSDFFGGGRGGGRGGAQRGSDLRYTLELNLEEAVRGTTVSIRVPTLVNCQPCDGSGAKKGSTPSTCPTCGGIGQVRMQQGFFSVQQTCPRCHGQGKIITDPCTSCHGEGRVEEYKTLSVKVPAGVDTGDRIRLSGEGEAGTHGGPTGDLYVVISVREHEIFQRDGKHLYCEVPISYTDAALGGELEVPTLDGRVKLKIPEGTQTGKQFRLRGKGVAPVRGGGAGDLLCRVAVETPVNLSRRQRELLEELRDSLEGDSSHSPKASGWFDGVKRFFGDL

SEQ ID NO: 8328 - protein, 1124 aa, Physcomitrella patens subsp. patens
MTSTKLSYSLGTTVKSKHSVRVQQTTADAKLQAVYEESNDSGDAFNYSKSVGQAAKATVQQVPAQAVSSYLQRMQRGGLTQTFGCMLAVEESTFRVIAYSENAPEMLDLVPHAVPSVGQQDVLGIGADARSLFTPSSASALERAASTSDLSMVNPISVHSRSSGKPFYAIVHRIDVGVVIDFEPVRPNDVIISTAGALHSHKLAAKAVARLQSLPGGDIGLLCDAVVEEVRELTGYDRVMAYKFHDDEHGEVLAEIRRSDLESYLGLHYPSTDIPQASRFLFMKNRVRMIADCCAPPVKVIQDKDLRQPITLAGSTLRAPHGCHAQYMGNMGSVASITLAVIVNDQEEDFGVQQKGRRLWGLVVCHHTSARTISFPLRSACEFLMQVFGLQLNMEVELQAQVKEKHILRTQTLLCDMLLRDAPIGIVSQSPNIMDLVKCDGAALYYGKRFWLLGTTPTEQQITEIADWLLEYHKDSTGLSTDSLADAGYPGANLLGDAVCGMAAARITPKDFLFWFRSHTAKEIKWGGAKHDADEKDDGRKMAPRSSFNAFLEVVKRRSVPWEDIEMDAIHSLQLILRGSFQDIDDSDGKTMIHARLHDLKLQGMDELSTVANEMVRLIETATVPILAVDSSGFINGWNAKVAELTGLPVGDAMGRSLVKDLILEESVEAVERLLYLALQGEEEQNVEVRLKTFGQQKSKGVLILIVNACSSRDVQENVVGVCFVGQDVTGQKMVHDKFTRIHGDYKSIVQNPNPLIPPIFGGDELGYCTEWSPSMEKLTGWKREEVLGKMLVGEVFGVQLMCCRLKGQDAVTKFMIVLNNAMDGQDTDKFPFSFFDRQGKFVEALLTANKRTDADDYITGVFCFLHTASPELLQALTVQRATEKVAFAKLKELAYIRQEIKNPLYGIMFTRNLMEDTDLSEEQKQFMDTSAVCERQLRKILDDMDLESIEDGYLELETAEFDMGSMMDAVVSQGMITSREKGLQLIRETPREIKGMCLFGDQVRLQQVLADYLLNAVRFTPSSEGWVGIKVVSTKKRLVGGFHVVHLEFRVTHPGSGLPEELVCEMFDRGRGMTQEGLGLSMCRKLVKLMNGEVKYIRDAGKSYFLVNLELPLAGRDDSGNAR

SEQ ID NO: 8329 - protein, 206 aa, Bradyrhizobium elkanii
TQIKEFDTFPTLEQLPLWGFDGSSTMQAEGHSSDCVLKPVAVYPDAARENGALVMCEVMMPDGKTPHPSNKRATILDDEGAWFGFEQEYFFYKDGRPLGFPSDGYPAPQGPYYTGVGYSNVGSVARKIVEEHLNLCLAAGINHEGINAEVAKGQWEFQIFGKGSKTAADQMWMARYLMLRLTESYGIDIEFHCKPLGDTDWNGSGM

SEQ ID NO: 8330 - protein, 61 aa, Passiflora sanguinolenta
EVMPGQWEYQVGPSVGIDAGDHIWCSRYILERITEQAGVALSLDPKPIEGDRNGAGCHTNY

SEQ ID NO: 8331 - protein, 91 aa, Oxalis teneriensis
  misc_feature (2)..(2): Xaa can be any naturally occurring amino acid
  misc_feature (58)..(70): Xaa can be any naturally occurring amino acid
  misc_feature (88)..(88): Xaa can be any naturally occurring amino acid
IXISGTNGEVMPGQWEYQVGPSVGIEAGDHIWASRYILERITEQAGVVLTLDPKPIDXXXXXXXXXXXXXTKSMRDEGGFEVIKKAIXNLS

SEQ ID NO: 8332 - protein, 89 aa, Oxalis polyrhiza
LYAGINISGTNGEVMPGQWEYQVGPSVGIEAGDHIWASRYILERITEQAGVVLTLDPKPIDGDWNGAGCHTNYSTKSMRDEGGFEVIKK

SEQ ID NO: 8333 - protein, 87 aa, Oxalis picchensis
  misc_feature (4)..(4): Xaa can be any naturally occurring amino acid
  misc_feature (9)..(9): Xaa can be any naturally occurring amino acid
  misc_feature (66)..(66): Xaa can be any naturally occurring amino acid
  misc_feature (68)..(68): Xaa can be any naturally occurring amino acid
  misc_feature (70)..(71): Xaa can be any naturally occurring amino acid
  misc_feature (73)..(73): Xaa can be any naturally occurring amino acid
  misc_feature (78)..(78): Xaa can be any naturally occurring amino acid
  misc_feature (80)..(80): Xaa can be any naturally occurring amino acid
GTNXEVMPXQWEYQVGPSVGIEAGDHIWASRYILERITEQAGVVLTLDPKPIDGDWNGAGCHTNYXTXSXXDXGGFEXIXKAIFNLS

SEQ ID NO: 8334 - protein, 383 aa, Mycoplasma pulmonis UAB CTIP
MLKCLTMNKKEDYYKILGIDKSANEKEIKKAYRKLAMEHHPDRSSSKESEAKMREINEAYEVLSNPEKKAIYDKYGHEAANNPGFNGFNAGSAGFGNFGGFSNFGGFDSIFEEFFGGSRSHSKQNSNYPYPGESYSTQVKISFLDSVHGRVISQKLDKYKDCESCNGTGARSKSDIKTCSTCNGRGSVEKLVNSLFGKIKQSVTCSTCNGLGQEITHKCPSCKGAKKIKESISQKISIPAGVISGQEVLLRGFGGPGFNGGPNGDLYIRVYVTEHPYYQRINDDIYVDFPISIVNLILEKPVVVPTPYGDEKIKIKSTFKNDQIITFKGKGFKRKNRVGDLKIRLKFEIPNFSSKVKKNLESLLSETNDSINEDFVKKVNSIK

SEQ ID NO: 8335 - protein, 363 aa, Physcomitrella patens subsp. patens
GVQHMARQNFYDALGLKKGASAKEIKSAYYKLAKQWHPDVSKGNAEAERKFQEIQQAYEVLKDDEKRAMYDQVGHDAFEQAAAGGAPGGGAGFGGFGGGFEGFGFGGDAFGGGMDEVILIALDLTFREAAQGCSKVVNFQTTVRCQPCNGSGLPPGVQPQTCKTCKGRGRVSSLQQAFFTFESTCSTCGGSGHMVKDHCRSCQGAGVVKGNREVRVDIPAGVESGTTLKVHGEGGEGPKGGRPGNLLLQIRVQPDKVFKREGADIYVDIPIPFTQAILGGSVQVPTLTGDVVLKIRPGTQPGHKQVMRGKGVKVLNSRHHGDQYVLINVTIPTNITQRQRQLIEEFAGEESSEPETAAAEGSG

SEQ ID NO: 8336 - protein, 338 aa, Bordetella holmesii
MAKRDYYEVLGVAKNASDEDLKKAYRKLAMKYHPDRNPDSKEAEEKFKEAKEAYEVLGDEQKRAAYDRYGHAGVDPNAAGMGGGMGGGMGGGMGGGFADAFGDIFGEIFGAGRRGGGGPQVYRGADLKYALEITLEQAASGFDTEIRVPSWENCDTCHGSGAKAGTSPKTCRTCGGSGAVRMQQGFFSVQQTCPTCHGTGKEITDPCPSCDGVGRTRRNKTLQVKIPAGIDDGMRIRSSGNGEPGINGGPPGDLYVEIHIKQHKIFQRDGDDLHCELTIPFTTAALGGELQVPTLGGKAEISIPEGTQSGKTFRLRAKGIHGVRGSYPGDLYCHVVVE

SEQ ID NO: 8337 - protein, 107 aa, Oryza sativa
  misc_feature (15)..(15): Xaa can be any naturally occurring amino acid
  misc_feature (30)..(30): Xaa can be any naturally occurring amino acid
MEAAAADDANGAGGXRWVAGATTRMVTALXTDPQQISKDYDYCKDRKDLHRPELEGHFRKNPLGGESTILRGLEECLRFIANYKLTETEITGLGPVQHTREDRFFEY

SEQ ID NO: 8338 - protein, 170 aa, Zea mays
  misc_feature (101)..(101): Xaa can be any naturally occurring amino acid
MDAGGEKCGDAAAEGGEGGGDLYAVLGLKKECSDAELKVAYRKLAKKWHPDKCSSSSSVKHMEEAKEKFQEIQGAYSVLSDANKRLLYDVGVYDDEDDEEXHGMGDFIGEMAQMMSHAQPTRQESFEELQQLFVDMVQSDIDSGFCNKTAKAHQFQGPAKRRTCSTSTYY

SEQ ID NO: 8339 - protein, 395 aa, Staphylococcus epidermidis ATCC 12228
MLDKNQLEKYNQEHLYEYEKLMSSNEKNALDEKVDQLNLAEIQDLYQDLYVNRKTIDDVSSVSEVKYEVKSRLNEEERHTYEQKGYEAIRNGEFAVLLMAGGQGTRLGYKGPKGSFEIEGTSLFELQARQLIRLKEETGHTINWYIMTSDINHKDTIEYFKQHKYFNYDANHIHFFKQDNIVALSEEGKLVLNRDGHIMETPNGNGGVFKSLKKAGYLDKMQQDHVKYIFLNNIDNVLVKVLDPLFAGFTVTQSKDITSKTIQPKDSESVGRLVNVDCKDTVLEYSELDTDIVNQFNNANIGIHAFKLGFITSAVDRELPYHLAIKQLKQLDENFGVVERPTLKFELFYFDIFRYGTSFVTLQVPREEEFSPLKNKEGKDSVHTATEDLKRMDLI

SEQ ID NO: 8340 - protein, 476 aa, Ashbya gossypii ATCC 10895; identical to SEQ ID NO: 891

SEQ ID NO: 8341 - protein, 166 aa, Oryza sativa Japonica Group; identical to SEQ ID NO: 6959

SEQ ID NO: 8342 - protein, 286 aa, Bradyrhizobium elkanii
LDASLWGFDGSSTQQAEGHSSDCVLKPVACYPDAARENGVLVMCEVMMPDGKTPHPSNKRATILDDDGAWFGFEQEYFFYKDGRPLGFPEEGYPAPQGPYYTGVGYKNVGSVARKIVEEHLNLCLAAGINHEGINAEVAKGQWEFQIFGKGSKTAADQMWMARYLMLRLTESYGIDIEFHCKPLGDTDWNGSGMHANFSTKYMREVGGKEYFEKLMGAFEKNLMDHIAVYGPDNDKRLTGKHETAPWNKFSYGVADRGASIRVPHSFVNNGYRVIWKTAARTRKAP

SEQ ID NO: 8343 - protein, 206 aa, Bradyrhizobium japonicum
TQIKEFASFPTLEQLPLWGFDGSSTQQAEGHSSDCVLKPVAVFPDAARTNGVLVMCEVMMPDGKTPHASNKRATILDDAGAWFGFEQEYFFYKDGRPLGFPTAGYPAPQGPYYTGVGYSNVGDVARKIVEEHLDLCLAAGINHEGINAEVAKGQWEFQIFGKGSKTAADQMWMARYLMLRLTEKYGIDIEFHCKPLGDTDWNGSGM

SEQ ID NO: 8344 - protein, 313 aa, Geobacter sulfurreducens PCA
MAKYQDYYAILGVSKTATQEEVQRAYRKLARKYHPDINKAGDAEEKFKQINEAYEVLSDPDKRATYDQLGRDWDGRHGTQGYQGGDNAGHHFSTADPGQFSDFFQDLFGSGWNFGGSAEFQGGGTRRRRGRDHEATITITLAEAYHGARKSIELERAEADSAGRLARTRRTYDVAIPPGVTDGSLIRLAGQGGRGTGGGEAGDLFLRVSILPDSRFTLNGNDLTTMVDVTPWEAALGAKVPVPTVDGRINLTVPAGTQSGQILRVRGKGMPIASGRHGDLLVSVRIVVPKHLSDRERHLFEELAKESRFDPRM

SEQ ID NO: 8345 - protein, 286 aa, Bradyrhizobium elkanii
LPLWGFDGSSTQQAEGHSSDCVLKPVACYPDAARENGVLVMCEVMMPDGKTPHPSNKRATILDDDGAWFGFEQEYFFYKDGRPLGFPEEGYPAPQGPYYTGVGYKNVGSVARKIVEEHLNLCLAAGINHEGINAEVAKGQWEFQIFGKGSKTAADQMWMARYLMLRLTESYGIDIEFHCKPLGDTDWNGSGMHANFSTKYMREVGGKEYFEKLMGAFEKNLMDHIAVYGPDNDKRLTGKHETAPWNKFSYGVADRGASIRVPHSFVNNGYKGYLEDRRPNSQGDPY

SEQ ID NO: 8346 - protein, 83 aa, Physcomitrella patens subsp. patens; identical to SEQ ID NO: 902

SEQ ID NO: 8347 - protein, 372 aa, Thiobacillus denitrificans ATCC 25259
MSKRDYYEVLGVAKNASDEEIKKAYRKLAMKHHPDRNPGDHAAEDKFKEAKQAYEILSDSDKRAAYDQFGHAGVDPQSGMGGGGFGGGGFSDAFSDIFGDIFGGGGGNRRDRVYRGADLRYNLEIGLEEAARGTETKIRIPTLEECGTCHGSGAKPGTQPTTCSACGGHGQVRVQQGFFSVQQTCPRCGGTGKMVSDPCPSCHGEGRVKKHKTLSVKIPAGVDSGDRIRLAGEGEAGVNGGPSGDLYVVIHLKDHPVFKRDGDDLHCEMPISFATAALGGEVEIPTLDGHAKIKIPAETQSGKVFRLRGKGIKGVRSHAPGDLLCHMLVETPVNLSERQRELLREFEALSPGRNNNPRAQSFMDKVKSFFGT

SEQ ID NO: 8348 - protein, 204 aa, Rhizobium tropici
TQIKEFDAFPTLEQLPLWGFDGSSTMQAEGRSSDCVLKPVAIYPDPARTNGALVMCEVMMPDGVTPHESNSRATILDDEDAWFGFEQEYFFYKDGRPLGFPESGYPAPQGPYYTGVGYKNVGDVAREIVEEHLDLCLEAGINHEGINAEVAKGQWEFQIFGKGSKKAADQIWMARYLLLRLCEKYGIDIEFHCKPLGDTDWNGS

SEQ ID NO: 8349 - protein, 278 aa, Bradyrhizobium elkanii
  misc_feature (248)..(248): Xaa can be any naturally occurring amino acid
FDGSSTQQAEGHSSDCVLKPVACYPDAARENGVLVMCEVMMPDGKTPHPSNKRATILDDDGAWFGFEQEYFFYKDGRPLGFPEEGYPAPQGPYYTGVGYKNVGSVARKIVEEHLNLCLAAGINHEGINAEVAKGQWEFQIFGKGSKTAADQMWMARYLMLRLTESYGIDIEFHCKPLGDTDWNGSGMHANFSTKYMREVGGKEYFEKLMGAFEKNLMDHIAVYGPDNDKRLTGKHETAPWNKFSYGVXDRGASIRVPHSFVNNGYKGYLEDRRPNSQG

SEQ ID NO: 8350 - protein, 379 aa, Legionella pneumophila str. Lens
MEQRDYYELLEVSRNASDAEIKKAYRRLAMKYHPDRNPGDTSAEEKFKEIQKAYNILSDKQKRAAYDQFGHAGVDPSMGGGPGGFGGFGGFGDVFEDIFENIFSGGRGQGRQSRGQRGADLQFNVQLTLEEAAIGKEVEITVPRHGTCTVCEGSGAKKGTSPKTCETCQGMGQVRIQQGFFSIQQTCPTCHGEGKIISDPCASCHGQGRVRESKKINVKIPAGVDNGDRVRLSGEGEAGVHGGGSGDLYVQISLKKHAIFERHENDLHCEVPISFATAALGGSIEVPTLEGRVTLKIPAETQTGKVFRLRSKGMKSVRGYGQGDLLCKVVVETPVNLSREQKELLNKLQDSLENAKGTHSPKTSSWFAGVKKFFEDMKF

SEQ ID NO: 8351 - protein, 63 aa, Lithospermum erythrorhizon
EFGLLGLKHKEHIAAYGEGNERRLTGKHETADINTFKWGVANRGASIRVGRDTEKEGKGLVRI

SEQ ID NO: 8352 - protein, 750 aa, Chlamydomonas reinhardtii
MAGVPAPASQLTKVLAGLRHTFVVADATLPDCPLVYASEGFYAMTGYGPDEVLGHNCRFLQGEGTDPKEVQKIRDAIKKGEACSVRLLNYRKDGTPFWNLLTVTPIKTPDGRVSKFVGVQVDVTSKTEGKALADNSGVPLLVKYDHRLRDNVARTIVDDVTIAVEKAEGVEPGQASAVAAAAPLGAKGPRGTAPKSFPRVALDLATTVERIQQNFCISDPTLPDCPIVFASDAFLELTGYSREEVLGRNCRFLQGAGTDRGTVDQIRAAIKEGSELTVRILNYTKAGKAFWNMFTLAPMRDQDGHARFFVGVQVDVTAQSTSPDKAPVWNKTPEEEVAKAKMGAEAASLISSALQGMAAPTTANPWAAISGVIMRRKPHKADDKAYQALLQLQERDGKMKLMHFRRVKQLGAGDVGLVDLVQLQGSELKFAMKTLDKFEMQERNKVARVLTESAILAAVDHPFLATLYCTIQTDTHLHFVMEYCEGGELYGLLNSQPKKRLKEEHVRFYASEVLTALQYLHLLGYVYRDLKPENILLHHTGHVLLTDFDLSYSKGSTTPRIEKIGGAGAAGGSAPKSPKKSSSKSGGSSSGSALQLENYLLLAEPSARANSFVGTEEYLAPEVINAAGHGPAAVDWWSLGILIFELLYGTTPFRGARRDETFENIIKSPLKFPSKPAVSEECRDLIEKLLVKDVGARLGSRTGANEIKSHPWFKGINWALLRHQQPPYVPRRASKAAGGSSTGGAAFDNY

SEQ ID NO: 8353 - protein, 265 aa, Glycine max
  misc_feature (260)..(260): Xaa can be any naturally occurring amino acid
TWEICGGGPPLRGGAPSKKGGPLFFFLGEYYSKEEVHPFDDVDEFRLLMTGETLDSLLSQGKEYILVLKSDNVATVLDPNILNHLMINDIEYCMEVTPSNSFNLMLPTTKFKLREIGGDQDKHLKDNFKLIDTTNMWVSLRAIKRFVDTVEVRQKKPSFSKDTAAGPAIKFFDNVFGVSVPESRFLPLDATSDLLLLQSDLYTCREGVLTRNPARTNPLNPVIDLGPEFEKFGDFQSRFRSIPSIIELDSLMVRGDVWVXANITL

SEQ ID NO: 8354 - protein, 475 aa, Glycine max
MATATLSPADADKLSNLKSSVAALSQISENEKNGFTSLVARYLSGEAQHVEWSKIETPTDEVVVPYDSLAPTPDGSLEVKNLLDKLVVLKLNGGLGTTMGCTGPKSVIEVRDGLTFLDLIVVQIENLNSKYGSNVPLLLMNSFNTHDDTQKIVEKYKNSNIEIHTFNQSQYPRLVVDDFLPFPSKGQTGRDGWYPPGHGDVFPSLVNSGKLDVLLSQGKEYVFVANSDNLGAVVDLKILNHLIEHKNEYCMEVTPKTLADVKGGTLISYEGRVQLLEIAQVPDEHVSEFKSIEKFKIFNTNNLWVNLKAIKRLVEADALKMEIIPNPKEVDGVKVLQLETAAGAAIRFFDKAIGINVPRSRFLPVKATSDLLLVQSDLYTLQDGLVIRNQARANPENPSIELGPEFKKVSNFLSRFKSIPSIVELDSLKVAGDVWFGAGVILKGKASILAKPGVKLEIPDGAVIADKEINGPEDL

SEQ ID NO: 8355 - protein, 427 aa, Physcomitrella patens subsp. patens; identical to SEQ ID NO: 4666

SEQ ID NO: 8356 - protein, 749 aa, Chlamydomonas reinhardtii
MAGVPAPASQLTKVLAGLRHTFVVADATLPDCPLVYASEGFYAMTGYGPDEVLGHNCRFLQGEGTDPKEVQKIRDAIKKGEACSVRLLNYRKDGTPFWNLLTVTPIKTPDGRVSKFVGVQVDVTSKTEGKALADNSGVPLLVKYDHRLRDNVARTIVDDVTIAVEKAEGVEPGQASAVAAAAPLGAKGPRGTAPKSFPRVALDLATTVERIQQNFCISDPTLPDCPIVFASDAFLELTGYSREEVLGRNCRFLQGAGTDRGTVDQIRAAIKEGSELTVRILNYTKAGKAFWNMFTLAPMRDQDGHARFFVGVQVDVTAQSTSPDKAPVWNKTPEEEVAKAKMGAEAASLISSALQGMAAPTTANPWAAISGVIMRRKPHKADDKAYQALLQLQERDGKMKLMHFRRVKQLGAGDVGLVDLVQLQGSELKFAMKTLDKFEMQERNKVARVLTESAILAAVDHPFLATLYCTIQTDTHLHFVMEYCDGGELYGLLNSQPKKRLKEEHVRFYASEVLTALQYLHLLGYVYRDLKPENILLHHTGHVLLTDFDLSYSKGSTTPRIEKIGGAGAAGGSAPKSPKKSSSKSGGSSSGSALQLENYLLLAEPSARANSFVGTEEYLAPEVINAAGHGPAVDWWSLGILIFELLYGTTPFRGARRDETFENIIKSPLKFPSKPAVSEECRDLIEKLLVKDVGARLGSRTGANEIKSHPWFKGINWALLRHQQPPYVPRRASKAAGGSSTGGAAFDNY

SEQ ID NO: 8357 - protein, 860 aa, Coccidioides posadasii
MGPTNILAAFIAVSSLFIQSLALNPYAKSNLAVYWGQGAGQNRLSYFCEKTSFDIIVVGFINVFPDQGPAGWPGSNFGNQCADSYYYTKNGTKTKLLDGCYQIKEDLPKCKALGKTILLSLGGGAVHDFYEVKSEESALNFADFLWGAFGPLTPDWTGPRPFGEASVDGFDFDIEKGSNFGYSIMVRRLRELFLQDPLNRYYISAAPQCIMPDKYLSHAISNSAFDFIFIQFYNNPSCSAKRWVTNPKSVTYTVDDWVKYIRKSGNPLAKLFIGLPASKSAAAKEDYLTPGEATKIVSTYMAKYPSTFGGMMVWEATASENNKLGGLPYADIMKEVLLRCDPDPPTSTVTSTTSASTSTQTSSQSTTMETKTLSASTTPSSPSTVSPSSTMQTTSTGSTSIETVTTRSQEPPSTTISTRSASTEPVTTRSQEPPSTTISTRSASTETVTTRSQEPPSTTISTWSASTETSTSSQDSPSTTISTKSAPTGTVTTRSQDLPSTTISTRSPETETETATTKSQGSPSITLSTRSSSAETVSTRSQHSSSTTISTKSAPTETGTTSEHSTSMPVSTRSASTETVITRSQNSDSQSMTVSTRSPSTESITTRSQGSPSETFSTKSVPVDTISTELPSQTPTTIITGTPSDPVSAPTTTVPPNPTLTLAPSSSTTEDRTTITTIITTSYVTVCPTGFTTVTITYTTTYCPETASLTPTQPPIPGAPAPPPDGWTTIVTVCPQCAPTPTTVTLTVPTRSAFLPARTETRPVVTVVPVPENPIKNVKPSESGDFVTVTTAAPATVTKTLEYNNPVDSDVNVQPTGGSSPVEFEGSAMTVRSMDVVAKALITAGALCWDCSWGYNLLIC

SEQ ID NO: 8358 - protein, 350 aa, Thermus thermophilus HB27
MKDYYAILGVSREASQEEIKKAYRRLALKYHPDRNPGDKEAEERFKEINEAYAVLSDPKKRAAYDRGHLEAPEYRPEDLFDLFFQEVFGVRGHRRPPRGEDLEAEVEVELQDLLHGAEKEVRYTRLVPCEACGGEGGRRTPCPTCRGQGVVESYRQSFFGTVVTRTACPHCKGRGYLLAETCPACRGRGRVPREERVRVQVPPGMDEGHLLRVPGYGNLGPGGPGDLYLRIRVRPHPHLERQGPDLVYRLRLGLAQAALGARVVVPGLEGPIPLDIPPGTGHGEVFALEGGGLPLPGGRGRGTLRVVVELAVPKKLSPKAQKLLRAYAEEVGEEVAPEGFWERLKGFFRK

SEQ ID NO: 8359 - protein, 376 aa, Bradyrhizobium sp. ORS278
MSTKRCYYETLEVERDADETKLKSAFRKLAMKWHPDKNPGDASSEVKFKEINEAYEVLRDADKRAAYDRYGHAAFEQGAGGGPHGFGAGFASSFSDIFEDLFGMAGQRRGGTGRERGADLRYNMEITLEEAFLGKTAQIEIPVSVTCEPCSGTGAKAGTKPKTCAMCGGAGRVRQAQGFFTLERTCPGCHGRGQMIEDPCPSCSGSGRVTRDRTLSVNIPQGVEDGTRIRLAGEGEAGLRGGPPGDLYIFLSLTPHEFFQRDGADLHCRVPISMVTAALGGEFEVPTIDNGKTKVKIPAGAQSGRRFRIAAKGMPVLRSRQTGDMYVQIVVETPQNLTKKQQELLAEFEKLSSGATQPEAAGFFTKVKDFFGKAAS

SEQ ID NO: 8360 - protein, 423 aa, Oryza sativa Japonica Group
MAGSRFGSFKSEKGDPAATAAQRRDPYEVLGVGRNATDQEIKSAFRRMALKYHPDKNGDDPVASDMFQEVTFSYNILSDPDKRRQYDTSGFEAIEADSQELELDLSSLNTVNTVFAALFSKLGVPIKTTVSATVLEEALNGSVMVSQLQLGNSVHRKVEKQSAHFYSVDITEKEAKMGLVCRVKSTDRSKFKLLYFELEENGGLSLALQEDSVKTGKVTSAGMYFLGFPVYRFEQNNLAAAAKDPDSAFFKRLDSFQPCDINELKPGTHFFAVYEVVCGESFPAEKEKLQSVEAKILTKRAELSKFETEYREVLAKFTEMTSRYTQEMQAIDNLLKERNEIHASYTNNSPLKRSSSRSKAKSPSKFSKGEEENSQRKEKKVKDQPTGGCRSADEDSNEKKTKERFPKKKWLNIPFKIDRRKPC

SEQ ID NO: 8361 - protein, 172 aa, Bradyrhizobium yuanmingense
WGFDGSSTQQAEGHSSDCVLKPVAVFPDGARTNGVLVMCEVMMPDGKTPHASNKRATILDDAGAWFGFEQEYFFYKNGRPLGFPESGYPAPQGPYYTGVGYSNVGDVARKIVEEHLDLCLAAGINHEGINAEVAKGQWEFQIFGKGSKKAADEMWMARYLMLRLTEKYGIDI

SEQ ID NO: 8362 - protein, 297 aa, Vitis vinifera
MARTPQSTPLLISLSVLALLQTSYAGGIAIYWGQNGNEGTLTQTCNTGKYSYVNIAFLNKFGNGQTPEINLAGHCNPASNGCTSVSTGIRNCQNRGIKVMLSIGGGVGSYSLSSSNDAQNVANYLWNNFLGGQSSSRPLGDAVLDGIDFDIELGSTLHWDDLARALSGFSKRGRKVYLTAAPQCPFPDKFLGTALNTGLFDYVWVQFYNNAPCQYSSGNTNNLLNSWNRWTSSINSRIFMGLPASSAAAGSGFIPANVLTSQILPVIKRSAKYGGVMLWSKYYDDQSGYSSSIKSSV

SEQ ID NO: 8363 - protein, 289 aa, Vitis vinifera
MARTPQSTPLLISLSVLAFLQTTYAGGIAIYWGQNGNEGTLTQTCNTGKYSYVNIAFLNKFGNGQTPEINLAGHCDSASNGCTSVSTDISNCQSQGVKVMLSIGGAIGSYSLSSSDDAQNVANYLWNNFLGGQSSSRPLGDAVLDGIDFVILLVLGQPCSSLIGFQKVYLTAAPQCPFPDKFMGTALNTGRFDNVWVQFYNNPPCQYTSGNTTNLLNSWNRWTSSINSRIFLGLPAASAAAGSGFIPPNVLTSQILPVIKTSPKYGGVMLWSKYYDDQSGYSSTIKSSV

SEQ ID NO: 8364 - protein, 172 aa, Bradyrhizobium elkanii
WGFDGSSTQQAEGHSSDCVLKPVACYPDAARENGVLVMCEVMMPDGKTPHPSNKRATILDDDGAWFGFEQEYFFYKDGRPLGFPEEGYPAPQGPYYTGVGYKNVGSVARKIVEEHLNLCLAAGINHEGINAEVAKGQWEFQIFGKGSKTAADQMWMARYLMLRLTESYGIDI

SEQ ID NO: 8365 - protein, 245 aa, Corynocarpus laevigata
ALSIAGAVQSQKLAVCAISQLQSLPGGDIKLLCDTVVESVRELTGYDRVMVYKFHEDEHGEVVAESKRADLDPYIGLHYPATDIPQASRFLFKQNRVRMIVNCHASSVRVIQDEELRQPLCLVGSTLRAPHGCHAQYMANMGSIASLAMAVVINGTDEEGTGGRNSMRLWGLVACHHTSARCIPFPLHYACEFLMQAFGLQLNVELQLALQLSEKHVLRTQTLLCDMLLRDSPTGIVTQSPSIMD

SEQ ID NO: 8366 - protein, 172 aa, Bradyrhizobium liaoningense
WGFDGSSTQQAEGHSSDCVLKPVAVFPDGARINGVLVMCEVMMPDGKTPHPSNKRATILDDAGAWFGFEQEYFFYKDGRPLGFPEYGYPAPQGPYYTGVGYKFVGDVARKIVEEHLDLCLAAGINHEGINAEVAKGQWEFQIFGKGSKKAADEMWMARYLMLRLTEKYGIDI

SEQ ID NO: 8367 - protein, 479 aa, Zea mays
CQPLATTVSLDPEAALAGVKEPRAPRSLLARARANLAFQSVWAELNGAMGDLGTYIPIVLSLALARHLDLGTTLVFTGIYNAVTELIYGVPMPVQPMKAIADTELSDSSVGVPQIMAAGILTAAFVLLLGVTRLMQLVYWIVPLPVVRGIQLAQGLNFAMAAVKYIRYEQDLGRGKSLGRRPWTGLDGLVLAIACICFILLVNGAGSESGSRRGRKRRRAMAIREQGAHPERQEEEEEEEEERQGGGGWRSTVRRAAAVVPSAVIVFVLGVALAVARHPAAVRELRAGPSRVRVVRISREAWKQGFLKGAVPQVPLSVLNSVVAVCKLTRDLFPEKEASATSVSVTMGGMNLVGCWFGAMPCCHGAGGLAGQYRFGGRSGGCVAALGALKLALGLVLGGSMLRVLVEFPVGLLGVLLLFAGVELGAAARDMASKAEALVMLLCTAVSLVGSSAALGFLCGMVAHGLLMLRAWAMGVRLT

SEQ ID NO: 8368 - protein, 224 aa, Helianthus annuus
NIHGRGWRSAITSPDPLAFLGCSATTYPSSLTQQKRWFTGLFEILFTDNNPLLLTIRGNIWFRQALAYFYCCLWAVRSVPELCYASLPAYCIIKDSHFLPKVNERAFLIFMGIFVIYTLYAYWECKRIGISLRMWWNLQRMERVNTLTARLFAFVSVMLKLIGFSDTVFEVTQKEHMSNDDDNDNVSVGRFTYDNSPMIMPGVIILLINIMALVNGMLRLYKVD

SEQ ID NO: 8369 - protein, 311 aa, Hevea brasiliensis
MAKRTQAILLLLLAISLIMSSSHVDGGGIAIYWGQNGNEGTLTQTCSTRKYSYVNIAFLNKFGNGQTPQINLAGHCNPAAGGCTIVSNGIRSCQIQGIKVMLSLGGGIGSYTLASQADAKNVADYLWNNFLGGKSSSRPLGDAVLDGIDFDIEHGSTLYWDDLARYLSAYSKQGKKVYLTAAPQCPFPDRYLGTALNTGLFDYVWVQFYNNPPCQYSSGNINNIINSWNRWTTSINAGKIFLGLPAAPEAAGSGYVPPDVLISRILPEIKKSPKYGGVMLWSKFYDDKNGYSSSILDSVLFLHSEECMTVL

SEQ ID NO: 8370 - protein, 224 aa, Helianthus annuus
NIHGRGWRSAITSPDPLAFLGCSATTYPSSLTQQKRWFTGLFEILFTDKNPLLLTIKGNIWFRQALAYFYCCLWAVRSVPELCYASLPAYCIIKDSHFLPKVNERAILIFMGIFVIYTLYAYWECKRIGISLRMWWNLQRMERVNTLTARLFAFISVMLKLIGLSNTVFEVTQKEHTSNDDDNDNVSVGRFTYDNSPMIMPGVVILLINIMALVNGMLRLYKVD

SEQ ID NO: 8371 - protein, 224 aa, Helianthus annuus
NIHGRGWRSAITSPDPLAFLGCSATTYPSSLTQQKRWFTGLFEILFTDKNPLLLTIKGNIWFRQALAYFYCCLWAVRSVPELCYASLPAYCIIKDSHFLPKVNERAILIFMGIFVIYTLYAYWECKRIGISLRMWWNLQRMERVNTLTARLFAFVSVMLKLIGLSNTVFEVTQKEHTSNDDDNDNVSVGRFTYDNSPMIMPGVVIWLINIMALVNGMLRLYKVD

SEQ ID NO: 8372 - protein, 170 aa, Zea mays
MDGGGSGNASGGSGGASTCCYYALLGIRKNASATDIRAAYRRLAMKWHPDRWASDPGAAGEANQRFQRIQEAYSVLSDKGKKAMYDAGLFDPLDDDDQDFSDFMQEMLVMMDSVKNEKPDTLEDLQKMLEDIVKGDRGGGGGSGAGGRAPTDGARRTRVAPYPQPQRARR

SEQ ID NO: 8373 - protein, 958 aa, Nakaseomyces delphensis
MTSRKRSPHEFIFKEELGHGSYSSVYKALDKRDLKITYAIKVCSKQHIIKESKVKYVTIEKNTLNLLARGNHPGIVKLYYTFHDEENLYFVLDYAPGGELLTLLHKMGTFNNTWSNHFAAQLVDTLEFMHSQGIIHRDLKPENVLLNKDGILMITDFGAAATPNGMDVKRNGEGNDPNNTCDLRTEEENGCSSFVGTAEYVSPELLLYNKCSFGSDIWALGCMIYQFVKGYPPFRGENELKTFEKIVSLDYTWNPDKSVNTGNVNPQVVSLVRKMLTIDTNQRASIAVIKKDPWFSSVNWNDKKKLWRGIWQVQQHVKPNTSFTSSTIRANMNHQNILQNRQLHVIDTPLRNIPVTKQKRKKPAKDFSTTSSIVEWRKKLGIAPSNISPTNNSSQNMNNMAVDAKSVDNIVTNQSMMPLQNTNIQSIPMTGANGANNVKTMNYVQPLHVQPIPVNMATNIWRADYDNTNGNKNQLNGVNGNATSPDNISVQRQVPTESGAVKNNANKLDPQIVNPSMKQSTTTEEFDFVEKPDSRKKYTAPEVDLNDTQPSDGISKANNVLKGDELNTEPNDTNNIQHEPLRIKPSIGILKQDFVYVKAISYDAAGPDMAITSYKKINDGLITSLVSQHKSDIKQTNIFPQLLTLYKDGSLAYKEIQTSSRKGERSLHPMVNLGDINLSMYDFEFNELSRKGFLILERYKYKLWFISLPSFSILATFPKELTKGLLVNGNENWIDCFFRTRKLIEDGVNITGKLESVNLDENDSSKEISANSTNQDVNGVKVAPTSKQPQIHQNSHIVNPQAGNPKRNIYPITEKTLLSEPVRPKKGTRIRSQPLPALNTHAKIQNVQNLPTPILKRRSVSGASSTTSTPSTPSTPSTPSAPIHRKSLKNVHRPPTNTSTPTSSSYLGGKNRILPDSNMHISSSRYEVIQSIKNNDKLIDKYQASSGASAAFKNLQKR

SEQ ID NO: 8374 - protein, 245 aa, Corynocarpus laevigata
ALSIAGAVQSQKLAVCAISQLQSLPGGDIKLLCDTVVESVRELTGYDRVMVYKFHEDEHGEVVAESKRADLDLYIGLHYPATDIPQASRFLFKQNRVRMIVNCHASSVRVIQDEELRQPLCLVGSTLRAPHGCHAQYMANMGSIASLAMAVVINGTDEEGTGGRNSMRLWGLVACHHTSARCIPFPLRYACEFLMQAFGLQLNMELQLALQLSEKHVLRTQTLLCDMLLRDSPTGIVTQSPSIMD

SEQ ID NO: 8375 - protein, 374 aa, Crossosoma bigelovii
ALSIAGAVQSQKLAVRAISHLQSLPSGDIKLLCDTVVENVRELTGYDRVMVYKFHEDEHGEVVAESKRPDLVPYIGLHYPATDIPQASRFLFRQNRVRMIVDCNATPVKVIQDESLMQPLCLVGSTLRAPHGCHAQYMANMGSNASLAMAVIINGNEEEGVGGRSPMKLWGLVVCHHTSARCIPFPLRYACELLMQALGPQLNMELQLASQSSEKRVLRTQTLLCDMLLRDSPTGIVTQSPSIMDLVKCDGAALYYQGKYYPLGVTPTEPQIKDIVEWLLAFHGDSTGLSTDSLADAGYQGAATLGDAVCGMAVAYITKRDFLFWFRSHTAKEIKWGGAKHHPADKDDGQRMHPRSSFKAFLEVVKSRSLPWEN

SEQ ID NO: 8376 - protein, 335 aa, Microcystis aeruginosa PCC 7806
MPAADYKDYYAVLGVGKTASAEEIKKAFRKLAVKYHPDRNPNNKSAEERFKEISEAYEVLSDSEKRQKYDQFGQYWQQAERSNWPGGNGGVDFGSDGFDFSQYSTFDDFINELLGRMGRSGGTRPSSHSYGTPGRGFGDFSNFNDFAGARTPPQSVTSGVSTAKLRLTFAEALRGVQKRVNLAGEMIDIKIPPGTKTGNRLRVRGKGLIDPLSKQRGDLFLDVELEPHPFFTFEGDNLTCEVPITPDEAVLGTAIEVPTPDGLVTVKVPAGIRSGQSLRLRGKGWIDNKGQRGDQLVKIVIDTPKELTAIERELYEKIKSQRTTDPRRHLRQVQI

SEQ ID NO: 8377 - protein, 245 aa, Eucryphia billardieri
ALSIAGAVQSQKLAVRAISQLQSLPGGHIKLLCDTVVESVRELTGYDRVMVYKFHEDEHGEVVAESKRPDLEPYIGLHYPATDIPQASRFLFKQNRVRMIVDCHATPVRVIQDEGLIQPLCLVGSTLRAPHGCHAQYMANMGSTASLAMAVIINGNDEEAIGGRNSMRLWGLVVCHHTSARSIPFPLRYACEFLMRAFGLQLNMELQLALQLSEKHILRTQTLLCDMLLRDSPTGIVTQSPSIMD

SEQ ID NO: 8378 - protein, 172 aa, Bradyrhizobium yuanmingense
WGFDGSSTQQAEGHSSDCVLKPVAVFPDGARTNGVLVMCEVMMPDGKTPHASNKRATILDDAGAWFGFEQEYFFYKDGRPLGFPTSGYPAPQGPYYTGVGFSNVGDVARKIVEEHLDLCLAAGINHEGINAEVAKGQWEFQIFGKGSKTAADQMWMARYLMLRLTEKYGIDI

SEQ ID NO: 8379 - protein, 295 aa, Zea mays
MATNLKWAPVLALLLVAAMVGSTSAGNIAVYWGQNGNEGTLADTCNSGLYAYVILAFLTTFGNGQTPVLNLAGHCDPGSGGCTGLSSDIQTCQSQGIKVLLSIGGATGSYGLSSTDDANSVADYLWNSYLGGSDGSTRPLGAAVLDGVDFDIENGQSAHYDDLATALKGKGSVLLSAAPQCPYPDASLGAALQTGQFDNVWIQFYNNPGCAYANGDDTNLVNAWSTWTSSVTAGSFYLGLPASTQAAGSGYIEPGTLTGTVLPAIKGVGKYGGIMVWNRFYDVQNNYSAQVKDSV

SEQ ID NO: 8380 - protein, 297 aa, Vitis vinifera
MARTPQSIPLLISLSVLAFLQTSYAGGIAIYWGQNGNEGTLTQTCNTGKYSYVNIAFLNKFGNGRTPAINLAGHCNSASNGCTSVSNGIRNCQNRGTKVMLSIGGGVGNYSLSSSYDAQKVANYLWNNFLGGKSSSRPLGDAVLDGVDFDIELGSTQYWDNLARALSGFSKRGRKVYLTAAPQCPFQDRFLGPALNTGLFDYVWVQFYNNPPCQYTTGNTNKLLNSWNRWTSSINSRIFLGLPASSAAAGSGFIPANVLTSRILPVIKRSAKYGGVMLWSKYYDDQSGYSSSIKSRV

SEQ ID NO: 8381 - protein, 245 aa, Eucryphia billardieri
ALSIAGAVQSQKLAVRAISQLQSLPGGHIKLLCDTVVESVRELTGYDRVMVYKFHEDEHGEVVAESKRPDLEPYIGLHYPATDIPQASRFLFKQNRVRMIVDCHATPVRVIQDEGLIQPLCLVGSTLRAPHGCHAQYMANMGSTASLAMAVIINGNDEEAIGGRNSMRLWGPVVCHHTSARSIPFPLRHACEFLMQAFGLQLNMELQLALQLSEKHILRTQTLLCDMLLRDSPTGIVTQSPSIMD

SEQ ID NO: 8382 - protein, 245 aa, Aleurites moluccana
ALSIAGAVQSQKLAVRAISRLQSLPGGDIKLLCDTVVECVKELTGYDRVMVYKFHEDEHGEVVAESKRPDLEPYIGLHYPSTDIPQASRFLFKQSRVRMIVDCHATAVSVIQDEALMQPLCLVGSTLRAPHGCHAQYMANMGSIASLAMAVIINGNDEEAIGGRNSMRLWGLVVCHHTSARSIPFPLRYACEFLMQAFGLQLNMDLQLASQFSEKHVLRTQTLLCDMLLRDSPTGIVTQSPSIMD

SEQ ID NO: 8383 - protein, 587 aa, Glycine max
  misc_feature (242)..(242): Xaa can be any naturally occurring amino acid
  misc_feature (261)..(261): Xaa can be any naturally occurring amino acid
MAAAAAAKRCHYEVLGLPRDCAPDEIRSAYRRLALQRHPDKLVKSGISQEEATAQFQELQHAYEVLSDPKERAWYDSHRSQILFSDPNTVSNSFVPDLFSFFSNTVYSGYSDTAKGFYKVYSDVFDKIHANEINFARKLGLDSDAVRQAPVMGNLDSPYAQVTAFYSYWLGFCTVMDFCWVDEYDVMAGPNRKSRRLMEEENNKVKEKATREYNYTVRRLGDFVKKRDKRVIDIKVKRSVQXERNKEDERERVEEREHKLXFYCVLCKKKFKSEKQWKNHEQSKKHKERVAEFRDSIGDEEDLEEEEEEEGKEGLESEEDQVGVNDEIDNGIGDLEARIRDGVNVEEGETRNGIELNDGDEFFDASRVKEGEEANVKVNFRYDGNDEDDENGVLEAMVAGHKNRKPRASAHKPKASVAPSPIENENDELGSKEYNNRKGARKKRGAKKEKGRKNWEESQGAASSGDYENINSNGNDNSHAEESCSQHFVENEDNGIENEQVGRDDKISNQPADKKGRDKNISHQPADTKGAGKDTKTKAKVSSKGRKGKVTSKNVGNICEACGEEFDSRNKLHKHLGDSGHATIKGR

SEQ ID NO: 8384 - protein, 172 aa, Bradyrhizobium yuanmingense
WGFDGSSTQQAEGHSSDCVLKPVAVFPDGARTNGVLVMCEVMMPDGKTPHPSNKRATILDDSGAWFGFEQEYFFYKNGRPLGFPESGYPAPQGPYYTGVGYSNVGDVARKIVEEHLDLCLAAGINHEGINAEVAKGQWEFQIFGKGSKTAADQMWMARYLMLRLTEKYGIDI

SEQ ID NO: 8385 - protein, 1168 aa, Arabidopsis thaliana
MVSGVGGSGGGRGGEEEPSSSHTPNNRRGGEQAQSSGTKSLRPRSNTESMSKAIQQYTVDARLHAVFEQSGESGKSFDYSQSLKTTTYGSSVPEQQITAYLSRIQRGGYIQPFGCMIAVDESSFRIIGYSENAREMLGLMPQSVPTLEKPEILAMGTDVRSLFTSSSSILLERAFVAREITLLNPVWIHSKNTGKPFYAILHRIDVGVVIDLEPARTEDPALSIAGAVQSQKLAVRAISQLQALPGGDIKLLCDTVVESVRDLTGYDRVMVYKFHEDEHGEVVAESKRDDLEPYIGLHYPATDIPQASRFLFKQNRVRMIVDCNATPVLVVQDDRLTQSMCLVGSTLRAPHGCHSQYMANMGSIASLAMAVIINGNEDDGSNVASGRSSMRLWGLVVCHHTSSRCIPFPLRYACEFLMQAFGLQLNMELQLALQMSEKRVLRTQTLLCDMLLRDSPAGIVTQSPSIMDLVKCDGAAFLYHGKYYPLGVAPSEVQIKDVVEWLLANHADSTGLSTDSLGDAGYPGAAALGDAVCGMAVAYITKRDFLFWFRSHTAKEIKWGGAKHHPEDKDDGQRMHPRSSFQAFLEVVKSRSQPWETAEMDAIHSLQLILRDSFKESEAAMNSKVVDGVVQPCRDMAGEQGIDELGAVAREMVRLIETATVPIFAVDAGGCINGWNAKIAELTGLSVEEAMGKSLVSDLIYKENKATVNKLLSRALRGDEEKNVEVKLKTFSPELQGKAVFVVVNACSSKDYLNNIVGVCFVGQDVTSQKIVMDKFINIQGDYKAIVHSPNPLIPPIFAADENTCCLEWNMAMEKLTGWSRSEVIGKMIVGEVFGSCCMLKGPDALTKFMIVLHNAIGGQDTDKFPFPFFDRNGKFVQALLTANKRVSLEGKVIGAFCFLQIPSPELQQALAVQRRQDTECFTKAKELAYICQVIKNPLSGMRFANSLLEATDLNEDQKQLLETSVSCEKQISRIVGDMDLESIEDGSFVLKREEFFLGSVINAIVSQAMFLLRDRGLQLIRDIPEEIKSIEVFGDQIRIQQLLAEFLLSIIRYAPSQEWVEIHLSQVSKQMADGFAAIRTEFRMACPGEGLPPELVRDMFHSSRWTSPEGLGLSVCRKILKLMNGEVQYIRESERSYFLIILELPVPRKRPLSTASGSGDMMLMMPY

SEQ ID NO: 8386 - protein, 1168 aa, Arabidopsis thaliana
MVSGVGGSGGGRGGEEEPSSSHTPNNRRGGEQAQSSGTKSLRPRSNTESMSKAIQQYTVDARLHAVFEQSGESGKSFDYSQSLKTTTYGSSVPEQQITAYLSRIQRGGYIQPFGCMIAVDESSFRIIGYSENAREMLGLMPQSVPTLEKPEILAMGTDVRSLFTSSSSILLERAFVAREITLLNPVWIHSKNTGKPFYAILHRIDVGVVIDLEPARTEDPALSIAGAVQSQKLAVRAISQLQSLPGGDIKLLCDTVVESVRDLTGYDRVMVYKFHEDEHGEVVAESKRDDLEPYIGLHYPATDIPQASRFLFKQNRVRMIVDCNATPVLVVQDDRLTQSMCLVGSTLRAPHGCHSQYMANMGSIASLAMAVIINGNEDDGSNVASGRSSMRLWGLVVCHHTSSRCIPFPLRYACEFLMQAFGLQLNMELQLALQMSEKRVLRTQTLLCDMLLRDSPAGIVTQSPSIMDLVKCDGAAFLYHGKYYPLGVAPSEVQIKDVVEWLLANHADSTGLSTDSLGDAGYPGAAALGDAVCGMAVAYITKRDFLFWFRSHTAKEIKWGGAKHHPEDKDDGQRMHPRSSFQAFLEVVKSRSQPWETAEMDAIHSLQLILRDSFKESEADMNSKVVDGVVQPCRDMAGEQGIDELGAVAREMVRLIETATVPIFAVDAGGCINGWNAKIAELTGLSVEEAMGKSLVSDLIYKENEATVNKLLSRALRGDEEKNVEVKLKTFTPELQGTAVFVVVNACSSKDYLNNIVGVCFVGQDVTSQKIVMDKFINIQGDYKAIVHSPNPLIPPIFAADENTCCLEWNMAMEKLTGWSRSEVIGKMIVGEVFGSCCMLKGPDALTKFMIVLHNAIGGQDTDKFPFPFFDRNGKFVQALLTANKRVSLEGKVIGAFCFLQIPSPELQQALAVQRRQDTECFTKAKELAYICQVIKNPLSGMRFANSLLEATDLNEDQKQLLETSVSCEKQISRIVGDMDLESIEDGSFVLKREEFFLGSVINAIVSQAMFLLRDRGLQLIRDIPEEIKSIEVFGDQIRIQQLLAEFLLSIIRYAPSQEWVEIHLSQVSKQMADGFAAIRTEFRMACPGEGLPPELVRDMFHSSRWTSPEGLGLSVCRKILKLMNGEVQYIRESERSYFLIILELPVPRKRPLSTASGSGDMMLMMPY

SEQ ID NO: 8387 - protein, 307 aa, Robiginitalea biformata HTCC2501
MEFIDYYKVLGVDKKASESEIKKAYRKLARKYHPDLNPDDAGSEIKFKQVNEAHEVLSDPEKRKKYDKYGKDWQHAEEFEKARKARGSRSGPQSGEPFGGDPFGGYTYSGGDPNDFSDFFESMFGGFRGEGPSAGRGFRGPDLRAGLELDLRDVYETHQRTLTVGGKNIRITIPAGIEDGQTIRIRGYGGKGRNGGPDGDLYITFALRNSTPFRREGANLYRTVEIPLTTAVLGGTITVDTFDGKAKMNVKPLTRNDTRVKLKGKGFPVYKKEGRFGDLVLTYQVSLPEKLTDRQRQLFEELKKTNL

SEQ ID NO: 8388 - protein, 269 aa, Oryza sativa Japonica Group
MPCGYGVPIISTGGLREACGTGLYSTVIISFLTDFGGGNYKLNLAGHAWSAVGPDVKYCRSKGVLVLLSIGGGVGRYSLASQADAKAVADHLWNFYLGGTSTMSWPFGDAVLDGVDFDIELGSNAHYGDLARYLKAYSGRKPGGRKVWLTAAPQCPFPDRMLGEALRTGLFDRVHVQFYNNPVCNYRASNVAAFTSAWNKWAASLPGSSVYLGLPAVSGAANNGYVAPATLKENVLPIVQKSKNYGGIMLWSRNWDKQTGYSKSVKSAV

SEQ ID NO: 8389 - protein, 186 aa, Glycine max
MRSYGLTVPGSDHRFCVPTVSQVFFRPNRPINRIAFPKATLKNDGFVVDLSFYDLLGIPESGSVTEIKNAYKQLARKYHPDVSPPGRVEEYTKRFIQVQEAYETLSDPSRRAMYDKDMAKGINFAFNARRRYNYHDQVVEQKSEWKARWKSQLSELKRKSNGKDAGGNMSWAARMRQQRDELSNES

SEQ ID NO: 8390 - protein, 284 aa, Arabidopsis thaliana; identical to SEQ ID NO: 7718

SEQ ID NO: 8391 - protein, 203 aa, Oryza sativa
MRHKLHTFFCSMFAEPLFFSLAQSRDSYSDMLEGGNFSNQETLYEVLSVRKDATYDEIRAAYKSAVLNTHPDKAQMALNPLVSSSERNEFLSVQKAWEILRYPKSRAEYDKQLQSSRQNLEIVATEIEIDDMIVESTADSVELLYPCRCGDYFSITSRELGQIGISVREDGEMELHTSDSVPSSVVLGCGSCSLKARLVTNKT

SEQ ID NO: 8392 - protein, 64 aa, Brassica napus
MGVDYYKVLQVDRSASDDDLKKAYRKLAMKWHPDKNPTNKKEAEAKFKQISEAYDVLSDPQKRA

SEQ ID NO: 8393 - protein, 563 aa, Oryza sativa Japonica Group
MAAVAGSASAGANGSAAAHRVGAPTNPMATALLTDQYQFSMAYAYWKAGKHADRAVFDLYFRKNPFGGEFTVFAGLEECIKFIANFKFTEDDILFLQSVMPMCEDAFFDYLRKTDCSDVEVYSIPEGSVVFPKVPLMRVEGPVAVVQLLETPFVNLINYASLVTTNAARHRHVAGKSKVLLEFGLRRAQGPDGAISASKYCFMGGFDATSNVLAGNLFGIPLRGTHSHAYVSSYMSLDEIPDKSLKSKDGSRVCKDFVSLVKEWLQKIQLADSLCGVFGETNQSELAAFASYALAFPTIFLALVDTYDVMRSGIPNFCAVALALHDLGYKASGIRLDSGDLAYLSIEARKVFRTLEKEFNVPAFGKMIITASNDLNEETIDALNKQGHEVDSFGIGTYLVTCYSQAALGCVFKLVEINSRPRIKLSEDVAKVSIPCKKRCFRLYGKEGYPLVDIMMRESEPSPKAGERILCRHPFLESKRAYVVPQHVEELLQCYWPGTSNKPRVELPSLEEIRGRCMQQLEKLRPDHIRRLNPTPYKVSVSAKLYEFIHSLWLNEAPVGELQ

SEQ ID NO: 8394 - protein, 202 aa, Zea mays
  misc_feature (142)..(142): Xaa can be any naturally occurring amino acid
  misc_feature (144)..(145): Xaa can be any naturally occurring amino acid
MAAALYLPANPNPTPNPTSSLRPPLPRPSTSGELHFRPRPVPRRARARTHLPAAFGRRPPAAAAAERGGKDYYATLNVRRDATLKEVKSAYRTLARKYHPDMNKSPGAEEKFKEISAAYEVLSDKEKRSLYDRFGETGLHAXYXXGGDFGAHGVDPYELFNAFFGSSNKFFGDSMGPGRFHYSSNVKDNRALDIRYDLLLPF

SEQ ID NO: 8395 - protein, 378 aa, Alkaliphilus metalliredigens QYMF
MSKRDYYEILGVSKDVDEQELKRAYRKQAMKYHPDRNPDDPEAESKFKEANEAYEILSSPEKKARYDQYGHAGVNGNGGGPQGFGGGGGFEDIFGDIFDMFGGGGGFSSGRRRSGPQRGSDIQYEMSITFEEAAFGAEKTVEFYKQDNCGTCHGSGAKPGTDAKSCSHCNGTGEVRYAQRTPLGQIVNVRPCEHCHGEGKIVEEPCTACSGKGKVKKHKKIKVKVPAGVDTGSAIPLRGEGEPGTKGGPYGDLYVVLRVLPHRLFVRDGYDVICEMPITFVQATLGDELEVPTLEGKVKYKIAEGTQSGTVFRLKNKGIVHPKGYGKGDQYVKVIIEVPKKLSDKQKEMLKQFAAASGEDIHEQRRSFFEKVKDAFSS

SEQ ID NO: 8396 - protein, 233 aa, Zea mays; identical to SEQ ID NO: 7228

SEQ ID NO: 8397 - protein, 49 aa, Macaranga diepenhorstii
KACLYAGINISGTNGEVMPGQWEFQVGPSVGIEAGDHIWCARYILERIT

SEQ ID NO: 8398 - protein, 218 aa, Glycine max
MVKLTMIARVTDGLPLAEGLDDGRDLKDAEFYKLQVKALFKNLSRGHYEASRMSVETGPYVFHYIIEGRVCYLTMCDRAYPKKLAFQYLEELRNEFERVNGSQIETAARPYAFIKFDTFMQKTKKLYQDTHTQRNIAKLNDELYEVHQIMTRNVQEVLGVGEQLDQVSQMSSRLSSESRIYADKARDLNRQALIRKWAPVAIVFGVVFVLFWIKNKLW

SEQ ID NO: 8399 - protein, 172 aa, Saccharomyces cerevisiae
MSLVNSLTHYEILRIPSDATQDEIKKAYRNRLLNTHPDKLSKSIHDTVSNVTINKIQDAYKILSNIKTRREYDRLILENYKRQGFHNCGDGLDEFSLDDFSFDEDKLEFMMNCPRCQFVGGFHFSESLLDECIDNVDAMERSHSGYQLLTQCSACSLWLKVNFDIEEEQEGQ

SEQ ID NO: 8400 - protein, 245 aa, Aleurites moluccana
ALSIAGAVQSQKLAVRAISRLQSLPGGDIKLLCDTVVECVKELTGYDRVMVYKFHEDEHGEVVAESKRPDLEPYIGLHYPSADIPQASRFLFKQSRVRMIVDCHATAVSVIQDEALMQPLCLVGSTLRAPHGCHAQYMANMGSIASLAMAVIINGNDEEAIGGRNSMRLWGLVVCHHTSARSIPFPLRYACEFLMQAFGLQLNMDLQLASQFSEKHVLRTQALLCDMLLRDSPTGIVTQSPSIMD

SEQ ID NO: 8401 - protein, 1130 aa, Solanum tuberosum
MASGSRTKHSHHNSSQAQSSGTSNVNYKDSISKAIAQYTADARLHAVFEQSGESGKFFDYSESVKTTTQSVPERQITAYLTKIQRGGHIQPFGCMIAVDEASFRVIAYSENAFEMLSLTPQSVPSLEKCEILTIGTDVRTLFTPSSSVLLERAFGAREITLLNPIWIHSKNSGKPFYAILHRVDVGIAIDLEPARTEDPALSIAGAVQSQKLAVRAISHLQSLPGGDIKLLCDTVVESVRELTGYDRVMVYKFHEDEHGEVVAESKRSDLEPYIGLHYPATDIPQASRFLFKQNRVRMIVDCHATPVRVTQDESLMQPLCLVGSTLRAPHGCHAQYMANMGSIASLTLAVIINGNDEEAVGGGRNSMRLWGLVVGHHTSVRSIPFPLRYACEFLMQAFGLQLNMELQLASQLSEKHVLRTQTLLCDMLLRDSPPGIVTQSPSIMDLVKCDGAALYYQGKYYPLGVTPTEAQIKDIVEWLLAYHGDSTGLSTDSLADAGYPGAASLGDAVCGMAVAYISSKDFLFWFRSHTAKEIKWGGAKHHPEDKDDGLRMHPRSSFKAFLEVVKSRSSPWENAEMDAIHSLQLILRDSFKDAEASNSKAIVHAHLGEMELQGIDELSSVAREMVRLIETATAPIFAVDVEGRINGWNAKVAELTGLSVEEAMGKSLVHELVYKESQETAEKLLYNALRGEEDKNVEIKLRTFGAEQLEKAVFVVVNACASKDYTNNIVGVCFVGQDVTGEKVVMDKFINIQGDYKAIVHSPNPLIPPIFASDENTCCSEWNTAMEKLTGWSRGEIVGKMLVGEIFGSCCRLKGPDAMTKFMIVLHNAIGGQDTDKFPFSFFDRNGKYVQALLTANKRVNMEGNTIGAFCFIQIASPELQQALRVQRQQEKKCYSQMKELAYICQEIKSPLNGIRFTNSLLEATNLTENQKQYLETSAACERQMSKIIRDVDLENIEDGSLTLEKEDFFLGSVIDAVVSQVMLLLREKGVQLIRDIPEEIKTLTVHGDQVRIQQVLADFLLNMVRYAPSPDGWVEIQLRPSMMPISDGVTGVHIELRIICPGEGLPPELVQDMFHSSRWVTQEGLGLSTCRKMLKLMNGEIQYIRESERCYFLIVLDLPMTRKGPKSVG

SEQ ID NO: 8402 - protein, 245 aa, Goupia glabra
ALSIAGAVQSQKLAVRAISQLQSLPGGDIKVLCDTVVESVRELTGYDRVMVYKFHEDEHGEVVAENKRPDLEPYIGLHYPSTDIPQASRFLFKQNRVRMIVDCHATPVRVIQDKGLMQPLCLVGSTLRAPHGCHAQYMANMGPTASLAMAVIITGNDEEAIGGRNSMRLWGLVVCHHTSARCIPFPLRYACEFLMQAFGLQLNMELQLASQLSEKRVLRTQTLLCGMLLRDSPTGIVTQSPSIMD

SEQ ID NO: 8403 - protein, 172 aa, Bradyrhizobium japonicum
WGFDGSSTQQAEGHSSDCVLKPVAVFPDAARTNGVLVMCEVMMPDGKTPHASNKRATILDDAGAWFGFEQEYFFYKDGRPLGFPSSGYPAPQGPYYTGVGFSNVGDVARKIVEEHLDLCLAAGINHEGINAEVAKGQWEFQIFGKGSKKAADEMWMARYLMLRLTEKYGIDI

SEQ ID NO: 8404 - protein, 245 aa, Goupia glabra
ALSIAGAVQSQKLAVRAISQLQSLPGGDIKVLCDTVVESVRELTGYDRVMVYKFHEDEHGEVVAENKRPDLEPYIGLHYPSTDIPQASRFLFKQNRVRMIVDCHATPVRVIQDKGLMQPLCLVGSTLRAPHGCHAQYMANMGSTASLAMAVIITGNDEEAIGGRNSMRLWGLVVCHHTSARCIPFPLRYACEFLMQAFGLQLNMELQLASQLSEKRVLRTQTLLCDMLLRDSPTGIVTQSPSIMD

SEQ ID NO: 8405 - protein, 375 aa, Kineococcus radiotolerans SRS30216
MSDYYDVLGVSRDASAEDIKRAYRKLARKLHPDVTSDPDAGEKFKEVSQAYETLSTPDKRAAYDRGGSMPGGAAGGFGAGFGFSDIMDAFFGQGGGGRPGAPASRTQRGQDALIRVDVDLAEAAFGGERSIQVDTAVLCTTCQGSCCQPGTSPATCDICHGQGSVQRVVRSLLGQVMTTAPCPTCHGYGTVLPSPCLECNGEGRTRARRPLTIRIPAGVDTGTRIQLASQGEVGTAGGPPGDLYVEIHERPHPVFSRNGDDLLCTLHVPMTAAALGASIPLETLDGSAEEVDVRPGTQGGEVITLKQKGAEHLRAQGRGDLLVTLEVTTPRDLDDEQEELLRRLAELRGEVRPAGKLAPAHQGVFSKLRGKFSGR

SEQ ID NO: 8406 - protein, 358 aa, Cryptococcus neoformans var. neoformans JEC21
MSQLIATKRVDLLAPYLALDQGSRVQAEYIWIDAEGGIRSKTMTLDKAPSSVADLKEWNFDGSSTNQAPADNSDVFLRPVAIFKDPFRGGANILVLCECYDNDGTPNKSNYRAHCKKVMDAAKDTEPWFGLEQEYTLFDADGQVFGWPKNGFPGPQGPYYCGVGAGKVFARDFIEAHYRACLYAGIKISGINAEVMPSQWEFQVGPCTGIEMGDHLWMARFLLLRIGEEWGITPSLHPKPLKGDWNGAGCHSNYSTKDMRTPGKGMAAIEDAIKKLEKKHLEHIAVYGEDNDLRLTGKHETASMTTFSAGVANRGASIRIPRHVGAQGYGYLEDRRPASNVDPYRVTAILVETTVLNN

SEQ ID NO: 8407 - protein, 245 aa, Afrostyrax sp. Cheek 5007
ALSIAGAVQSQKLAVRAISQLRSLPGGDIKLLCDTVVESVRELTGYDRVMVYKFHEDEHGEVVAESKRSDLEPYLGLHYPATDIPQASRFLFKQNRVRMIVDCNAMPVPVSQDEGLMQPLCLVGSTLRAPHDCHAQYMANMGSIASLAMAVIINGNDDEAIGGRNSMRLWGLVVCHHTSARCIPFPLRYACEFLMQAFGLQLNMELQLASQLLEKHVLRTQTLLCDMLLRDSPTGIVTQNPSTMD

SEQ ID NO: 8408 - protein, 245 aa, Afrostyrax sp. Cheek 5007
ALSIAGAVQSQKLAVRAISQLQSLPGGDIKLLCDTVVESVREHTGYDRVMVYKFHEDEHGEVVAESKRSDLEPYLGLHYPATDIPQASRFLFKQNRVRMIVDCNAMPVPVSQDEGLMQPLCLVGSTLRAPHDCHAQYMANMGSIASLAMAVIINGNDDEAIGGRNSMRLWGLVVCHHTSARCIPFPLRYACEFLMQAFGLQLNMESQLATQLVEKHVLRTQTLLCDMLLRDSPTGIVTQNPSTMD

SEQ ID NO: 8409 - protein, 369 aa, Nitrosomonas europaea ATCC 19718
MSQSDYYEVLGVGRDADENELKKAYRKLAMKYHPDRNAGDTKAEERFKNIKEAYEILSDPNKRAAYDQFGHAGLNGGMGGAGAQGFSDAFSDIFSDLFGMRGGGRSSVHRGADLRYNLEITLEQAARGAETQIRIPRQEVCDTCHGSGAKPGTSPKTCPTCNGHGQIRMQQGFFSIQQTCSHCQGSGKVVSDPCGDCHGAGWVKRQKTLSVRIPAGVDEGDSIRLTGEGEAGANGGQAGDLYIVIHLASHPVFQREGNHLHCEIPISFTVAALGGEIEVPTLDGHARIKVPAGTQTGKIFRLRSKGITGVRNQSTGDLLCHVAVETPVDLTARQKELLEEFESISQKDGSRHHPRAKSWMEKAREFFAE

SEQ ID NO: 8410 - protein, 390 aa, Arabidopsis thaliana
MRYAVYSFFRFHFLFLFLCRSVIEVRDGLTFLDLIVIQIENLNNKYNCKVPLVLMNSFNTHDDTQKIVEKYTKSNVDIHTFNQSKYPRVVADEFVPWPSKGKTDKDGWYPPGHGDVFPSLMNSGKLDAFLSQGKEYVFIANSDNLGAIVDLKILKHLIQNKNEYCMEVTPKTLADVKGGTLISYEGKVQLLEIAQVPDEHVNEFKSIEKFKIFNTNNLWVNLKAIKKLVEADALKMEIIPNPKEVDGVKVLQLETAAGAAIRFFDNAIGVNVPRSRFLPVKATSDLLLVQSDLYTLVDGFVTRNKARTNPTNPAIELGPEFKKVASFLSRFKSIPSIVELDSLKVSGDVWFGSGVVLKGKVTVKANAGTKLEIPDNAVLENKDINGPEDL

SEQ ID NO: 8411 - protein, 353 aa, Glomus intraradices
MYNNNKSNTETLAKYLSLDQGGKVQAEYIWIDGDSGLRSKTRTLDFKPADVSEISEWNFDGSSTNQAPGDDSDVLLRPVAIFKDPFRGGDNILVLNECFNNDGTPNRTNHRHSCAKVMKTYTDQHPWFGIEQEYTLFESDGSVLGWPKGGFPGPQGPYYCSVGANVAFGRDVVEAHYRACLYAGVNISGINAEVMPGQWEFQVGPCEGIDMGDHLWIARFLLHRVAEDFGIIVSFHPKPIKGDWNGAGCHTNYSTQAMREEGGIKAIHAAIDKMAARHADHITVYGEDNDQRLTGRHETGHISQFSYGVANRGASIRIPRHVAAEGKGYLEDRRPASNIDPYRVTQIIVESSL

SEQ ID NO: 8412 - protein, 557 aa, Arabidopsis thaliana
MEPKENGSELGQKIIDGPTNPMVTPLLNDLYQFTMAYAYWKAGKHNERSVFDLYFRKNPFGGEYTVFAGLEECVKFLANFKLTDEEIDFVQECLPGSEEAFCDYLRGLDCSDVEVYAIPEGSVVFPKVPLMRVEGPVGVVQLLETPFLNLVNFASLVATNAARHRFVAGKSKSLLEFGARRAQGPDGAISASKYCYLGGFDATSNVAAGKLFGIPLRGTHSHAYVSSFMSTDEIVDKVLRSADGKTTCEDFVSHVQTWLKKIQYSPSLSGIFSETNQSELAAFTSYALAFPKTFLALVDTYDVMKSGIPNFCAVALALNDFGYKALGIRLDSGDLAYLSREARNFFCTVERELKVPGFGKMVVTASNDLNEETIDALNKQGHEVDAFGIGTYLVTCYSQAALGCVFKLVEINNQPRIKLSEDVTKVSIPCKKRSYRLYGKEGYPLVDIMTGENEPPPKVGERLLCRHPFNESKRAYVVPQRVEELLKCYWRGSADEAREVLPPLKEIRDRCIKQLENMRPDHMRRLNPTPYKVSVSAKLYDFIHFLWLNEAPVGELQ

SEQ ID NO: 8413 - protein, 390 aa, Arabidopsis thaliana; identical to SEQ ID NO: 8410

SEQ ID NO: 8414 - protein, 224 aa, Helianthus annuus
NIHGRGWRSAITSPDPLAFLGCSATTYPSSLTQQKRWFTGLFEILFTDKNPLLLTIKGNIWFRQALAYFYCCLWAVRSVPELCYASLPAYCIIKDSHFLPKVNERAILIFMGIFVIYTLYAYWECKRIGISLHMWWNLQRMERVNTLTARLFAFVSVMLKLIGLSNTVFEVTQKEHTSNDDDNDNVSVGRFTYDNSPMIMPGVFILLINIMALVNGMLRLYKVD

SEQ ID NO: 8415 - protein, 158 aa, Nicotiana tabacum
MGVDYYNILKVNRNASEEDLRKAYRRLAMIWHPDKNLGTNKYEAEAKFKQISEAYDVLSDPQKRQIYDLYGEEALKSGQVPPPPRGGPHNMRNPHPNPTFRFNPRDADDIYAELFGSSSSENNGRPRKSRDAFFRSTTNGGAEFSGAGAGTSGTGGRV

SEQ ID NO: 8416 - protein, 53 aa, Macaranga gigantea
DAHYKACLYAGINISGTNGEVMPGQWEFQVGPSVGIEAGDHIWCARYILERIT

SEQ ID NO: 8417 - protein, 224 aa, Helianthus annuus
NIHGRGWRSAITSPDPLAFLGCSATTYPSSLTQQKRWFTGLFEILFTDKNLLLLTIKGNIWFRQALAYFYCCLWAVRSVPELCYASLPAYCIIKDSHFLPKVNERAILIFMGIFVIYTLYAYWECKRIGISLRMWWNLQRMERVNTLTARLFAFVSVMLKLIGLSNTVFEVTQKEHTSNDDDNDNVSVGRFTYDNSPMIMPGVVILLINIMALVNGMLRLYKVD

SEQ ID NO: 8418 - protein, 130 aa, Triticum aestivum
RGKIRFQQIHEAYQVLSDDKRRALYDAGMYDPLDDDQEDVEGFHDFVQEMVSLMATVGREEPVYSLADLQSMLDGMIKDFTAPPQPEPSVFYTGGASGKPSSKEQSTASSRMHPQGFGDAACFSRTAFSR

SEQ ID NO: 8419 - protein, 1123 aa, Solanum lycopersicum
MSSSRPSQSSTTSSRSKHSARIVAQTSIDAKLHADFEESGDSFDYSSSVRVTSVAGDEEKPKSDKVTTAYLHQIQKGKFIQPFGCLLALDEKTLKVIAFSENAPEMLTMVSHAVPSVGEHPVLGIGTDIRTIFTGPSGAALQKALGFGEVSLLNPVLVHCKNSGKPFYAIVHRVTGSLILDFEPVKPYEVPMTAAGALQSYKLAAKAITRLQSLPSGSMERLCDTMVQEVFELTGYDRVMGYKFHEDDHGEVVSEITKPGLEPYLGLHYPATDIPQAARFLFMKNKVRMICDCRAKHVKVVQDEKLPFDLTLCGSTLRAPHYCHLQYMENMNSIASLVMAVVVNDGDEEGESSDSSQSQKRKRLWGLVVCHNTTPRFVPFPLRYACEFLAQVFAIHVNKELELENQFLEKNILRTQTLLCDMLMRDAPLGIVSQSPNIMDLVKCDGAALLYKNKIHRLGMNPSDFQLQDIVSWLCEYHTDSTGLSTDSLYDAGFPGALALGDAVCGMAAVRISDKDWLFWFRSHTAAEVRWGGAKHEPGEKDDGRKMHPRSSFKAFLEVVKTRSIPWKDYEMDAIHSLQLILRNAFKDAEVVNSNTNSIYKKLNDLKIDGMQELESVTAEMVRLIETALVPILAVDVDGQVNGWNTKIAELTGLPVDEAIGKHLLTLVEDSSVDTVNKMLELALQGKEEKNVEFEIKTHGPSRDSSPISLIVNACASKDVRDNVVGVCFMAHDITGQKSIMDKFTRIEGDYRAIIQNPHPLIPPIFGTDQFGWCSEWNTAMTKLTGWRRDDVMDKMLLGEVFGTQAACCRLKNQEAFVNFGVVLNNAITGQESEKIPFGFFARYGKYVECLLCVSKRLDKEGAVTGLFCFLQLASHELQQALYVQRLSEQTALKRLKVLAYIRRQIRNPLSGIIFSRKMLEGTSLGEEQKNILHTSAQCQRQLNKILDDTDLDSIIDGYLDLEMLEFKLHEVLVASISQVMMKSNGKNIMISNDMVEDLLNETLYGDSPRLQQVLANFLLVSVNATPSGGQLSISGRLTKDRIGESVQLALLEFRIRHTGGGVPEELLGQMFGSEADASEEGISLLVSRKLVKLMNGEVQYLREAGQSTFIISVELAVATNSS

SEQ ID NO: 8420 - protein, 224 aa, Helianthus annuus
NIHGRGWRSAITSPDPLAFLGCSATTYPSSLTQQKRWFTGLFEILFTDKNPLLLTIKGNIWFRQALAYFYCCLWAVRSVPELCYASLPAYCIIKDSHFLPKVNERAILIFMGIFVIYTLYAYWECKRIGISLRMWWNLQRMERVNTLTARLFAFVSVMLKLIGLSNTVFEVTQKEHMSNDDDNDNASVGRFTYDNSPMIMPGVIILLINIMALVNGMLRLYKVD

SEQ ID NO: 8421 - protein, 389 aa, Oryza sativa Japonica Group; identical to SEQ ID NO: 8205

SEQ ID NO: 8422 - protein, 921 aa, Oryza sativa; identical to SEQ ID NO: 7592

SEQ ID NO: 8423 - protein, 245 aa, Reinwardtia trigyna
ALSIAGAVQSQKLAIRAISQLQSLPGGDIKLLCNTVVDCVRELTGYDRVMVFKFHEDEHGEVVAENKRADLEPYLGLHYPATDVPQASRFLFKQNRVRMIVDCHASAVRVVQDEGLVQPLCLVGSTLRAPHGCHAQYMANMGSIASLAMAVVITGNDEEGTGGRNSTRLWGLVVCHHTSARCIPFPLRYACEFLMQAFGLQMNVELQLASQLLEKHVMRTQTLLCDMLLRDSPTGIVTQSPSIMD

SEQ ID NO: 8424 - protein, 349 aa, Oryza sativa Japonica Group
MGVDYYKVLGVDRGAGDDDLKKAYHKLAMRWHPDKNPTNNKKEAEAKFKQISEAYEVLSDPQKRTIYDQVGEEGLKGQPPPGAGGPGASPFYPGGAHSNSFHFNPRSADDIFAEFFGFRGPFSSMGGMPSVSGGMRGDPRFPGFGNEYFSSRFGGEGSTSMHQPSHQLAKPPPIENRLPVSLADLYKGVTKKMKISREIIDFNGRVSQQEEILQIEVKPGWKRGTKITFEEKGNQAPNMKPADIVFIIEEKPHDIFTREGNDLVITEKISLVEALTGYTARIITLDARSLSVPINSVIHPDYVEVVPGEGMPNPKGPNKKGDLKIKFNIRFPSRLTSDQKAGFKRLLGS

SEQ ID NO: 8425 - protein, 365 aa, Averrhoa carambola
ALSIAGAVQSQKLAVRAISQLQLLPGGDIKLLCDTVVESVRELTGYDRVMVYKFHEDEHGEVVAESKRPDLEPYIGLHYPATDIPQASRFLFKQNRVRMIVDCNAKPVRVIQDEGLMQPLCLVGSTLRAPHGCHAQYMANMGSIASLAMAVIINGNDEEAIGGRNSMRLWGLVVCHHTSARCIPFPLRYACEFLMQAFGLQLNMELQLASQLSEKHVLRTQTLLCDMLLRDSPTGIVTQSPSIMDLVKCDGAALYYQGKYYRLGVTPTEAQIKDIIEWLLAFHGDSTGLSTDSLADAGYPGATSLGDAVCGMAVAYITKTDYLFWFRSHTAKEIKWGGAKHHPEDKDDGQRMHPRSSFKAFLEVV

SEQ ID NO: 8426 - protein, 365 aa, Averrhoa carambola
ALSIAGAVQSQKLAVRAISQLQLLPGGDIKLLCDTVVESVRELTGYDRVMVYKFHEDEHGEVVAESKRPDLEPYIGLHYPATDIPQASRFLFKQNRVRMIVDCNAKPVRVIQDEGLMQPLCLVGSTLRVPHGCHAQYMANMGSIASLAMAVIINGNDEEAIGGRNSMRLWGLVVCHHTSARCIPFPLRYACEFLMQAFGLQLNMELQLASQLSEKHVLRTQTLLCDMLLRDSPTGIVTQSPSIMALVKCDGAALYYQGKYYRLGVTPTEAQIKDIIEWLLAFHGDSTGLSTDSLADAGYPGATSLGDAVCGMAVAYITKTDYLFWFRSHTAKEIKWGGAKHHPEDKDDGQRMHPRSSFKAFLEVV

SEQ ID NO: 8427 - protein, 296 aa, Legionella pneumophila str. Paris
MDKDYYKIMGVSQDASDKDIKMAYRKLARKYHPDISKEPDAEERFKEMAEAYEVLKDPKKRSEYDQYLKYKEFNPQSDGFTGRRTQEQPFQEFHFDSDFFETLFGHSRYQQQPMTGQNYHGKITISLEEAYHGAVKNLQVPVEQGTETKIQTLKVKIPPGVKSGQQIRLAGQGGSGSGGGARGDLYLTVEVMKHPTFDVMENDIYLTLPITPWEAALGATVVIPTLAGKIDLKIPPGSQGGQKLRIKNRGLPGSPPGNQYVLLKIITPPAQTEEAKALYKKMAEVMPYNPRKTMGV

SEQ ID NO: 8428 - protein, 377 aa, Solibacter usitatus Ellin6076
MSKRDYYEVLGVGKQAADSELKAAYRELAKRFHPDRNPDDPHAEEKFKECSEAYSVLSDAQKRAAYDRFGHAGVQGAGGGPAGFNPEQFADFGDILGDFFGFGDLFGQGGGAGGRRRTRAQRGEDVRYDLEITFEDAMFGMGADIQVPRMERCERCKGGGSEPGSGPTTCPTCHGRGEILYQQSFLSIRRTCSTCNGSGQIIRNPCGECHGHGYKQVQRKLKVNIPAGVDDGNRLRLAGEGQPGVNGGPPGDLYVFLKVKEHPFFERHEADLHCTIPINMAQAALGCEIEIPTLEQPSKLKIPEGTQNGAQFKLRHKGVAVLNSSSRGDLYVHIAVKTPTRISREQRKMLEQLRDTLPVDNRPAEKGLFEKVKDYFM

SEQ ID NO: 8429 - protein, 271 aa, Parkia platycephala
GGIVVYWGQNGGEGTLTSTCESGLYQIVNIAFLSQFGGGRRPQINLAGHCDPANNGCRTVSDGIRACQRRGIKVMLSIGGGAGSYSLSSVQDARSVADYIWNNFLGGRSSSRPLGDAVLDGVDFDIEHGGAYYDALARRLSEHNRGGKKVFLSAAPQCPFPDQSLNKALSTGLFDYVWVQFYNNPQCEFNSGNPSNFRNSWNKWTSSFNAKFYVGLPASPEAAGSGYVPPQQLINQVLPFVKRSPKYGGVMLWDRFNDLKTKYSSKIKPSV

SEQ ID NO: 8430 - protein, 425 aa, Blastocladiella emersonii
MTLIDKLMEKTKKVVGSSDKDAPAPASPSSPSTAAGAGSASSTASSTTTAAASGNLSIPSPLVAGSTTSSSISHAQKMATAAHTNSDYSPSPAATPSAPLDAVAERRRRKTTLADLELRQTLGTGSFGRVHLVRLRSTGKYYAMKVLKKAEVVKHKQVEHTLNEKGILEQIDHPFLVALHSSFQDSANLYMVMEYVTGGELFTYLRRSQRFSNNVAKFYAAEVVLAFEYLHSKDIIYRDLKPENLLLDAQGHVKITDFGFAKHVPDITWTLCGTPDYLAPEIIQSRGYGRAVDWYALGVLIFEMLAGYPPFYDEDHVRMYEKILQGKVKWPSHFDPAAKDLLKRLLTTDLTKRYGNLKGGSKDIKMHKWFAGLDWTKLFNKQIPPPYTPPNRGDGDTSNFDAYPEETEPYGKVQPDPYAQLFKDF

SEQ ID NO: 8431 - protein, 360 aa, Acanthothamnus aphyllus
AVQSQKLAVRAISHLQSLPGGDIKLLCATVVDSVRDLTGYDRVMVYKFHEDEHGEVVAESKRPDLEPYIGLHYPATDIPQASRFLFKQNRVRMIVDCRASPVGVRQDDGLMQPLCLVGSTLRAPHGCHAQYMENMGSKASLAMAVIINGNDEESIGGRNATRLWGLVVCHHTSARCIPFPLRYACEFLMQAFGLQLNMELQLAAQLSEKHVLKTQTLLCDMLLRDSPTSIVTQSPSIMDLVKCDGAALYYQGKYYPLGVTPAEAQIKDIVEWLLAFHGDSTGLSTDSLGDAGYPGAALLGNAVCGMAVAYITNRDFLLWFRSHTTKEIKWGGAKHHPEDKDDGQRMHPRSSFKAFLEVVK

SEQ ID NO: 8432 - protein, 164 aa, Triticum aestivum
VTLQNKFVQKSRLVPVRNSRDIVDPRVRDVAKVSIPCKKRCFRLYGKEGYPLVDIMIRESEPSPKAGERILCRHPFLESKRAYVVPQHVEELLHCYWPGSSDKPRAELPPLLKIRSRCMQQLEKLRPDHIRRLNPTPYKVSVSAKLYEFIHYLWLNEAPVGELQ

SEQ ID NO: 8433 - protein, 373 aa, Pisum sativum
TINRVEDLLNLDITPFTDSIIAEYIWIGGTGIDVRSKSRTISKPVSHPSEVPKWNYDGSSTGQAPGEDSEVILYPQAIFKDPFRGGNNILVVCDAYTPAGEPIPTNKRHRAAEIFSNPKVEAEIPWYGIEQEYTLLQTNVKWPLGWPVGGYPGPQGPYYCAAGADKSFGRDISDAHYKACIYAGINISGTNGEVMPGQWEYQVGPSVGIEAGDHIWASRYILERITEQAGVVLTLDPKPIEGDWNGAGCHTNYSTKSMREDGGFEVIKKAILNLSLRHKIHIEAYGEGNERRLTGKHETASINDFSWGVANRGCSIRVGRDTEKNGKGYLEDRRPASNMDPYVVTALLAESTLLWEPTLEAEALAAQKIALKV

SEQ ID NO: 8434 - protein, 190 aa, Oryza sativa Japonica Group; identical to SEQ ID NO: 7234

SEQ ID NO: 8435 - protein, 383 aa, Lactobacillus sakei subsp. sakei 23K
MAEKRDYYDVLGVGRDASDDEIKKAYRKLSKKYHPDINKAPDAEAKFKEVTEAYEALSDPQKRAAYDQYGHAGMNGGFGGGAGAGQGFGGFGGGAEGFGGFDDIFSSFFGGGARQQPNGPRQGSDLQYRMDLKFEEAVFGKETKISYSREAECHTCHGSGAKPGTSAETCHKCHGAGQIQVERQTPLGRMMSRETCDVCGGTGKEIKSKCDTCHGTGREEERHTVKVKVPAGVEDGQQMRLQGQGEAGSNGGPYGDLFIVFRVAPSDEFERDGAQIFVEVPISFVQAALGDEIEVNTVHGPVKLKIPAGTQTNTVFRLRGKGAPKLHGTGNGDQNVTVNVVTPKTLNSKQRDALKAFAVASGDSVNPQDSNLFDKILNKKYKK

SEQ ID NO: 8436 - protein, 612 aa, Pinus pinaster
FLFMRNRVRMICDCYAQPVAVIQDERLPRDLSFCGSTLRAPHGCHAQYMANMGSIASLVMAVVINEKELDGDSEGQMQQKGRRLWGLVVCHHTSPRYVPFPLRYACEFLMQVFGIQLNKEVELAAQMREKRILRTQTLLCDMLLRDTPLGIVTQKPNIMDLVRCDGAALYYEGNFWLLGATPTEAQIQDIVAWLSEHHMDSTGLSTDSLVYAGYPGAESLGNAVCGIAAVRINSKDFLFWFRSHTAKEIKWGGAKHDLQERDDGKKMHPRSSFNAFLEVVKMRSLSWEDVEMDAIHSLQLILRGSCKETDGSGRNISINRQLNDLKLQEMDELNAVTNEMVRLIETATAPILAVDAYGVVNGWNRKAAELTGLSVEEVLGEPLINLVEETSAENVKRMLHLALQGVEEQNVQIELKRHGSEEDKGPVVLLVNACSSRDLKENVVGVCFVAQDVTGQKTVMDKFTRIQGDYRAIVQNPSPLIPPIFGTDECGWCSEWNSAMEKLSGWKREEIIDKMLLGEVFGTRTACCRLKGQNALTQLRIILNSSMAGQETEKFPFGFFDRHGKYVETLLSANKKLDEEGKITGVFCFLHIASPELQQALYVQHMLEQAAM

SEQ ID NO: 8437 - protein, 206 aa, Glycine max
GPPPYDDLANTEAVEYLNKLAVVKLNGGLGTSMGCVGPKSVIEVRDGMSFLDLSVRQIEYLNRTYDVNVPFVLMNSFNTDTDTASIIKKYEGHNIDILTFNQSRYPRILKDSLLPAPKENKSDIANWYPPGHGDVFESLYNTGMIDKLMDRGIEYIFLSNADNLGAVVDLRILQHMVDSQAEYIMELTDKTKADVKGGTIIDYEGS

SEQ ID NO: 8438 - protein, 294 aa, Rehmannia glutinosa
MAAVRAALLFILPVFSALSSRNASGKISIYWGQNGNEGTLAETCATGNYHYVNIAFLPTFGNGQTPMINLAGHCDPTITNGCTHLSSQIKSCQAKGIKVMLSIGGGAGSYYLSSSQDAKQVATYLFNNFLSGKSSPRPLGDAILDGIDLDIEGGTDLYWDDLARYLSNYGKRGRKVYLTAAPQCPFPDYYIGNALQTGLFDYVWVQFYNNPPCQYSSGMDSFEKAWKDWNSIPAGEIFLGLPASAQAAGTGFVPAGDLTSQVLPAIKGSAKYGGVMLWDKYHDTGYSSSIKKDV

SEQ ID NO: 8439 - protein, 168 aa, Zea mays
MDGGGSGNASGGSGGASTCCYYALLGIRKNASATDIRAAYRRLAMKWHPDRWASDPGAAGEANQRFQRIQEAYSVLSDKGKKAMYDAGLFDPLDDDDQDFSDFMQEMLVMMDSVKNEKPDTLEDLQKMLEDIVKGDGGGGSGAGGRAPTDGARRTRVAPYPQPQRARR

SEQ ID NO: 8440 - protein, 182 aa, Zea mays
  misc_feature (120)..(120): Xaa can be any naturally occurring amino acid
MGRNRKGRKARVSHDADSDADGCEDERATTAGRSLYEILGVEKTASQQEIKKAYHKLALRLHPDKNPGDEEAKEKFQQLQKVISILGDVEKRALYDETGITDDDALVGEAANNLQEYFRXKGNMNRLFCAMICSEPKLDSHRFKDIIDEAIGEGELKSTKVYETWAKKISRMEPPTNPLERR

SEQ ID NO: 8441 - protein, 354 aa, Arabidopsis thaliana
  misc_feature (128)..(128): Xaa can be any naturally occurring amino acid
  misc_feature (135)..(135): Xaa can be any naturally occurring amino acid
  misc_feature (156)..(156): Xaa can be any naturally occurring amino acid
  misc_feature (198)..(198): Xaa can be any naturally occurring amino acid
  misc_feature (214)..(214): Xaa can be any naturally occurring amino acid
  misc_feature (228)..(228): Xaa can be any naturally occurring amino acid
  misc_feature (237)..(237): Xaa can be any naturally occurring amino acid
  misc_feature (244)..(244): Xaa can be any naturally occurring amino acid
  misc_feature (252)..(252): Xaa can be any naturally occurring amino acid
  misc_feature (261)..(261): Xaa can be any naturally occurring amino acid
  misc_feature (267)..(267): Xaa can be any naturally occurring amino acid
  misc_feature (274)..(274): Xaa can be any naturally occurring amino acid
MGVDFYKVLEVDRSANDDELKKAYRKLAMKWHPDKNPNNKKEAEAKFKQISEAYDVLSDPQKRAIYEQYGEEGLNQAPPPGAGGGYPGGSDAGASFRFNPRSADDIFSEFFGFTRPSFWTGSDSRAGXSGFRYGXDDILPFLSGLLLPGGEASIPXLGKSALIGRDIGLGTLGGICNKRGPPRRMSNPPRDVSLTPSXGGPTPRLEEILAPIGXKPRVGKKREPKITXPWKKRLITXPVEAIPXDLGFSTVXEKPHPVFKXRDGNDXVVMQKIXSLVDALTGYTAQVTTLDGRTLTVPVNNVISPSYEEVVKGEGMPIPKDPSRKGNLRIRFIIKFPSKLTTEQKSGIKRMLSP

SEQ ID NO: 8442 - protein, 284 aa, Pericallis appendiculata
PKSQITPYRVVITIRLVILGLFFHYRITNPVESSYGLWLTSVICEIWFAFSWVLDQFPKWYPINRVTFTDELSARYEKEGEPSQLAAVDFLVSTVDPLKEPPLITANTVLSILAVDYPVEKVSCYVSDDGAAMLSFESLVETAEFARKWVPFCKKFSIEPRAPEFYFSQKIDYLKDKVQPSFVKERRSMKRDYEEYKVRVNALVAKAQKTPEEGWTMQDGTPWPGNNPRDHPGMIQVFLGNSGAHDIEGNEIPRLVYVSREKRPGYQHHKKAGAENALVRVSAV

SEQ ID NO: 8443 - protein, 224 aa, Helianthus annuus
NIHGRGWRSAITSTDPLAFLGCSATTYPSSLTQQKRWFTGLFEILFTDKNPLLLTIKGNIWFRQALAYFYCCLWAVRSVPELCYASLPAYCIIKDSHFLPKVNERAILIFMGIFVIYNLYAYWECKRIGISLRMWWNLQRMERVNTMTGRLFAFVSVMLKLIGLSNTVFEVTQKEHVSNDDDNDNVSVGRFTYDNSPMIMPGVVILLINIMALVNGMLRLYKVD

SEQ ID NO: 8444 - protein, 345 aa, Vitis vinifera
MANRRIAILLFLLCGLASAITSIAGKSYYDVLQVPKGASDEQIKRAYRKLALKYHPDKNQGNEEANKKFAEINNAYEVLSDNEKRNIYDRYGEEGLKQHAASGGRGGGGMNIQDIFSSFFGGGPAEEEERIVRGDDVIVELDATLEDLYMGGSLKVWREKNVLKPAPGKRRCNCRNEVYHKQIGPGMFQQMTEQVCEQCPNVKYEREGYFITVDIEKGMQDGQEVVFYDDGEPIVDGEPGDLKFRIRTAPHDQFRREGNDLHTTVTITLVQALVGFEKTIKHLDEHLVNIGSKGITKPKEVRKFKGEGMPLHFSTKKGDLYVTFEVLFPSSLTEEQKTKIQEILG

SEQ ID NO: 8445 - protein, 75 aa, Mycobacterium sp. 'baby formula #683'
MAQREWVEKDFYKELGVSSDASEKEIKSAYRKLASELHPDRNPNNPTAADRFKAVSEAYSVLSDEAKRKEYDETR

SEQ ID NO: 8446 - protein, 675 aa, Coccidioides immitis RS
MTQLFNSSSGSSGVGSEKRPFPGLSLPSRKHSGDPSHFPTRLKNFFRINSSSSSNTPTVSNSGGGSGSGGAHHTSSGHAHLSTKPESKSTFRQSRFLPTIGRNRSTTVASEGNPLDEIASPTADANPYFHHQGYPALRHRNDDSAPSSPPDTPELQVEGVPASDQATAAGKEELARKLRRVASAPNAQGLFSGDGSGDRPKTAELGKEPLVASGGASPKLSFVDQPGSQAASISDERASTLSVPRSFVNCRRTYSSNSIKVRNVEVGPGSFDKIKLIGKGDVGKVYLVREKKSNRLYAMKVLSKKEMIKRNKIKRALAEQEILATSNHPFIVTLYHSFQSEEHLYLCMEYCSGGEFFRALQTRPGKCIPEDDARFYAAEVTAALEYLHLMGFIYRDLKPERHIMLSDFDLSKQSGPGGAPTMIVGRNGTSSSSLPTIDTKSCIANFRTNSFVGTEEYIAPEVIKGDGHTSAVDWWTLGILIYEMLYGITPFKGKNRNATFANILRNDVPFPDHAGAQQISNLCKSLIRKLLIKDETKRLGARAGASDVKTHPFFRTTQWALIRHMKPPMIPHQGRAIDTVNFRNMKESASVDIGGTSKLKGVPMDSGLATPGEQIPDPFEDFNSVTLHHDGDYHGQLADDSFNGYYSRLVCIQPPSIKVLAEISKMQTEPLGMKI

SEQ ID NO: 8447 - protein, 130 aa, Brassica napus
  misc_feature (39)..(39): Xaa can be any naturally occurring amino acid
  misc_feature (68)..(68): Xaa can be any naturally occurring amino acid
  misc_feature (118)..(118): Xaa can be any naturally occurring amino acid
GGTSIHETYYEILSVKEDASYDQIRNSYRFGILQSQPDXLNNSPGWSSNDKFPKIQKGLEVLSGGKLXLVKKTNLRSSKQDGGTTADEISIEDMSVEINGQDMEIFYQCRCGDYFSVXSSELESMGFELL

SEQ ID NO: 8448 - protein, 224 aa, Helianthus annuus
NIHGRGWRSAITSTDPLAFLGCSATTYPSSLTQQKRWFTGLFEILFTDKNPLLLTIKGNIWFRQALAYFYCCLWAVRSVPELCYASLPAYCIIKDSHFLPKVNERAILIFMGIFVIYNLYAYWECKRIGISLRMWWNLQRMERVNTMTGRLFAFVSVMLKLIGLSNTVFEVTQKEHMSNDDDNDNVSVGRFTYDNSPMIMPGVVILLINIMALVNGMLRLYKVD

SEQ ID NO: 8449 - protein, 296 aa, Oryza sativa Japonica Group
MQMLIMVVVALAGLAAGARAGDIAIYWGQNGNEGTLAQTCATGNYRFVIVAFLPVFGKGQTPVLNLAGHCDPASNGCTGVGADIKSCQSLGIKVMFSIGGGVGNYGLSSRDDAKQVAAYLWNNYLGGTSPSRPLGDAVMDGIDFDIESGGGMYWDDLARYLKAYSRQGSSKKPVYLTAAPQCPFPDASLGVALSTGLFDYVWVQFYNNPPCQYSSSNGVGNLASAWKQWTSIPAGRVFLGLPAAAEAAGSGFVETSDLVSKVLPVVKKSPKYGGIMLWSRYYDGLTGYSDKVKSSV

SEQ ID NO: 8450 - protein, 262 aa, Oryza sativa
MSNSCVNALLTDNYQLSMAYAYWKSNRHNDHSTFELFFRKAPFKGEYAIFAGLSEALTFVQNFRFTRDHTQYLSSTHMSDCEDEFFSWLLGLDCSAVTIYAIPEGTVVFPFLPLLRLEGPLAVCQLLETTLLNLLGYATLVCTNACRMVRAAGPGKVLLDFGLRRAQGPDGGLSASRYTYLGGFHGTSNVLAGKMFGIPVKGTHAHSFVASFIDLSQLSRTSITQSSGQEYPKFVDDVLAVRKELDYTHSHEGELAAFISYA

SEQ ID NO: 8451 - protein, 468 aa, Pisum sativum
MEPFTRDHRGSLEVFNPSSSDNINENPNPNSNSNPIPSNSWNTWTGSRAIETPPTRDSIISDEVPAATSWMALKETAPPPKSGESGSAAEQRAAEWGLVLKTDSETGKPQGVGVRGSGGGSGSRRESNNSVRSSGESSDDGREGGRGIPRVSEDLRDALSAFQQTFVVSDATKPDYPIMYASAGFFNMTGYTSKEVIGRNCRSMQGADTDPNDVAKIREAVAAGTSYCGRLLNYKKDGTTFWNLLTIAPIKDEHGKILKLIGMQVEVSKHTEGTKEKMLRPNGLPESLIRYDARQKEKANSSVTELVEAVSKRPRSLSESANRLPFIKKPTNGSNSHATQVHKTPSNSKSSRRKSESTLPSFRRKSHSGGDNFNSMHPITELPETKIISRRRSFMGFMRKSLSNNERFNDEHVIDGDSSEDDDDRFDSFDDKNITQKREKRKGLDLATTLERIEKNFVITDPRLPDNP

SEQ ID NO: 8452 - protein, 374 aa, Wolbachia endosymbiont strain TRS of Brugia malayi
MSKKDYYKLLGVDRNASTDEIKKAYKKLALKYHPDRNPGNKEAEEKFKEITAAYEVLSDSEKRAGYDRYGHEGASGGFDFSQGFGSAGDFSDIFNDFFGGEFGSSSRSKAKRSTTGVPGADLRYDLEITLEDAFKGIQAPIHYVTNVKCDMCQGRGSEGATKPVQCHTCQGSGRIRTQQGFFTIERTCTTCYGEGEIIQNKCKKCNGSGRRRDEVNISVSIPKGIEEGAKVRVSGKGEAGAKGGKSGDLYVYVKITPHKIFTRNKADLHCKVPIRMTLAVLGGEIDVQSIDGAKIKVKVPEGTQTSTKLRCKEKGMPYMNSYARGDLYVQIIVETLNPNNLTKKQIELLKALEEEENASIQQQSEGFFSKVKKK

SEQ ID NO: 8453 - protein, 294 aa, Zea mays
MAANLKWAPVLALLVVVAAMVGTTSAGNIAVYWGQNGNEGSLADACNSGLYAYVNIAFLTTFGNGQTPVLNLAGHCDPGSGSCTGQSSDIQTCQSLGIKVLLSIGGASGSYGLSSTDDANSVADYLWDNFLGGSGSSRPLGAAVLDGIDFDIENGQSAHYDDLANALKGKGSVLLTAAPQCPYPDASLGPALQTGQFDNVWIQFYNNPGCAYANGDDTNLVNAWNTWTSSITAGSFYLGVPASPQAAGSGTSTPALTGTVIPAIRGIGNYGGIMVWDRFNDVQNNYSSQVKGSV

SEQ ID NO: 8454 - protein, 374 aa, Acanthothamnus aphyllus
ALSIAGAVQSQKLAVRAISHLQSLPGGDIKLLCATVVDSVRDLTGYDRVMVYKFHEDEHGEVVAESKRPDLEPYIGLHYPATDIPQASRFLFKQNRVRMIVDCRASPVGVRQDDGLMQPLCLVGSTLRAPHGCHAQYMENMGSKASLAMAVIINGNDEESIGGRNATRLWGLVVCHHTSARCIPFPLRYACEFLMQAFGLQLNMELQLAAQLSEKHVLKTQTLLCDMLLRDSPTSIVTQSPSIMDLVKCDGAALYYQGKYCPLGVTPAEAQIKDIVEWLLAFHGDSTGLSTDSLGDAGYPGAALLGNAVCGMAVAYITNRDFLLWFRSHTTKEIKRGGAKHHPEDKDDGQRMHPRSSFKAFLEVVKSRSLPWEN

SEQ ID NO: 8455 - protein, 364 aa, Brexia madagascariensis
VQSQKLAVRAISRLQSLPGGDIKLLCDTVVESVRDLTGYDRVMVYKFHEDEHGEVVAESQRPDLEPYIGLHYPATDIPQASRFLFKQNRVRIIVDCHASSVRVIQDDGLMQPLCLVGSTLRAPHGCHAQYMENMGSIASLAMAVIINGNDEEVIGGRNPTRLWGLVVCHHTSARCILFPLRYACEFLMQAFGLQLNMELQLAAQLLEKHVLKTQTLLCDMLLRESPTGIVTQSPSIMDLVKCDGAALYYQGNFYPLGVTPTEAQIKDIVEWLLAFHGDSTGLSTDSFADAGYPGAALLGDAVCGMAVAYITNRDFLFWFRSHTAKEIKWGGAKHHPEDKDDGQRMHPRSSFKAFLEVVKRRSLP

SEQ ID NO: 8456 - protein, 293 aa, Oryza sativa
MALRRLAALLSLAVLLSAGLAAVSATSQNTGDTVIIWGRNKDEGSLREACDAGRYTTVIISFLSAFGYIPGTYKLDISGHQVSAVGPDIKYCQSKGKLILLAIGGQGGEYSLPSSQAAVDLHDHLWYSYLGGRRNGVYRPFGDANVNGIDFFIDQGAREHYNELAKMLYDHNKDYRATVGVMVTATTRCGYPDHRLDEALATGLFHRIHVKMFSDGRCPAWSRRQSFEKWAKTYPQSRVLIGVVASPDVDKDAYMPPEALNNLLQFINKQPNFGGVMVWDRFYDKKTGFTAHL

SEQ ID NO: 8457 - protein, 1128 aa, Oryza sativa
MSSSRPTQCSSSSSRTRQSSRARILAQTTLDAELNAEYEEYGDSFDYSKLVEAQRTTGPEQQARSEKVIAYLHHIQRAKLIQPFGCLLALDEKTFNVIALSENAPEMLTTVSHAVPSVDDPPKLRIGTNVWSLFTDPGATALQKALGFADVSLLNPILVQCKTSGKPFYAIVHRATGCLVVDFEPVKPTEFPATAAGALQSYKLAAKAISKIQSLPGGSMEVLCNTVVKELFDLTGYDRVMAYKFHEDDHGEVFAEITKPGLEPYLGLHYPATDIPQAARFLFMKNKVRMICDCRARSIKIIEDESLHLDISLCGSTLRAPHSCHLQYMENMNSIASLVMAVVVNENEDDDEVGADQPAQQQKRKKLWGLLVCHHESPRYVPFPLRYACEFLAQVFAVHVNKEFELERQVREKSILRMQTMLSDMLLRESSPLSIVSGTPNIMDLVKCDGAALLYGGKVWRLQNAPTESQIRDIAFWLSDVHRDSTGLSTDSLHDAGYPGAAALGDMICGMAVAKINSKDILFWFRSHTAAEIRWGGAKHDPSDKDDSRRMHPRLSFKAFLEVVKMKSLPWNDYEMDAIHSLQLILRGTLNDDIKPTRAASLDNQVGDLKLDGLAELQAVTSEMVRLMETATVPILAVDSNGLVNGWNQKVAELTGLRVDEAIGRHILTVVEESSVPVVQRMLYLALQGKEEKEVKFEVKTHGSKRDDGPVILVVNACASRDLHDHVVGVCFVAQDMTVHKLVMDKFTRVEGDYKAIIHNPSPLIPPIFGADEFGWCSEWNAAMTKLTGWHRDEVINKMLLGEVFDSTNASCLVKNKDAFVSLCILINSALAGDETEKAPFSFFDRNGKYIECLLSVNRKVNADGVITGVFCFIQVPSHELQHALHVQQASQQNALTKLKAYSYMRHAINNPLSGMLYSRKALKNTGLNEEQMKEVNVADSCHRQLNKILSDLDQDSVMNKSSCLDLEMVEFVLQDVFVAAVSQVLITCQGKGIRVSCNLPERYMKQTVYGDGVRLQQILSDFLFVSVKFSPVGGSVEISCSLTKNSIGENLHLIDLELRIKHQGKGVPADLLSQMYEDDNKEQSDEGMSLAVSRNLLRLMNGDVRHMREAGMSTFILSVELASAPAK

SEQ ID NO: 8458 - protein, 361 aa, Brexia madagascariensis
QSQKLAVRAISRLQSLPGGDIKLLCDTVVESVRDLTGYDRVMVYKFHEDEHGEVVAESQRPDLEPYIGLHYPATDIPQASRFLFKQNRVRIIVDCHASSVRVIQDDGLMQPLCLVGSTLRAPHGCHAQYMENMGSIASLAMAVIINGNDEEVIGGRNPTRLWGLVVCHHTSARCILFPLRYACEFLMQAFGLQLNMELQLAAQLLEKHVLKTQTLLCDMLLRESPTGIVTQSPSIMDLVKCDGAALYYQGNFYPLGVTPTEAQIKDIVEWLLAFHGDSTGLSTDSFADAGYPGAALLGDAVCGMAVAYITNRDFLFWFRSHTAKEIKWGGAKHHPEDKDDGQRMHPRSSFKAFLEVVKRRS

SEQ ID NO: 8459 - protein, 363 aa, Campylostemon angolense
QSQKLAVRAISQLQSLPGGDIKLLCDTAVESVRNLTGYDRVMVYKFHEDEHGEVVAESRRPDLEPYIGLHYPATDIPQASRFLFKQNRVRIIVDCHASPVSVIQDDGLMQPLCLVGSTLRAPHGCHAQYMENMGSIASLAMAVIINGNDEDGIGGRNPTRLWGLVVCHHTSVRCIPFPLRYACEFLMQAFGLQLNMELQLAAQLLEKHVLKTQTLLCDMLLRESPTGIVTQSPSIMDLVKCDGAALYYQGNYYPSGVTPTEAQIKDIVNWLLAFHGDSTGLSTDSLADAGYPGATLLGDAVCGMAVAYITNRDFLFWFRSHTAKEIKWGGAKHHPEDKDDGQRMHPRSSFKAFLEVVKSRSLP

SEQ ID NO: 8460 - protein, 172 aa, Physcomitrella patens subsp. patens
MAQYGRKQDTEETNCQPPEGPVRCTNNCGFFGSAVTMGMCSKCYRDFVLTQAKTSSAKIAETTPIVSVPKEPVADRALFQSSHFLSAQPEAAGASSGASASGQDPSRPKANRCFSCKKRVGLTGFECRCGNLFCSAHRYSDKHSCTFDYKTAGRDAISKANPVVKADKMNKI

SEQ ID NO: 8461 - protein, 266 aa, Lactuca sativa
PGEDSEVILYPQAIFKDPFRGGNNILVICDTYTPQGVPIPTNKRAKAAEIFSDPKVVAQVPWFGIEQEYTLLQQDVKWPLGWPVGGYPGPQGPYYCGAGADKSFGRDISDAHYKACLYAGINISGTNGEVMPGQWEFQVGPSVGIEAGDHIWCARYLLERITEQAGVVLTLDPKPIEGDWNGAGCHTNYSTLSMREEGGFEVIKEAILNLSLRHADHISAYGEGNERRLTGKHETASINTFSWGVANRGCSIRVGRDTEKAGKGYL

SEQ ID NO: 8462 - protein, 362 aa, Physcomitrella patens subsp. patens
MDCQLCASWFIFEALDVQVLNSKYNSKVSLVLGTSDNTNRAIKQAVKKYSTSNVDIVVFNQTEYPREVWPVTPKIGEDGGYLTNNGDLFAAFSFSGKLDEFLAQRKEYLFIASCDNLGATVDLSILHHLSDSYHMIMQVTPKNDTDAEIGARVSSEGNIELLEFEEAFPSQVSSRRAVKKEDALCWVNLKAVKRLTEIEALDIYCSSKGCEEGEDIKLQLQTAGGAPLYSFFDGSIAVEVSRSRFLPIRATSDLLLFQSDLYTVKEGVVCSNPVRGSDTNPTIKLDGMKLRKMQYFTERTKNRLSLLGLSSLRVIGDVWFGKDVVLQGNVVIWAKKDERIEIPDGKTIKDQVDIFVSNFKDF

SEQ ID NO: 8463 - protein, 361 aa, Campylostemon angolense
QKLAVRAISQLQSLPGGDIKLLCDAAVESVRNLTGYDRVMVYKFHEDEHGEVVAESRRPDLEPYIGLHYPATDIPQASRFLFKQNRVRIIVDCHASPVSVIQDDGLMQPLCLVGSTLRAPHGCHAQYMENMGSIASLAMAVIINGNDEDGIGGRNPTRLWGLVVCHHTSVRCIPFPLRYACEFLMQAFGLQLNMELQLAAQLLEKHVLKTQTLLCDMLLRESPTGIVTQSPSIMDLVKCDGAALYYQGNYYPSGVTPTEAQIKDIVNWLLAFHGDSTGLSTDSLADAGYPGATLLGDAVCGMAVAYITNRDFLFWFRSHTAKEIKWGGAKHHPEDKDDGQRMHPRSSFKAFLEVVKSRSLP

SEQ ID NO: 8464 - protein, 157 aa, Zea mays
MAGRGGGSKSSLYAALGVASDCSDAELRSAYRKLAMKWHPDKCAGAGSSGGGADAAKARFQKIQGAYAVLSDPNKRILYDVGAYDGEGDDDGAGEILGDILEAMSQAGPAADNGKGESLEDLQRQFEELFLRPSPSSFSPNDAAGKSASKSRPAGRK

SEQ ID NO: 8465 - protein, 362 aa, Zea mays
MGLDYYKILGVDKGATDDDLKKAYRKLAMKWHPDKNPNNKKEAENKFKQISEAYEVLSDPQKRAVYDQYGEEGLKGQVPPPGAGGAGPGGATFFSTGGDGPTVFRFNPRNAEDIFAEFFGGSSPFGGMGGGGMGGSGMGGGMPGMRSGGTRFSSSIFGDDIFGSAFGGGPDGHGMHAGGRAVKAPAIERKLPCSLEELYKGTTKKMKISREISDASGKTIPVEEILTIDVKPGWKKGTKITFPEKGNETPNTIPADLVFIIDEKPHPVFTRDGNDLVVTQKIPLAEALTGYTAHVTTLDGRSLTVPISSVIHPGYEEVVRGEGMPIPKDPSRKGNLRIKFDIKFPARLTADQKSGVKRLLGQ

SEQ ID NO: 8466 - protein, 281 aa, Pericallis appendiculata
  misc_feature (281)..(281): Xaa can be any naturally occurring amino acid
PKSQITPYRVVIIIRLVILGLFFHYRITNPVESSYGLWLTSVICEIWFAFSWVLDQFPKWYPINRVTFTDELSARYEKEGEPSQLAAVDFFVSTVDPLKEPPLITANTVLSILAVDYPVEKVSCYVSDDGAAMLSFESLVETAEFARKWVPFCKKFSIEPRAPEFYFSQKIDYLKDKVQPSFVKERRSMKRDYEEYKVRVNALVAKAQKTPEEGWTMQDGTPWPGNNPRDHPGMIQVFLGNSGAHDIEGNEIPRLVYVSREKRPGYQHHKKAGAENALVRX

SEQ ID NO: 8467 - protein, 379 aa, Pseudoalteromonas sp. SM9913
MSKRDYYEVLGVSKDASERDIKKAYKRLAMKYHPDRTAGDKDLETKFKEVKEAYEILTDAQKRQMYDQYGHAAFEQGGGGGHGGFGGGQGDFGDIFGDVFGDIFGGGGGRRQSRQQRGSDLRYNMDLSLEEAVRGKDVEIKVPTWVSCEPCDGSGAKAGSKPKTCTTCHGAGQVQMRQGFFAVQQTCPTCHGQGQIISDPCNKCHGQGRVEKTKTLSVKIPAGVDTGDRIRLSGEGEAGMHGAPAGDLYVQVSVREHKIFVREANNLYCEVPISFTTAGLGGEIEVPTLDGRAKLKIPSETQTGKMFRMRGKGVKSVRSGAQGDLICKVVIETPVNLNERQRDLLKELDESMGKDSSKNRPKEQGFFDGVKKFFDDLTK

SEQ ID NO: 8468 - protein, 401 aa, Kluyveromyces lactis NRRL Y-1140
MNVNSYQPLSQKIPGTNQAKHLTMSLRTLMGECYSRMKLKERMIPESRVVEFSEVESEEECQRQITNNMRFIRLALKEHAIPITVVFNGSITKRKRCEEGSGGKLLRWRYPEFANTKKKCSKVPQLLQLLHILNERIKTKKNTTTVRDIYYGNIELFESQQMVEMLFQRIEAMFNVEKLFFNVVSTQKGLIYSGPRLQIGSQLFHAECQLVPYDQGEMIVQQNQQLKVIVLEKDAIFQQLIQCQEMIKDWIIVTGKGYPDHLSRELLHKLDLSLQGNVQFHIFTDSDPYGIDIVTKYMVKCPRLIHKGVLLNQLITRNTESNSMLVLLPLSLRDATFAMGLIRRLCKEEEEEEGSVRKHTMRQNLKYEVQRQLFFQRKGEMNVVNNGNVQQYFKWMYSRIH

SEQ ID NO: 8469 - protein, 324 aa, Glycine max
MKDIGRTLGKKNWDFSVDPCSGQSNWTSFVQVKGFENAVTCICLANASICHVVSMILKVKHDATDEELKKAYKKLAMKWHPDKNLEDPLRKEEFEAKFKQVSEVYDVLSDPKKRQIYDLYGHYPLNSQRFTKEYGGGNMKDAGVVESSLLCTLEELYNGCKKKLKVSRIVAPDEFGELKSVEEILKIDIKPGWKKGTKITFPGKGNQEPGFAPADLIFVLDESPHAIFKRDGNDLVAIQKILLVDALIGKTLNLATLDGRDLTIQMADIVKPGYELVVPNEGMPISKEPGKKGNLRIMFDVMFPSRLTTQQKYDLKRILSDVDY

SEQ ID NO: 8470 - protein, 279 aa, Pericallis appendiculata
  misc_feature (9)..(11): Xaa can be any naturally occurring amino acid
TPYRVVIIXXXVILGLFFHYRITNPVESSYGLWLTSVICEIWFAFSWVLDQFPKWYPINRVTFTDELSARYEKEGEPSQLAAVDFFVSTVDPLKEPPLITANTVLSILAVDYPVEKVSCYVSDDGAAMLSFESLVETAEFARKWVPFCKKFSIEPRAPEFYFSQKIDYLKDKVQPSFVKERRSMKRDYEEYKVRVNALVAKAQKTPEEGWTMQDGTPWPGNNPRDHPGMIQVFLGNSGAHDIEGNEIPRLVYVSREKRPGYQHHKKAGAENALVRVSAV

SEQ ID NO: 8471 - protein, 279 aa, Pericallis appendiculata
  misc_feature (9)..(9): Xaa can be any naturally occurring amino acid
  misc_feature (11)..(11): Xaa can be any naturally occurring amino acid
TPYRVVIIXRXSILGLFFHYRITNPVESSYGLWLTSVICEIWFAFSWVLDQFPKWYPINRVTFTDELSARYEKEGEPSQLAAVDFFVSTVDPLKEPPLITANTVLSILAVDYPVEKVSCYVSDDGAAMLSFESLVETAEFARKWVPFCKRFSIEPRAPEFYFSQKIDYLKDKVQPSFVKERRSMKRDYEEYKVRVNALVAKAQKTPEEGWTMQDGTPWPGNNPRDHPGMIQVFLGNSGAHDIEGNEIPRLVYVSREKRPGYQHHKKAGAENALVRVSAV

SEQ ID NO: 8472 - protein, 1131 aa, Solanum lycopersicum
MASGSRTKHSYHNSSQGQAQSSGTSNMNYKDSISKAIAQYTADARLHAVFEQSGESGKSFDYSQSVKTTTQSVPERQITAYLTKIQRGGHIQPFGCMIAVDEASFRIIAYSENACEMLSLTPQSVPSLDKSEILTVGTDVRTLFTPSSSVLLERAFGAREITLLNPIWIHSKNSGKPFYAILHRVDVGIVIDLEPARTEDPALSIAGAVQSQKLAVRAISHLQSLPGGDIKLLCDTVVESVRELTGYDRVMVYKFHEDEHGEVVAESKRSDLEPYIGLHYPATDIPQASRFLFKQNRVRMIVDCHATPVRVTQDESLMQPLCLVGSTLRAPHGCHAQYMANMGSIASLTLAVIINGNDEEAVGGGRNSMRLWGLVVGHHTSVRSIPFPLRYACEFLMQAFGLQLNMELQLASQLSEKHVLRTQTLLCDMLLRDSPPGIVTQSPSIMDLVKCDGAALYYQRKYYPLGVTPTEAQIKDIVEWLLAYHGDSTGLSTDSLADAGYPGAASLGDAVCGMAVAYITSKDFLFWFRSHTAKEIKWGGAKHHPEDKDDGQRMHPRSSFKAFLEVVKSRSSPWENAEMDAIHSLQLILRDSFKDAEASNSKAIVHALGEMELQGIDELSSVAREMVRLIETATAPIFGVDVNGRINGWNEKVVELTGLSAEEAKGKSLVHDLLYKESQESAEKLLYNALRGVEGKNVEIKLRTFGAEQVEKAVFLVVNACSSRDYTNSIVGVSFVGQDVTGEKIVMDKFIHIQGDYKAIVHSPNPLIPPIFASDENTSCSEWNTAMEKLSGWSREEIVGKMLVGEIFGSCCRLKGPDAMTKFMIVLHNAIGGQDTDKFPFSFFDRNGKYVQALLTANKRVNMEGDTIGAFCFIQIASPELQQALRVQRQQEKKCYSQMKELAYICQEVKSPLNGIRFTNSLLEATNLTEYQKQYLETSAACERQMSKIIRDVDLENIEDGSLTLEKEDFFLGSVIDAVVSQVMLLLREKGVQLIRDIPEEIKTLTVHGDQVRIQQVLADFLLNMVRYAPSPDGWVEIQLRPSMMPISDGATVVHIELRIICPGEGLPPELVQDMFHSSRWVTQEGLGLSMCRKMLKLMNGEIQYIRESERCYFMIILDLPMTRKGPKSVG

SEQ ID NO: 8473 - protein, 284 aa, Pericallis appendiculata
PKSQITPYRVVIIIRLVILGLFFHYRITNPVESSYGLWLTSVICEIWFAFSWVLDQFPKWYPINRVTFTDELSARYEKEGEPSQLAAVDFFVSTVDPLKEPPLITANTVLPILAVDYPVEKVSCYVSDDGAAMLSFESLVETAEFARKWVPFCKKFSIEPRAPEFYFSQKIDYLKDKVQPSFVKERRSMKRDYEEYKVRVNALVAKAQKTPEEGWTMQDGTPWPGNNPRDHPGMIQVFLGNSGAHDIEGNEIPRLVYVSREKRPGYQHHKKAGAENALVRVSAV

SEQ ID NO: 8474 - protein, 399 aa, Mycobacterium hiberniae
MAHREWVEKDFYKELGVSSDASEKEIKSAYRKLASELHPDRNPNNPAAAERFKAVSEAYSVLSDEAKRKEYDETRRLFAGGGFGRRFNGGGGGFGGGNFDRFSTGADGGEFNLNDLFGAAGQTGGANIGDLFGGLFGRGAQQRPSRPRRGNDLETESELSFLEATKGVEMPLRLTSAAPCTNCHGSGARPGTSPRVCVSCNGSGVISSNQGAFGFSEPCTECRGSGSIIEHPCTECKGTGRAARTRTINVRIPPGVEDGQRIRLAGQGEAGLRGAPSGDLYVTVRVRPDKVFGRDGDDLTVTIPVSFAELALGTTLSVPTLDGKVGVRVPKGTADGRILRVRGRGVPKRGGGHGDLLVTVKVAVPPNLEGSAQAALEAYAAAEQASGFDPRAGWAGNRS

SEQ ID NO: 8475 - protein, 392 aa, Chlamydophila pneumoniae CWL029
MDYYSILGISKTASAEEIKKAYRKLAVKYHPDKNPGDAAAEKRFKEVSEAYEVLSDPQKRDSYDRFGKDGPFAGAGGFGGAGGMGNMEDALRTFMGAFGGEFGGGSFFDGLFGGLGEAFGMRSDPAGARQGASKKVHINLTFEEAAHGVEKELVVSGYKSCETCSGQGAVNPQGIKSCERCKGSGQVVQSRGFFSMASTCPECGGEGRIITDPCSSCRGQGRVKDKRSVHVHIPAGVDSGMRLKMEGYGDAGQNGAPSGDLYVFIDVESHPVFERRGDDLILELPIGFVDAALGMKKEIPTLLKTEGSCRLTVPEGIQSGTILKVRNQGFPNVHGKGRGDLLVRISVETPQNLSEEQKELLRTFASTEKAENFPKKRSFLDKIKGFFSDFTV

SEQ ID NO: 8476 - protein, 1124 aa, Vitis vinifera
MGLGSRGGERRATHRTPTFSSSAASNMNNPNSRNNTIAQYNADARLLAEFEQSGESGKSFNYSRSVMNAPESVPEDQIIAYLSRVQRGGLVQPFGCMLAIEEPTFRIISYSENSMDFLGLNTLSETTQLKSLIGVDVRTLFTPPSSASLAKAAMSREISLLNPIWVHSRSAQKTFYAILHRIDVGIVIDLEPTRSGDSALSLAGAVQSQKLAVRAISRLQSLPGGDIGVLCDTVVEDVQKLTGYDRVMVYKFHDDDHGEVVSEIRRSDLEPYLGLHYPATDIPQAARFLFKQNRVRIICDCNAKAVRVIQSEELKQPLCLVNSTLRSPHGCHLQYMFNMGCIASLAMAVVINGNDATKLWGLVVCHHTSPRYVPFPLRYACEFLMQAFGLQLYMELQLASQLAEKKILRMQTLLCDMLLREAPLGIVTHSPSIMDLLKCDGAALYYGGRCWLLGVTPTESQVKDIAEWLLTEHGDSTGLSTDSLADAGYPGAALLGDAVCGMATARITSKDFLLWFRSHTAKEVKWGGAKHHPEDKDDGGRMHPRSSFKAFLEVVKSRSLPWEVSDINAIHSLQLIMRDSFQDIEDSSGKVMVHTQKYDSEMQGLNELGSVACEMVKLIETATAPIFGVDSSGCINGWNAKIAELTGLQAKEAMGKSLVDEIVHEDLRGAVDNLLCRALQGKEDKNVELKLKNFGLNQQDSALYIVVNACTSRDYTNDIVGVCFVGQDITSEKIVMDKFIRLQGDYKAIVQCLNPLIPPIFASDGNACCSEWNTSLEKLTGCMRHEVIRKMLPGEVFGGLCPLKSQDTLTRFTILLYQAISGQDTEKFPFGFFDKSGKLVEVLLTANKRTDANGNVIGCFCFLQIDTPDKHQGLGHGPEYRECFSKFKELAYIRQEMKNPLNGIRFTHKLLETTATSVYQKQFLETSEACERQMMSIIADIDMGIIEEGSMELNVEEFLLGNVLDAVVSQVMMLLKEKKLQLVCEIPEEIKTLPLSGDQIKLQQVLSDFLHNIVHHAPSSDGWIEIKISTGLKMIQDFNEFVHLQFRMTHIGQGLPPDLIQDMFEGGDQWNTQEGLGLNLSRKLLSAMNGRVQYVREHGKCYFLVDIDLKNRRAREKGKQIQVR

SEQ ID NO: 8477 - protein, 284 aa, Pericallis appendiculata
PKSQITPYRVVIIIRLVILGLFFHYRITSPVESSYGLWLTSVICEIWFAFSWVLDQFPKWYPINRVTFTDELSARYEKEGEPSQLAAVDFFVSTVDPLKEPPLITANTVLSILAVDYPVEKVSCYVSDDGAAMLSFESLVETAEFARKWVPFCKKFSIEPRAPEFYFSQKIDYLKDKVQPSFVKERRSMKRDYEEYKVRVNALVAKAQKTPEEGWTMQDGTPWPGNNPRDHPGMIQVFLGNSGAHDIEGNEIPRLVYVSREKRPGYQHHKKAGAENALVRVSAV

SEQ ID NO: 8478 - protein, 279 aa, Borrelia turicatae 91E135
MSKDYYNILGIHKNATTEEIKKAYKKLAIKYHPDKNKGNKFAEEKFKEINEAYEILSSPQKKANYDNFGSANFNNNFNTEGFSKGFKNTDFHNFESFDLFSDIFGGATRGTLKDTEITIKISLYDAYMGGKKSILINNEKIDINIPKGTIETTKLKFNGKGNINPISGKRSNLIIKFEISSYKNFTLKERNLETKINVYPWEIALGSEKVFETIEGKKIKIKIPKDTKNEEILSLKGLGMPALGNTNKGDLRVKLIVDVPKIINDEVKKIYERLKEIYN

SEQ ID NO: 8479 - protein, 346 aa, Mesorhizobium loti MAFF303099
MTKYKLEYIWLDGYTPVPNLRGKTQIKEFAEFPTLEQLPLWGFDGSSTMQAEGRSSDCVLKPVALYPDPARTNGILVMCEVMMPDGVTPHESNSRATILDDEDAWFGFEQEYFFYKDGRPLGFPESGYPAPQGPYYTGVGYKNVGDVARKIVEEHLDQCLAAGINHEGINAEVAKGQWEFQIFGKGSKKAADQIWMARYLLLRLTETYGIDIEFHCKPLGDTDWNGSGMHCNFSTKFMREVGGKAYFEALMAQFDKNLMDHIAVYGPDNDKRLTGKHETAPWNKFSYGVADRGASIRVPHSFVKNDYKGYLEDRRPNSQGDPYQIASQVLKTISQVATDAKVSAAA

SEQ ID NO: 8480 - protein, 341 aa, Arabidopsis thaliana; identical to SEQ ID NO: 1065

SEQ ID NO: 8481 - protein, 380 aa, Pseudomonas syringae pv. phaseolicola 1448A
MAKRDYYEVLGVERGSSEADLKKAYRRLAMKHHPDRNPDDKASEELFKEANEAYEVLSDASKRAAYDQYGHAGVDPSMGGGGGFGGGAGGANFSDIFGDVFSDFFGGGRGGGGGGRGGAQRGSDLRYTLELNLEEAVRGTNVNIRVPTLVNCKPCDGSGAKKGSSPVTCPTCGGIGQVRMQQGFFSVQQTCPRCHGHGKIISDPCDSCHGEGRVEESKTLSVKVPPGVDTGDRIRLSGEGEAGTQGGPTGDLYVVINVREHAIFQRDGKHLFCEVPISFTDAALGGELEVPTLDGRVKLKIPEGTQTGKQFRLRGKGVAPVRGGGAGDLMCHVAVETPVNLSKRQRELLEEFRTSLENDESHSPKASGWFEGVKRFFGDL

SEQ ID NO: 8482 - protein, 299 aa, Aspergillus nidulans FGSC A4
MSSRDQKVPEIPTEPPDETDLYLILGVKEDATPEQIKSAYRKLALRHHPDKAPADAREEANQQFQKIAFAYAILSDPRKRQRFDSTGSTAEAVELDDDFDWVDYYREQFSTAIDTNALEKFKNEYQGSEEEGKDVLAAFETYGGDMDRVYESVMLCNVLDDDERFRAIIDKAIETGKVKGYKQYTEEPERKRQQRLKRAQKEAKEAEKLAKKLEKEKEVGSAKAGGRKSNKGSAVETNDLAALIQQRQASRAESFFDRLEAKYNPSGKKRVAMDEPPDEAFEATAARRGSKKTKSKTRA

SEQ ID NO: 8483 - protein, 359 aa, Dehalococcoides sp. CBDB1
MVNKRDYYEVLGLERSASDEDIKKAFRKMAMKHHPDRNHEEGAADKFKEVNEAYEVLSNPEKRAAYDRFGFSAGADSFGQGGFENFDFGGLGSIFETFFGGATQGAKRGPRRGPDMSYDIKISLEEAATGVEKDITTERLEYCTECSGTGAKAGTSPVKCTSCNGTGQVYQVQKSVFGRFTSVTPCPKCRGEGTIIGEPCTKCRGTGKEYVKRTVQVKIPAGVADGNQIRLNGYGGVGDKGASAGDVYINVGIAEHADFKRDGDDVIYELEINFAQAALGTEVNVPGLNTEHKLKIPSGSQNGKYFVLKGKGIPHLNRFGSGDEMVHLNVVTPEKLSRKQKQLFEELEKSFAEDKKQAT

SEQ ID NO: 8484 - protein, 1123 aa, Stellaria longipes
MASPAQSQSSTNSGRSKHSARIIAQTIQDAKLHAEFEESSNEFDYSSSVRGSTSGVNQLPQSDKVTSSYLLQIQKGKFIQPFGCLLALDDKTFRVIAFSENAPEMLTMVSHAVPSVGDLPVIGIGTDIRTIFTDPSASALQKALGFTDVSLLNPILVHCKNSGKPFYAIVHRVTRSLVIDFEPVKPYEVPMTAAGALQSYKLAAKAITRLQSLPSGNMDRLVDTMVQEVFELTGYDRVMAYKFHDDDHGEVVSEVTKPNLDSYLGLHYPATDIPQAARFLFMKNKVRLICDCRAKNVRVVQDEKLSVDLTLCGSTLRAPHGCHAQYMENMNSIGSLVMAVVVNDEDDEDGGSAPAQPHKRKRLWGLVVCHHTSPRFVPFPLRYACEFLAQVFAIHVNKELELESQFLEKKILRTQTLLCDMLMRDAPLGIVTQNPNVMDLVKCDGAALLYNNKIWKLGISPTDYQLRDIAGWLSRDHTDSTGLSTDSLHDAGYPGARSLGDTVCGMAAVRITLNNMLFWFRSHTAAEVKWGGAKHETGEKDDGSKMHPRTSFKAFLEVVKRRSVPWKDYEMDAIHSLQLILRNAFKDVEASDLNTSVIHSKISDLQINGLRELEAVTSEMVRLIETATVPILAVDADGLVNGWNTKIFELTGVPVAEAVGKHIASLAEESSIDNVKRMLQLALQGEEKKNVQFEIKRHQSNPDSSPISLVVNACASKDVNGNVVGVCLITQDITGQKTVMDKFTRIEGDYKAIIQSPNPLIPPIFGTDEFGWCSEWNPAMAKLTGWSREEVIDKMLLGEVFGTQKSCCRLKNQEAFVNFGIILNGAMSGQNTDKLPIEFFTRFGKYIECLLCVNKKLDGDGAVTGVFCFLQLASHDLQHALHIQRLAEQAATKRAKALAYMKRQIKNPLSGIMFSGKILDGTEMGEDQRQVLQTSIRCQGQLNKILDDSDLDSIIDGYCELEMVEFTVQDILVASTCQVMAKSNEKGIQIANDSTTEHGLKETLYGDSLRLQQILADFLWISVNFTPAGGNVGIKVRLTKDKIGESIQHANLEFRISHTGGGISEELLSQMFENQGEVSEEGISLLVSRKIVKLMNGDVQYLRSAGSSTFIISVELAIAGNSL

SEQ ID NO: 8485 - protein, 219 aa, Physcomitrella patens subsp. patens
MVKLTLIARVTDGLPLAEGLDDGRDQKDIEFYKQQAKQLCKELSRRQHEASRMSVETGPFFFHYIIEGGVCYLTLCERSYPKKLAYQYLEELQREFEKVNRSQIETVARPYAFIKFDTFIQKTRKLYQDTRTQRNLSKLNDDLYEVTQIMTRNIQEVLGVGDRLDQVSQMSSRLSTESKFYADKAKDLNRQALIRKWAPVGIVLGVVLLLFWFRRLFWS

SEQ ID NO: 8486 - protein, 1122 aa, Stellaria longipes
MASPAQSQSSTNSGRSKHSARIIAQTIQDAKLHAEFEESSNEFDYSSSVRGSTSGVNQLPKSDKVTSSYLLQIQKGKFIQLFGCLLALDDKTFRVIAFSENAPEMLTMVSHAVPSVGDLPVIGIGTNIRTIFTGPSASALQKALGFTDVSLLNPILVHCKNSGKPFYAIVHRVTRSLVIDFEPVKPYEVPMTAAGALQSYKLAAKAITRLQSLPSGNMDRLVDTMVQEVFELTGYDRVMAYKFHDDDHGEVVSEVTKPNLDSYLGLHYPATDIPQAARFLFMKNKVRLICDCRAKNVRVVQDEKLSVDLTLCGSTLRAPHGCHAQYMENMNSIGSLVMAVVVNDEDDEDGGSAPAQPHKRKRLWGLVVCHHTSPRFVPFPLRYACEFLAQVFAIHVNKELELENQFLEKKILRTQTLLCDMLMRDAPLGIVTQNPNVMDLVKCDGAALLYNNKIWKLGITPTDYQLRDIAGWLSRDHTDSTGLSTDSLHDAGYPGARSLGDTVCGMAAVRITPNDMLFWFRSHTAAEVKWGGAKHETGEKDDGSKMHPRTSFKAFLEVVKRRSVPWKDYEMDAIHSLQLILRNAFKDVEASDLNTSVIHSKISDLQINGLRELEAVTSEMVRLIETATVPILAVDADGLVNGWNTKISELTGVPVAEAVGKHIASLAEESSIDNVKRMLQLALQGEEKKNVQFEIKRHQSNPDSGPISLVVNACASKDVNGNVVGVCLIAQDITGQKTVMDKFTRIEGDYKAIIQSPNPLIPPIFGTDEFGWCSEWNPAMAKLTGWSREEVIDKMLLGEVFGTHKSCCRLKNQEAFVNFGIILNGAMSGQNTDKLPIEFFTRFGKYIECLLCVNKKLDGDGAVTGVFCFLQLASHDLQHALHIQRLAEQAATKRAKALAYMKRQIKNPLSGIMFSGKILDGTEMGEDQRQVLQTSIRCQGQLNKILDDSDLDSIIDGYCELEMVEFTVQDILVASISQVMAKSSEKGIQMSNNCTEHGFKETLYGDSLRLQQILADFLSISVNFTSPGGHIGVTVRLTKDKIGESVQLANLEFRIMHTGGGISEELLSEMFESRGNASEDGISLLISRKLVKLMNGDIQYLRSAGTCTFIIYVELAVADNSS

SEQ ID NO: 8487 - protein, 358 aa, Canotia holacantha
ESQKLAVRAISHLQSLPGGDIKLLCATVVESVRDLTGYDRVMVYKFHEDEHGEVVAESKRPDLEPYIGLHYPATDIPQASRFLFKQNRVRMIVDCCASPVGVIQDDGLMQPLCLVGSTLRAPHGCHAQYMENMGSKASLAMAVIINGKDEEIVGGRNATRLWGLVVCHHTSARCIPFPLRYACEFLMQAFGLQLNMELQLAAQLSERHVLKTQTLLCDMLLRDSPTGIVTQSPSIMDLVKCDGAALYYQGKYYPSGVTPSEAQIKDIVEWLLAFHGDSTGLSTDSLADAGYPGAAFLGDAVCGMAVAYITNRDFLFWFRSHTTKEIKWGGAKHHPEDKDDGQRMHPRSSFKAFLEVVK

SEQ ID NO: 8488 - protein, 175 aa, Triticum aestivum
VTLQNKFVQKSRLVPVRNSRDIVDPRVRPRVRVKVLQLETAAGAAIRFFEKAIGINVPRSRFLPVKATSDLLLVQSDLYTLVDGYVIRNPARVKPSNPSIELGPEFKKVANFLARFKSIPSIVELDSLKVSGDVSFGSGVVLKGNVTIAAKAGVKLEIPDGAVLENKDINGPEDL

SEQ ID NO: 8489 - protein, 374 aa, Canotia holacantha
ALSIAGAVESQKLAVRAISHLQSLPGGDIKLLCATVVESVRDLTGYDRVMVYKFHEDEHGEVVAESKRPGLEPYIGLHYPATDIPQASRFLFKQNRVRMIVDCCASPVGVIQDDGLMQPLCLVGSTLRAPHGCHAQYMENMGSKASLAMAVIINGKDEEIVGGRNATRLWGLVICHHTSARCIPFPLRYACEFLMQAFGLQLNMELQLAAQLSEKHVLKTQTLLCDMLLRDSPTGIVTQSPSIMDLVECDGAALYYQGKYYPSGVTPSEAQTKDIVEWLLAFHGDSTGLSTDSLADAGYPGAAFLGDAVCGMAVAYITNRDFLFWFRSHTTKEIKWGGAKHHPEDKDDGQRMHPRSSFKAFLEVVKSRSLSWEN

SEQ ID NO: 8490 - protein, 374 aa, Catha edulis
ASSIAGAVQSQKLAVRAISQLQSLPGGDIKLLCDTVVESVRDLTGYDRVMVYKFHEDEHGEVVAESKRPDLEPYIGLHYPASDIPQASRFLFKQNRVRMIVDCRASPVRVIQDDGLMRPLCLVGSTLRAPHGCHAQYMENMGSLASLAMAVIINGNDEEVTGGRNPTRLWGLVVCHHTSARCIPFPLRYACEFLMQAFGLQLNMELQLAAQSLEKHVLKTQTLLCDRFLRDPPTGIVTQSPSIMDLVKCDGAALYYQGNYYPLGVTPTEVQIKDIVEWLLAFHGDSTGLSTDSLADAGYPGAALLGDAVCGMAVAYITNKDFLFWFRSHTAKEIKWGGAKHHPEDKDDGQRMHPRSSFKAFLEVVKSRSLPWEN

SEQ ID NO: 8491 - protein, 374 aa, Celastrus orbiculatus
ALSIAGAVQSQKLAVRAISRLQSLPGGDIKLLCDTVVESVRDLTSYDRVMVYKFHEDEHGEVVAESKRPDLEPYFGLHYPSTDIPQASRFLFKQNRVRMIADCRASPVGVIQDDGLMQPLCLVGSTLRAPHGCHAQYMENMGSRSSLAMAVIIHGNDEEVIGGRNATRLWGLVVCHHTSVRCIPFLLRYACEFLMQAFGLQLNMELQLAAQLSEKHVLKTQTLLCDMFLRDSPTGIVTQSLSIMDLVKCDGAALYYQGKYYPIGVTPAEAQIKDIVEWLLTFHGDSTGLSTDSLADAGYPGAALLGDAVCGMAVAYITKRDFLFWFRSHTTKEIKWGGAKHHPEDKDDGQRMHPRSSFKAFLEVVKSRSLPWEN

SEQ ID NO: 8492 - protein, 373 aa, Celastrus scandens
ALSIAGAVQSQKLAVRAISRLQSLPGGDIKLLCDTVVESVRDLTSYDRVMVYKFHEDEHGEVVAESKRPDLEPYFGLHYPSTDIPQASRFLFKQNRVRMIADCRASPVGVIQDDGLMQPLCLVGSTLRAPHGCHAQYMENMGSKSSLAMAVIINGTDEEVIGGRNATRLWGLVVCHHTSARCIPFPLRYACEFLMQAFGLQLNMELQLAAQLSEKHVLKTQTLLCDMLLRDSPTGIVTQSPSIMDLVKCDGAALYYQGKYYPIGVTPVEAQIKDIVEWLLTFHGDSTGLSTDSLADAGYPGAALLGDAVCGMAVAYITKKDFLFWFRSHTTKEIKWGGAKHHPEDKDDGQRMHPRSSFKAFLEVVKSRSLPCE

SEQ ID NO: 8493 - protein, 96 aa, Cronartium ribicola
DWNGAGAHTNYSTEATRAPGGIKAIHEYIEKLGKRHNEHIAVYGEDNDMRLTGRHETGHIGSFSSGVAHRGASIRIPRHVEATGQGYLEDRRPASN

SEQ ID NO: 8494 - protein, 281 aa, Pericallis appendiculata
QITPYRVVIIIRLVILGLFFHYRITNPVESSYGLWLTSVICEIRFAFSWVLDQFPKWYPINRVTFTDELSARYEKEGEPSQLAAVDFFVSTVDPLKEPPLITANTVLSILAVDYPVEKVSCYVSDDGAAMLSFESLVETAEFARKWVPFCKKFSIEPRAPEFYFSQKIDYLKDKVQPSFVKERRSMKRDYEEYKVRVNALVAKAQKTPEGGWTMQDGTPWPGNNPRDHPGMIQVFLGNSGAHDIEGNEIPRLVYVSREKRPGYQHHKKAGAENALVRVSAV

SEQ ID NO: 8495 - protein, 440 aa, Magnaporthe grisea 70-15
MAIKDIPKLNRNSIRTLRHDPLSEISGALGDLGTLLPLMIALALQSSISLSTTLVFSGIFNVLTGIVFGIPLPVQPMKAIAAAAIAEHTSLRQTVAAGGLVSAAVLILSATGLLRRATRLIPVPVAKGIQFGAGLSLVISAGSSLLQPLHWLHPILDNRLWAFGALVGLVVTHRFRRVPYALIVFILGTAFAAVAVATSGRNLRLPGVAPWVPFLVLPAWTSPVAISMAVAQLPLTTLNSVIAVSALSADLLPNLPTPTVTEMGLSVASMNLIGCWFGAMPVCHGAGGLAAQHRFGARSGASIIILGIFKILLGLILGETLLDLLDRFPHALLGIMVLASGLELAGVGQSLNHGAADLWESSMEGNAPEALSTRIHRSLSEEERAERWSVMLITTAGILAFKNDAVGFAAGMLSHWTYRAAQHWGRGTGERQPLISRPFH

SEQ ID NO: 8496 - protein, 465 aa, Propionibacterium acnes KPA171202
MSEEGLAAARQKMTEAGVDPVAIEVFTSYYHQLETGDTGLIREDTISPLTNPPMLDDVEVSEEQAAEALDKTVIIKLNGGLGTSMGLDRAKSLLEVRDGKSFLDIIATQVLSARKTFGARLPLMFMNSFNTREDTLKALEKYPELAVDGLELDFLQDQEPKLDAETLAPVEWPKDSSLEWCPPGHGDLYTALLGSGVLDHLLEAGYQYASVSNGDNLGAVPDGRLAGWFAASGAPYAAELCRRTINDKKGGHLAIRKSDDQLILRDTAQTAEEEMDYFTDEHRHPFFHTNNLWFDLEALKKVLDERHGVMGLQIIRNEKTVDPKDSSSTPVIQIESAMGGAIEVFEGATCICVDRSRFLPVKTTNELLLLRSDVYDLDDSDHLVKTTDMTCAVDLDKDFYKKISDFDDRIPEPPSLRRATSLKVKGDWTFGSEVVVAGDVSLDTEKPQTIPDGTVLTGEVLGAKK

SEQ ID NO: 8497 - protein, 467 aa, Oryza sativa
MADEKLAKLREAVAGLSQISDNEKSGFISLVARYLSGEEEHVEWAKIHTPTDEVVVPYDTLAAPPEDLEETKKLLNKLAVLKLNGGLGTTMGCTGPKSVIEVRNGFTFLDLIVIQIESLNKKYGSNVPLLLMNSFNTHEDTLKIVEKYTNSNIEVHTFNQSQYPRVVADEFLPWPSKGKTCKDGWYPPGHGDIFPSLMNSGKLDLLLSQGKEYVFIANSDNLGAIVDMKILNHLIHKQNEYCMEVTPKTLADVKGGTLISYEDKVQLLEIAQVPDAHVNEFKSIEKFKIFNTNNLWVNLKAIKRLVEADALKMEIIPNPKEVDGVKVLQLETAAGAAIRFFDHAIGINVPRSRFLPVKATSDLQLVQSDLYTLVDGFVTRNPARTNPSNPSIELGPEFKKVGCFLGRFKSIPSIVELDTLKVSGDVWFGSSITLKGKVTITAQPGVKLEIPDGAVIENKDINGPEDL

SEQ ID NO: 8498 - protein, 226 aa, Helianthus annuus
NIHGRGWRSAITSPDPLAFLGCSATTYPSSLTQQKRWFTGLFEILFTDKNPLLLTIKGNIWFRQALAYFYCCLWAVRSVPELCYASLPAYCIIKDSHFLPKVNERAILIFMGIFVIYTLYAYWECKRIGISLRMWWNLQRMERVNTLTARLFAFVSVMLKLIGLSNTVFEVTQKEHTSNDDDDDNDNVSVGRFTYDNSPMIMPGVVILLINIMALVNGMLRLYKVD

SEQ ID NO: 8499 - protein, 352 aa, Frankia alni
MSYQAEYIWIDGTEPEPLMRSKTRIIKDGKEPEIWGFDGSSTNQAPGSNSDCVLRPVFETPDPIRGGDNRLVLCEVQLTDFTPPTNTRAAALGVAERYADMSPMFGIEQEYTFFKDGRPYGWPEVGYPAPQGPYYCGVGGSKMPGRQIVERHTQACLDAGLAIEGTNAEVMMGQWEFQIGVLPAPAIGDQIWLGRWLLHRIAEDYGVEVSFAAKPIPGDWNGAGAHTNFSTKQTMEGWDAIVTCCEALGTRVTEHVTHYGKGIEDRLTGKHETAPWNKYSWGASDRGASVRIPWAVEKAKKGWLEDRRPNANMDPYLVTALMIDTCCSALAGDKPTLFVPSQTTPAPAEASV

SEQ ID NO: 8500 - protein, 333 aa, Glycine max
MASERQALMLILLTTFFFTIKPSQASTTGGITIYWGQNIDDGTLTSTCDTGNFEIVNLAFLNAFGCGITPSWNFAGHCGDWNPCSILEPQIQYCQQKGVKVFLSLGGAKGTYSLCSPEDAKEVANYLYQNFLSGKPGPLGSVTLEGIDFDIELGSNLYWGDLAKELDALRHQNDHYFYLSAAPQCFMPDYHLDNAIKTGLFDHVNVQFYNNPPCQYSPGNTQLLFNSWDDWTSNVLPNNSVFFGLPASPDAAPSGGYIPPQVLISEVLPYVKQASNYGGVMLWDRYHDVLNYHSDQIKDYVPKYAMRFVTAVSDAIYESVSARTHRILQKKPY

SEQ ID NO: 8501 - protein, 623 aa, Candida glabrata CBS 138
MKTCYYDLLEVRSDASDLDLKKAYRRKALQYHPDKNPDNVEEATTIFAEIRAAYEVLSDPQERAWYDSHKEQILSDTPLNPNDEDDDYVVDSTVTGVTTEELMMFFNSSLYTSIDNSPAGFYQIAGKVFAKIAKDEVSWGLRLGLDGYKNYKDMEFEEHINSRGYILACDSSKANLSNLLFPIFGYSSTSYEELKLFYTKWSSFNTLKSFTWKDEYMYSRNYDRRTKREINKRNEKARAKAKEEYIKTVKRYVNFIKKLDQRMKEGAKKAAEKRLADERLRKENEMKLRKERLNNEQGAQFHLQSWQTIDQENWKELEKQYEKEFEKRNVDKDDELIGHEFTKNQFQTNNNSQHEDVDEIIIYDCFICKKSFKSEKQLENHIKTKLHKRNLDRVQKEMKKDSMALGLDELSDYNDFDSAESETEKLYSGMDLNDIDAELKKIEEQLAQSSVTDSEDFTDDNNDTEDQNSLVDKLSNTNYDIEIDDEINDDTNEEVQISGADNSETQNAEQDHDSNGDSEEEKEDELTRILRELEESKTSRSNFSDSDEEWSNKKKTKAKKKKNKANTPDKQPVTANKNDAKEVCGECRAEFESRNQLFSHIQTEGHVSPLSKVKKGKRSKKNK

SEQ ID NO: 8502 - protein, 38 aa, Macaranga lamellata
GTNGEVMPGQWEFQVGPSVGIEAGDHIWCARYLLERIT

SEQ ID NO: 8503 - protein, 224 aa, Helianthus annuus
NIHGRGWRSAITSTDPLAFLGCSATTYPSSLTQQKRWFTGLFEILFTDKNPLLLTIKGKIWFRQALAYFYCCLWAVRSVPELCYASLPVYCIIKDSHFLPKVNERAILIFMGIFVIYNLYAYWECKRIGISLRMWWNLQRMERVNTMTGRLFAFVSVMLKLIGLSNTVFEVTQKEHMSNDDDNDNVSVGRFTYDNSPMIMPGVVILLINIMALVNGMLRLYKVD

SEQ ID NO: 8504 - protein, 167 aa, Oryza sativa
MASSAGDPLLSGEAGDGRRRFVPSTIRLKTSVWSELGGAVGDLGTYIPIVLALSLASHLDLGTTLIFTALYNFATGLLFGIPMPVQPMKSIAAVALSSAHLTIPQIMSAGLVLALAALLFIILATGSGDDEDVNRDGTARRRRTGAEAKLLCSCVFFCSSFVFMLCS

SEQ ID NO: 8505 - protein, 224 aa, Helianthus annuus
NIHGRGWRSAITSPDPLAFLGCSATTYPSSLTQQKRWFTGLFEILFTDKNPLLLTIKGNIWFRQALAYFYCCLWAVRSVPELCYASLPAYCIFKDSHFLPKVNERAILIFMGIFVIYTLYAYWECKRIGISLRMWWNLQRMERVNTLTARLFSFVSVMLKLIGLSNTVFEVTQKEHTSNDDDNDNVSVGRFTYDNSPMIMPGVVILLINIMALVNGMLRLYKVD

SEQ ID NO: 8506 - protein, 76 aa, Olea europaea
EKRGGLKRPREVTRCSGSGCRKKIGLIGFRCRCGEMFCSEHRYSDRHDCNYDYKAAGREAIARENPVVKAAKILKV

SEQ ID NO: 8507 - protein, 375 aa, Oceanobacillus iheyensis HTE831
MGKRDYYEILGIDKSASQDEIKKNYRKLARKYHPDVNKEADAAEKFKEVKEAYEVLSDDQKRAQYDQFGHSGPQSQGFGGFGGGAQDFGGFGDIFDMFFGGGGRSRDPNAPQQGNDLQYTMILDFEEAVFGKETDIEIPKEESCDTCNGSGAKPGTKPETCSHCHGSGQLNQEQNTPFGRVVNRRVCNYCQGTGKIIPDKCNTCGGSGTVQKNKKIHISIPAGIDEGQQIRVAGKGESGKNGGPAGDLFVVIKVRPHDFFVREGDHIFCELPLTYAQAALGDELEVPTVHGKVKVKVPAGTQTGKTFRIKGKGAPNVRGRGHGDQHIKIKVMTPTNLSEKQKDLLREFNELGGNESTDEQDDNIFQRFRRAFKGE

SEQ ID NO: 8508 - protein, 421 aa, Arabidopsis halleri
MNHKNVLLIKLISAILITFFAFRLFILHSSEFSPIFASVTGKFEARFLPPEVIVPENEDLIPQDIEVEKCDLFSGKWIPDSVGPIYTNNSCGSLIDGHQNCITNGRPDLDFLYWKWKPHDCLLPRFDPRRFLQLMRNKSWALIGDSISRNHVESLLCMLSMVEEPVEVYHDKEYKSKRWHFPLHNLTISNIWSPFLVQAAIFEDSNGVSTASVQLHLDKLDETWTDLMPSLDYAIISTGKWFLKSAIYHENGKPVGCHNCQEKPRIEELGFDYAYNATLRNVMDFLAAEDNSKGTVFFRTSTPDHFQNGEWHSGGTCKQTEPVSDEEIEIKDVHKILKDIEIGQFKRAVREKTGQDGGNLKLLDFTGMLLTRPDGHPGAYRQFRPFDKDKNAKVQNDCLHWCLPGPFDYLNDVILETIVNG

SEQ ID NO: 8509 - protein, 364 aa, Celastrus scandens
VQSQKLAVRAISRLQSLPGGDIKLLCDTVVESVRDLTSYDRVMVYKFHEDEHGEVVAESKRPDLEPYFGLHYPSTDIPQASRFLFKQNRVRMIADCRASPVGVIQDDGLMQPLCLVGSTLRAPHGCHAQYMENMGSKSSLAMAVIINGTDEEVIGGRNATRLWGLVVCHHTSARCIPFPLRYACEFLMQAFGLQLNMELQLAAQLSEKHVLKTQTLLCDMLLRDSPTGIVTQSPSIMDLVKCDGAALYYQGKYYPIGVTPVEAQIKDIVEWLLTFHGDSTGLSTDSLADAGYPGAALLGDAVCGMAVAYITKKDFLFWFRSHTTKEIKWGGAKHHPEDKDDGQRMHPRSSFKAFLEVVKSRSLP

SEQ ID NO: 8510 - protein, 435 aa, Physcomitrella patens subsp. patens
MAADYYSVLGVPKGATKQEIKSAYRKLARKYHPDVNKQPGAEDKFKEISSAYEILSDDQKRSMYDQFGEAGVKSGAAGGAGAYGATNPFDLFESFFGSSMGGMGGMGGMGGMGGMGGTRRPTVVQGDDVRYDMALEFTDAIFGTEKEFEAAHLETCTACTGSGARAGTSRKTCPTCGGMGQVMRTQDTPFGTFSQVSTCTTCGGEGEVISDYCRKCGGEGRIRVKKNIKVKIPAGVNNGSTLRVRGEGDVGPRGGPPGDLYVFLNVKELAGVQRDGINLYSTVPISFTDAILGTVTQVKTVEGVKDLQIPSGTQPGDVLVMSKLGAPKLNKPNVRGDHYFTVKITIPTRLSGIERQLVEDLARLQKSKGRGGSVKMGSSNGSRPQRSQDGRTAVLEKEKIEVDESEEAEGVIETIKNAVGSAASGAINWLKDRLG

SEQ ID NO: 8511 - protein, 373 aa, Neisseria gonorrhoeae FA 1090
MSNQDFYATLGVARAATDDEIKKAYRKLAMKYHPDRNPDNKEAEEKFKEVQKAYETLSDKEKRAMYDQYGHAAFEGGGQGGFGGFGGFGGAQGFDFGDIFSQMFGGGSGRAQPDYQGEDVQVGIEITLEEAAKGVKKRINIPTYEACDVCNGSGAKPGASPETCPTCKGSGTVHIQQAIFRMQQTCPTCRGAGKHIKEPCVKCRGVGRNKAVKTVEVNIPAGIDDGQRIRLSGEGGPGMHGAPAGDLYVTVRIRAHKIFQRDGLDLHCELPISFAMAALGGELEVPTLDGKVKLTVPKETQTGRRMRVKGKGVKSLRSSATGDLYCHIVVETPVNLTDRQKELLEEFERISTGLENQTPRKKSFLDKLRDLFD

SEQ ID NO: 8512 - protein, 516 aa, Physcomitrella patens subsp. patens
MLHVGAISELQHNEALPVRVRVTKQLCDTRKILMRDLAYIRKSAVPAVESPASTEVDQLTRIRLELATLDQISDNEKQGFLKLIGRYLGGKSEAIQWEKIKPPTDEVVVPYDKMSEFSDDPVKIKSLLDKLAVLKLNGGLGTTMGCTGPKSVIEVRNGLTFLDLIVKQIESLNQTYDSNVPLVLMNSFNTHDDTLKIVERYKDSKLEVITFNQSQYPRVVAADMIPWPAKGKTDNAGWYPPGHGDVFPSLDNSGKLDELLAQGKEYVFIANSDNLGAIVDLKILNHLVENQNEYCMEVTPKTLADVKGGTLISYEGRVQLLEIAQVPDEHVNEFKSIDKFKIFNTNNMWVNLKAIKRLVEADALQMEIIPNPKEVDGVKVLQLETAAGAAIRFFDRAIGVNVPRSRFLPVKATSDLLLVQSDLYTVQDGAVVRNPARTNPENPSIDLSSEFKKVGDFLKRFKSIPSILELESLKVSGNVWFGKDIVLKGKVVVEAAKGEKVEVPDEAVLDNTVVKN

SEQ ID NO: 8513 - protein, 370 aa, Celastrus scandens
ALSIAGAVQSQKLAVRAISRLQSLPGGDIKLLCDTVVESVRDLTSYDRVMVYKFHEDEHGEVVAESKRPDLEPYFGLHYPSTDIPQASRFLFKQNRVRMIADCRASPVGVIQDDGLMQPLCLVGSTLRAPHGCHAQYMENMGSKSSLAMAVIINGTDEEVIGGRNATRLWGLVVCHHTSARCIPFPLRYACEFLMQAFGLQLNMELQLAAQLSEKHVLKTQTLLCDMLLRDSPTGIVTQSPSIMDLVKCDGAALYYQGKYYPIGVTPVEAQIKDIVEWLLTFHGDSTGLSTDSLADAGYPGAALLGDAVCGMAVAYITKKDFLFWFRSHTTKEIKWGGAKHHPEDKDDGQRMHPRSSFKAFLEVVKSRSL

SEQ ID NO: 8514 - protein, 374 aa, Crossopetalum rhacoma
ALSIAGAVQSQKLAVRAISQLQSLPGGDIKLLCDTVVESVRHLTGYDRVMVYKFHEDEHGEVVAERKRPDLEPYIGPHYPATDIPQASRFLFKQNRVRTIVDCHASPVRVIQDDGLMQPLCLVGSTLRAPHGCHAQYMENMGSIASLAMAVIINGNDEEVIGGRNTTRLWGLVVCHHTSARCIPFPLRYACEFLMQAFGLQLNMELQLAAQLSEKHVWKTRTLLCDMLLRDSPTGIVTQSPSIMDLVKCDGAALYYQGNYYPLGVTPTEAQITDIVGWLLDFHGDSTGLSTDSLADAGYPGAALLGDAVCGMAVAYITNRDFLFWFRSHTAKEIKWGGAKHHPEDRDDGQRMHPRSSFQAFLEVVKSRSLPWEN

SEQ ID NO: 8515 - protein, 391 aa, Rhodopirellula baltica SH 1
MATKTCYYEVLKVERTATKQQVDRAYRKLAIKYHPDSNRDDGSATAKFKEATEAYEVLSDANKRARYDQYGHAGVEGATQQYGDVEDIFEAFGDLFGGGFGDFFGGGSRRGGGRRRVRRGADVRCDVTLTLEEAARGCHKDIVFRRRVSCDTCDGSGAAAGSEPVTCTMCGGQGQVIQSAGILRVQTTCPTCKGAGKQIGEPCGKCRGTGTQNEKAEMNVEIPAGVDDGMRVRLQGEGEPSPDGGPNGDCYCFISVKEHNLFKREGQHLILQMPISYAQAALGATINVPTLDGPHELTVPAGTQTGHVFTVRGQGIVDPRSGRTGDLLVQIFIEVPKKLSDKQQKLLRELAELDHDSVLPERTSFLDKLRHFFDPEPEEAGTGSTDTEKDS

SEQ ID NO: 8516 - protein, 374 aa, Crossopetalum rhacoma
ALSIAGAVQSQKLAVRAISQLQSLPGGDIKLLCDTVVESVRHLTGYDRVMVYKFHEDEHGEVVAERKRPDLEPYIGPHYPATDIPQASRFLFKQNRVRTIVDCHASPVRVIQDDGLMQPLCLVGSTLRAPHGCHAQYMENMGSIASLAMAVIINGNDEEVIGGRNTTRLWGLVVCHHTSARCIPFPLRYACEFLMQAFGLQLDMELQWRAQLSKKHVWKTRTLLCDMVLRDSPTGIVTQSPSIMDLVKCDGAALYYQGNYYPLGVTPTEAQITDIVGWLLDFHGDSTGLSTDSLADAGYPGAALLGDAVCGMAVAYITNRDFLFWFRSHTAKEIKWGGAKHHPEDRDDGQRMHPRSSFQAFLEVVKSRSLPWEN

SEQ ID NO: 8517 - protein, 374 aa, Cuervea integrifolia
ALSIAGAVQSQKLAVRAISQLQSLPGGDIKLLCDTAVESVRNLTGYDRVMVYKFHEDEHGEVVAESRRPDLEPYIGLHYPATDIPQASRFLFKQNRVRIIVDCHASPVSVIQDDGLMQPLCLVGSTLRAPHGCHAQYMENMGSIASLAMAVIINGNDEDGIGGRNPTRLWGLVVCHHTSARCIPFPLRYACEFLMQAFGLQLNMELQLAAQLLEKHVLKTQTLLCDMLLRESPTGIVTQSPSIMDLVKCDGAALYYQANYYPLGVTPTEAQIRDIVEWLLAFHGDSTGLSTDSLADAGYPGATLLGDAVCGMAVAYITNRDFLFWFRSHTAKEIKWGGAKHHPEDKDDGQRMHPRSSFKAFLEVVKSRSLPWEN

SEQ ID NO: 8518 - protein, 240 aa, Neisseria meningitidis MC58
MDKDLYAVLGVSPQAGADEIKRAYRKLAMKYHPDRNPGNPKAEEKFKEIQRAYDTLSDLSKRMQYDASFRRHEERGRQEEAFRREQARREQFYREQMRREQAFRQAFERQASRSCHTYEPSGGGSGRNYVLAAYILFGLGAIMLFMPIVGVIFAYMPIVGVILAYMKRNSLDSIVYAAHTEYLIKTFWRTFWLYILGALTALLGIGVLIIIATNVWYFYRIIAGFIRFNGGRAVAPEKWI

SEQ ID NO: 8519 - protein, 168 aa, Zea mays
  misc_feature (72)..(72): Xaa can be any naturally occurring amino acid
MFFDHAIGINVPRSRFLPVKATSDLQLVQSDLYTLVDGFVTRNSARTNPSNPSIELGPEFKKVGSFLGRFKXIPSIVELDSLKVSGDVWGKVTITAKPGVKLEIPDGAVMEPNTNNSEGSLAGDAVWDVFRRQDLPKLNEYLAVHQEECAARCQAVSSVMTHFFPMSN

SEQ ID NO: 8520 - protein, 434 aa, Hordeum vulgare
MQVRRDDDGAGGCAGDAVPGGGEGQDGVPARQPAGRVWGVSRAARATSGFKVLALGPETTGVIQRMQQLLDMDTTPFTDKIIAEYIWVGGSGIDLRSKSRTISKPVEDPSELPKWNYDGSSTGQAPGEDSEVILYPQAIFKDPFRGGNNILVICDTYTPQGEPIPTNKRHMAAQIFSDPKVTSQVPWFGIEQEYTLMQRDVNWPLGWPVGGYPGPQGPYYCAVGSDKSFGRDISDAHYKACLYAGIEISGTNGEVMPGQWEYQVGPSVGIDAGDHIWASRYILERITEQAGVVLTLDPKPIQGDWNGAGCHTNYSTLSMREDGGFDVIKKAILNLSLRHDLHIAAYGEGNERRLTGLHETASISDFSWGVANRGCSIRVGRDTEAKGKGYLEDRRPASNMDPYTVTALLAETTILWEPTLEAEALAAKKLALKV

SEQ ID NO: 8521 - protein, 681 aa, Magnaporthe grisea 70-15
MKFFGKKSLKKNQRQDSGEDTDDFSHSEPSSPIKSPSYKSSSPTKSSPTKSPVKHLHSHNPSKIDQENLPSLSRESKHPRLSRSFGRDQGSSSRRKKIDPDTHPLNLPPEERKRLSELSAMSNRGESMDIDREPPNGTPASPKAQSPTPQPSSDETGPADATGGSARPMNTDSDVPVPPPHKSPPGPTPAEEAEGFKAAGNKLFKDKEYLRAIGEYTKAVNLVPNSAIYRSNRAAAFMSAGKFEEAFEDCKRSLELDPDNSKTLLRLARIHTGLGKPDEALATFGRIRPPPSTKDMALAKEMLQHVEAAQSALKSGHASFVLRALDLAEKNLPYGALRPRKWQLMRGEALLKMADINSIGDAQNIAMSLLRINNQDPEALGLRGRSLYAQGENDKAIQHFRKAVSLDPDFKDAVKWLRVVQKLDRMKEEGNVEYKAGKWQAAIEKYSAALQVDPDNKGTNSKILQNRALAYNKLKQYDQAIIDCEKALSLDPSYTKARKTKATALGLAEKWEDAVREWKSLAESEQGDRAILKELRHAELELKKSKRKDYYKILGITKDADDKEIKKAYRKLAVIHHPDKNPGDEAAEARFKDIGEAYETLSDPQKRERYDSGIDLEDPSDMFGGGGHGMHGGIDPEILFSMMGGQGGFGGGGGFGGGGGFHSFGGGGSRQRGYPGGFQFS

SEQ ID NO: 8522 - protein, 324 aa, Canavalia ensiformis
MGCERKALILMVVIWIMSFWTLSLADISSTEIAVYWGQREDGLLRDTCKTNNYKIVFISFLDKFGCEIRKPELELEGVCGPSVGNPCSFLESQIKECQRMGVKVFLALGGPKGTYSACSADYAKDLAEYLHTYFLSERREGPLGKVALDGIHFDIQKPVDELNWDNLLEELYQIKDVYQSTFLLSAAPGCLSPDEYLDNAIQTRHFDYIFVRFYNDRSCQYSTGNIQRIRNAWLSWTKSVYPRDKNLFLELPASQATAPGGGYIPPSALIGQVLPYLPDLQTRYAGIALWNRQADKETGYSTNIIRYLNATAMPFTSNLLKYPS

SEQ ID NO: 8523 - protein, 233 aa, Glycine max
NSARAVLVFVLGVVLTFIRRPRVMHEIKFGPSSIEVVKMSRHAWKQGFIKGTIPQLPLSILNSVIAVCKLSSDLFPGKDFSVTSLSVTVGLMNLVGGWFGAMPCCHGAGGLAGQYKFGGRSGGCVALLGAAKLILGFVLGSSLAHFFNQFPVGILGVLLLFAGVELAMASRDINTKEDSFVMLLCTAVSLVGSSAALGFLCGMIVFVLLKLRDWTNGKPINAIWKHEGPEEQV

SEQ ID NO: 8524 - protein, 174 aa, Glycine max
MDHDKTGCQAPPEGPILCINNCGFFGSAATMNMCSKCHKDILLKQEQAKLAASSIGNIMNGSSSSTEKEPVVAAAANIDIPVIPVEPKTVSVQPLFGSGPEGSVEAKPKDGPKRCSSCNKRVGLTGFNCRCGDLFCAVHRYSDKHNCPFDYRTAAQDAIAKANPVVKAEKLDKI

SEQ ID NO: 8525 - protein, 430 aa, Pisum sativum
MAQILAPSTQWQMRITKTSPCATPITSKMWSSLVMKQTKKVAHSAKFRVMAVNSENGTINRVEDLLNLDITPFTDSIIAEYIWIGGTGIDVRSKSRTISKPVSHPSEVPKWNYDGSSTGQAPGEDSEVILYPQAIFKDPFRGGNNILVVCDAYTPAGEPIPTNKRHRAAEIFSNPKVEAEIPWYGIEQEYTLLQTNVKWPLGWPVGGYPGPQGPYYCAAGADKSFGRDISDAHYKACIYAGINISGTNGEVMPGQWEYQVGPSVGIEAGDHIWASRYILERITEQAGVVLTLDPKPIEGDWNGAGCHTNYSTKSMREDGGFEVIKKAILNLSLRHKIHIEAYGEGNERRLTGKHETASINDFSWGVANRGCSIRVGRDTEKNGKGYLEDRRPASNMDPYVVTALLAESTLLWEPTLEAEALAAQKIALKV

SEQ ID NO: 8526 - protein, 340 aa, Streptomyces hygroscopicus
MSIKAEYIWIDGTQPTAKLRSKTKILSDGSRLPRWGFDGSSTNQAEGHASDLVLEPVFSCPDPIRGGDHLLVLCEVLHTDLTPHPSNTRALLRPVAERFAGQEPIFGIEQEYTFLKGDRPLGFPEGGGYPAPQADYYCGVGADAIFGREIVEKHLDLCLAAGLGLSGINAEVMPGQWEFQVGALPPLEVSDHMWVARWLLHRVAEEFGVTASLDAKPAKGDWNGAGAHTNFSTRAMREGYDPIITACEALGQDDKPLEHVRQYGTGIEDRLTGAHETAPWDAYSYGASDRGASVRIPWQVEVEKKGYIEDRRPNANVDPYVVTRLMVDTCCTELARREQI

SEQ ID NO: 8527 - protein, 214 aa, Arabidopsis thaliana; identical to SEQ ID NO: 7311

SEQ ID NO: 8528 - protein, 102 aa, Triticum aestivum
  misc_feature (29)..(29): Xaa can be any naturally occurring amino acid
  misc_feature (80)..(80): Xaa can be any naturally occurring amino acid
LARLIPWTPTGGAGSGNASGACAGTPFCXYYALVGMRKNASSTDIRAAYRRIGMKWYPDRWASDPCATREAKRLLQPSQXRYFVLSYMGKRSIYDAGFFDTL

SEQ ID NO: 8529 - protein, 373 aa, Haemophilus somnus 2336
MAKRDYYEILGVQKGADDKEIKRAYKRLAMKYHPDRTKGDKESEEKFKEINEAYEVLADKEKRAMYDQYGHAAFEQGGGAGGFGGFSGADFGDIFGDMFGDIFGGGRSRQRVVRGEDLRYDIEISLEEAVKSCKKDIQINTLVHCGTCHGSGAEAGSKIESCPTCHGAGRVRRQQSFFVTEQTCPHCHGTGKKIEKPCHTCHGEGRVHKTQNLTVTIPMGVDTGNQLRLAGKGAAGENGAPAGDLYVVIHVKKHHIFERDGNNLYCEVPISFTMAALGGEVEIPTLDGRLKVKIPAETQTGKLLRLRGKGITSRGYAGDLICEIVIETPIKLNEEQKELLRKLEESLEGKTLQRPKSSGFLDGVKKFFDNLGK

SEQ ID NO: 8530 - protein, 343 aa, Streptomyces viridochromogenes
MTFKAEYIWIDGTEPTAKLRSKTKIITGQPAGLDALPIWGFDGSSTNQAEGHSSDCVLKPVFTCPDPIRGGDDILVLCEVLNIDLTPHASNTRAALAEVAERFAAQEPIFGIEQEYTFFQDGYPLGFPKGGFPAPQGGYYCGVGADEIFGRDVVEAHLDNCLKAGLAISGINAEVMPGQWEFQVGPVSPLEVSDHLWVARWLLYRTAEDFDVAATLDPKPVKGDWNGAGAHTNFSTKAMRESYDAIITAAESLGEGSKPLDHVKNYGAGIDDRLTGLHETAPWNEYSYGVSDRGASVRIPWQVEKDGKGYIEDRRPNANVDPYVVTRLLVDTCCSALEKAGQV

SEQ ID NO: 8531 - protein, 1123 aa, Physcomitrella patens subsp. patens
MSTPKKTYSSTSSAKSKAHSVRVAQTTADAALQAVFEKSGDSGDSFDYSKSVSKSTAESLPSGAVTAYLQRMQRGGLTQSFGCMIAVEGTGFRVIAYSENAPEILDLVPQAVPSVGEMDTLRIGTDVRTLFTASSVASLEKAAEAQEMSLLNPITVNCRRSGKQLYAIAHRIDIGIVIDFEAVKTDDHLVSAAGALQSHKLAAKAITRLQALPGGDIGLLCDTVVEEVRELTGYDRVMAYRFHEDEHGEVVAEIRRADLEPYLGLHYPGTDIPQASRFLFMKNKVRIIADCSAPPVKVIQDPTLRQPVSLAGSTLRSPHGCHAQYMGNMGSIASLVMAVIINDNEEDSHGSVQRGRKLWGLVVCHHTSPRTVPFPLRSACGFLMQVFGLQLNMEVELAAQLREKHILRTQTLLCDMLLRDAPIGIVSQIPNIMDLVKCDGAALYYGKRFWLLGTTPTESQIKDIAEWLLEYHKDSTGLSTDSLADANYPAAHLLGDAVCGMAAAKITAKDFLFWFRSHTAKEIKWGGAKHDPGEKDDGRKMHPRSSFKAFLEVVKRRSLPWEDVEMDAIHSLQLILRGSFQDIDDSDTKTMIHARLNDLKLHDMDELSVVANEMVRLIETATAPILAVDSNGMINGWNAKIAQVTGLPVSEAMGRSLVKDLVTDESVAVVERLLYLALRGEEEQNVEIKLKTFGTQTEKGVVILIVNACSSRDVSENVVGVCFVGQDVTGQKMFMDKFTRIQGDYKTIVQNPHPLIPPIFGADEFGYCFEWNPAMEGLTGWKKDEVVGKLLVGEIFGMQMMCCRMKSQDAMTKFMIALNTAMDGQSTDKFTFSFFDREGKYVDVLLSTNKRTNADGVITGVFCFLQIASSELQQALKVQRATEKVAVAKLKELAYIRQEIKNPLCGITFTRQLLEDTDLSDDQQQFLDTSAVCEQQLQKVLNDMDLESIEDGYLELDTAEFEMGTVMNAVISQGMTTSREKGLQIFRETPREINTMRLLGDQIRLQQVLSDFLLNTVRFTPSPEGWVKIKVVPTRKRLGGSVHVVHLEFRVSHPGAGLPEELVLEMYDRGKGMTQEGLGLNMCRKLVRLMNGDVHYVREAMQCYFVVNVELPMAQRDDASSQM

SEQ ID NO: 8532 - protein, 315 aa, Lupinus angustifolius
MSLLSDLINLNLSDTTEKIIAEYIWVGGSGVDLRSKARTLSGPVNDPSKLPKWNYDGSSTGQAPGKDSEVILWPQAIFKDPFRRGNNILVICDTYTPSGKPIPTNKRHAAAKIFSHPDVAAEEPWFGIEQEYTLLQKDIHWPIGMALGGFPGPQGPYYCGTGAEKAFGRDIVDSHYKACLYAGINISGINAEVMPGQWEFQVGPSIGISAGDELWVARYILERITEIAGVVLSLDPKPIPGDWNGAGAHTNYSTKSMRNDGGYEVIKQAIEKLEKRHNEHIAAYGEGNERRLTGRHETADISTFSWGVANRGASI

SEQ ID NO: 8533 - protein, 52 aa, Macaranga oblongifolia
AHYKACLYAGINFSGTNGEVMPGQWEFQVGPSVGIEAADHIWCARYILERIT

SEQ ID NO: 8534 - protein, 800 aa, Microcoleus chthonoplastes PCC 7420
MTTSISLLENSSVFLGNIRSRLKERTLLFRYLAEINLIFGAWYLHWRITHSINTNALWLSIPLLLAEIYCYVGGVMFLLGLWRPIVHKVRSLWQLSPPFPPAEFPTVDVFITCYNEPPELVENTTRAALALNYPLTKLSVYVLDDGNSPDLRAMTEKLGLEDLQSPMLQQEAERLDTERSELENRRQQLKNLALEISQAEQFLESFQLTVTTDFNALSQVLSWFEQLRQPRIPNSVWLECQTVLAEGFDNAISHAHKNLPPEMPITLEVSIFTQSIEMRIWDQGTAFDLEGHVLNNPNPVEETAERGRGVNIMYQVADYLSYTHTLDNRNCLLMIKSYSPLSEVEQDCPSYTVTSHLKSLRNWLRVLHPTSPNLSSNLASEIRIVEKAIYQKELELSNLVRCRYIARPKPKGKPHHAKAGNINYAMFSGETSGDFILTLDADHIPKPQFLQRVLPYFYTYNLNTGKYESNQIAFVQTPQAFYNIPPGDPFGHQAHLFYGLIQQAKDGMNSAFYTGTNAVLRREALISVGLQNFADEFAVDQKRLAEFDLVGGVSSNSITEDMNTAMRLHAAGWKSAYHDEELATGLAPDDLSSTLKQKLRWAQGTLQVLLRENPFSKPGLTFWQQLHYFQTMYSYFSGFATVVFLICPIIYFFTGIIPVQAYGDEFAIHFIPAFVLNRLTFIAASWGIPARELWRSEQYAIALFPLFIQAVWSVFTGRPIKFQVTPKQRQSGMYLRLVLPQLTIVIFTILGILWCLYRLAMGELKNPGLYLINGLWAVYSLSLLWVIIRAAVWQPKASRN

SEQ ID NO: 8535 - protein, 179 aa, Vitis vinifera
MVKLTIVGRVSDGLPLAQGLRYQNDEENENFLCYKQQAEFILKEISRGALSPSKMTIHIDHYHCFNYLVENGHCFITLCDSSYPRKLAFHYLQDLQKEFEKFDIGLMEKITKPYSFVRFDGIIGNIRKQYIDTRTQANLSKLNANRGQDLDIIAKHMSEIIQKGPKSGEFHLQYWVCFC

SEQ ID NO: 8536 - protein, 224 aa, Helianthus petiolaris
NIHGRGWRSAITSPDPLAFLGCSATTYPSSLTQQKRWFTGVFEILFTDKNPLLLTIEGKIWFRQALAYFYICLWAVRSVPELCYASLPAYCIIKDSHFLPKVNERASLIFMGIFVIYNLYAYWECKRIGVSLRMWWNLQRMERVNTLTARLFAFVSVMLKLIGLSNTVFEVTQKEHMSNDDDNDNVSVGRFTYDNSPMIMPGVVILLINIVALVNGMLRLYKVD

SEQ ID NO: 8537 - protein, 349 aa, Arabidopsis thaliana
MGVDYYNVLKVNRNANEDDLKKSYRRMAMKWHPDKNPTSKKEAEAKFKQISEAYDVLSDPQRRQIYDQYGEEGLKSTDLPTAAETAAHQQQRSYSSSNSEFRYYPRDAEDIFAEFFGESGDAFGGGSSGRTRGDGGDGGGRRFKSAEAGSQANRKTPPTNKKTTPPANRKAPAIESKLACTLEELYKGAKKKMRISRVVPDDFGKPKTVQEILKIDIKPGWKKGTKITFPEKGNQEPGVTPADLIFVVDEKPHSVFKRDGNDLILEKKVSLIDALTGLTISVTTLDGRSLTIPVLDIVKPGQEIVIPNEGMPTKDPLKRGDLRVTFEILFPSRLTSEQKNDLKRVLGGS
